United States Patent Application Publication US 2005/0228172 A9 - sequence listing, part 199

SEQ ID NO: 900708 - DNA, 673 bp, Homo sapiens
agatgccaatgcaattgcaaaaaagtaaaattgacaaatgggatctaattaaactaaagagcttctgcacagcaatacaaatgatcattggagtgaacagacaacctacggaaagggagaaaatctttgcaagctatgcatccaacaaaggtcttatgtccagcatctatatggaagttatatttacaagaaaaatacaaacaaatccataaaaagtgggcaaaggacatgaataggcacttttcaaaagaagacacacatgtggccaataatcatataaaaatactcaatatcactaatcattagagaaatgcaaaagaaaacaaaaatgagatatcatcttacagcagtcagaatggctattattaaaaagtcaataaataacagatgctggtgaggttgtggagaaaaaggaatgcttacacactgttagtgggagtgtaaattagttcaaccattgtggaagacagtgtggtgattcctcaaagacctaaaggcagagataccattcgacctagcaatcccattactgggtgtatacccraaggatgtaaatcattctgttataaagacacatgcatgcatatgctcattgcagcactatgcacaatagcaaagacatggagtcaacctaaatgtccatcaatgatagactggctaaagaaaatgtggt

SEQ ID NO: 900709 - DNA, 673 bp, Homo sapiens
agatgccaatgcaattgcaaaaaagtaaaattgacaaatgggatctaattaaactaaagagcttctgcacagcaatacaaatgatcattggagtgaacagacaacctacggaaagggagaaaatctttgcaagctatgcatccaacaaaggtcttatgtccagcatctatatggaagttatatttacaagaaaaatacaaacaaatccataaaaagtgggcaaaggacatgaataggcacttttcaaaagaagacacacatgtggccaataatcatataaaaatactcaatatcactaatcattagagaaatgcaaaagaaaacaaaaatgagatatcatcttacagcagtcagaatggctattattaaaaagtcaataaataacagatgctggtgaggttgtggagaaaaaggaatgcttacacactgttagtgggagtgtaaattagttcaaccattgtggaagacagtgtggtgattcctcaaagacctaaaggcagagataccattcgacctagcaatcccattactgggtgtatacccgaaggatgtaaatcattctgttataaagacacatgcatgcatatgctcattgcagcactatgcacaatagcaaagacatggagtcaacctaaatgtccatcartgatagactggctaaagaaaatgtggt

SEQ ID NO: 900710 - DNA, 673 bp, Homo sapiens
caaatagtattgtatatattcaaagtatacaatgcaatgctttgatatacacacacacacacacacacatatatatatatagtatattgaataycacaatcaaattaattaacacatccatcaccacccatactggacattatatccctagaactaattcattgtataagtaaaatgttgtgcctttgatcaacatctctccattccccctacccctcagcccctggaagctattgttctacttctgcttctataagtttaacttttttagataccacaaataagtgagaccatgttatatttgtatttctgtgtctgtcatatttcactaggtgtaacgtcctctagtttcacctatgttgtcacagataaccagatttcttttatggctgaataatattccattgtatctccctttctctctctctctcctctctctcctctctctctctctttttctctctctgtgtgtgtgtgtgtgtgtgcgtgcatacatacatatagattgcattttctttcttcactcatccactgatggccactttgcttgttttcatattttgattattgtgaacaatgctacaatgaacatgagggtgcagactccttgtattagttcattttcatgctgcttataaagacatacctgagactgggcaatgtacaaaagaaa

SEQ ID NO: 900711 - DNA, 677 bp, Homo sapiens
gcgacgtgtaagaaacagtcaaacaggtttgcaatgtaatatgttgtttatatcaccaaatgtaagctcctcaaaagcatggaccttgtccagtttgttcactgctgaatttcaagttctgtcagagtcccttttacatatcaaagctaacttgttaaaccagtaaaaaaaatgaataagtgccacgttattttgtcttactttgtgtatgccaaacaatttagggcagccttctcaatctaagatgaaccacttttagagaataatgtgtcctcagaggaagtttactttatatttaatggtacgtttgtttgaaaagcgcgcgtgtgtgtgtgtgtgtgtgtgcctatactcatatttactaatatacaaggtttgtagataaggcttgactaaatctgaaggtaagatttacacctggagcatcttcgtacacccagcatagagacaacagatcatttacgttttctggtttaccacataaactgctgattactttcctattttggactgatacagttcagaaaaaaatgtaactcttaatattcctctgcctgactatttgctattttacttatraagattatgccttccaggtaatgatatgttttgatacccctttctatctttttcccggatattttctgagatttttatcttagaatggatttacaggg

SEQ ID NO: 900712 - DNA, 624 bp, Homo sapiens
gggttttctaaatatgtaatcatgtcatctgcaaacagagacaatttgacttcctctcttcctatttgaataccctttatttctttctcttgcctgattgccgtggccagaaattcaatactatggtgaataggggtggtaagatagggcatccttgtcttgtgctggttttcaaagggaatgttttcagcttttgcccattcagtatgatattggctatgaagttttttcataaatagctcttattattttgagatatgttccatcaatagctagtttattgtttttagcatgaagaggtgttgaattttatcaaaggccttttctgcatctattgagataatcatgtggtttttgtcattggttctgtttacatgatggattacgtttattgatttgtgtatgttgaaccagccttgtatcccagggatgaagccaacttgatcgtggcagataagctttttgatgtgctgctggattcggtttgccagtattttatcaaggattttcacactgatgttcataagggawattccctgaaattttctttttttgttgtgtctctgccaggttggtatcaggatgatgctggcctcataaaatgaattagggaggagtccttct

SEQ ID NO: 900713 - DNA, 689 bp, Homo sapiens
gcaacggtttcttatacatgagactaaaagcacaagtgacaaaagaaaaaagttagagtagattcttcatcaaaattaaatctaagtttgtaggtagagcaccaaaggagaaacaggcaatatgataaggcaaagacttttgaccatttacagagaaaagctaaaatgtcaggttgattctaagttagaagagaagcaaattcacattttctagagaagaactacagtgtccataggtaactgagaatgaggggaagcaaatagtgaaaaaaatataaaaagataaaccattggaatatgagtcttgaaggaataaaaatatggtaacaaaagttttaacatagatgaaaatgaaagctgatgtttatcaaattattttgaaatcacattcctactcattcatttgcaaaaaaaaaaaaaaaaaaaaaaaaaaaaaaaaaaaaaaggatttgttcaaatccctccaagcagctcctgtgtcctggccactatgggggatgtaaacactggttttcatgcttagtgtctctttcttgcctgcccctggtcagtgtatcatttcyggaggaagaaaaactgactgggtgactatttcattctaaccaatgatctcattcaaacaatttttttttcatcaaatagtcccttttcaattttttttaatttttaaaaaagtttttagacaagac

SEQ ID NO: 900714 - DNA, 689 bp, Homo sapiens
gcaacggtttcttatacatgagactaaaagcacaagtgacaaaagaaaaaagttagagtagattcttcatcaaaattaaatctaagtttgtaggtagagcaccaaaggagaaacaggcaatatgataaggcaaagacttttgaccatttacagagaaaagctaaaatgtcaggttgattctaagttagaagagaagcaaattcacattttctagagaagaactacagtgtccataggtaactgagaatgaggggaagcaaatagtgaaaaaaatataaaaagataaaccattggaatatgagtcttgaaggaataaaaatatggtaacaaaagttttaacatagatgaaaatgaaagctgatgtttatcaaattattttgaaatcacattcctactcattcatttgcaaaaaaaaaaaaaaaaaaaaaaaaaaaaaaaaaaaaaaggatttgttcaaatccctccaagcagctcctgtgtcctggccactatgggggatgtaaacactggttttcatgcttagtgtctctttcttgcctgcccctggtcagtgtatcatttctggaggaagaaaaactgactgggtgactatwtcattctaaccaatgatctcattcaaacaatttttttttcatcaaatagtcccttttcaattttttttaatttttaaaaaagtttttagacaagac

SEQ ID NO: 900715 - DNA, 637 bp, Homo sapiens
ccttgtttggatgaagttttcttctcttgcatttgtaacaattcacaagaaatatctatctgtctatcaaaatctggcagagacacaatgaaaaaagaaaactttaagctaacatccctgatgaatatagacacaaaaatcctcaacaaaatactagcaaattgaacccagcagcacatccaaaaagctaatccaccatgatcaagtaggctttattcctaggatgcaaggttggttcaacatatacatatcaatagatgtgattcatcacataaacagaactaaaaacaaaaaaccacatgatcatcttaattaagatgcggaaaaggctttcaataaaattcaacatctcttcatgttaaaaaccctcaacaaattaggccaaagcataagagccatctataaccaactcacagccaacatcatactgaggaggcaaaagatgaaagcattctccctaagaactgaaacgaaacaagggtgctcactcttaccactcctactcaacataaygctggaagtcctagccagagcaaccaggcaggagaaagaaataaaaggcatccaaatacgaagagaggaagtcaaactatctctctttgaaaatgatatgattttatacctagaaaacaaaacc

SEQ ID NO: 900716 - DNA, 639 bp, Homo sapiens
ccaattgttaatttcaattgatggcaattcaraatacatgtattaactgtttagtacaatatttgcaatgccctgtgctacattctaaagagaaaacaaagatacataggttatgacaccaagacatttataaactaggagatgctcaactatttgttttaatagaatatagaagaattgatgaaggttaccttgaccagcactttccaacagaaatataatgtaagctacaaatctgagctacagttatgattttaaatttcctgagagccacattaaaagaaaaacaaagcaggtgaaattaattttaacagtattttctttaacccaacatatctgaattattatcatttgggaatgaaattgatataaaaaatttttgagatatgtatatttttatactaagtcttagatctttgaaatatggagttacacttacatatttcaaatactcaatagctacacaaggctaattaatctctgctatattgggcagcacagacctaaacttaaaccatccattgttcagcaagctcataccttcttcagcaatccttgccatgtaaaaatcatttctggttttaaagaaaaagcaagaaggaagttatatagaaaaattggtaataaccctggtaatta

SEQ ID NO: 900717 - DNA, 647 bp, Homo sapiens
ggactccgaatgtctggtcttaatttcctatctgatcaggatgagccaattctttgctaggctctctggtcacagctcaaaagaaggcctacaggacttctatttcttaagaacaaaatggcagtaacaataggcgcagcattggaccctcatcaagtattgttcttaatttgcttaacttttatttaaaagttacactaggaaaatcttatctcatatataaaagcagtaaggcaaactgccttttcatgcctaaatttctgttgggtgatttcatatatttttttctaactaaaaccctaaaccatagccaagatttactttctttttacaagttacacatgatgttggttgcattgctttccagagtgacaacaagggtgtctactttatgaagtttacatttagctaatggccttaaattatgtgaacaaagattaatgatggaatctaattcctgatttaccacttataatatttatcatttaaaatcaccaagaaggtctttataaaagacccaygcaagtaatataaatcctgctaaaatcttgaataattctgatttaattctacaggtttgtaacagaatttgtaaacctaggcaatttttcagctcttcgcactttcagagtcttgagagctttgaa

SEQ ID NO: 900718 - DNA, 624 bp, Homo sapiens
agcacaaaaagtttgggacacaaaagggcgtaaatattcaccaaaagatgaagaatggtacaggtgaaacaactcacccatacttcttgctgaattacagccatcatatttttaaagacagggtttcagtctgtcacccaggctggaatgcagtggcatgaacatggctcactgttgccttgacttcctgggctcgagctatcctcccacctcagcctcctgactaggtggaacacgccatcatgattggctaatttgtaaattttttgtagatatggggtctcaccatgttgcccagcctggtctcaaactcctggcctcaagcaatcctcctgcctcagcctcctgaagtgttgggattacaggtgcgagccactgcacctggcctacagttatcatttttaacacatgtgcatgatctaacttactggagtcctgccaaaatggttgcccaggaaaaacagtattactggaaaccttctccaacgatagctcataaggtatacaarcagtcatatttgcccaaaatataatccaggaaaagcattacttacttcccaaagacactttcctttatctgagactccctttgaaatacagcaactagatttttttctaattgcc

SEQ ID NO: 900719 - DNA, 624 bp, Homo sapiens
agcacaaaaagtttgggacacaaaagggcgtaaatattcaccaaaagatgaagaatggtacaggtgaaacaactcacccatacttcttgctgaattacagccatcatatttttaaagacagggtttcagtctgtcacccaggctggaatgcagtggcatgaacatggctcactgttgccttgacttcctgggctcgagctatcctcccacctcagcctcctgactaggtggaacacgccatcatgattggctaatttgtaaattttttgtagatatggggtctcaccatgttgcccagcctggtctcaaactcctggcctcaagcaatcctcctgcctcagcctcctgaagtgttgggattacaggtgcgagccactgcacctggcctacagttatcatttttaacacatgtgcatgatctaacttactggagtcctgccaaaatggttgcccaggaaaaacagtattactggaaaccttctccaacgatagctcataaggtatacaagcagtcatatttgcccaaaatataatccaggaaaagcattacttrcttcccaaagacactttcctttatctgagactccctttgaaatacagcaactagatttttttctaattgcc

SEQ ID NO: 900720 - DNA, 663 bp, Homo sapiens
aacttattaaaattacaaattcatctcatctcagccttctgaaagttaaaaactcaaaacatttatttcttccgtaagcttttaaattcaatctctatatrtaactatacatgttagtctaaaaagttttaacaatcactttgaaggagctttgattcatagttgatcctacttacaaaattaattttaaaacttcaaatatataaaacaacatttataaatttcaaataattgatttccttctaaatactacaatagtctaattgaacaaacttttcctaaatatttaaaaattacactgtacatttaataaattaagcttataaataagaactttaagttatctaaaatgatctaatattatttgcaaacaaagctatttcaacttagaaatttcaagtgtaaatcaattactcaattacacattttcaatttattgataaggttgactaatattctaatagatgaaatcttataaacatattcagatgccttattacaaaaatattaacattatgttttgattctcttacagtttttaatgttaatctaaatatttttccgggtaaaagatgctaaccagctaaaatacaatatgtcactctccaaaatttaggggataccttcttaacagctagaagttcttaacagctgaaagtagca

SEQ ID NO: 900721 - DNA, 647 bp, Homo sapiens
tagaacagacattgtagagtgacagcaaactgtattctgaaagcacggtaacaatttataatccaagtagatatgagagaaagttcaaactgatctaagcctcaacatcacagtgtttcagccaactatatggtaagaaatgatgcctcgttgttagtgaaatttataattttttatgaacaaactttatggttttatatttttataaaatccaaatgataacttttctacaccacctgtttgaaaaattcccattattatagcatagtatatgcatgtatatatgttattggtatattttctggtaaaatatattgaagatacattctccaaattagatgcatcacatatcactcaattttaacattggatgggcaaaatttttaactttaatgtagttgaattaatcaaaattttaaccttggttatagttttttatattccttttctttgtttaagattacagagtttcactctgtggcccaggctggagtgtgttgctgtaatctctgctcaatgcaacatctgcctcctaggttcaagtgattcccgtgcctcagactcytgagttgctgggattacaggcacccatcatcatagccagctaatatttgtatttttagtagatatgtttttgccatgttggc

SEQ ID NO: 900722 - DNA, 558 bp, Homo sapiens
tcactcacttatactcattgagggctttcaatgtatcaggcactgctccaagtgtgtcacatggatgatttcattacacccacaayaggagtaacagacaggtactcttattcccattttacaaatgaggaagcggaagcacagagaggtttagaaagttgtccgtgctaggaagtgatgatgcatggtttcaaaaccaggtcatggggctccaccactgttgctctgaaccaaaccaacacccagggatccttccagaccctccacaggtgctcaggcattggcagagttacaaatcttcagcccagaggccataactgccaaatgggaaaggacaaaggtttgccctccctgtactggatatgagattgggtaacacttgcttagagcctacgatttgccaggttccatgtttagtgctttatatatatgatatcatttggttctcacagtagtcctgggagaaaggaatagttgtcctcttaagtagaaaaacttgtgccagaaaacttacttaccctactcaaggacatacagttaataaatagcagggcagga

SEQ ID NO: 900723 - DNA, 667 bp, Homo sapiens
caattcctcaaacagctaaaagcagaactaccattcgacccagcaatcctattactgggtatatacccagaggaatataaatcactctaccataaagacacatgtacacaaatgttcactgtggcactatttgcaatagtaaagacaaggaatcaacctaaatgctcatcaatgacaaactggataaagcaaatgtggtacatatacattatcgaatactatgtagccataaaaaaggaacaagatcatgtcttttgcaggaacgtggatggagctggaggccattatcctcagcaaactaacgcaggaacagaaaaccaaatactgcatattctcacttatacgtgggagctaaatgatgagaacttatgaatacaaagaaagaaagaataggcactggggtccacttgatgggggagggtgggaggaaagagaggagcagaaaaggtaactattgggtactgggcttaattcctgggtgatgaaataatctgtaaaacaaacacccccatgacatgagtttatctatataacaaaccttcacatgtaygcccaaacctaaaataaaagtgtaaaaaaaagaaaatagagactcaagtacatgtgcacacgtttatagcagcactgctgacaataaccaaaaggtagaaacagcccaaatgtccag

SEQ ID NO: 900724 - DNA, 627 bp, Homo sapiens
acacaccaaattaaaatttgtcatcatgaagctaccttacccttatttctctaatcagtgtcaagaggcatcaagtgaaagttgatcaaaaacttttcatyaccctgccctgtctccaacccttcctgtctgtagttcatgaacctaggtgcccagtcaaaaataaacaggttctaacaagttatgtaagattcctctaagtttggatttttttgaccagaaagtgtatcgtcttccaaattttacacaagactgagtatatcacttgacactaaacattgtatcaattaaacaaatgagatttttctattagattacttacttctactatcttctgcacatccacgtcattaaaaaatgaaacaaatccatagctataaaggcagataaatgaagtataaaatcaccatcatacagtacatggttcagaacttctactatatacggaagtgatcatgactaaaatatgaataatatactatgctaaatatttaagatgtacatgatagatcctctacaaatactgctttttcttcatctgaactatgtcaatcaaaatgtgctaagattagggtagtgtgaaaacttcattgattaacaaagaattcatatccatgaacctgaatt

SEQ ID NO: 900725 - DNA, 606 bp, Homo sapiens
tcctttcagatgtttttctaggtgttttcttttaacacttacatagaacatttgctatttgaacttatagaacatattgatayataaaatatgtggtatttttattatacttgtaatagagaaattatattcatataaaaatgttatatataacttatagaaaatatatgcttacactatatatttatacttaaagggtatatagagggaatatatattattttggggtatatgttcttgaacaaaaatgctgttaaaatgtatgtaacttgattttttttctccaacaatatgactcagaaatatctacattactaggtagatatattttttttcttttttagaaatggagtcttgctatgttgcccaggctggcctggaacctctgggttcaagtgatcctcccacctcagcctctgagtagctgggactaatggggtgtaccatcacacccagttactcagaaatttctaatgtcagcatatagatctacctaattccttttaactttggcataattttacataatatggatacgccacagttattagccattccctggtcaattgatgtttaggtcttttgtactttgtcatggttataaat

SEQ ID NO: 900726 - DNA, 579 bp, Homo sapiens
ttctaatgtcagcatatagatctacctaattccttttaactttggcataattttacataatatggatacgccacagttattagccattccctggtcaattgaygtttaggtcttttgtactttgtcatggttataaataatatacaatgaaactgtctcattggagacacatgagtatttttttttctggggtgaacaccaagaagtatatctgccagttcatagatatgcacatttcaaattttaatagatatcacaaaattgccctttaaagtgttgtgccaatgtatacccatttacactccaccatcagtgagttagtcttcatttatctattcactttccaatattgatatcaccactctttaatttgcctacctgatggtcaagaaatggcatctcgttttcattttactttgcatttccctgattgctcatggagttaaatttttttctactgtttgttgactgttcaggttcctcatcattgaatgacctgtttatagtctctggccaatttccctttgagttgcttgtctttttcatattgttttgtgggaatctggcttccctcttttt

SEQ ID NO: 900727 - DNA, 522 bp, Homo sapiens
gatggttttataagggattattccaccttcacttggcactttttcctgctgccttgtgaagaaggtgccttgcctccccttcacctkccaccatgattgtaagtttcctgaggcctctccagccatgctaaactgtgagtcaattagacctctttgctttataaattacccagtcttaggcagttctttatagtagtatgaaaatggactaatacagtaagttggtactgcagagggtggggttctgctataaagatacccaaaaatgtggaagcaactttggaactgggtaacaggcagaggttagaacagtttggagggctcagagaagacagggaaatgtgggaaagtttggaacttcctagagacttgttgaatgcctttgaccaaaatgccgatagtgatatggacaatgaagtccaggctgaagtggtctcagatggagatgaggaacttgttgggaaccagaataaaggtgactattgctatactttagcgaagagactggcagcattcattttt

SEQ ID NO: 900728 - DNA, 463 bp, Homo sapiens
ctgaaggatctctacaatgagaattataaaacactgaaagaaagaaatcagagatgatacaaacaaatgaaaaaacattccatgctcatgaataggaaggatatatattgttaaaagtcatcatggccaggcacagtggctcatgcctgtaatcccagcactttgggaggctgaggtgggtggatcatgatgtcaggagattgagaccatcctggctaacacggtgaaaccctgtctctactaaaaatacaaaaaattagccgggtgtggtggcaggcgcctgtagtcccagctacttgggaggctgaggcaggaaaatggcgtgaacctgggagatagagcttgcagtgagccgagatcacgccactacattccagcctgggcaacagagcgagactctgtctcaaaaaaaaaaaaacaracaaagtggtcatgctgcccaaagcaatttacagatctaata

SEQ ID NO: 900729 - DNA, 593 bp, Homo sapiens
tgaaacaatattataccaaatctatttcctttttattgactgttgatatgagatctctttcatactcacagtttcacgaacttattttctaaaacttattttgctacttctacaactcattggcaartgctcaaacattaatttgagctactgattaaataatacaataactaaagaaatctcatgtttatttttattatgctcatccttttctttaataagaatctatacattagctgcacatttacagtcatgacaaaacttcttttatgtttgataccatatacactactgtaataatttgcatattaagcataaagctgtagcaatcatgtaaattaatatataccttttaatatagtcaccatttagactcggaacaattatttagacctcatttttatatcctggttttactgtatctaaaaacaataaagcagtggagccttaaagataaagcctctgcatataaaagctttgttcttaaaggacctagctcaattctgctatcagaatgaagaaagtcggtaagactactcccttcaccaaacttttcaataacattaatgtctataacagaaaccactaatcat

SEQ ID NO: 900730 - DNA, 601 bp, Homo sapiens
atcacattgattgatttgcatatgttgaaccatccttgcatccaagggataaatcccacttggtcatgttgaatgatctttctaatgtattrttgaatttagtttgataggatttcgttgaggatttttgtataaatatttatcagagatattggcctataggatattggtctatagtattttttttttaatgtgtctttgtcatgtttttgtttctgggtaatactggactcttgaaatgaatttggaagaattcatttcttctctgtttctcagaatagttttaataggagaataggatttacattacttctttaaaagtttggtagaattcagcagtaaagccatcagtgtgcaggacttttttttttctggaagagtccttattatggcttcaatctcattacttgttattggtctgttcatgttttagagttgtttctggttcaatcttggcaggttgaaccagaatctgtccatttcttctggatttttaaaatttattggcatataggtactcatagttgtcactaataatcctttgaatttctgcaatgtcaggtgtaatgcctcctttttcatttctgattttatttattgt

SEQ ID NO: 900731 - DNA, 561 bp, Homo sapiens
aaggaaggtgtctcttttggagccatgatctgtgcactttggagttaggtgataggagcactccttttgcttccctagctggtgtctcagtatgttgtgtgcctctgcartctactgtctctgtggccacttcagtcttaggactcacctgagatttgaagtctttgtggcctagactgcctttcaagtttacttagagactgagagcactttgcccttcatggtgaggtttgcagacactcaagttcagatcactgaggttggtgattcccatctggctagggctggtttaaatgctccctgtgtgggtggtcatcagctaagtttggtgtgattttcctttctgttctaacagaacaatactgtgttcaatgcctcacaattgctgtgttcttcttcccccagcacccagagaagctctctgcaccatgcccccaagcctggggtgggggaggggtggcaccagcgattctggacgtttttttctatcacttcagtgcctcttccagcaatatgaatttaataccagatacctaatttttggttcttatacagattttt

SEQ ID NO: 900732 - DNA, 599 bp, Homo sapiens
aatggtcatgcagtgagcagaaaggtaactgacttggaggctgaaaatatgaaggcccattatacgcagtggcaaaacatttattaacactcttgcctgctataaattggaaggaaaaccatatgcccactgaatatgcagctccaaagagtcagagtcagggtaatagtatatcctgttctgatgttctgcattgagaaagtattcaaagagattaattagaaaaatatttggctagtttgcaagcaaaaatgaacctgtctacttctagatctgcataaagcaaaattctggaagttctttctatgccatgaaagatatattagaaagactttggcctctccatcaatctacaaaagtcagaagaaaattggtctcagagtctaatttgattaataaaaataaataattttaattaacaatgatgtattgtgaccagtagtggattccaactgaagacttaatctctaaatttaagaaagttaaaatccatttgagtagggaaaaaaaaakaataaaagcacaatttaaaagtaactacaaacaagttagttcgatctagataattatatattacagtgcaagtgggtcctctaaat

SEQ ID NO: 900733 - DNA, 595 bp, Homo sapiens
gtcctcaatcccatttctcctgactgggtgagaccttccaattttggtcttcagccacctcttacaggtgcatgtgggtgagcaacaggcctgtacctccctgggacagaggtcctagagggaggagcagactgccatctttgttgttttgcaagccttcactgtgatacctccaggtactggaaaatctgaggtgactaagcactggagcagatccccagcattctgcaacagccctacagaaaattggccagactgttacatgggtacttgttcccatatcttctcaccagtcaggtcctctagccaccccttaccagagctattcagccagtatcaactcagcaactccctggacagagcctccaggggcaactgaaagcctctttgccactgcatctaacacgaagccatccttgctaccctctcactaacaaaggagcaagcaccctttgtgcctcattcacacttccaayaagctgcagtcaacccaaggaaaggaggccactacatctcccatgggtcccccacacatctcattgcttactgccacacagggaacccctggtttaggcccacagcacagaccctccat

SEQ ID NO: 900734 - DNA, 740 bp, Homo sapiens
acaagccatagtaatttgtactaaagagccaaaatactatgggattttagaaaaggagaaaattaatatggtctggaatgcatagacagatggaatttaacacttcaatacatttctgttgakgcagctaaatagtcatttgaaaatatgatgcatctgtgaaatgtatggatactactctacatgatttttaaattttggacaggttttttttttgacttttattttaagttcaggagtacaagcacaggtttgttacattggtaaacttgtgtcagggggtttgttgtacaaattgtcatcacccaggtgtctggtacccagtagttatttttttctgatcatctccctcctccaaccctccaccctctgaaaggccccagtgtgtggtgttcccatctatatatccatgtgttctcatcatttagctcccacttataagtgagatcatgtggaattgggttttctgttcctctgtgagtttgctaaggataatggcctcctgctccaaccacatctctgtaaacaacataatcttattttttatggctgtataatattccgtggtgtacatgcaccacattttctttacccagtctttcactgatgggcatttaggttgattccatgtctttgctattgtgaatagtgctgcaacgaacataagcatgcatgtgtctgtataatagaacagtttgtattcctttgggtatatacccagtaatgggattgctggatag

SEQ ID NO: 900735 - DNA, 650 bp, Homo sapiens
ttctggggtgctagtgcagtcctttggaagtaagaaaacactctaactttttgagttgccagagttcttacactggttctttcccatctgtgtgggctgatgttcctttaatcactgaaggcatcagggtgtactggttgtggtggtggctctgtgtgttccaagtgcacaatagtggaggcggagcagcagttcaacataaccactcatgcatgccagtggcaatgagacagtccacatatacgcactgacagagcagtggaggggactgtgggtgagtatgttccagcaaagcaatagggagaggcttctggtgggtgggggcatgtttgttggggcctgtcagctgaagctctcttacagttatgaaaggtctgctagtgaaggagctgtggtggcagctgccaggaagcactcctgttgagtgttcaaggctacaatgctagtgggcatggctaggcatgatccctgagagaggctggcagacagggaggtgctcaggtcatactggccccatctcatcggcaagactaccctgttttattccaagtccaatagtcaacaaaagccaatctcacctagaaaagcatggcaagccttggggaaygggcattcctggccatgttcatctgcagccattccttcgccaa

SEQ ID NO: 900736 - DNA, 593 bp, Homo sapiens
aggcaagtccaattatatgaaggaaaaaatttgcccataacttctatttgatacagatgaatatagcttgtgacctaaaacaaatgaatgcttatctcccatgtaatgagatatattttaacatttattcagtgtccagcatatataaggcctcttgttgggtctaagggtaagaaaagatgaaaatgtgaagatgtgatctttgttctgaaggtgtttttaagcccgtaaaattcatataagttgcaaaacaaagtttgaaagataaaacaagtgagataaactcaaaatggtatagaaacacaataaagtatcatagcaattggacctggggagctccagaaagatagaattatgttatgaagaataggtcaaattttgacagagtgggaaattcatagtctagtttgcctggactatgaggtaaatgctaaagaagcagaagcagaatctggaatagtaatttttaattttggtgataatcatttttttcttttatgcatcatgcttyctgtgtcatatctaaaaacacatttatttaacccaaggctaaggtagtaaatacattcccttttgtttcctattatttgttt

SEQ ID NO: 900737 - DNA, 543 bp, Homo sapiens
cagcaatggttcataaccagttcgaaataactgaaatgatagacatataattcagaatcttgattgcaaaaaagctcaacaagattcaggaagaagttgaaacccaatccaagaaattcartaaaatcatacaagagctgaaagatgaaatagccattttaagaaagaaccaaactaaactgctagagctgaaattcactacaaggattttataacacaatcagaagtattaacagcagaataaatgaggctgaggaaagaatctgaaagcttgaagcatggttcttttaattaattaaatttttaaaaaagaattgtaaaagatgaacaaaacttttgagaaatatgggattatttaaagagacaaaatctgactcattgatattcctaagaaagaaggagagagaataagtaaattggaaattatacttgaggatatagttcacaaaattgtttctaatttcactagagagattgacatgcaaattcaagaaacacagagaacccaagctagatactaaccataacactatcctcaaggca

SEQ ID NO: 900738 - DNA, 305 bp, Homo sapiens
tctccaaatattgaagcaagaagagattgaaaccttgaatagaccaatattgatctctgaaattaaaccagtaataaaaaatctagcaaccaataaaacccctggaccagatgtattcacagcagaatwctaccagacatacaaagaactggtatgaattctactgacactactccaaaaaacaaacaaacaaacaaacaaaatcacagaggagatgctacttcctatcttattttgtatgaagctagcatcagacagataccaaaatcttgcagagacacaacaacaaaaaaattacaggccag

SEQ ID NO: 900739 - DNA, 305 bp, Homo sapiens
tctccaaatattgaagcaagaagagattgaaaccttgaatagaccaatattgatctctgaaattaaaccagtaataaaaaatctagcaaccaataaaacccctggaccagatgtattcacagcagaattctaccagacatacaaagaactggtatgaattctactgacactaytccaaaaaacaaacaaacaaacaaacaaaatcacagaggagatgctacttcctatcttattttgtatgaagctagcatcagacagataccaaaatcttgcagagacacaacaacaaaaaaattacaggccag

SEQ ID NO: 900740 - DNA, 305 bp, Homo sapiens
tctccaaatattgaagcaagaagagattgaaaccttgaatagaccaatattgatctctgaaattaaaccagtaataaaaaatctagcaaccaataaaacccctggaccagatgtattcacagcagaattctaccagacatacaaagaactggtatgaattctactgacactactccaaaaaacaaacaaacaaacaaacaaaatcacagaggagatgctacttcctaycttattttgtatgaagctagcatcagacagataccaaaatcttgcagagacacaacaacaaaaaaattacaggccag

SEQ ID NO: 900741 - DNA, 573 bp, Homo sapiens
ctcctggatcagagacaatcttctttattaatgtaggcatttaccataacaaacttcccatttagtactgcttttgctgtattccatgagttttrgtattatgtctcttcattttaatttatcttaagatattttctgatttctctttttatttcttctttgacccattgattgttcagaattgtgtttttaatttcctcatatttttgagtattctaattttccttctcttatgggtttctggtttcattccattgtggagaaaaagatacttagtatgatttcattcttttaaaatttgttaagacattttgagaatgtgtatttttctgctgttggatggaatgttttgtatatgactggtaggtccatttggtctttaatgatttgaagtctgttatttctttattttctatttggatcatgtatttggtattaagagtggggtattgaagtcttcagttattattgtattgcagtttatctctttattctgtcttttttatatttttagttcctctgaatagatgtacatacatgtttataattgttgggccttcctgaggaattcat

SEQ ID NO: 900742 - DNA, 466 bp, Homo sapiens
aagagtgggggccaatattcaacattcttaaagagaagaattttcaacccagaatttcatatccagccaaactaagcttcataagtgaaggagaaataaaatcctttacagacaagcaaatgctgagggattttgtcaccacgaggcctgccttacaagagctcctgagggaagcactaaacatggaaaggacaactggtaccagccaaggcaaaaacatgccaaattgtaaagaccattgatgctaggaagaaactgtatcaactaatggtcaaaataaccagctagcatcataaagacaggatcaaattcacatataacaatattaaccttaaatgtaaatgggctaaatgcttcaattaaaatacacagactggcaaattggataaagagtcaagacccattagtgtactgtrttcaggagacccatctcatgtgcagagacgcacataggctcaaaataaag

SEQ ID NO: 900743 - DNA, 623 bp, Homo sapiens
ggaatgacctgggagttcaacccacctctgaggcttgaaccccgcttctaagaactctgtttagaaacctccagcagtggagcactctccaygtatggagcaacctcttccatttcctaaaagttctgatggcctaattcacacggaattgcacggcagcctttacttatgctccggggggtgatgttttaggggttagatccctgcaagtgcagcttaggtgatagcgtcaagagtgatctctagaccttactgttctgaaaagtattttagtctgctgctcattctcactggctgtgtttctttgcagacccggccctgctgctgtactgcccagcccagcccctctccccaggtcccaggcatccttttttggtcccttggattctctccaaaatctgtcaactttttgtttttctatgctgggcaatttatttcactttgccttccgtctctcttccgaggccggctttgccaccatgtggtcctccgaggtgcttagtttaacactaaggtatctacttaaaagaggcattatatcataggaaatggaattactgcagttagggtgttaaatgacttttggctcccacccctctccccattcatctagtttttcattt

SEQ ID NO: 900744 - DNA, 665 bp, Homo sapiens
gccaggtatctccatacaccaccctctttcctcttgttctccctttgcttccacccccagccagcctctaacatcttaaattcccagtagcacagttgagtctcaactccacacacatatgcacacacctcagtctgcgctacaggcccatctttacattttccaaaacagtttaatgagtgttttggaaacatttcatcaaagggctttagctgtagccaattgtgaaatcagatttcttgattatgagcaaagtagagggtatgttctctctttccctgacaggcacaaatcccagggcttccctatctatttggcgtccaaggttatctgaggtcacgagccacagagtgagtcctgggaaggaagggcagttgcagtgtacgtagtgagccctggagccacaggactggcagtaagtgctacaaactggtgtggcctcagagagggaccttggagaggggcaccagcaagtgtgtgctcagagggccatgagacacataaatcctcagagaaacatctccgtaactgctcctcgcacactgcttttacagratgtcatttgcaagcacttcagcaggctataactcactggagagcatcttgcgacctttctcctcctcacaatggaaattttttattacagaagttatagtgaatatata

SEQ ID NO: 900745 - DNA, 647 bp, Homo sapiens
gccataaaagctataaggaaatgaataaaaatgaacaccctggaaaaatatctgccagtgctgctcacagcttgtgaattccaaagcctcatgaaacttctyttaaaacgcttttcccattcttgaaatatcttgtcgaagagcccagcaacaatcattaatataggtaaagcctatttgggtaaaagagagagaaaactgggactgtaacattgagtgattctgaaggttgaactaatgaagcctgcaaccatcatcttacagagtcatttggaaggaatcagagcattcacagaaataaattagtaaaggctctaagcagaagttgaaaattttgcatatgcatgattactgataaataccatgaattaagaagtggtcatccctactcaaaaggtctggggcgctttacaaagggacacactgaggctggctaacgcaggcacattgggcagctcaggctgggcagggtcctccatggctcataagctttaataagaaggaagtagagattgccatcagcataatacttttggttttagtgtatattcatgttaaaagttagctgagttgttattctcattaaaataatggaaatgagtattctcaacaaatctatttttgtattttaaagatgctgaactaag

SEQ ID NO: 900746 - DNA, 703 bp, Homo sapiens
ccatgctggcaccctgatcttggactttcagcttccagaactgtctgttgagaaaataaattcgtctgttgtttaatccacctgtctatggtgttttgttttagcagccagagcagactaagacaggaggggaagggctgtgagcaaaccctggcctggggctagacctggccaggcactgactgcctgagggagcgtggaccagccctgccttcttagggctacagtgcccaaatttctcaaatccagccttggaccacatgagctgaagatccatgtacctctgaggatgggtgactctcatctcgaaccagtctttatgctgagctgtatttttagtagagacggggtttcaccatgttggtcaggctggtctctaactcctgaccttgtgatccgctcgcctcggcctcctaaagtgctgggattacaggcgtgagccatcacgcctggccccttttgtcactgcccctctttacacacagggtccctggtgtacctaaacaagggacgtaattcacagagcctcagtgttccttcctgtacacttgggatactggtgcccccacttaatgggctgacttcgggaacaaatgaagtaaygattacagaggacttagcatgtgcctggcaccaaggaggtgctcagtaaagaacagctacagttattgttctcatgatgtcacctggccagtgcagaggg

SEQ ID NO: 900747 - DNA, 657 bp, Homo sapiens
tgggcttggggatggggccaggaaggtatgagggctgcctcaaaatttctcagggtcaggtcagagccagcaggagagccaggtgagggtgagggcactgccctgggcacaggattctggctcagcaaacagcagaagtgattcaagcagtgcaggtggtggagctgaggctgctgaccctagcaggtggcctcaggccagccggcttggacataaaggggtggtagtgggcttgaagctgtgagttctggaaaggtggtgagggagagatggagaagagccagctgtgtcctggctggaggaaacacagttcagaggctgaaatcattgaggcactggcatcctctcttaggatgtctctcccagcagtgaggctttgtaggaggagggacttcagtacaacctttgtgtgctaattggacaaatatacttcagaaggaaggacattgaaggctattgatcccattctacttattggacgttccttagatggttctttgacggcagtgaccatggaggtcagaggccacactgctagcaattcaagtccccyataaagatcactgggagaacaaaagctgccatctctagttcagagttcctcccacgcggtgctgccaggacaggatgctgccaggtagaacagagaaggccatg

SEQ ID NO: 900748 - DNA, 469 bp, Homo sapiens
caatttaatcttctttttcctgactttctgaactttaaacaatgtccttaggctctgccccagctcctcttcatttatcactccatgctttcttttcctaggcaatctaatagctgcacccatagtcatccctccactgacaactttcaagtttatgtatttcatttttggcttctgagcacaaacccatacattcatctaacatgcttcaaatagtatatgttaccctcacctactctaaatgggtgtcttttgtggactcggagaatctgagacaggtctcagttaatttagatattttattttgccaaggttaaggacacacacccatgacacagcctcaggaaatcctgacatgtgtycatggtggttggggcacagcttggttttgtacattttaggaagacatgagtcatcaatcaatatatgtaagaagtacattggtttagtctggaaaggtaagaaaact

SEQ ID NO: 900749 - DNA, 640 bp, Homo sapiens
acaaacaaacatacaaacaaacaaacaaacccagctcctggattcattgattttttaaagggtttttcgtgtytctatctccttcagtccttctctgatctttattatttcttgtcttctgctagcttttgaatttgttttctcttgcttctctagttcttttaattgtgatgtcaagatgttgatattagatcttttccactttctcctgtgggaatttagtgctataaatttccctctaaccactgctttagctgtgtcccagagattctggtacattgtgtctttgctctcattggtttcaaaaaacttatttacttctgccttaattttgttatttacccagtagtcattcaggagcaggttgttcagtttccatgtagttgtgcagttttgagtgagtttcttaatcctgagttctagtttgattgcactgtagtctgagagactgttgtgatttctgttcttttgcatttgctgaagtgttttacttccaattatgtggttaattttagaataagtgctatgtgatctgtgatcaggggtctttgatgctactgttttaattgttttggagtgctacaaaccacacctatataagatggcaaacttgatagacaaatattgcatgtgttctgac

SEQ ID NO: 900750 - DNA, 499 bp, Homo sapiens
gggcaaagtgccactgcttgttatgctaaagcataacaagagtcacctttgctccagttcccaacaagttcctcatctccatctgagaccacctcagcctggactttattgtccatatcactatcagcattttggccaaagctattcaacaagtctctaggaggttgcaaacttttctacacctttctgtctttttctgagccctccaaactgttccaacctctgcctgttacctaattccaaagttgcttccacattttcgggtatctttatgcagcaccccactcccagtaccaatttattgtattagtccattctgacgctgctaataaagacatactcaacactgggtaatttgcaaaggaaagaggtttaactgactcattgttccacatggctgtgkgggggggtggggcttacaattatgacagaaggtgaaggaggagcagtcacgtcttaatggcagcaggcaaagagagtttgtgcagggaaactccca

SEQ ID NO: 900751 - DNA, 586 bp, Homo sapiens
aaattatctccccagttttaccttatcttctcagtggctgctgccaccactcttactctctctcccactccccaccccaaatagaaagaggaaaagaaaatgtcrcttctctccagaaaggtggggtgggctatgagtagaattgtcatgattctgctgactcaccagagccacatgtaggaggtatgtacactgcactccatcatcttctgagttattttttcctctgtcatcacttaagttcttatgccactagattatgctcttgtctgactcttactggtatatttttctcatttattattattattttttttactatttttgacatttccataggagttgagggagaaagcttctgcaggcctatttcactttgccaactcaactgcaactcatgtgtgttctatcttccagaattctctggaacattctgcccgatacaggctaccattcttgttttccagcacctttatagttttattccttaaacacaaaccaacaattccacaggcacacacatgtcttctgacttttccatgaaatgttgagggagcctggcgcggtggctcacacccgtaatccc

SEQ ID NO: 900752 - DNA, 597 bp, Homo sapiens
tgcagtagtgtgggttgagcctggcagtgggcagatgtatgctgaatttcctcttggcctgaggcctggttatcaaactgatgtagtccccggagtcttctcaaatgcccacagagctggcccgacagaaacagtaaagtgttgggattagcaaggggtcaagaagcagaaagccagctccattactctcttctgcagaaatcacctccttcgacagccccagaggcagtgccttgggttagtttcctcagaaatggagcttgagaaaaggattgactgggggactgctcccagataaaacctgtaagggactgaggagttagaatggggcagagaagaagctgggcaaacatatagcttcagctgaagtctaactcagcctgatcccgtggggagctcacatgcagttgtcccaactgcagggaagccctttggcctttaggtccccatgtcagtcatcactggctgtgggctccccttaggggaggaygtaacctctcaggcttttcaggatgaggtggctctggagaaggaagtctctggagaaagaaacagctgtgtcattagcagtcagcatgcactgcagatgggggatgg

SEQ ID NO: 900753 - DNA, 597 bp, Homo sapiens
tgcagtagtgtgggttgagcctggcagtgggcagatgtatgctgaatttcctcttggcctgaggcctggttatcaaactgatgtagtccccggagtcttctcaaatgcccacagagctggcccgacagaaacagtaaagtgttgggattagcaaggggtcaagaagcagaaagccagctccattactctcttctgcagaaatcacctccttcgacagccccagaggcagtgccttgggttagtttcctcagaaatggagcttgagaaaaggattgactgggggactgctcccagataaaacctgtaagggactgaggagttagaatggggcagagaagaagctgggcaaacatatagcttcagctgaagtctaactcagcctgatcccgtggggagctcacatgcagttgtcccaactgcagggaagccctttggcctttaggtccccatgtcagtcatcactggctgtgggctccccttaggggaggacgtaacctcycaggcttttcaggatgaggtggctctggagaaggaagtctctggagaaagaaacagctgtgtcattagcagtcagcatgcactgcagatgggggatgg

SEQ ID NO: 900754 - DNA, 650 bp, Homo sapiens
tccctacctacaggaatacgcttactcaggcactgacacacttaatcacccctttgttttaatgagtgcctacaacyttcccagcactgtgttgggtgaacaggctgcacagacatgattaagatacaggtttggctttcaaagaggtatgagtatatggatgagaggaaaataaatcatttttttcttttttaaaattattatactttaagttctagggtacatgtgcacaatgtgcaggattgttacatatgtatacacgtgccgtgttggtgtgctgcacccattaactcgtcatttacattaggtatttctcttaatgctatccctcccccatccctccaccccgcgacaggccccagtgtgtgatgttccccatccaagtgttctcattgttcaattcccacctatgagtgagaacatgcggtgtttgcttttctgtccttgtgatagttttgctcagaatgatggtttcccgcttcatccatgttgctacaaaggacatgaactcatcattttttatggctgaatagtattccatggtgtatatgtgccacattttcttaatccagtctatcattgatgaacatttgggttggttccaagtctttgctattgtgaatagtgccacaataagcatacatgtgcat

SEQ ID NO: 900755 - DNA, 708 bp, Homo sapiens
ggggagtctgtcttcctctttgttaggtctgccgggtgaagagaaggcagctgctgcttcaacaggtacctctgaycaggaagcagcagtttcttccagctccttatgtggacctggattctgccaggacacgaacaaacaaacaacaacaaaaccccatcatttatacggggtcaaaacagggttcacatggtgaactcatctgcagagtctaaattctgagatgcttaccaactttggaaccacccagaagatcaagggggagatgagcagttttgaatttatgactgtcctgacacatccaggacagtttcaagccagcattaccctaaggtgacccagcttgcagtaatgaaagagactagactccacgagcacttggcattaggaatgatgattgactccattttagtaacctgatgttttgttggtattgatagctctggatttttttttaagcatatttatcgtctaccttagtttattcactaagggcactgaatttaggttagaacagcatcccaggtttgaattgcatgcctactccatatttgctctgtgactttaagccagttacttagcctctttgagtatagttttcctcatttctaacatgagaatacgacctgccttccagggttcactctaaggattaaatgtctatgcatagtatgaatgcaataaatactatttattgtcatttcccaa

SEQ ID NO: 900756 - DNA, 633 bp, Homo sapiens
gaaaatcatgtaatttctccaaatccattctgtgcaacactagtctcatgagttgcgttttgcaaaacaaatgttttcctgatcagrtaagtttgggaagaatgacatattctcctcttggaattttcaagcacactaaaggtgctgagaagtccagtaatgaagaaacctgccttaacttgttctgttacacacagcatttccaaaacctactcaaataatcttttctacacccaccccaaacaccttttaacatttggctgaatacttccaagaaaactgatgtggtccaaatttcccattatatggatttttaaaactagactctaagagaggtgaatttaccccagattacacagctgttaaagacagaagtatgtgtggcatcacccttgattccatctccaaagacaaatatccctaaaggacttcagctctctctccctaagcccatgtgtagtctcagaatcttgtaaaacacagtcaccccatcaacagaagctggcatgtgagagtaaatttacttgtcattcctaaactggcttccacgtgtttggactctgggtttctaaagtaacaatgtcatcgtcattatcatcatcacaatcgttgtcattggtatcacactgtcat

SEQ ID NO: 900757 - DNA, 651 bp, Homo sapiens
tcagtaaccttgcatgtcagttcmcaaaattgtcaattattttggattttctacatagatgattatgtcatctgcagagaaatacagttttatttcttactttctcatctgtataccttttatttcctttatttccttttcttgtcttactgcattatctggtacttccagaacaatgttgtaaagtattggcgagagggacatctttgccttgtccttgatcttagtgggaaaacttcaagtttctcaccatacttgaggatgttagctgtaggttattgtagatattctttattaaggtgaagaagttcttccctatttctagtttactgggagtttttgtcacaaatctgtgttgaattttgtttactgaaagttatcacaaatgggcgttgaattttgttaatttttttgtatatattgatataatcaagtgattttttttagcttgttaatgttatggataacattaattgatttttgaatgttgaacctgccttaaatagctgaaataaatttaacttcatcacagtatataattctttttatacatcattggattggatttgctgatgttttgttaaggttttgcatctatgttcatgaggtatattggtccatagttttcttttcttgtgatgtcttaatctg

SEQ ID NO: 900758 - DNA, 612 bp, Homo sapiens
acagcaccatggagtctccttaaaggggtaagtcaccctaaatcagcagttaaggcaatctttgagcaaacatttgctgtacatctccaagtaaatagatakatgagtcaatatgtgtggcttcaaattatgccagtttgactttccctcaggcatcagaaattcattgaatatctaatatatgccaggtatagtgctatgttgtatagcattaaataagatagacatgaatcttctccccaaaatttaaaatgtatttggcaaaatagaaaattaaacaattaattacaataaagataggtactatgagagagcatacagtgggcctagtctggggagtagagtcagaacacttcaatttttgttaatcttgacataattttttaattgaatttttgaggtatttttacatacaataaaattcaccaatgtcaagtttactatttgattaatttggacagatgtatacaattgtgtaacctctaccacaatcaagaccattttcatcactcctaaaagttctcttatgcccccactgtaggcaatctcatcccccaacccattcccaacttctgacaatcacttctctgctttctattactacagttttgc

SEQ ID NO: 900759 - DNA, 582 bp, Homo sapiens
gtgagtgaaaggtggtatctgagctaagacctcagaaggtgagagagtgagccaagcagacagctgagaggagagyaatccaggaagaggaatccccagggggatgtgtcaggagtatttgagatcagttgtgtctggagcactggaggctggtggacataagggcaaagagtgtagccagggtgagggcagatcacataggccttaaaggattaccgtaaggagttgggcttgttaagtaaaaactatggaaggccattgttttggactaacctcctgcactaggtcccagctgaccagaccaaaccaaaatggaatctgtcgtattaaagttccatgtcctcaaaccaaaactaagttgttatctgacctttgagactcctggagacagagttaacagccaaattcccaaacatgacagtttcagttggcgtaataatgcagacagtaaccatgctcatgataatgaagttccccgttttaatcattattaaaaagtaacctgaagaaaactgatgtcaaccaccctgttccggccgcatatagaaagtaactttgaaatgatgaatctggccctgtgca

SEQ ID NO: 900760 - DNA, 597 bp, Homo sapiens
cacaggggtgatgggggtcagacaaaccctgcaggtwccccaagggcatttggctcaacctaagtaagagaatatgaatttgagggagaaagccgaggtgtctggggagtgtggtcacaattcagagaagggcaggtgtgggaagtcctccgtgcctcatgaccgctgatggggacacactgagtcaggtgtgggacgagggacagcactgggaggcaggggaggcatgtcctgggatggaggccctgggggcagtctgaagggtgaatgcggacgaggcatccaggcagatggtgtgatcaggagccccacagacagaggggaactttgaagctcagagcggtaagcaagtccatcagggcagtgcagagagcatcatgcttgcccttggtggagggtgcgggagagggacttgccccacagaggcgggcagacagaacccctcgagggacagagcaggaaagaggacaaggggtgggggtctcagcaggggcaaggcttcactaaagaataggggaccacggggtgtggagacacactggaatctcgtggaccctctgagcctagggtctgggtggtgcctaacagcaatgaaag

SEQ ID NO: 900761 - DNA, 660 bp, Homo sapiens
ccgcacagccggctctgcgtgaattactcttcttctattgcaattcccctgtcttgatcaatcggctctgtcgaggcagcaggcaaggtgaaccccttgggtggttacaattttgctccttcaacaaaactccaagttcctctttgatagtggcaaacaccagttgccgtattttctactgttactggcacaaaaagtccctgttcacagccctgctggacgtaagggcccaggtgctaaaaagttaccccccacctcaccccagcctcatcagcgggactggatactggcagtgggcagaggaatgaaatttatttatttatttttcttatttatttttgagatggagtttcgctcttgtcacccaggctgaagtacagtggcaccatctcagctcactgcaacctccgcctcctgggttcaagcaattctcctacctcagcctcctgagtagctcggattgcaggctctcctgccgccacacccagctaatttttgtatttttagtagagatgaggtttcaccatgtaggtcaggctggtcttgaactcctgacctcaggtgaccaacctgcctcggsctcccaaagtgctgggattacaggcaggagccaccaagcccggtcttttttttttttttttttttttttaacatgtcatg

SEQ ID NO: 900762 - DNA, 577 bp, Homo sapiens
aatttgctttgctggtttaagcattagaatgcttctaagatttatgcttttcagccacatttttaataaaatcmtccagcatatttactagtatagtattgctcataacattctcatatttttaattgctcccatgctagttataattgttttcattccaagtttctttaacttttttctgtgttgattagacttgccagaaatttatgaattcagtatattttaatgaaataaaacactgttacttttgaatgctatagttatccggttttcttatcacctaatttctgcttttacttttctaattttcctgtatttctttttttctataatctgaagttaaattcttgagagtgctatctaaggctcttaaggccttttttacttctttcattcccttctttacttcctctttttaaatatatcctactgaagaaagagcatttctccctatggtcatgaggacattctataatgaaggatttcagcataagaattatgatacaagaaaaagcccattactttttgccccacttacattgttttcactcaaagctttatatgttttttcttacag

SEQ ID NO: 900763 - DNA, 615 bp, Homo sapiens
gccaaatatatggacacttgaaactgttgtttatgcctacctaattcagtctatcagcattccaaactcctcaaagaaacacaaaattatttkcccagctagaatcaggtattcattctcaggcttcccaatctcttgcttcatgtaaacagctgtattggaggttgggtgtggatgtgttaacaagaaagagagtaactgagatctccagcaacaaatcaaacagaaatttaaaaatcgttcatgagctaaatgcatttattatatattttggatttccgtcataggggacgtaggcaattacttctttttagctggactttaggtgtccaaagtgtaaaatatgtctatggggaaaggtaatacacatgtgggtttagttattctatccataatcatcattgagaataaaaattaggtttgtatttctcctacatccattgtcattatattaattatgattatgattatttcaagtttgaaagataatgttctggaggaggacatagtggttgctataaacataagcaatgcaagtaagttgcaaaaaaactacttattatgaagttatgaccatctaaaaatatttcaaaagtaatcatgtatgtcttcaaa

SEQ ID NO: 900764 - DNA, 594 bp, Homo sapiens
tccattacttagctgagtgcaggggctggattcagggagtgggaaggaaaagctaaaatttcaatagtttttacttgttcttaatcttcttygattttgttctaattttacatcttcataggatattggatttttacatctgcacacttacctggttaatgttcgttaaaagtacagcagtattctcacaagttgatagacataagaaatcaagaaaaaatgtagagtacaagaaaatttctacgaccacatggctctatatttttttggattgctttagtgtgttataactgaaacactgcagtaacctaagtttctagaatgttcctcagtgaatattctctagtagattgtctaccctgacattttgcataccagtggattttgttggaactatttttcaaaccagtgatgaacccattccctccattggttcctctcctggcactggtgttctaagttcttaatctgtaagatctccttactgtgttctcatccccttggtttatgatgtgcaaggctcttacggtatgagctattgaggtaacttacaaccctctcacagcactttaaacaaacacaagctctcgtaga

SEQ ID NO: 900765 - DNA, 636 bp, Homo sapiens
atttaaaattaagcactcaacacttttaaatattaataactattgtgaacacctactagcttctttggctgaattacctactaatatactaaattttttaaattttctttatttcttgataattttcttaagatatggctttgtaaatgtttaaaaaaaatccaactctagcaagatagtcaaattcacatcttatacagttaaagtctctatggatactcaattattgattaccatctccctctgatatgtttctttgctttacatgatattacacactctgtatttctgaccctgactactcattctcctactctgatttccaaaattcagcatggcctccagttctgttcttggggctccccctcctcttcttatacatggctcttgacctcatgtagtatttttatcacgtatttcctaaatgttaaagtcaattatccttgaataggtttgcatgttaggtacatgagccaaaattcttagagattcaactttcattgaggagtagacttggaaataaaatgtttaatttctggctcttygccaggcttccagtttctataatcataaattcttgatattattcagaggccagaggcagattttaaggtaattatacaattagaactgttt

SEQ ID NO: 900766 - DNA, 626 bp, Homo sapiens
ttccgtggttgtctccctaactggccataaattagcccttgctgagtttctctaccaaattttacagctcttgtggagcagtactctcttgtagttgcagctacagcaccagcttcagcccgctgtaaatttcagtacatgttccttcccactgcctcaagccaagtaatattcatatctcctgctgttgctcagctcagggtgcttccatatgccttgttggtttctttgaacttgtccttatactttgaaactgcccttgcattaaagtctcctaaatcactacattttgagtgtgccactttttcctgctgataccaacgttcatactacttaatacttaataacaatttaattgagtaagaaaaaaagccacacttaactgtgaaaaataaaagtaaatttaattttacagctgtcaaatttcaaatgcctgactagtatttcaggagtcagctgtctaagtagtaatcctatagagatggaagaccaaagaggtatctgggatggayattgatttgcagtttaataaaatttatgaacctggaaaaacctgggctttgtttaacaatctgtaaaattaaggaaatgtattcattatttcctctgtgctttcatccctgtga

SEQ ID NO: 900767 - DNA, 574 bp, Homo sapiens
atctgggtgagccatagttttctcacttgtaawataaaggtatatgttaattgaaattataaagactctttcaacttttttaaggttccttttctccacatatagttcaaattcctgaaaaaaaaattactaaaattgaacaaaatgattctatatttgagacatcagttagtcctgttattaaaacttaaacactgttagcaatcagcaagcaagtttatttatttggggcaattatgaaaccaatagtttctaagtttacttttctaaataaatcaaccttatttgttgagaggtggcaatttgaagactcttctcacttgttaattccacattttgctcctgttacctctacaatagagtttctctagagaaaatatttactttccctagggagactggcatagcaagtttgaccagtgtaaaagtcttatcagtttcaaaagataacagctgcataattactacattaagagtttatctgagcagacagccatggaaaatgtttataattttatttaagtagagttgaaattaatcatctaaaatcaagttccctttcacttacctttca

SEQ ID NO: 900768 - DNA, 612 bp, Homo sapiens
aaagcaaaagtccttactttccccataccccgattcctctgcctaggggkaattgtctttaacatattaatatgcgtcctttctgtctcccacaacctaaaaataaaagatatagttgaaattttgttagtaaacaataagattctaaccaatccttttcagatgtaaataacttactgttcataatgatagctttacttttggcaaattatatttcctaatttcaaatattgggtctcttagatcatgtgaggaataatatagcattgtatgtatatttttcttactggtttagaatttaataaaaattgttaaaatttactgagtttaaaagttactaaagtttattactgtgtgctaggtgctttgcctaaattagcatatgataacgtgtttaatcttcatgagaaccttttaaactaggtgctaaaactctccctattggacagttggtaaattttaggcaccgagaggtcaaataaattggctaagaccacaaagctactaagtggtgatgctaaaattcaaacccaaaagtcaagttccaagatcccagaaccagaactcttaaccactatgcagtactgaagataatgagctagtgaaagagca

SEQ ID NO: 900769 - DNA, 562 bp, Homo sapiens
ctcaaactcctgacctcaggtgatctgcctatcttggcctcccaaagtgctgggattacagacatgagccaccatgccctgcctgacgtgttttattcttgtcttcactctatccactcgttttgggttctttggcttcatacttctccaagaacaatgcttcactgtgaggtgtagggaggcattctgaccagcctctgtgtccctgagctggcatcagaatcctccacagaagaggtggctgaccttctctttattgccacagcatggacttctgtcattggtttcctggggaaaatgtgcactgactgagagtatggaagtagtctcaggctggctggagggaggggcctcctcactccaagcctctgctctactcaaacgcagacatcaggggctcaagaagggaaactgggtgaaaccattgttcatccaaaaatcaactctgtcatgctcatttctctatcctttcctcactytagaccaggctttcctccagctgccatggaggggaccaggacaagggaggaggcagcaagcaggagctcacagtggtggaaac

SEQ ID NO: 900770 - DNA, 530 bp, Homo sapiens
aaaagggaccttgcagatatgattaaggctaaggaccttgagacaggggattatcctggattatccagtagggcctaatctaatcatacatgtccttaaaatctgagaaagtttcttggctgccatcagagataggatgactcggataagggaagacaggcaggagaaattagaagtgttaaaagggttccacttgccattgtgggcttggctttgaagatgaaagagggtgccatgatccaaagaatgcaggtggcctcttgaagctgggaacagaaatacacagattctctcctaaagcctctagaagaaaacacagcccagccaataccttgattttagccctgtgagatcttgctcaactctgacatagagaactgtaggatagctttttttgtgtgttgttacaagcaattaaatttgtggtaatttataatwgcaacaataggaatctaaacaaagacactgggttggagagagggttgagcagtttggcccagtaaaactgcatgagttatttatgggttgag

SEQ ID NO: 900771 - DNA, 606 bp, Homo sapiens
accgttttttccttattttttgcttaattttwaaaaattgtcatttaattcttaaattgtcatttatttgagatggaaatgagatttaaagttagttgcctttgcatgtaaaatatataacttgcaaattaaaatatttttatttttttgaacaagtggaagtaaatttgttttacataaatcttaattttcaactttcctagatactgtcacacgtgcccatgttaagagaccaccaaacaggctttgtgtgagcaagaaagcttttcaatcacctgggtgcaggtggactgagtctgaaaaaggagtcagcaaagggagataagggtgggcagttttataggatttgggtaggtagtggaaaattacgtcgaaggtggtttttcccttgcggggcaggggccggagttacaaggtgcttggtggggaacttctgagactcattgtccaggagaaggaatgtgacaaggtcagttgatcaattagggtggggcaggagcaaatcacaatggtggaatgtcatcagttaaggcaggaactgcctattttcacttcttttgtggttcttcagttgcttcaggccatctggatgtatacgtgcaggtc

SEQ ID NO: 900772 - DNA, 631 bp, Homo sapiens
ttacatatgaggacctgaatcttagaaggttgagtcctttgccaaatgaaagcttaacagtaaagaaacagtagaatccagactgtctggttccaaaacttgtgcttttagccacttcacatattgcttctgtcattggtatgacagatgtcacaggcagatcatactcaaattctgtaatatgttctaaataatacaaacaatataactagaaaatggtagctaacttatatagcaggccccactgaaataattcaaacataaaaatgacctcttggcatttgattatctttcaccttagacgttgataaaccaaaccattcccttaggacaatatttttctgtccagcaaagcatttctcttgccaaagtataattttgttggctacatctatctcctccaagccctggaatcagacctaagctagtaaattgtgctgtcctggcaagacactcatcctccagggcattgtatcaggctaaagtaatacatcatgttgcttcccactctgtctgcccatttctccaaagagtcctaaaacagtaatgtttctgctttgmatctcttgctgttatcgcccctaggacttgcactttagcttcctggccttggaaaccaaggtgagctgaa

SEQ ID NO: 900773 - DNA, 644 bp, Homo sapiens
tactgctccaaatgtatgttttgtttctaatctcctttatgatcttcataaaagagtgcccaaaaagttcatattagattctgcccatgatttcatttcaatatgaattttagacacttgtaaaaagcagtgaccctttgccaagtgctttttcgaggagttctcacaagaagtcaaggactggcactgagtttgccaaagggctttgaaatctcttatctggatgctccattgcccatctgtaattcccagaaagcagccacagtgaaatttttaaaaggtgattcccatcatgtcagtctaccactgaaaaccctccaatgtccttccattgtgctacaaataaaactcaaactcccagatggggcccccaagtccctgctcatcctcccttgtgttcttctttctaggcttatttcttagcatctctcctcccactctggccttgtttcatttcactggccccagaacataccagccccttcccacctcaggccctggtagctgcttttttctcttcctggcctgcttttccccagatcctcccaaagctggyttaacctcacctgttggaccttcaatcaactgccctgggacaactctatgtaaaatgggcctcttcccattactctccagtccatcac

SEQ ID NO: 900774 - DNA, 606 bp, Homo sapiens
gtgaggcactttgccttcactctcattcaatcctcagacaactttatttgtatcctcattttacaagtggggaaactgaggaccattgaagttacacacagatagtaattggcccaactgggattggcaaccacacaggtaccccaggactctcaatgtggcttccatccctgctctcctctccttgtgaccagagctgagagaagtccaggtctctggcttctgttcaggatgcttagaaaaaaaaaatccaccttttaaatctctttctttctggctaggaaaattgtccataaggaggtgaaataggccaggccagaaaaaaaaattatcttttttatgaggtgactgctactagtgtgaaatcttcctttcaagaataaaatatcaggcctgttgtggtggctcatgcctgtaatcccagcactttgggaggccaaggcaggaggattgcttgaggccaggagttcaagaccagactgggcaacatgtcaagayctatctctaaaaaagatttaaaaattaacggcatggtggtgtgtgcctgtcgtctcatctgctagggaggccaaggtgggagaatggcttgagttcaggagttcgagg

SEQ ID NO: 900775 - DNA, 714 bp, Homo sapiens
acaactttcattaaatgcatttttaagtatttatgttattacaaatggaactttaaaaaattattgttgatatataaaaatagaattaatttttgttcagttttaataatttgtgtctctgaaggaatttgtccatttcatttatgttgtcaaatttattggtatgaacttatcataatgttccctaaattatccttttaatgtctgtaaggtgtataataatgttcctctttcattcctaatattggtaattgtcttcttccatttcttcttgatcagtttagctacatattttcagctgtattaatcttttccaagaaatcggttttggttttattgattgtcttttttgcttttgtagtttctatttctttggtttctactgttatctttattgtttcctgtcttttacttgctatgggtttaatttattcttatttttgtggtatcttagggtggaaacttagagcattgatttgagatctttcttattttctaatataagtaatggaacctgtaaatttccctccaagtgctgatttagctacaccgtacacattttgataatgatgtttttaaaatttttattgtgttcaaaatattttctatttttttgtatttgttccatgactcaawagctatttagaggtattgtattagtccattttcacactgctgataaagacataccgaagactgggcaatttacaaaag

SEQ ID NO: 900776 - DNA, 507 bp, Homo sapiens
tccatccttatttacagactctggastcagttcgaatacacagtgtcacattagagacatacattctgacctgctgacaaaatataagggtcaaaggatcaattaagtcatcttaactcatccgtggcagggaaaatatttcagctaaaacatggatcttgattctgaaatgtaagacagctgagctaaatcagttcctgtattcacagaaaacagcatcatttcctggcttgttgcccagcctttggaggatgtgactgatgaaaggcaggcagaaccccacggtgggaaaagaggagaaagaaatatttattaagcacttactctggccaggaggcctacctggccatttcacacaagtgggtcacctcacgtcttttaatccccagaaacctacaattactgcatggaatggaaaaggtaggatcagaggccaatttactgtcattcttccgcctcaggactcctcatttacatgtgtcccttctaaataagtactcattttat

SEQ ID NO: 900777 - DNA, 358 bp, Homo sapiens
caggggcaaaatgctgccagtctctttgctaaagcaagaatracctttattcccattccctgcaagttcctcatctccatctgagaccacatcagcctggacttcattgtccatatcactatcagcaatttgatcaaagccattcaacaagtctctaggaagttccaaactttcccacatctttctgtcttctgagccctccaagtctctaggaagttccaaaatttttcacattttttctgtcttcttctgagccctccaaactgttccaacctctgtctgttacccagttccaaagctgcttccacattttcaggtatcctcatagcagcaccacactctctgcagtatcagttta

SEQ ID NO: 900778 - DNA, 640 bp, Homo sapiens
gacaaagaaggacatggcataatggtaaagggatcaatgcaacaagaacagctaactatcctaaatgtataagcacccaatacaggagcacctagattcataaagcaagccctcagagacctacaaagagacttagactcacacacaataatagtgagagactttattagacagatcaatgagacagaaaattaacaaggatattcaggacttgaactcagatctggaccaggcagacctaatagacatctacagaactctccacccgaaatcaacagaatatacattcttctcagcaccacatcgcacttattctaaaattgaccacataattggaagtaaaaacactcctttagcaaatgcaaaagaatggaaatcataacaaacagtttctcagaccacagtgcaatcaattagaactgaggattaagaaactcactcaaaccacacaactacatggaaactgaacaagctgctcctgaatgactactgggtaaataacgaaataggcggaaataaataagttctttgaaactgatgagaacaaagacacaacgtaccagaatccctgggacacagctaaagcagtgtttagagggaaatttatagcaygaaatgcccacaagcaaaagcaggaaaa

SEQ ID NO: 900779 - DNA, 497 bp, Homo sapiens
tctgtaacaacttatagacttttccctcattgtagggactctgagatcatgcaagaaaagcagaaggcagctaatgagaagaagtctatgcagacaagagaaaagtgatgactggctatttggaaaacctgggtgctactgccaactgggtgtatcataagctctaagatcaagattttgtagagtggacagtcattacatatgttataacttatcctttaaaaactattttaaactttatcctttcagctttacttagtgcgatgttttagaagcagtcttcaaagaataaaacactaaccatgcatgtgacatattggtgaacattatttttattattgaacattcatatataatttattaggtaatatgatcagataataggatctcttatataataaagaatcttagtcatcagctttgttaacatagtttttttttcctcacagtttctaaggataaggataaartagatctttgaagtaaacttaaatata

SEQ ID NO: 900780 - DNA, 620 bp, Homo sapiens
agttttcacccattttatctccctcaatgtcatgagaacttatacatgcttacagctttgaatatttctatgagagaagaaaggaaatatgcttctcagtgtcctaaatgtgaaaggaaaggtaggacttaaatatcatcattgttggtatttggtacacaaaaaaaggagcattggactagcttgcatcatggagcttaatcacagataaacctcttatagggtgatatggtttggatatgtgtccctgcccaaatctcatgtcgaattgtaatcccagtgttggaggaggggcccggtgggaggtgattggatcatgggggtggatttgcccctgctgttcttgtgacagggagtgagttctcaggcaatctggttgtttaaaagtgtgtggcacctcccgctttgctctctcttcctcctgctccagccatgtaagtcgtgcctgcttccccttggccttccaccatgatggtatgattcctgargcttctctagtaatgctgccagcctgcagacctatgagtcgactaaactctttcctttataagttgcccaatctcaggtagttcgttctttacagcaaggcaagaatggactaatatatagggctgtcttca

SEQ ID NO: 900781 - DNA, 629 bp, Homo sapiens
accatgattcttgaaggctccccagaagccaagcagatggccggcatcatgcttcctacagcctgtggaactgtgagccaattaaacctcttttctttataaattacygagtcttgggtgtttctttataacagtgcaataatggactaacacaaacagaatgatgaatctcaagaataacacattaataatatcaagatataatccaaaattacctaacatagaataccagaaaaatgtgatgcattcctaaaggtaaagaccatcaagaatccaaacctgagatgacacagatgtgggaattagcggacaatgactttaaagtagctactataactatattcaataagataaaggaaaacttattggtaaggaatgaaaataaaggaaatcttatcagaaaaaaaggaaaatataagaaagccaatggaaattttagcaataaaaatataatatttgaaattaaaactcactgcctgatcttgggaaaaatggagctaaaagaggcaaaagtcaatgaatctgaaaatagatcaatagaaatgatccaatctgaagaaaagaaaaagaactgaaataaaataaaaataaaataaatctcagagacctattgaacaatatagaatata

SEQ ID NO: 900782 - DNA, 590 bp, Homo sapiens
attgatctttcatctttcccactgtgttttctttgttagttttacaatttcaggtctatgtttaagtctttaatccattttgagttgacttttgtatacagtgtgagataagggtctagtttcatttttctgcatctggatatcaaattgtcccaccaccatttattgaagaggctgtcctttttccattgtatattcttgatacttttgttgcaaatcagtggacagtaactgtgtggatttatttctgggagctgtattctgctccattggtctacatgtcttttatgccagtaccatgctgttttgattattatagctttgaagtatattttgaagccaggtagtatgatgtcttcagcttcatttttttgtttgtatgttttgttttatttatttatttactttgctcaatattgctttgggtatttggggtgttttgtggttccatgcaaattttagggaagttttttatatttctgtaaaaamttcattgaaattttgatacgaattgtattgaatttgtatattgctttgggtaatatggacattttaaacagtattaatttttccaagctatgaacataaaa

SEQ ID NO: 900783 - DNA, 635 bp, Homo sapiens
ccaatttcctctgcctgtcacctgactgctaagccacatacaatggggctttgttatggtagccgatacagtttggatgttttcctcctccaaatctcatgtcraaatgtgattcccaatgttggagctggggcctggtggggagacattggatcatggggatggatccctcatgaagggcttagtgccatccccttggcgatgagtgagttcttgctcagttatttcacatgagatcttgtttaaaagtctgggacctccccaccctctctctcttcctcctgttctcaccatgtgatatgcctgctcctgcttcaccatgactgtaagcttcctgaagcctcaccagaagcgtagcagatgttggcaccatgtttgtgtagcctatagaactatgagccaattaaaactcaataaattacacagtctcaggtaattctttatagtaatgcaagaacagcctaacacagcaacacccatatgtggcatcatatgctggttttgtcattagctagtttatgctacagaaacaagctcacccctcaaatatctgtttattagtatttaaaagctcattctttactcaaagtccaccataggtctaatgactttctatgacacctcccttccaagta

SEQ ID NO: 900784 - DNA, 692 bp, Homo sapiens
gatcaactggaagaaggggtatcagtgattgaagataaaatcaatgaaatgaagcaagaagagaagtttagagaaaaaagaataaaaatcaaggaacaaagcctccaagaaatatgggactatgggaaaagaccaaatctacatctgattggtgtacctgaaagtgacagggagaatggaaccaagttggaaaacattcttcaggatattgttcaggagaacatccccagcctagcaagacaggccaacattcaaattcaggaaatacagagaacaccacaaagatactccttgagaagaccaactccgagacacatgattgtcagattcaccaaagttgaaatgaaggaaaaaatgttaagtgcagccagagagaaaggtcgggataccaacaaagggaagcccatcagactaacagctgatctctctgcagaaactctataagcaagaagacagtggggaccaatatttaacattcttaaagaaaataattttcaacccagaatttcatacccagccaaactaagcttcataaatgaagaagaaataaaatactttacagacaaacaaatgctgagagattttgtcaccaccaggccttccctacaagagctccygaaggaagcactcaacatggaaaggaacaattggtactagccactgcaaaaacattccaaattgtaaagaccatt

SEQ ID NO: 900785 - DNA, 663 bp, Homo sapiens
atatacacaaggagttccaaaaatttattggtaattgtcataacttttggtaaacttatgtgcatgtgtgtctcaaactctgacttttaggagaaaaggtagaatcatgtatcaaaaaatagctgtattaatttcattagacattcacccttatatttaatgagagagaaaagtatataccagtaaaagctaattatttggcagctagcatataattaattttttggaaatatgagatagaaaatatttaacattagatgaaataagacaaaaattgaccatagttgggatatatagctcatgatataatttgataaaatacattttagatatcttactaagcatatacatccaatgtaaaaaaattattaaaattatccaagagttttctagtgtattttgaagatcatagtaatgcagaaaatactccatttacatttgaaagaataaacacagaagtctatactattttgactatttgtgtttttctttttagggtcgtgacattccagggaagactttgagaatagctgattattataacttttatttaaatatgggatgggggaaaagctstttctggagttcagtaattttctgtgctctttggtttggggccctgggactcttccttggaaataaggtattctgaccatagctggg

SEQ ID NO: 900786 - DNA, 537 bp, Homo sapiens
ttgctcaagtcttctgtccattctctattggattgtgtgtgtttctctggtgacttatagtaggtctttgtatattctgggtacaattttgggggctcayttttagggtgtaacaaatcacttctcccagagtgtggtttacttatttattctcttaatggttttttgttttgttttgcttttaaacagaagtttttaactttaatatactagagttaaatttatcactttttctttatggttagtactttctgtgctatgtctagtaaatctttcactaccttgagatcataaagatattcttcaattttgtcttttaaaagtttcatacttttgcttttaatataactcctaatccacaaggaattttttgtttatgtgtgtaaaagggatctgtaataaataatctaattccatttttgatgtttgactaccaacagctttcaggctccacccctccccctttccctcttgcccagcgatctggcaaagctgattagaaaccccaggtgccccctcccttggtgccaaggagaa

SEQ ID NO: 900787 - DNA, 644 bp, Homo sapiens
aaagcaggatagaggttgttttgggtggggggtwtcttgaggagtgagcacaaatggggcttttgtgtgctgattatggtctgagcactggttgctttggtaggcttgctttgtgaaagtttattgagctgtacgctgatttgagcacttctctacttctttgttaagctcattaaggagtaggacaatacagaacaaatggttcttctcattgactttcaagtgaaatatgagactgggtatctctagtggtttgttaaggaaagcattgttaggctggcaactttttttttttctgcatccactgtattgtagtgttgatttggattttattgggtttcagtctccaaataaaccaataaggggtcaaacatccaacagatcagtggcaatcagcaacagaacaaaaacaacaaacagcaaagcaaaacaccatcaacactgcagtgctataggactgcatttgattgaaaaaagaatcctcatgctccactaagccagaaaaagctaccagtataaggcattgtttccaagaaaacttaagaggaaagtgaaagctaaacattgctatcactgaagccaatgttatctagacatgttctttattttccccggaaataccatctaggattatgtcacgaggt

SEQ ID NO: 900788 - DNA, 646 bp, Homo sapiens
gaactttcttgtttgtgacgatgtgggggtaggaaccctcatgtaatgcaggtgaaaatggccacggcatctctgaaaggtgctttggcaaaatgtattagatatatttaaactatacacaaagctttatcttttctctgtttctacaaaggtatgcttcttacagactcttctcccaggtttttttctttttgctaatgagcagttgaattttccttctgtgggatgcagttgtgtgttataagttttactatatttataatttgtattgaaatgctgctacagattttttctaccctgcccatagcccacgttattaacatttctaacagcacgttagtaccaggctcttctcaaatagaattaaatgctagagtggggagggggttggaggagaagggggaggaagaagtgtgggctttggtattaggtaagggtttgaatcctagcagtgtacctttcttcctgtgtggttttgggtaagttacctaacctctctgagccttagtgttgtatctttcacctgggactagtgttcaccaagggctattgytgcgataatcaaaggaaggagtgtggatgaagcccctgagcgctgtgcctgggaatacttggtgaatggagctattgttactgggtgtataga

SEQ ID NO: 900789 - DNA, 652 bp, Homo sapiens
ctaagtgactcgcctgccattgaggagtgagcacctctctggatgctgttgggggaggcaagaggtgttgcccatctcaagtgatgggcaagtttgggacacatgagaggggcccaactcagggccaatgtgggcccgttcctatgtgtgtttcaggggcatcacctttcctcctgcccacctcaaaggtggcttttgactttgtcctctaactgaggtagctgggtttgtgtcttttgacctcctgcctcctcttctagggtaaacaaggcagaccccaacaagaatcttgccagtccctgcaggagcagattagtggccatatccctttctggggtcgggaacctgaacctctttcctggaacaggtatttggggctgggtgccctaggaagtgctgtctttttgaagtaagctggtttctcatatttcgaggtgctcttcctcccagagtaccctaggcagagggttatttgggtgttgggggggatgagttatggggcaaacgcgctgctttgtgagcattaggaagtgcaggtgaatgggctggagctctcctgtcctccttcctgtgttggatagcctctgctgcgaggggtggctrggggttgagtggggaaggatggggcctgaggagctgggagggcagggcg

SEQ ID NO: 900790 - DNA, 594 bp, Homo sapiens
cagcaacccagaaaagggaccacattcgaacccaatcactctggcacctggatctcagacttccaaccttcagaaaccaatttctgttgtttataagccacctagcctatagtacctcattataasagcctgaactaagacagtacccttaatcatctttatattccattcttcctcaaaagagaagtaatgataacttctctttatattccacaactcaaagagaagttatcattcaatttcattctattgcttccccctaggatgccattccttgcttccctattgctatggtttgagtgtgttctctcaattcatgtgttgtaaactttattcccaatgcaactgtgttgtgagatgaagcctaataagaaagaattgtgtcacaaggacagagtcctcatgaaaggattaatgtctttattgtggtagtcggttagttattgcaagagtgtgttattatgaagggagttcacctttctcactatctcccacatgctttcttccacctgttgccttccaccatggagtgactcttgccagatgacagcaccatgctcttggacatcttcacctccagatccatgagccaaa

SEQ ID NO: 900791 - DNA, 707 bp, Homo sapiens
tctccccaactcctaaccacttacataagaggaaagaagaggcagaataagttttaggtcttaaaattcccttggcaggccatcagaaggtgccattgctctggayggctgtctgtagctaaaggaggtattgagacagacaagtggtcacctttagtattctaacaggtttgaatttttacctttcgagagctactaactttgggagaaaatacattgagatcagttatttaccaattattgacacaaagagtttgaaaaatatctagcacatggctaagagaaatttatgtgggggagctgtgacttagaaataagacattggccgagcacagtggctcacgcctgtaatcccagcactctgggaggccgaggcaggtggatcacaaggtcaggagattgagaccacgctggccaatgtggtgaaaccctgtctctacaaaaatacaaaaaaattagccgggcgtggtggcatgcgcctgtaatcccagctactcaggaggccgaggtggaagaatcacttgaacccgggaggcagagattgcggtgagccaagatcatgccattgcactgcagcctgggtgacagagtgagactctgtctcaaaaaaaaaaaaaaaagaaagaaataaaacactaaaattcaactctgacatattttcagctgtgtttgttttccatgattacacattttgaagtgtgatcctg

SEQ ID NO: 900792 - DNA, 660 bp, Homo sapiens
tatatacaaatcaagtaaaatatttgagcctccactttctcttctgtaaaatggggttaataaaaatagttagctccttgggttattgttaggattcaagattaaatgagataatgtgaaaattaaaygagatgtattaaggcattttataaactataaaaccataagcaaatttaacttactgaaagttactagaaaaagatacatgagatatctctgaattatttcctacaaatgtgtacgaatcaacaattatctcaaaaagtataataagagtgataagaacatccctaaagaaaaacaaggatttatttatttatttatttatttattttttatttatttttttttttgagacagagtttctctcttgtctcccaggctagatagagtgcaatggcgcaatgttggcgcactgcaatctccgccccctgggttcaaacaattctcctgcctcagcctcccgagtagctgggattacaggcacccgccaccacccccagctgatttcagggactgattttaaaagagaatgccctctataaattctcagcatcggacaacgttcctgtgtactttctaagtattagcaaaaaaaaagtatatggaatgattttaaatccttttttcccgagtactagctgggcactagatgattaa

SEQ ID NO: 900793 - DNA, 663 bp, Homo sapiens
taagatgtttatttagaaaatacatctaatgaatataacagatggagtagaacataaataaagcaagttggtggtcctgacccctgtgtcatctctcaatgtttcctttttcttttcagtttatgttccactcatattggcttttcatttccttgaatatcaactctaagaagatattgtttcttctgcctggaccactccctccccactaataaactagctcctcaactttcagatcttaggtgtcacatcaaaaaagcctttcttgacaattcaactcaggggtctctgctgggtgcacctatagcactctggtctttccctgtatggcaactcctcaattcaaatacacatcaaaccctatttctgtgcccctaagaaataattctactttgtgcctttaagtaaattctacttaacttaataaagatagtgacaataacctttagaaattactttgtagatttaaagaagacagctaatattaaaatacccagtccagtacatatcataaagtaggtgtcactaaattatagctattataattactgactgaaaaaacaaactaattgcaacatgcatctgcttcaacctgtggtttatataatattttaaaaatcagctcctttttcyagtcaaacatttggatttttgtaatagaaa

SEQ ID NO: 900794 - DNA, 493 bp, Homo sapiens
ttactttatattaaacatcaattattacctttatgatgttcatgcatcataaccatatcagacttcacrggaattggaatgttggcctctggtggtatggttctgaacatatctggagctacattctgggtacaggtcatgaaagaaactgcatgcttggcttccatgtaatacataatgtataagttgcacatttcatcactagacgtgccactgcaggcaaaaaaaagatataacaaatcaactattcacataaaacacatgcttaatgcaagaaaaatgaagcccttagatctgccagcaatggattcaaaggtagaaatattgtgcatttattttatagctttcattaaaacccatcacagttttcaacatcaaaagcacattgtcaaaggcatatttccacttaacaatggagtgtcagtttgcaggcacaccatgaacactactaaataccactgatgaaaatggcattttagtagatgagggaata

SEQ ID NO: 900795 - DNA, 620 bp, Homo sapiens
ctgcagccaattgattgctttctttgagactaaccttgaaagggaggattagttcctaatctgacttcaaggcactattttatgaaatagtttgtaagagtgattggttacattgtatggtgaggcaatttartctcctttgtatagacatattcataaaattatagaacaaaaactgagtcaccagaaacaaaaatctagaattactaaagtcatgtgcataaataagaaaatatatcatgaaaagtatttatccaggagatccttgagagattttaaaagaaagtagaattctacatacacacttcaaaatagttttttcaacaactccatgataagcatgactcattacttaatcaaatatggaagagtcttaaagtttatatcatatttttggcccccgaaaaattacattcaccatatttcctcttctgataatagtagaaaaatttaggcaaatcgtactcattcaagatagttcatatgggcagctcgtaaacttgtttacattgaatcccaccaatccatcaaaaatcttggtttcaccagcatagaaaaagggttttttcctcaataagaaaaatctctagtttgacagctgctctattatatttatcaag

SEQ ID NO: 900796 - DNA, 567 bp, Homo sapiens
ttggaagggacaaaacattctacagtaatacctagggtttccaattccagggtctakaagagctcttcacctgtgagagttttccgtgatggtctgtggttagcccagcttctaggcaaacttttcagagaattccattggcctacattcatgggacaccaataataggcatcaggaacatcctcttttttcactcttctcctttacctttcctgtccactgtgcttgtaagtcctctctacgaagaccactccattaaatgcaaatatggcaaataactcctaagctgccttaaaagcttttttcttctctatcttgagaaataacaagtttactctggatcccagggcaggaacgtgcagatgtgatgtcatgtccttatttcttttcaacaggcattaacaatttcttaatatttcacttttattcagtcactactctttcttcccaacttaagtgttataagctgattttcatctacttgttcacatcatcatgttccttgttttctagtttttcaaataccaggatcttatagtaccataattatatggaaaaaatacacag

SEQ ID NO: 900797 - DNA, 625 bp, Homo sapiens
gcaaggagatctgaacagagaggcaaaaattgcagtgtcgtgagaagccagaatcttgtcagaaaagagagactgttggctatagaaatgtctgaagtgttttttcaaaaccgaatacctgagattaaatgtaaactgctccacctcctcccactgataccttttgttacaaatcttcaggaaacctagaatggaacaacacagcaagggctgctgcctgggcattagaaatagaacaccacacccaatggctaaagctggtggccagagataagaacttagaggcatctctcctgcctagcagactgggccctgtgttttcccgccacttcctttaaataaaccattcaggcacttgcctgtaaactgaaagtgatccatattctgctagctgccactctctctttctctctgcctgacctttcattcctgccttgcgtgaccgagggatggagggctgccctccagattcattgcaccctccctgcccaaggccttaagcaaaaagctttgactttgcttstttttgtggtggtgtattgaattttcaccttccatctgaagaactggggactaccctaggctagattttccaagggaggccaggacgaacacaagagcagtc

SEQ ID NO: 900798 - DNA, 594 bp, Homo sapiens
catatgtttatgtaaaaaattaaataaatcatcatttatatctttttattatttagctttatttttgagggtgagggaagagggaggcactttggagaattttttatagccataatagctgtgttctttggggctagctgaaatttaatcctgtttgtatcctcaagcctattgcagtgatgctagctaatttacccttgctttctttgaactgttgtttgtattcttttgtgtgatccttcaccatacgctatcccatgttgttctcaaattacttctaatatattctatagtcccggaaatatcattactcttagatctgacccagtttgaagcatagagtagatgcacaataagaaatcaattgagtaattggagacatctttggatggggctgaggcacaacccgggtttggaacacaaactctcactgctttgaataagttatagagaagagagaagcaaatctactccatgatggactaagtacaggctttctcatttccatggagaragcagtgacagccacagcatcaaccacacttgaaggaaatcaaatcttgcaaaatggaattcagagggcatcaaatgaag

SEQ ID NO: 900799 - DNA, 607 bp, Homo sapiens
ataaataatgaaatggcttgaccacattgtaccaggaactcagagaatggaagctttgcccctctccttcactccatccccaggatccatgctccccgaggttagcagtgtccatcagaaagctgccctctgccctcatttgtgttttatgaggaaacacaatattacaatgaaagaaatcctgatactttccttaaggcagaagcactgaatttatgttatcttgaacttgaacctattctaggactatgcatatcttcttttggtcaatagatcaaaagcagtgagcacagtggctcacacctgtaatcccagcactttgggaggctaaggtgggaggatcgcttgagccaggagtttgagattagcctgggcaacaaagtgagacccagcctctacaaacataaaaaataaataaattagtggagtatggtggtgtgtacctgtggtcccagctatacaggatgctgaggcaggagaatcacttgagcccaggaggtygacactgcagtgagctgtgttcatgccactgcactcaagcctgggtgacagagtgagaccctgcctcaaaatcaatcaatcaatcaaaagctagttacaaaaaaga

SEQ ID NO: 900800 - DNA, 523 bp, Homo sapiens
aatgccaatctctaactagctttgattatgagtataatagaaattatgtaacggtatataggaggtaattgaaagtagaaataggctgggcgcagtggctcatgcttgtaatcccagcacttgagragttccaggtgggtggatcataaggtcaggagttcgagaccagcctggccaacatggtgaaaccctgtctctactaaaaatacaaaaattagttgggcgtggtggcacatgcttgtagtcccagctactcaggaggctgaggtaggaaaatcacttgaacctgggaggcagaggttgcagtgagcccaagatcgcgccactgcactccagcctggtgaccgagcaagactctgtctcaaaaaaaaaaaaaaaaaaaaaaaaaggagaaataacacaaggtaatccaacttcagctcaataaaaactctgtatcatataaaaaagtaaactgtctcctcttacaaacagaattgaggactataagttgcaaataaaaaactccctttgtcatttgtga

SEQ ID NO: 900801 - DNA, 523 bp, Homo sapiens
aatgccaatctctaactagctttgattatgagtataatagaaattatgtaacggtatataggaggtaattgaaagtagaaataggctgggcgcagtggctcatgcttgtaatcccagcacttgagaagttccaggtgggtggatcataaggtcaggagttcgagaccagcctggccaacatggtgaaaccctgtctctactaaaaatacaaaaattagttgggcgtggtggcacatgcttgtagtcccagctactcaggaggctgaggtaggaaaatcacttgaacctgggaggcagaggttgcagtgagcccaagatcgcgccactgcactccagcctggtgaccgagcaagactctgtctcaaaaaaaaaaaaaaaaaaaaaaaaaggagaaataacacaaggtaatccaacttcagctcaataaaaactctgtatcatatamaaaagtaaactgtctcctcttacaaacagaattgaggactataagttgcaaataaaaaactccctttgtcatttgtga

SEQ ID NO: 900802 - DNA, 597 bp, Homo sapiens
acacaatgagttaaattatatatctgtggrtttctttcaaagctcaaagttgtgtggtctgtaataggtcctgaataactgacaaagttgaaaaatacagatgttgcctaactctccagacaaaatgtgaggtgcaattttcaagttttaaaaaaaattataggatgtactttcagtatttcctgataaattacttgaatctttgaaatgtttatttttcttttaagtcatcccgttggtttaggccttttttttgtgacagaattctacaacatataattgcactacaggtaggtattaagtaaccattaagaaacagcaacaaaaaaagtaacaacaacagactgatgacccatttctctgttagcaaggtatttttgtatagtctattttagtttacattgtaaaatgtatgtgatttaatttctcttgtgtctttggtgaaaccgccttctcagttcatgtctgtattttatgctattaacatattttggcatctgagtccatattcagaattttctcatctcattccaaagaagtaatttttactaatagatggtatttctaataagcttaaaacaaacatttgagacataa

SEQ ID NO: 900803 - DNA, 533 bp, Homo sapiens
agccacaggggcagagctccttgagaccatcggaatccacctcttgcatcactatgacctggatgtgacagctggagccaaaggagaccattttggagctckaaaatttgaccaccctgctggatttcagacttgcatgggccctgtaacccctttgttttggccaatttctcccatttggaatgactgtatttaccaaatacctgtacccccattgtatctaggaaatagctagcttgcttttgatttcataggctgataggcagaagcgacttgccttgtctcagatgagactttggactgtggagttttgggtttatgctgaaatgagttaagactttggagacctgttgggaaggcatgattggttttgaaatgtgaggacatgagatttggaggggccaggggtgaaatgatatggtttggctgtgtcctcacccaaatctcatcttgaattgtactaccataattttcaatgtgttgtgggagggacccagtgggagatcatttgaatcatgggggcggttccccca

SEQ ID NO: 900804 - DNA, 662 bp, Homo sapiens
ggaaagaagatcacagagatgaagtgccattcttgttatatcatattaagatctggctgaggtagcgcttgtcagagtctccagtgtaaatttaccttttcttcctttctatactcttattctttgtaagtaagtcactaagtgcagcctacacttaaatggtggagagttaagctccttgatggggcagggtctacataagttatttgaaattctgtatgggagatctagttcttttatggaaaatttatttttcctttaccaaatattaaaaaattattaatttctattctattctattataaggtaatggcaaaatggtctctacttcttgcaaattatggcttcagtaggggttcaaaaatatgattaatttttgtaaatgttttaaggacattcaaaaagattatacatgctctatttcttagatacaagaaacttattgttactcaagtattttatgaccttttgcaatatttgattacttgatatgtcattttaaattaagtatgtaaagtctcaacattattataatgtttatgagttcttacattttagtggttattcatttatrtatctttacttagtgttattaggagcataaattttctttttcctgctagtttgctttggtgtaatgtaatttctactaaaatgaaaca

SEQ ID NO: 900805 - DNA, 473 bp, Homo sapiens
cttacagttctacatggctggggaagcctcacaatcacggcagaaggcaaggaggagcaagtcctgtcttaaatgaatggcagcaggcaaatagaatagagaatgaggwagatgcaaaagcagaaccccctgataaaaccatcaaatctcatgaggcttattcactgccatgagaacagtgtgtgggaaactgcccccatgattcagttatctcccaccaggtccctcccacaacacatgggaattgtgggaatataattcaagatgagatgtgggtggggacacagagccaaactatatccttctgcccctggcccctgccaaatctcatgtccttacatttcaaaatcaaccatgccttcccaacagtcctgaaagtcttaactcatttcagcattaactcaaaagtccacagtccaaagtctcatctcagacaaggcaagtcccttctgcctatgagcctgtaaaatcaa

SEQ ID NO: 900806 - DNA, 514 bp, Homo sapiens
aatatataattggtttttctgtaacaacttatagacttttccctcattgtagggactctgagatcatgcaagaaaagcagaaggcagctaatgagaagaagtctatgcagacaagagaaaagtgatgactggctatttggaaaacctgggtgctactgccaactgggtgtatcataagctctaagatcaagattttgtagagtggacagtcattacatatgttataacttatcctttaaaaactattttaaactttatcctttcagctttacttagtgcgatgttttagaagcagtcttcaaagaataaaacactaaccatgcatgtgacatattggtgaacattatttttattattgaacattcatatatcatttattaggtaatatgatcagataataggatctcttatataataaagaatctttgtcatcagctttgttaacatagtttttttttcctcacagtttctaaggataaggataaartagatctttgaagtaaacttaaatata

SEQ ID NO: 900807 - DNA, 539 bp, Homo sapiens
agtcatcaatagaaaatacaaatttattccatacattttctttcttttcttttttctttttctttttttttttcttttttttttttttttgagacagggtctctctctctctcgtccaggcttgagtacagtggcgtgaccttggctcactgcactccccacctcccaagttcaagcaattcttgtgcttcagcccctgaagtagttggaattacaggtgtgcgtcaccatacccagctaatttttttatttttattagatatggcgtttcaccatgttggcaaggctggtctggaactcctgaccttaagtgacctgcctgcctcagcctcccaaagtgctgagattacaggcttgagccaccatgcccaccttattccacacattttctaataaatatttcacaactttatgctgtaaaatgtatggcttatcacagatrcgcatttcttaaatgatgattctgtaaaaggaagagatgactaagagttacaccattgctgttacttcatacttacagcaactgcctccaggatttg

SEQ ID NO: 900808 - DNA, 587 bp, Homo sapiens
gacctgatataattgtctcatcggcctacttaaagtatcactccatactaccttacagcagagaactataaagaggaacaggaaacagwctcctagatagaagtctcatgtagtgagcaagctttagacctctgttcttggaaagaatgttggaaaagtggtacctgcaagagtcagacccagaacaagtcctgagtcttccctcagttgaagcacccaggtactactgctactaatagctcagaatcatcattagacatttgattgtatgtggccaatgaaaagtgggttccagtgctgaacttacaattagtaaagagtgtgtactttatggaagccaaaagaatagtaattgatctctaagattgaatatgttcactcatcactgccaggactatgtacatatttagggtaaagtgcttaataagtaagtttaacatcagattagtaatttcgagagcctcaatcaccctttaggcacaatgacattttgggggaacaactttacaataaataggaaaattatcacataggttaagtcactgtcctatatacacaatatttttaaccaacacgagggctaatat

SEQ ID NO: 900809 - DNA, 587 bp, Homo sapiens
gacctgatataattgtctcatcggcctacttaaagtatcactccatactaccttacagcagagaactataaagaggaacaggaaacagactcctagatagaagtctcatgtagtgagcaagctttagacctctgttcttggaaagaatgttggaaaagtggtacctgcaagagtcagacccagaacaagtcctgagtcttccctcagttgaagcacccaggtactactgctactaatagctcagaatcatcattagacatttgattgtatgtggccaatgaaaagtgggttccagtgctgaacttacaattagtaaagagtgtgtactttatggaagccaaaagaatagtaattgatctctaagattgaatatgttcactcatcactgccaggactatgtacatatttagggtaaagtgcttaataagtaagtttaacatcagattagtaatttckagagcctcaatcaccctttaggcacaatgacattttgggggaacaactttacaataaataggaaaattatcacataggttaagtcactgtcctatatacacaatatttttaaccaacacgagggctaatat

SEQ ID NO: 900810 - DNA, 645 bp, Homo sapiens
tcatccttctcagtctaaaagaactacatatttagaacttagcggccaattatgmgatataatttcatgaacaatctataaaaatgtttgcatttcttagaagtaacgaaaagaaaaatatcacatcggggttacattataatttggtaaaaactgtatggaattgaagaattataaattgtattcatgtttaaatatttggttaatcagtgagccagaaagctaaagtctgctgttctcttatcttaccaagcatgacattctataatagagacaaacccacataaaattgtttaaatgctactttctatgatgtagtattcacaaatagcagatttggagactctctacattcctgtgtaaggaggcgctacccagcattgttctagtgctcaataaatatttgattaatgtcaaatagatgaagttcagaagaaattactgacatacttaattatatacttggctataaagactaataaaaaaccacacacacacaaattattcactatatattcaaggtagttttatttacaaagaaagaaaatggacaaccaccttaacctttcatattagaatatataagtaaagacaaattaattcaataaaatatcattgtagctattaaaatatgtattgagaatt

SEQ ID NO: 900811 - DNA, 606 bp, Homo sapiens
atagtaataactcttggttactctaattctattcttttatttcaggatgtaagtctcctgtagatctttgatactttaatttttgctcttggtcttttggtcagtttattcaaggtgtgtttagtggccaggtaattaacagaaaaaaaaatagaaaagtgcatgaagttaaaattagccaactaatatcttatttttttcttttcttttctttttttttttttgaaatggagtttcactcttgttgcccagactggagtgcaatggcgcgatctcggctcactacaacctctgccccccgggttcaagcgattttcttccctcagcctcccgagtagctgggattacaagtgcccaccaccacacccagctaattttttgtatttttagtagagacagggtttcaccatgttggccaggttggtcttgaactcctgacctcacgtgatctgcccacctctgcctcccaaagtcctgggattacaggcataaactagtatctttaaaagaacaataaatttacakaaactttcatctattgattctgataataataaaccagaattctggaaaatgcaatatttctacttcctatcatcaccatta

SEQ ID NO: 900812 - DNA, 619 bp, Homo sapiens
aacccaagattcactctggctcytcttttttttttttaagaaacaagattttgctctgtcacccaggctggagtgcaatggtgtattcttggctctctgcagccttgacctcctgggctcaagtgattctcccaccttagcctcccaagtagctgggactacaggcgtgcaccaccacacccagctaattttttattgttttgtagagaccaggatcttgctatgctacccagggtgatcttgaactcctgggctcaagcaatcctctcaccttggcctcccaaagtgctgggattacaggcatgagacaccacacccagccttactacacctcttaacatgcacaccagatggcctctggtaaataaatgattggaaattgagatatcacagaatcatctcactcctagcaacaattccaaggtgacgatagacaaaacctggggcagagcacagtaacctgacttcttgctcatatttctaccaccacatctgctgtcatctcagtctcagtctctcactgactactccaaatgtccatcttgtaagcacttcccctaaagagtggttggaaatagatagctctcctacaatgaccccacagaggtcaatctgcata

SEQ ID NO: 900813 - DNA, 638 bp, Homo sapiens
acagaaggggttttgccgtgctgcccaggctgatccctaacccctgggctcaagcaatccacccaccttagcctcccaatgtgctgggattacaggtgtaagccaccrtgcctggcaataatttttcttttatatcaagtttcttcttcattttaaaaaaatttaaggtctatttttacttccaggaattttaattgattgttttctctataaaatgcattttacatttatgttacacttatctcttcatttcttgagtaattcagcacacattattaaaattcttttcacattatggtgtcattttccttttctggtgaaatgtttctctctttaggcaaggatattttttgttttggtttgattttcctaacctctcagcttcacatttttcttgtgtgtattgaaatgtgttgtgaagcttcatgatgagcagatactccttttgaggcggtttagaaccaggtcatgagctggtggctttagatcttaatcctttttccatacttggaccatggcctgacctggttcttaggttctggtgctgctgggttttcctgccactgcagacaaattgtttactttcaggcagagccttggatagctgcagatttttaagggccctctttataaaaata

SEQ ID NO: 900814 - DNA, 593 bp, Homo sapiens
aatgtatccctgatgtccaggaattaataatctggtcagaatttacgtggaattactgaactagtcacatgtatttatttcctccatcccacaaaaagtttactgttgaccacctgactgccataggttctagaggcacaaagaaaaagacccttcagatcctaactccgaggtctaatgagggagataattaaaatacaattggtcaagagttcagatggtggaatatgcaggatactgtggaagtgtgagaaaagaagtcagggaaggcttcctggatgaggaggcactgagttgagaaacagaattgaattaaccagtggatagaagccatttcaggatgtgcaaactgcatgtgtaagagcctggaggagacaagaggaaggtgaatgcataggagtgagcagagacagtgctagagcatccttcccactcaggaactgccaaaagccctgagaggttggtaagagaagcacctytataaagacacggtactgacttcggacttaaccctcagggaaatgggaggtcacacagaggttttacagagaacagtaacatgatcagattttctctggaaagatccttctggt

SEQ ID NO: 900815 - DNA, 669 bp, Homo sapiens
aatgtcagctctcgcagcgttctttaacatgaatgattgccaggaactatgttaagatcttgccaagcgtcctcacaccaacttgaagagtgagggactgtcagccccactttacagatgaagatayaatctcaaacatggattaacttgctgagatcacacaagtaataagtggcagaggttggggcttcgacttgggtgtgtctgaagccaaagcctgttttctaggacactttcctgtcccctctttccaaatattgacctataatgtgaatccttacacagaaaagtggaccagcaattttgccctctgcctacaggttgagtagtagggagtgccagttgattttgtggcaagggctggcacagtgctgggagttggggctgggccttgtcacagcagtctgcagccctcagatgctctgggtccagctggttagtaccagccagtcagacagcattttctaacactgattgcagctgtgtagacctggcagctatgtcaggctcccaaaataaaagcttaagggtcttttattttgttaccaactggcctggttttgacacttaactgggaacaactaggctttcaagtgctgggttatatgagctcaagttacccactatgttttcagattatcacttaaacaatcacatgcatgaaattta

SEQ ID NO: 900816 - DNA, 629 bp, Homo sapiens
gaaggtgggtcctggcgggaggtgatctggttcaggggggcagatttctcatgaatggtttagcatcattcgcttggtgctgtccttgcattagtgaatgagttgtcacaagatctggttgtttaaaagggtgtggcacctcctccctctctctcttgctcctactctggccatgtgacgtgcctgctccctgtttaccttctatcatgattagaagcctcctggggcctccccagaagcagatactgctatgcatcctgtaaagcctgtagaactgtgaaccaattaaaccttttaactttataaattacccagtctcaggcacttctttataaccatgcaagaacagcctaatacacctataaaggagataaatgggaatgaggtagaagagactgactgggaaaataaaggtaggcaaaggtgagcccaccattaaaacctgtgacctgtctgctctgaatgctgtgctgccctgggtgtgaaacggaattagggcctggggataggatttgaccaggaccccatggtgtcatgggaactgtaagatctactaaagtgatggattggttgctaaggaawatactgggagaataaactctggactaagagtcaggaaacctggattc

SEQ ID NO: 900817 - DNA, 595 bp, Homo sapiens
tttttggagttagatcacagcgtttttttattctaacctattgagactgttgcttaggtattttcaggctttctttttgmctgatctatacttactgctatacattgtcctctattataggtttaggcagagtaaattttgtgaatggtatgcagtaaatttgttttttctttgttttacccatttggataactgagccagaggcattactgaaaaggtgagtttcctcccattgttctagaatgccaactttgtcataattcaagtgtctacaggtaattatcagttttcagattctcttttaccattgatctacatgattactcgtgtaacaccacattgccttaattaccactgttttataagaagtctaataagttatccaaatttgttcttcaaaagtgtcttagctactcttgccttggggcatttctgtatatcattttagaaccaaattataagatttttataaaaaaggttgttggaggtgttgatataaggttcattgactactgtgaaaaactgatgtaattttgttgaggagtgaagaatatgactaatcacacgtattagatacactgtcagggcaaccata

SEQ ID NO: 900818 - DNA, 587 bp, Homo sapiens
tgaacacagtaaacaagtttgcatgcaaaataataggaaatgttttaatctgaaagccatcgtaacctcatctccaaaattttttcagagaaaatgaccaaagagttgcctacagtgaggtgactaaaaataaaaactgtagactgaacttcaccaacttcaaaaattatacaacagtaaaaattttctccaaattgtaatatcagtatgaaaaataaacacttcaaatgtctaatcaacagagtacattttattatttttcaacatttaacatttacacttaaaaataggagtctgtataaaaatgtaacgtgctgtatcatagaaaattaaatttagaatccttacttaccactaactctcttttaaatataacttataagatatattttgtaacaaattttatgcttgccacactttgtgtaagaatccaataagattcttcttttacaaacaaagaaaaacaatgttaactgatttaattattccacgtgtggacagtgtatgtctcttattttaatyaactaatctgaaagttatattggcaagcaaattctccacttaaaatccattttttagcacattaa

SEQ ID NO: 900819 - DNA, 575 bp, Homo sapiens
ctttgtgccattgttatcctggttcttccgagcaytccgctttcctaccgagcttcttttagttgtccttgggtgtcctttgaggatgcgtcatccactttcacacactgtagggtttcttcaccggggtctctgttgccccacattgggcagccaggaatgttggggtaatcagacccaacaccaggtcgtgggggtgacaaggtccagtggagtcaaaggattgagaaaaagacagtttgagagagaaagatgggaccaggggccatcgctagtgtatggaagctgtgaaggcccagagctctgggagcccacactatttattggtgatcaaacaaagaaacaggtggtgagaatgtggggttcgaaagggcaagtgcatgatctacagctgtgatggtttagcatatgctctgctacttgagataatggaaaggagattcttttaactcaagatacaatcaatcttgggagagcaaggagccaggagccagcatgtctagacacattccagagccattagccctctggattctatccaagccacgagggattttatgccctgggcttagatt

SEQ ID NO: 900820 - DNA, 501 bp, Homo sapiens
caaagtactgggattacagatgtgagcaccagacagaaaattgcatgcctggcaattgtcatttttaatgcatgttttctggtagtataaaagctttctgatgcaagaaggttgttattayagcggtagctaaaaggatactaagactttcttttcctcatgaagacttgctgaaaaggtctccaattacaaagatacttatttcactagaaaagttgtaaaactgttaaataagatattacagatacaatagtactgagcaaagctaactaaattcactagattgtttttgtaattgcaattgatgacactcagatccacttagagtggaaaaaacgtgttgacttttataaagagtcattggaagacctatgcacctaataatagaacgtcatgtataatctgctactgaagtctaatattactaaatgtggcaaggctctaatgcattatggcaaagcatattttcacaaggtaaagaaagctttttttttttttttg

SEQ ID NO: 900821 - DNA, 578 bp, Homo sapiens
taccatcagagaatactatgaacacctccatacaaataaactagaaartccaggagaaatggataaattcctcaacacatacacactaccaaaactaaaccaggaagttgaatctctgaatagaccaataacaggctctgaaattgaggcagtaatagcttaccaaccaaaaaaagtccaggaccagatagattcacagccgaattctaccagagatacaaggaggagctggtaccattccttctgaaactattccaatcaatagaaaaagagggaatcctccctaactcattttatgaggccagcatcatcctgataccaaagcccggcagagacaacaaaaaaagaattttagaccaatatccctgatgaacatgaatgcaaaaatcctcaataaaatactggcaaaccgaatgcagcagcacatcaaaaacttatccaccatgatcaagtgggcttcatccctgggatgcaaggctgattcaacatacacaaatcaaacataatccagcacataaacagaacagcaaaaaccacatgattatctcaatagatgcagaaaaggcctttgacaaaat

SEQ ID NO: 900822 - DNA, 578 bp, Homo sapiens
taccatcagagaatactatgaacacctccatacaaataaactagaaaatcyaggagaaatggataaattcctcaacacatacacactaccaaaactaaaccaggaagttgaatctctgaatagaccaataacaggctctgaaattgaggcagtaatagcttaccaaccaaaaaaagtccaggaccagatagattcacagccgaattctaccagagatacaaggaggagctggtaccattccttctgaaactattccaatcaatagaaaaagagggaatcctccctaactcattttatgaggccagcatcatcctgataccaaagcccggcagagacaacaaaaaaagaattttagaccaatatccctgatgaacatgaatgcaaaaatcctcaataaaatactggcaaaccgaatgcagcagcacatcaaaaacttatccaccatgatcaagtgggcttcatccctgggatgcaaggctgattcaacatacacaaatcaaacataatccagcacataaacagaacagcaaaaaccacatgattatctcaatagatgcagaaaaggcctttgacaaaat

SEQ ID NO: 900823 - DNA, 578 bp, Homo sapiens
taccatcagagaatactatgaacacctccatacaaataaactagaaaatccaggagaaatggataaattcctcaacacatacacactmccaaaactaaaccaggaagttgaatctctgaatagaccaataacaggctctgaaattgaggcagtaatagcttaccaaccaaaaaaagtccaggaccagatagattcacagccgaattctaccagagatacaaggaggagctggtaccattccttctgaaactattccaatcaatagaaaaagagggaatcctccctaactcattttatgaggccagcatcatcctgataccaaagcccggcagagacaacaaaaaaagaattttagaccaatatccctgatgaacatgaatgcaaaaatcctcaataaaatactggcaaaccgaatgcagcagcacatcaaaaacttatccaccatgatcaagtgggcttcatccctgggatgcaaggctgattcaacatacacaaatcaaacataatccagcacataaacagaacagcaaaaaccacatgattatctcaatagatgcagaaaaggcctttgacaaaat

SEQ ID NO: 900824 - DNA, 578 bp, Homo sapiens
taccatcagagaatactatgaacacctccatacaaataaactagaaaatccaggagaaatggataaattcctcaacacatacacactaccaaaactaaaccaggaagttgaatctctgaatagaccaataacaggctctgaaattgaggcagtaatagcttaccaaccaaaaaaagtccaggaccagatagattcacagccgaattctaccagagatacaaggaggagctggtaccattccttctgaaactattccaatcaatagaaaaagagggaatcctccctaactcattttatgaggccagcatcatcctgataccaaagcccggcagagacaacaaaaaaagaattttagaccaatatccctgatgaacatgaatgcaaaaatcctcaataaaatactggcaaaccgaatgcagcagcacatcaaaaacttatccaccatgatcaagtgggcttcatccctgggatgcaaggctgattcaacatacacaaatcaaacataatccagcayataaacagaacagcaaaaaccacatgattatctcaatagatgcagaaaaggcctttgacaaaat

SEQ ID NO: 900825 - DNA, 607 bp, Homo sapiens
ttgctgacctctgcacactatgatcaatctattgaaagccagtcatggggatgggggtacmtgttagatctgaaaaaatgagatctgtctctgttctttataaagtgggggaggaagggcggtatggtaagaaaatgaacaaattctgtgctgaagactgaataatggtatttacctttgatttcttgtttactgcatgtcaggtgccgtacattattcgctgtaagcctcaaaaactcaggaagatttagccccattctccagataaatgaagtggctcagagatgttaagttgctggagatcacataggcaggattctaacacgaaagcttattctcatttcgctatgttccactgggcctgatccagtctcagcctcaattctcctgtttgggtggtgctatgttatccagcaagatgaccctgcaaagtcaatgctgtgtattcaaggcacaatagacagtcttctagaggcagtagcctccacctagcacaatatggtgacaaggtagcccaagctgtctgaccacttcagcccaaataatttcacacaagcatgaaaattagagaagatgtcataatggtgtcagagggatttgaaccaga

SEQ ID NO: 900826 - DNA, 607 bp, Homo sapiens
ttgctgacctctgcacactatgatcaatctattgaaagccagtcatggggatgggggtacctgttagatctgaaaaaatgagatctgtctcygttctttataaagtgggggaggaagggcggtatggtaagaaaatgaacaaattctgtgctgaagactgaataatggtatttacctttgatttcttgtttactgcatgtcaggtgccgtacattattcgctgtaagcctcaaaaactcaggaagatttagccccattctccagataaatgaagtggctcagagatgttaagttgctggagatcacataggcaggattctaacacgaaagcttattctcatttcgctatgttccactgggcctgatccagtctcagcctcaattctcctgtttgggtggtgctatgttatccagcaagatgaccctgcaaagtcaatgctgtgtattcaaggcacaatagacagtcttctagaggcagtagcctccacctagcacaatatggtgacaaggtagcccaagctgtctgaccacttcagcccaaataatttcacacaagcatgaaaattagagaagatgtcataatggtgtcagagggatttgaaccaga

SEQ ID NO: 900827 - DNA, 490 bp, Homo sapiens
cttgtctccttatttcccagtccctgtgccattttgtcatttctgtttttatgtgcacgtgttcttaggctcttaccttccagcccaatcattctaacaaaataattttttcaattttttaaaaawgtatattctccctcagaagatcctggttgagaacatcttcttcatccttttatggcacaagtggaagcagggccatagtgtgcccatgaggtgttgctgcgctatcatttctgcatctgatcttgagttccttaaaggctggggtggcacttagtgacctcagggctgggatcccagaggtacagatgatgtgcctgtgtgggatcaatgagcaggtgctgccttgggtctctgctggctcctgtggcaaggtctgcaggtccttcccctgttctcgtggtggaacagctccccgggccaccccacaccccaaccatgtgctgaacttcctcctgggaatgacatttttctagcacctactagt

SEQ ID NO: 900828 - DNA, 490 bp, Homo sapiens
cttgtctccttatttcccagtccctgtgccattttgtcatttctgtttttatgtgcacgtgttcttaggctcttaccttccagcccaatcattctaacaaaataattttttcaattttttaaaaatrtatattctccctcagaagatcctggttgagaacatcttcttcatccttttatggcacaagtggaagcagggccatagtgtgcccatgaggtgttgctgcgctatcatttctgcatctgatcttgagttccttaaaggctggggtggcacttagtgacctcagggctgggatcccagaggtacagatgatgtgcctgtgtgggatcaatgagcaggtgctgccttgggtctctgctggctcctgtggcaaggtctgcaggtccttcccctgttctcgtggtggaacagctccccgggccaccccacaccccaaccatgtgctgaacttcctcctgggaatgacatttttctagcacctactagt

SEQ ID NO: 900829 - DNA, 650 bp, Homo sapiens
tctcttctttctcaaggctgtcttttggctayttgggtttattgtgtttccatataaatattaattattttttataattaagtaaaaaagtcacagttattttgataatgactacaatgaatctggagattgctttaagtagtatgaacactataacaatgttaagtcttctaatccataaacacagtatgtctttaatttgattgtgtcttcttcaattgcattcattgacattttgtagtttttattgtactaatcttttacctccttaattttattcctaagtattttacatatcaagttttagctttttttgaaataactgtgcaagtttatagggctactatggaaaaatatgttcctggattcaacatttttttactgttcctgtaagcaagcatatttatgttttcacactcagacacagacaggcatacctgtgtacacacacacacaccacagacacacgtacagagaatacaacatcagagagactataaaaaaatgaagccaaagtgtaaaggaatttttttaaacctcgataaatctaccaataagccacagttgttcaatgcaagattccttaaagcgacattgttcttctcatagaactaaggaccaactgtaaacttgatcttgactctactgaa

SEQ ID NO: 900830 - DNA, 607 bp, Homo sapiens
atagtttcagtatactatatttacctttcttggaaattaatcaatacattctctgacaatgactaaaattattcatttttcagtccatctatcaatataatttaagaaagactgaatttggatggtagaaacctataagataaaaataattactttgtcctgataccataatttttcacacatttatcttgtttgctctgcacacacttatgcagttttacatcagtaaaatttatatatacagttatcccttgaaccacatggttttaaatgtgtgagtccattgatacacagatgttcttaaaaaataaaagttacattgagtgtgcctgcttctcctgcctcccctttcacctcctccacctcttctttttttgctgtttctgagacaacaaaactactccccctcttcctcctcctcagcttatgcaacatgaaaatggcaaggatgaagacctttatgatgatccatttccatttaatgaatagtaagtatattttatcttccttacgattttctcagtaacacctttttttctctagcttactttattgtaagmacacagggtataatacataggacatacaaaatatgtattaatcaatc

SEQ ID NO: 900831 - DNA, 568 bp, Homo sapiens
acaatttccatttgattcatctaatgcattattttattattttttaaatgatttctgacytttttactcataaataagtgaggaacacacattatcacactttaatctttgttacctttgcaatcaaagcagaagaaagtgtgttataatattactcactcctttcatttactttgaaatatatcttatactgaaatataacattcctatagtgaaaagttataacaaagcacttatgtcagaactaaagattaaatgatatacttttacacttatgaaacaaggactcatttatatttatgacatgaaaggtgatttataacttcatatatgagacgttacaatttaattaaaacttagaatccaaaatatttcattcatttaaaatatttattaattataagtgaacacagacaaaagatgggcaaaatctttgtacttaagcaacttatactctactggaatcaggcagatgattcagaagaaatgaattaaaaaaaagtattatggaacaaaatgaagtaagtcagaggactaggtagtctggggactaaagatggacattcag

SEQ ID NO: 900832 - DNA, 632 bp, Homo sapiens
tgatgcaggagaattgcttgaacccagggagcagaggctgcagtgagccgagatcgcgccactgcactccagcctaggcgacagagtgagattccrtctcaaaacaaaaacaaaaacaaaaagaataaaagatctcaatgatcttaagagatcttcaggttactaatcttagcttggttattattaaagtatttattctttatatgccaacttagagcttctagaaacctcaacgtatatgcagatatagcttccaaatttaccaaaattataaagattttaaaaatatgtcaaatttaaaaattgtgtcctagaggtgtaaaaaagaaattatagtttttatcttgacaaaaaaaatattcttagggcacatatattgaattcaactgctataccagatatcttcagctattatttcattcatcacataacagcaaaccaaatcacttttacagaggagaaaatcgggtggcaaagcttaatctaaagtcacactgcttatgattggaaagagctgaatttgaatgcagttttatctagtgtcaaagacaagctgatgctcttcacgtagcaccttgctgaaccccatgcatcgtgttctaaaagagaaacaccagtgagtttcttgctgg

SEQ ID NO: 900833 - DNA, 705 bp, Homo sapiens
aaatatgaaaacacattttaatatttctctgaattttcatcatgctaaaaatagctagaaatgtcagaacactattgarattaaaaagtaatgagaattaactaattgaaataatgcagctattcttaaaatgttaaataccattaacatattttaattgaaaagcaattctgcttgaacattttaaaattttacataatcaacttgaaatgataggtagttcattattgtaaataaagtttaatctattttatacaaatcaaaatgttagataaatattaaacatgaaatgggcaaaagagggtaaaaatacagtaataattatcaaatcaaataatgaaccatattagcattcaaaaatttaaaaaattataaaatataacttttttattattgttatactttaagttctgtgacacatgtgcagaatgtgcagatctgttacataggtatacacgtgccatggtggtttgctgcacccatcaacccatcatcttcattaggtatttctcccagtgctatccctcccatagccccccacctcctgacaggccccactgtgtgatgttcccctccctgtgtccatgtgttctcattgttcaattcccacttcccactgagtgagaacatgcggtgattggttttctgtttgtgtgttagtttgctgaaaatgatggcttctagcttcatccatgtccctgtaag

SEQ ID NO: 900834 - DNA, 651 bp, Homo sapiens
ttgtaatgcccatcaacagttccatttcctaatttgaggtgatggtcttgtgattgttgratcagctgtaagtcctagtcataagacagtgcattgaaacagtcattttctgttaacatccagctgtagtggattaggcatgcatgtgcttttataaaaataatttaaataaaaaatacattcttactatacttcctcccacaattggaaagtttggttgttttttattttccatgactccaaaataaaataccaaccacatatattagattaaatactaggttatcacatgagaacactccttaggaaataatctagaaaatgtttgtcaatcccaccctgtggcagaagggactaagtaattttttgatgtgtctcacagtcttgatctgttaaatatgagacaaaggcagaatgttaactgtatttaccacacaaagtagatgttattttctctgttcacttattacttttcaaggagatgtttaccaatgaaagttcagcacctggtacagtacacagctcaataatgaattcttgcctcagtgaatcacaagttcagtttaagacaattatggaaaaggttgagaactacatcaattacacttagtgcacctgtggcattagtacatatgtttattctagaaacta

SEQ ID NO: 900835 - DNA, 675 bp, Homo sapiens
ggggactcaacgatgatgttcaggaatttttagcatagcgcctgttcaaaaattgtttgctattattacaattattattaacttttctgtgaatatactgactccccacttgccttacttcctaaatctaatgtattatgtgtatgtctatagtgtgtcttatttatttatttatttttccaagatggagtcttgctctgttgccccggctagagtgcagtggtgcgatcttgcctcactgcaacctctgcctcctgggttcaagcagttctcctgcctcagcttcctgagtagttgggattacaggtgcccaccaccatgtctggctaatttttgtatttttagtacagatggagtttcaccatattggccagactagtcttgaactcctgaccttgtgatctgcccaccttggcttcccaaagtgctgggattacaggcgtgagccactgtgcctggtctcacttatttattataatattaattatcattttttctgtttcctcttttttattttatgttattagaaatttttatttttaatttttgtgggtacatattggtgtatatatttatggggtacatgagatattttgatacaggcatacaaggcataataatcacatcagtgtaaatgggatgttcatcrtttcaagcatttattctttctttgtg

SEQ ID NO: 900836 - DNA, 679 bp, Homo sapiens
atgttgaatgaaaggttgtaatttataaatttaaataatttattaacctgctttttctcatgtatgggttttcatagtgtgatgattttttttttctttttgatgtgccagctttactaagctacgttcccagttattcagtaaaacactattctaggtgttgctgtaaaaggaattttcagatgaaactgaaatcctcaatcagttgactttaaatatgggagatgggagactatcctggataatctagggcctgattaaatcagttgaacagccgtgagagcagggctggaggggtgagacacacacacacacacacacacacacacacacacacacacacacacacacacacacagagagagagagagagagagagagagattctgctgtggacagcagcttcagcccctgcctgtggtttccagcctgcctgtgatcttcccttcgtgacatcctgccctacagatttcagatttgtttagccagcctccacaattgtgtaattcaatttcttgtaatatctatctatctgtctgtctgtctgtctrtctatctatcatctatctatccatctatcgtctatctatctatcatcatcctcttctcctactagttacgcttctgtagttgaaccctaattgttacaaaatttggtacctagaagtgggatgctgtt

SEQ ID NO: 900837 - DNA, 618 bp, Homo sapiens
cctgggcacctacaccaccagggccctgggttttaagcacaaaactgggcagctatttgggcagacaccaagctaactgcaggagtttttttttcgtaccccagtggcgcctggaatgtcaacgagacagaactgttcactcccctggaaagggggctgaagccagggagtcaagtggtcttgctgagtggatcccacccccaggaagcccagtaagtgaagatccactggcttgaaattcttgctgccagcatagtagtctgaagtctacctggtatcctcgagcttggtggtgggaggggcatccaccattactgaggcttgagtaggcggttttcccctcacagtgtaaacaaagctgccgggaagttcgaactgggcagatcccactgcagctctgcaaagctgctgtagccagactgcctctctagattcctcctctctgggcagggcatgtctgaaagaaaggcagcagccccactcaggggcttatagataaaaccyccatctccatgggacagagcacctgggggaagggacggctgtaggcacagcttcagcaggcttaaaggtccctgctgactggctctgaagagagcagttgatctcccagcacaa

SEQ ID NO: 900838 - DNA, 442 bp, Homo sapiens
ggtctagtgagaatgaattccatcggcatttgtttgtctggaaaagactctttttttcctctttcatttatgaaggataattttactgaatacaatattcttgtctgccagtttatttctttcastactttgaatatattataccgttctcttccggcttacaaggtttttgctaagaaattcaccgttagtttgatgggatttcctttataggtactagaggcttttctcttgctgttttaagaatgcattctttctctttcattttagacaatctgactataatgtgtcactcacgtaaaagaccctttgtgttgtctcttcttgtgaaccactgagcctcctgtattttaatgtctaatacattattagacttggaactttaaatatattatcatattaaataggtgttctaatatttcctttgtttctttgccctcag

SEQ ID NO: 900839 - DNA, 631 bp, Homo sapiens
ttgttcttttctacctggtttttatattttgaaccttctcccccaaaaagcatgacaaatcccagtgagaaacaagagtacacaatayatctctgtgtattttgtcactcactatattttcaacactacttcatctatcacacattacttcaagagagaccaaaaaaatgggcacacgtaaaaagatacgcttgggaaaataattctctttagttatcccaacatgacagagaacttaaccagactagtgccttggcatttgtgtgcagttcaaaagaaaattaatggagctgcaagacttctcaattttgcaaagaaattttactcagtctttttgatagcaagcaaatgcatgatgataagcaactcttgaatcctaccttctcatccctttttccaataaaagagtagtgctccttgtaataaggtttctccctcctgttattcctcagtggcacccaggaaaaaatagtaaattaaagtgtgtgcccatgaatcactaagattttttcaatctctctgaggcagggagatttatgtgatgaaaccaatagctttttgccacctgtcttacagtgtacattgtctgcacaataagatatgtcttcctctcttcctcggtgtttagcta

SEQ ID NO: 900840 - DNA, 695 bp, Homo sapiens
caatttggtcagggcttcaaaatagaagcaacacaaaaatatgttatttctttctgtttatcagcttctctttcatggctgaattcttgataatattcagayagagaaacttattggctgaaaaatttgttttttgcttggaatcttccagattcaaatatctcctgccatcactgtgtcatctaaagcttatctgttttctttttaaccctgccgagtctcttcatcaacatcaggcctacacctccacccactcgtatccagaccaggagctgttccctaggtagagaagttgccatggtactctaactaggaagcacttgtttttctttggaattcagttcatcaaggctttattatatctacaattcctttttcgccccttagaaaataaggtttacttatccattttgtcaattttgttgtttttaccatgatttgaaaagattttttagctcttcttcatataaactggaagtggaagccagataaatattcatcattaaatttctattcatggttttatattcttttccataaaagttcccccaatttgcctaatctttagggctcacatatctagatctgccctgaataaactaaaacacttttttcagagtagagtttttaaaaccaaggagacagcaagatagacataagataaatattacatgggatctgaataaaatagtttt

SEQ ID NO: 900841 - DNA, 610 bp, Homo sapiens
aaatcttgtatacaaatgttaacagcaccatacatcctgacagccaagaagtggaaacaatcaaaatgggtgttaattgatgaatggctaaacaaaacgtggcatataaartatcatttgatcttataaaaggaattaaatactgaaatatgttgatatggataaagcttggaaatatactacaggagagaagctagatacaaaaggtccatataacgtgattccatttatattacatgtccagaattgagtcagaaggtagattggtggattccagggtctgcagagaaaggcaaacggggaaagactgctaatgagttcagagtttctttgaggggtaatgaaaattttaaatactggtgatggttgcaaaactctgtaaatatactaataactactcaattgaagattttaaaatgataaattttatggtatatgaattctatctcaataaagctgttattcaaaacaaaacaaggttggtaaatgggtataaacttatagttagataggagaaatgagttctcatgtttgatagccaaccaggtgacttgttagcaacagtgtattgtatatttcaaagcagctagaagagaggacttgaaatgtt

SEQ ID NO: 900842 - DNA, 551 bp, Homo sapiens
ctccagttcccatgagttcctcatctccatctaagagcatctcagcctgggcttcaccatccatatcactatcagcatttttgtcaaaatcattcaacaagtctctaggaacttccaaactttcccacatatcttctgagcccttcaaactgtttcaacctcagcctgttacccaatttcaaagttgcttccacatttttgggtatttttataacagcacccctctctctgtggtaccagtttactgtattaatctgttctcatgctgctatgaaaaaatacccaagactgggtaattcataaagaaaagagatttaactgacccacagtttcacacagctgggaaagcctcaggaaacttacaatcatggcagaaggtgaaggggaagaaatgcacgttcttcacagggtggtaggaaggaaaagtgccaagcaagggggagaaaccccttataaaaccatcagatctcatgagaactcactcsctatcacaagaacagcatggggtaacctcccccatgattcatttacctcccacggagttcctccca

SEQ ID NO: 900843 - DNA, 562 bp, Homo sapiens
ataccacttataagtgggagctaaacaatgagaatacacagacacggtgaggggaacaatagacattggtgctacttgagggtggaagctgggaggtgggagaagatcagaaaaaaatacctattgggtactargcttattacctaaatgtcaaaataatctttacaccaaacccccatgacatgcagtttacctatataacaaacctgcactagtacccctgaacctaaaataaaagttaaaaaaatttttttggagatgggatcttgctctgttgcctagactggagtacaatggtgcaatcatagctcattacagcttctgactcctgagtttgagccattttcctgcctcagccttctgagttgctgggactacaggcatgtgcggctatgcccagttaattttcaaatttttttttctttttttctttttttttttttttagagatagtcttactattttgcccaggttggtcttgaactcctgacctcaagtgatcctctcacctcagcctcccaaagctctgggattacaagcatgagccattatgcctggcctg

SEQ ID NO: 900844 - DNA, 609 bp, Homo sapiens
caaaaggcatacaaatggcaaacaggcatatgaacaaatgcatcagaaaactgcaratcaaaactacagtgatatatcatctccccccagttaaaatggcttttattcaaaaataggcaataacaaatgctggcaaggatgtggggaaaagggaacgctcatacactgttggtgggaatgtaagtatccttcagtcactgtaaagagcagtatagaagttcctcaaaaacctaaaaatagaactatcatatgatccagcaatcccactgctaggtatagtcaaaacaaaggaaatcagtatattcaagagatatctgctctctcgtgtttattgcagcactatttgcaatagcgaagatttggaagcaacttgtatccaagttgcatatcaagtaacagatgaataaataaagaaaatgtggtacatgtacacagtggagtactattcagacataggaaagaatgagattctgtcatctgcaacaacatggatggagcttgaggacattatgttaagtgaagtaagccaggcagagaaacacacactttgcatattctcactcatctgtgagagctaaaaattaaaacatttgaacttatggagacagg

SEQ ID NO: 900845 - DNA, 424 bp, Homo sapiens
gatagtacacatcacataagactttaataagaaaaacatcattctttgaggagcatttggaatttatcataaggaattaatttataagtctgctacctttattggagaatatttcctctaccagggcataaagcagagatacatgtgcacccttcaatgacagggaacaggaatgacattagtccttgaagtcagtctccatcttcagagcccactgtcctgagacgtggcatcttgactgtgaaaaccaggcattggatattatgcaagagatagaattagcatggccaaaatgatgggcagaaagaaaggtcacctgatcccacasggtctttcttcgccacctttctaaaatacatgctgtgtccccatgaagagtgcttcctaggcaagccacagaaccaacctgggcaacgtgattcct

SEQ ID NO: 900846 - DNA, 576 bp, Homo sapiens
caaattgcttcctctccaaarcagttttactgatgtgtacccttgccatcagtgtagtatttccatttctcgtcatctttatcactacctgatgcagtcagatattttaatgtttgacaattcaatgagcataaaatgatgcattgttattttactttttatttccctgatgaatccatttgtatctgagtaactcatccttttcctgcttatcttttatgccatctttgtcatcttctgagtgtctacatatgcccaaatgttagtccaggcttttctggcccatttttctgtgtatctattcctgtcctggtgctccactgttttattaccatattttatacaaagtcttgttatctggtatattaattctcacaccaccatacccttcttcaaaatcgttgtggccattcttggccatttactcatcatatgaattttcagatgagcctatcgggtctcctaaaaaattgtgttgggagctagattgaatttatgttttaatgccagaagttacatctttataatattgtgcctcctaatcttgaacatggtatatcatttcctttacattgg

SEQ ID NO: 900847 - DNA, 190 bp, Homo sapiens
gggttttttattattttattttakttttttggcttgtagaattgtttaagttacttatggattttggatattagatctttgttggatgcataggttgcaaaaattttctcccattctgcaggttgtctttttactctattcataatttattttgctgtgtagaaacccttttgtttaattaggtctcatt

SEQ ID NO: 900848 - DNA, 643 bp, Homo sapiens
caaagtcttaactaatttcagcattacctcaaaagtccacagtccaaaatctcactsgagacatggcaagtcccttctgcctgtgagcctgtgaaatcaaaagcaagttagttactccctagatacatgagggtacaggcattgggtaaatacagccattccaaatgggagaaattggccaaaacaaagggtctacagacctcatgcaagtccaaaatccagcagagcaatcaaaccgtaaagctctgaaatgatcttctttgactccatgtctcacatccaggtcatgctgatgcaagaggtgggttatcatggtctctggcagctctggccctgttgatttgcatagtatagccctcctcctggctgctttcacaggctggcattgagtgtctgtggcttttccaggtgcatggtaagttgtcagtggatctaccattctgaggtctggaggatggtggacctcttctcaagctccactagatggtgttccagtagggactctgtgtgggggctccaactccacatttcccttctgcactggcctagtagaggttctccatgagacccccacctctgcagcaaatttctgcctggacatccaggcattcccatatatctgctgaaatctaggcagagattc

SEQ ID NO: 900849 - DNA, 610 bp, Homo sapiens
gtgtcgcaattcctcaaggatctagaaccagaaataccatttgacccatcaatcccattactgggtatatacccaaaggattataaatcattctactataaagacacatgcacaygtatgtttattgcagcactattcacgatagcaaagacttggaaccaacccaaatgcccatcaatgatagactggataaagacaatgtggcacatatacatcatggaatactatgcagccataaaaaagaataagttcatgtcctttgcagggacatggatgaagctggaaaccatcattctcagcaaactaacacaggaacagaaaaccaaacactgcatgttctcactgataagcgggagttaaaccatgagaacatatgggcacaggaggggaacatcacacataggagcttgtcaggggtttgggcaaggaaagggatagcattaggagaaatacctaatgtagatgatgggttgttgggtgcagcaaactgccctggcaaatgtataccaatgtaacaaacctgcaccttctgcatatgtatcccagaattgaaagtacattaaaaaataataataatgcaaaaaaaaaccccacttttatcctttaagtc

SEQ ID NO: 900850 - DNA, 607 bp, Homo sapiens
tattaattaaaagcaaatcacaggtcctgcccatacccatgaggatagtttttaatcaggagggaktattatgggaaacaacatggaatcttttccccagactgtagaaataatacaaatctaaaattttaagtgaaatttcaggggagtaacaataaggtgtgaggtgctctagacctttgaatctttgagccacttgaattttcatcctaatattttcataatgaggattttgaaatatcatagtttatccaaaagcagttatttaaggaataaataaaggaaggatcgtatgtctaggttagtcttacacatccactggaatcaattatctctttctataaacaaaccaaataaaggtaataagtaaaggaaaatataaacataatagcttttcttttgtatgtgtttgataaaattggcactctttttaaaaaataattagccccaaatgccctttttgagaatgtgcaccagatgtactttctaatttctgatacgttcaccaaggctctagctctatgtcaccaagatttttttaaaaatgttcctaatacaataaattcaaatggattgttgataaaaggcagagatgtttataaaatta

SEQ ID NO: 900851 - DNA, 665 bp, Homo sapiens
gtgtcttgagagttgattttaagatgtttaattctttgctctcctgacaggcaaaactagtgttactggaaaattcttaagaaagattactgttgtactaaccatttcctcctgatctttggaatcattccttgattgtgtttcctgttcttgttctcgtgttactggagtgaactcttaccagtgagaaattctggctatgaattcaagaatccaagaaccaaagacgtcgagtttgaaagtagtcaggtagtgggagtgggatgggtaggattctgtgatgtggtaagatacttgttgatcatattaatttttaggttatttgtaagacagcctgatataactgggtaaatcacaatgtgttctggtacaatagcttgagaaatagcagcaattgagtcattcaggtgttttcttgtttatttgtttgttgtgaaattggtcagttgcaaaaagcagagtcatcacttggagcacagtttacaagtgacatgagctcccatatcttaccctcaacacatccagccaaggtgaaactggctggaacttaagggagatgtggtgatttcaatgagagaaattatgctratcctaagtactttagttagggtcttacagagaaacagaatcaataggataatttctctctctctttctctctctct

SEQ ID NO: 900852 - DNA, 626 bp, Homo sapiens
cttttcagatggctttgtctaayaggaatgatatttaagagcagccttctccaaatagcttcagctcttgctgccacattcccaaaagtttagtttattaccacaaaaagcagtggtactccttcactagataagctccttgaacacaaatatgatgtctttattatctttgaagccctaatattcagaagtttgagagatataacagtcattcaaatttatcagaaacagatttgtgtgggcttaaaggtggcccatatgataacttgtcaaactactttacatagtccacattcagcattgtcctacaaatctcctgagccagggtgtcatacaagcaaatggctattgatgtggtgaagcaaagatctcctcagctcttgagatcactaggcagtgtctaaggtggatagtatcagggcaggtagtctcatacatttaccccgtatagatatcaatgtctatatgtggcattacatgagcaagcattgctctggcctcaacgcccccaacaaactagtacatctccacttttacctcccagaactgcacacataacaaatatcacttaaaaacagagcattctattatcacttcacttatgatatgataatcatatcagggat

SEQ ID NO: 900853 - DNA, 360 bp, Homo sapiens
acagccttcagtctgtggtcaaaggtccaaggtcaaaggtccaagagtcccaaagctgaagaacatggagcccaatgttagaaggcaggaagcatccagcacagaakaaagatgtaggccaaaagactaagccagtttagtttttccacgttgttctgcctgcttttattctggccaagctggccagtcaagctggcagctgattagttgtgcccacccagattgagattgagtcacttttcccagtccactgattcaaatgtgaatctcctttggcaacaccttcacagacatgtccaggaacaatactttgcatctttcaatccaattaagttgatactcaatattaaccatctcaac

SEQ ID NO: 900854 - DNA, 599 bp, Homo sapiens
agccaatattactgctgaaaatacagaaaatgcacggtaggtatccaatgacttggaaaaatggtgttgaaatacatgtgccatgaactacctgaaatttttcaaactcaacctcaatcaatyacatatagattgacaaagattattccaatagctgtagtgggtcactataattttttttttttttttgagacagagtctcgctctgtcgcccggcctggagtgcagtggcaagatctcggctcactgcaagctctgcctcccgggttcacggcattctcccatctcagcctcccgagtagctgggactacaggcgcctgccaccacgactggctaattttttgtattttttttttagtagagccagggtttcgccgtgttagccagtatagtctcaatctcctgaccttgtgagccgcctgccttggcctcccaaagtgctgggattacaggcatgagccaccgcgcctggccactataaaatatttaaaaccaactttaagtgccagtaccttcctcagaggcattagaaatatattatgaccacttttttccttaaaatgcacattcatatgtcaatgttttatatgatttttag

SEQ ID NO: 900855 - DNA, 547 bp, Homo sapiens
ctttgcatagaattaaattatgccactaacagatttcagtttgaggtatttaatcttttttctgtctttactcatamctttaataaacagtaccaaaaattaatccagtttgggcttgttcaattcatcttttccccctacatcttaaaccctattctgataaattaatagtcaggaacttttgttttgacttatctctaggaagctaaattaatcatatttagattcaaattaatgaggctgaaattatgaataatttgatttttaaaatattaaaccttgtgttgtggaatcatgttaaagtgttacatacagagtaaaaacattctctaaatacattgatatattgataaattgacagacatacccagcttgtctccctatctgtttttctctcctcctttccttttatctctctctctgtttctcattctttttctctctctcccagcatgtgtgtgtgtggattttaactggcctccttgatatttcacaatatagaacaaagagtgaatgaataatcttgcaatgtagtgagaaacaatac

SEQ ID NO: 900856 - DNA, 576 bp, Homo sapiens
cttccatgttacttcctaaggatattatgtgtaacaatgctagacaggattgtaaatcatatacagagattaactaaggctcaccaatcattcaatgttgtagagcattcacttgactgtagataagatcttctaagtaacaagacttactgtgttattatatagatatatgaagttccacattactatacagagtaaggcagacagcagctgttcccagttatacatggtgacattaacatgacaaaattcacatcagccccaaaactcatctaaaattccattacctcattattgattaattgctccaactttaaatgtacttgggatgaagctgacttatatgtctactttgtctgtttagtccagaatgttctacctgtcaaaatgaaggaatccgatgattttctttcaaaaaagagaataggtatactgactggcacagttgcccttgataaaaacaacayatatgcacaatgggcttattcatcctaacaaagacaaattacacatgtaacaattatgcatgtaattagttccccatgactaaaataatggaaatactttaaattttac

SEQ ID NO: 900857 - DNA, 618 bp, Homo sapiens
aaatattgaagttcccaaaactctttttggaaaaagcgcaggttgcagctcttactgtgacttttctttcttttwtccagatgtaccctcaactttggcaaaataagcctttaatgaattgagctctgtctcattcactttttggttgacaagttcaatttttgagtttatttgctttgcatattctttgtttgtttcaggccataattattaagtataaagggttaattttgtattttcctgattacttgtaacaagtttcccttgctgatactgccatgctgttaattgcaaagaaaaccttgaaatgttcctagccataaactttagagactaacttgaatcaagaacccacaacaagaccaataaaatgagtggagagaattgaaaacaatgagcaaagatgcttagaggcaaaggtacaaagatgactataaaaaataaaatatagactttaactaccacctcattttaaatcagcaaaactgtatacaaactatagatataataataaaagtatgtgtgtatatgtacatatatactcacacacacaatacatatataatacagtttataatacacaatacagtttataatacacaatacagtttataaata

SEQ ID NO: 900858 - DNA, 558 bp, Homo sapiens
gtaaagggagtagagtgttctttgtcaatacttctcacccattttcataacaaacataaaaatttgataatatttgtactgcacactgggataaactgaaggggatctgggcacaactatccatggcttgctgaaaaaaattattacattatttttctaacatataataaataaaaacccaagtactagaaaagtaactaaattttgaatatttataaaacacgtaaataaggtatcttccaatcttttaagagaaacttgagcttgattctatgcacataaatattacatcagcttttatccataaaaataggcacaaacaattcctgttcaagtttttaatgacaagctcttcaaactctagacagtctacattgatgagaaactttattctcacaagtgagtgataggtttaaaaccattttttacaccagatattttacagccatttaaaattttggaaataactatcataaayatttgaattttgaacattgtaaattcaaaaattgacaatagttaaaattacatttaaaagaccagttcttcctttttttt

SEQ ID NO: 900859 - DNA, 573 bp, Homo sapiens
ttgcctcagcttcccgagtagctgggactacaggcgcccgccaccatgcccaggtaatttttttgtatttttagtagagatggggtttcactgtgttaaccaggatggtcttgatctcttgaccttgtgatccacccgccttggcctcccaaagagctgggattacaggcgtgagccaccacgcccagccctggctactttcttatttttatgtagagatagggcctcgctatattttccagactagtcttgaactcctggtcttgagcaatcctccagatttggcttcccaaagagttgggattacaggtgtgagccactgcacctggccaattcctcagaatttatatgaaacctccttggaaaaaaaaaaaaaaaaagtggggcaaatcagaattaactgaatggagcccaagtattaaattcagttttaaaaaataaagttataatgtttcaaatataggatctttaaaaaccatacccatatcatcaacaatgaaagtaactgaccagttcttcygagaaagaggataataaggtaatggtgtggctaaactgggaagtcttcaaaaa

SEQ ID NO: 900860 - DNA, 585 bp, Homo sapiens
tttgttttgaaatatatagttatttttcataaaagtatattatttgtgttaaaatataattagtaatttttaaatgaagtaatatgaaataataacattatcttttgttttctcagttttaatctgtaatacwttaaatactgatagacataatacacataaaccaaatctctttaaggtcctcaatgagtgtaaaggagttcttagatcaaaaagttagaagactactggtttattttaagttcaaaggatttttttctctaacactttgaagatgctacttcattgtgatcttgcatctcatatcattaaagagaagtttgacattaattttattcttgctcctttattggtgatctgttccttccctcaaaagcttttagaattctctttggttcttagttgtttctacattttattgcagtatatctaagtgtaagtttatttttatctatactgttttgtaatctatagattgcttctacttcctcttattctggaaatttctctattattatttcttaaaatattgatacttctttgcttattttttcctctcctctagagtcctctattcgacagatg

SEQ ID NO: 900861 - DNA, 603 bp, Homo sapiens
ctcttccactgttgagtggggtctgctccttgatagccagatctgctgcctcttgtctcctcaccaaacaggaactgatgtggatrtgtgggaaaaggaggtaagaggagaagcagccagaagtcagaacatacgataatggctgcaattaaacttgagtgactggagtatgcccagtgttaagtcctagaatgaagttagaaaatatttccaatgaccatagtagaggaaacaaaattatttaactgtatgtttatatgaacattaattattaaatcctaaaatacgtatatatgcaatttcttatttttatgctacatttaagaatccaatagtcagattattgtgccaaagtgtaacttgcctttggatgaatttcagttgtttattcattgatttaaaaataagaatgagatgtacacttctcaataataagaatgagatgtacatctctcttttcaataataagaataagatgtacacctctcctttcaataatgagaattagatgtacacctctcttttcaatgaataggcacaactttgattagttcctgaggttgcagagcccaaggtggaaggaacgtgaatgtgcagttagtc

SEQ ID NO: 900862 - DNA, 622 bp, Homo sapiens
gtttgaactctacgttggcccctttcagccatggctagtgcagctgggacacagggcaccaagtccctaggctgcacacagcttggggactctgggcatggcccatgaaaccactttttcctcctaggcctccaggcctgtgatgagagggttgccatgaagacctctgacatgcactggagacattgtccccattatcttggggattaacaatgggctcctccttacttatgcaaatttctgcagtcagcttgaatttctcctcagaaaatgggtttttcttttctatcacattgtcaggctgcaaattttccaaacttttttgctctgcttcccttataaaactgaatgccgttaccagcacccaagtcaccttttgaatgttttgctacctagaaatttcttctgccagataccctaaatcatctcaagttcaaagttccacaaatctctagggaaggggaaaaatgctgccagtctctttgctaaaagataacaagagtcacctttgctcccrttcccaacaagtttcacatctccatctgagaccaccttagcatggacctcagcatggtccatatcactatcagcatttttgtcaaagccatccaacaagtctcta

SEQ ID NO: 900863 - DNA, 677 bp, Homo sapiens
attaataaaaattataaatattcagaatgtacactgtgrtattttaatgtatgtatacattgtgaagtaattataatcaggctaattaacatatccatcacctcacataattaacttttgtgtgggttgtgtggtgggaacacgtaagatctactttcttatcaaatttcaaatgtacaataaagtattattaactatggccaccatgctgtacattagctctctagaatttattcattctgacagaaactttgtattctttgactaatacctccccattcctctcactcccaacccctggcaaccaccattctactctctgcttctgagttcaacatttttagattttacatataaggctgaaaaaatattcctttgtatgcatacatatcacattttctttatccatacctccattagtggacatttaggttgatccatatcatggctattgtgaataatgatgcaatgaccatggaagtgtagatatcccttcaacatacctatttcagtacctttgaaggaaattgtgggtcatatgttagttttttaattttttgaggagcctccatagggtattttataatgactataccattgcgccctgccaccaaaaatgtacatgggttcctttgtctttaaatcctcaccagagattgctatctttttgataatag

SEQ ID NO: 900864 - DNA, 560 bp, Homo sapiens
ttcattcttttgtggtcccactcaaattttagaattgtttttcatatttctgtgaaaaatgttgttgaaattttgatagggactgcactgaatctatacagcactttgtgttgtatgaacttttaaacattaattcttccaatccatgaacatgggatattttttcatttgcatattcttcaatttctttcttcaatgttttatagatttcagtatacagaactttcacctccaaagtatttttttgcattattgtaaatgggacttccttgatttctttttcagatggttgttagtgtatagaaacaataatgatttttgtacactgagtttgtatcctgtaactgtattaagtttattagttcaaacagcttttggtgggtctttaggattttctatatatgagatcatgtcatctgcaaacaaataattttacttcttccattctgatttggatgcctttttctttttcttgcctaactgctctagctaagacttctaatacagttgtcccttggaatcagcaggagattggcttcrggacccctcaaggataacaa

SEQ ID NO: 900865 - DNA, 565 bp, Homo sapiens
gctgtatttgagccagagcaaggaaacaaagtgcatctggatataacaattgaggatggagtaagacaagatcagctcagaggggtaagaatagtccagaccctgtaggaatttattggcccttayatagatgttgacttggaaatcaatagattgctctgcagaaagaagtgatacaatccaacttcagttttaagagatcatcctggctgctgtgtagaaattagtcttttcaaaggtaaatgtgaaatcagattaagacccttgtgtgctatcccagaggtgagaaaatggtgatagaatggaatggaaatagaatagaaataggatggaaatggaatagaaagcaatggaagctgtgagaacgttttgaaagattttgatagattttttaattttgctgggaaaaaaattgaggagtcaatattgatgtcgagtttttgtggctttctagtactgatcaacatttcatcagaatcctggaattgatccttatttttgctgcaaattcagagaagttggccttctctttgttgagtgggtcatacttgctggtattcccaac

SEQ ID NO: 900866 - DNA, 572 bp, Homo sapiens
actggaggaaactatcttaaaaggctacatactgtatgagtccaactacatgacaatctggaagaattcaggcacacagaccaatcctagctgcatcatttaactagctgtatgcctttggkcaagtgacctaagctctcttttccttaagttactcatctgtgaaataggactaaacctcatggagttattctgagaattaaaataagaataataataataatgcatataaagagtttagcacagtatcagacagaaaataagcatttgccaaatatctcatttataagaaacatcctgcagtacattcttaaagatataaagaaaataatcaatattcttcaggagttcataatctaggagagaccatgaaactatagtgatactagttcataataaattttgtcataatgagaaatgtgattaaatcaggagttaagagccttaaaggggaattccactgcaatctattgtaaaaataaaaacctccagacaccatgacaagtataaagactgtctcagatatgttgctcccatatagttctctgcggagctcaaatcctggtattagt

SEQ ID NO: 900867 - DNA, 619 bp, Homo sapiens
tcttgataaatataatagagcagctgtcaaactagagatttttcttattgaggaaaaaaccctttttctatgctggtgaaaccaagatttttgatggattggtgggattcaatgtaaacaagtttacgagctgcccatatgaactatcttgaatgagtacgatttgcctaaatttttctactattatcagaagaggaaatatggtgaatgtaatttttcgggggccaaaaatatgatataaactttaagactcttccatatttgattaagtaatgagtcatgcttatcatggagttgttgaaaaaactattttgaagtgtgtatgtagaattctactttcttttaaaatctctcaaggatctcctggataaatacttttcatgatatattttcttatttatgcacatgactttagtaattctagatttttgtttctggtgactcagtttttgttctataattttatgaatatgtctatacaaaggagaytaaattgcctcaccatacaatgtaaccaatcactcttacaaactatttcataaaatagtgccttgaagtcagattaggaactaatcctccctttcaaggttagtctcaaagaaagcaatcaattggctgc

SEQ ID NO: 900868 - DNA, 617 bp, Homo sapiens
ctcaaggttttataaggattattcataaatttatacagctttattcctttaagatgtttatctctgtttctatatagaaatctggccttattttttcaaattcacctttggaaaaatcgaagaarctaagaaaatatcttcaaaattgcagaagcctcccaaacttaacaccaacaccctgtagtatctggagctgaattcagtggaggcataatttgtcccagccaattactaaaaaaagaaattgtttttagtgatctgtaacctcttaataggtttaatgactcaaatcctattttaattgcttaatcatgagcaggaaatacaaaacaatttatgcagacttgatgttttctgtctagtaattttctttaactctgcccccttctccaatccctgagctgtaataatagccaacatttgacagtgagtgggtgccaggcactgtgctaggaagaaagtgttttgctgcagcaatgtctcttttaatcttcacaacaaccatgtaagatagatatcatgagcctcatcctactaatgaggaaactgagacttagaaaggacaaagtaacagctagaaagtcaaggagatggaactcaaactcaggtgtgtctgc

SEQ ID NO: 900869 - DNA, 700 bp, Homo sapiens
agaaacagtgagaattacaggcagtagcagatgacagctgaacacttcatgtaaggaacaggctgaggaactgcttcttaatgttttttctattccatatagacctaggtggccagttctccacatcacctgaaagccagagaaacagcagcacctataatggagtcaatgggatattatcagggtggcccatcattccttacccagatataatctcctgcacatcctaggactaagtaattatagcacagctttttgttgaggaagagtagagtttatggcaaaggaaaagggagagtgcctgagattcagggtcatcttgtaagaaagcaaatgaggcaaacatagtgattgagccaatatagcaacccaagaggcttaccgccctgaggagtaccctgtctccaccaccacactcaccaggagggatgtcagccatgttctggactttaaactttctcccagtacatactttcagccaaagtacttaataatcccagagcagtaagagttgtctagtaaaaataacaagacatctgagaaacataactgcaataagagaaagataatatatggaacaatctgtaacaaccaaaccaaaataaattaatagatcggagagaacaagcayttaaaataagatcaataaatatcataaaagtggtgaaaaaggacatttgtaggatatttaatataaagc

SEQ ID NO: 900870 - DNA, 617 bp, Homo sapiens
attaaaataagtagaagggcggttaccagaggctgggaaaggtagtggggagatgagaagaaagtgcagatggttaatgggttcaaaaatatagttagtataaaacctagtatttgacagtgcaacagggtgactacagtaaaaaataattgtacattttaaaataactcaaggagtataattaaattgtttttaacacaaagaataaatgcttgaggtgatgaataccccatttaccctgatatgattattacacattacatgcctgtatcaaaacatctcctgtaacccataaatatgtatatctactatgtacccacaaaaattaaaaataaaatctggctagcacaactaaaaaaaaatggaggaacagaatataatatgtaaagagtctgatttttcttatccgctggattaggagaagaacagtaaacaagatttatgagcttagactcattgcaggcctctccttaaataaatgtcgctgagkatccataatgtgtacttcagaaaggaaaatatttttcttttaagaaatgacatccaccttgagttttccaagaacatccacctctttccatgtgaaatgtttgtcaccccctttcactgaagatatt

SEQ ID NO: 900871 - DNA, 589 bp, Homo sapiens
gtccaataaacgttgagccctcaacaacagaggatagaaaagaatgtcatcaatatgtttgggtatgaatggatatttttgtrtaatatgcaggtatcacacagagatctggtaagtaatcttgtactgtcacttcggtgttttcacatgccttccaaaatcaacttgaactcttccaaaataggacactcaattaatgtataattaattgtctgttttgatatcattttgatatcattttgtttcttccttcaacgcctctacaaaaccaacacaccttctggcttttttaaaagtagcatactcctatgaagatgcataaatccttcatattagtgtttgcctagctgatttttgttgctcattagtgaagcaggaacccaagtaagtgggttgtgctcactgtttttaaatttgcattttaataaagaatagactggaaaagaacatagcagaataaaacaatacaatagaacacagtgccatagagataaaatatcataggaaattactcaggtgctttgcaagaattacacatattgcagcaagtgctgtgggaaatttgtaagtgtgaagtaagccagccagt

SEQ ID NO: 900872 - DNA, 548 bp, Homo sapiens
caaggaattacaagttgatataggactagcacagcctcagaacctactttagagcaaaacagtgtatcagtgtagtttactgtggcatcaactacttctgttatacacacatacgcacacacacatacacrcatatgcaccccacccagaagctgttaatcagagagagaaatataaatgtaacagtccatgaaaagcacaactgatgtgcctgtttaaggataatactctggtaaggtagaacactgtatttcaaaacgcaatatatcccctaaatcaatagctctcatatggtgctaggataaaaaagttgagatatatggatttgatagctgagagtggttctcagtaagtaactgaacttatttttatttccagctacccatttaagaggtttttacttatttctttttttttttcctcagagatctgggttcctgtggaagaagactttcaccagagtacacagcaagagtccctttaaacttcaatccttggctgttgtaggtatacttcaggacttgttgtcaaaataccaataatcaaga

SEQ ID NO: 900873 - DNA, 645 bp, Homo sapiens
ggattttctaatggattggatattgtgtgtcggataaaaagaagtcaagaatatcaccaaaatcttggatgtgggtaactggaaggttggaattaccctcaattgagacagggaagaatgagaagaaagcaggttaggatattaactgttgtctctcagccccgcacttgcccttctatactcttgtcagtacttctggggataggagtctgcaaactgcatttcccaggctcccttgcaatttggcttcttgttaggagtcactactgggagatcagaaggtgacaggaaaagaaagtcttcctacttctggggtaatgtggtagttaccagtagttgctaacatgaaggtgggtaggggtgattccataagccaacagcccaggcaggggcggcagatttctggcagcttcagcactgatcctgaagatgcagacctgacacaacagcatctccagcatggcaagcttgtgagctccagtgtgggagtgcatgcagcttctgacctctgggtattgttccttcttcctttattacttccagacctcctccattttcccttttgcacttccagctcttccaacacctatgaaacttcccggtattgaaatgcayagtgttgttgttgttgttgttgttgttgtt

SEQ ID NO: 900874 - DNA, 509 bp, Homo sapiens
ttagaagaagacgtttacatggccaacaaacatatgaagaagctcaacatcactgatcatcagatgaatgccaatcaaaaccacaatgagatatgatattatgccagtcagaatggtgattattaaaaagtcaggaaacaatagatactggtgagactgtggagaaataggaatgcttttacactgttggtgggaatgtaaattagttcaaccactgtggaagacagtatggcatttcctcgaagatctagaaccggaaataccatttgacacagcaatcccattactgggtatatacccaaaggaatataaatcattctataaagacacatgcacatgtatgtttattacagaactatttacaatagcaaagacatcaaaccaacccaagtgcccatcaatgatagactggataaagaaaatgtggtacatatacactttggaatactatgcrgccataaaaaggaatgagattatgtcctttgcagggacatggctgaagctagaag

SEQ ID NO: 900875 - DNA, 626 bp, Homo sapiens
aacaagcctgtgttatctactcgycagactctctagcaagcaactttttcctctctgacaggacaatactgtttttatttttggttcagtattatcatgataagtaactctgtccaggatattcattcatttattcatatgtcaagtacttggtatttgcaagatactctctcaggacttactattacttactccttatgactctgtgcttcaagaagcacagggaagtgaaataccacttcccttatttcctcaaacacaggatcacacgagccagcatttgcttaacaaattgtatttgtttaaatttgtaaaaacaaaaataaattgttttatttcacaaatttgtactatttgtatttgcttaacaaatcccattcattaacttattaaaacttcacaaaaatcctatgtggggattttacagctataaaaactaaaactgagagaggttagccagccattgatcataaagctaagtgaacaggattcatactcaggaatcctgattctgcacttacttaccactacactacagctacctccaaagagtccacacagacccaatgtataagcatggagtataccagacccacagctttcttctaagtccaggtcaaacactg

SEQ ID NO: 900876 - DNA, 575 bp, Homo sapiens
ctatggttgccctgacagtgtatctaatacgtgtgattagtcatattcttcactcctcaacaaaattacatcagtttttcacagtagtcaatgaaccttatatcaacacctcaacaaccttttttataaaaatcttataatttggttctaaaatgatatacagaaatgccccaaggcaagagtagctaagacacttttgaagaacaaatttggataacttattagacttcttataaaacagtggtaattaaggcaatgtggtgttacacgagtaatcatgtagatcaatggtaaaagagaatctgaaaactgataattacctgtagacacttgaattatgacaaagttggcattctagaacaatgggaggaaactcaccttttcagtaatgcctctggctcagttatccaaatgggtaaaacaaagaaaaaacaaatttactgcataccattcacaaaatttactctgcctaaacctataatagaggacaatgtatagcagtaagtatagatcagkcaaaaagaaagcctgaaaatacctaagcaacagtctcaataggttagaataaaaaaacg

SEQ ID NO: 900877 - DNA, 667 bp, Homo sapiens
aattgtaataatccccacatgccaagggcagtgctaggtgggcataattgaatcatgsgggaaatttcccccatactattctcctggcagtgaataagtctcatgagatctggtggttttataaatgggattttcttgcacaagctctctcttgactgctgccatgtaagacatgtcttgcttccccttccctttccaccatgattgtgaggcctctccagacatatggaactgtgagtcaattaaacctctttcctttataaattaccaattctcaggtaagtctttattagcagtgtgagacagactaatacaccagcctgcagaactgtgagctgataaaattctgtttattatatgtcactcagtctgtggtattctgttttatagcaacagaaaaaaaacagattaaggccatatatatatataaaatttagcaatttcaatttcagtgtttagaatagtctgtcatgttaggtaaaaatctaaaagatttctgggcttctaatttagaatatataacagatttggacttgaggttttaatttataaaaatgttactgcatttgtaaacagtatgtgattgtgccaaccaactaattatttatagcatagggaatactttattgtattaagttagtaaatacttgacaagttttgatttctt

SEQ ID NO: 900878 - DNA, 670 bp, Homo sapiens
ttcctattggaataaaaccactagcctctcccatgatgaataagcaaagacagatagggcacttgtcttgtgatgggagatgctggagtgatgatcaggctgtcctgattttctctgaggaggccttccttgactatgcagttatttgttctttttgcattattgttcatattttgatcttcttttgattatttgataatagatattaattcatttgaacaaattaagatgtcatcatatctaatgaatatctttgattgaaaactgcacataaataaaagccatacaaaaaagttaatcattcatagcctaccttggagtgtaacagatgttttaattaaaattgactgtgagatatattatcccgtggtgtaatttaataaatagtcattattacaataaattacaatacacatatttacttgacctttattgctttttttgcttattgcgatagagactgaatttgtttcaatgtcattgtttatcatcttttgttaagaaaatacaggttattcttttcttaacaatgcgcttttgcagttttcarcttctcagaaactctgtgattgctttatcttccatttattttcacagtcagtaaatgttcaattatctttttgaggttaaagaaaaaacaaaagagaccactaatgctaataatttttct

SEQ ID NO: 900879 - DNA, 406 bp, Homo sapiens
tgcttgtgatcagtttttcactgcactagattttcaaaggcttgtgaaaacctcaccctcagcaatgggtgttagtaaaaccaggtcctcagtcacaccatagtaaataagaactcagtgggtaaagcagagtgggccattgaaaggtaccacccagatttgggtctctggtacagttctgggagctctgagtaagttctttaaaatacctatgttctagtaaaagagatttcttaaataatataaaatctaggctgatacgtaagggcagttctaaaacatgcccctaacgtgccttgtaggtattaatggtaactatactgatgaactttgaagagatgactggaaataatctatggaagctatcctacaaagataartaccccaaacaactggtttcatgtag

SEQ ID NO: 900880 - DNA, 652 bp, Homo sapiens
tatcagctgggcatatagtcattttaaattctgaattaacctgaagatgaaagaacagtggccaacttatttccttttaagaaaaactctctctagttaaaaatacaacatgcataagtatgtgaggtaatgtataattattaatagctcaatttagcctttccataaggtatacctatttgaaaacatgttgtacatcataaatatatagttttcatcaatttaaaaataacttaaaaataaataaaaacatcatttataagtctaaaaagtgctaggggcaaaataaggccctctctctagcctattgaaccattttgaagtaaatgattacagctgtggaatgcttcaaggaacttaaggtatgatgtgacagcttgagtttgaaagtcttctctcgttcttttttatgactgcatagtattccatggtgtatatgtaccacattttctttatccagtctatcactgactttgcagggacatggatggagctggaggccattatccatagcggactaacaaaggaacagaaaaccaaacacygcaggttctcacttacaagagggagctaattgatgagaacacatggacacacagaggggaacaacacacactggggcctttcaaatggtggaaggtgggaggagaga

SEQ ID NO: 900881 - DNA, 576 bp, Homo sapiens
aaaccaactcaagatggatgaaagatttaaatataaaagctaaaattacaaaaaccctggaagataacctaggaaataccattctgaacttagaacctggcaaagatttcatgrcaaagacaccaaaagctatggcaagtaaaacaaaaattaacaattgggacctagttaaactaaagaatttcttcacagcaaaagaaattatcaataaacaaacaacctaaagaatgcaagaaaatctttgcaaactatgcacctgacaaaggtctaatatccagaatgcataaggaacttaaattagcaagcaaaaacaaaccaccccattaaaaagtgggcaaaggacatgaacagacacttttcaaaagaagacatacaagtagcccacaaacatatgaaaatatgctcaacatcactaatcattagagaaatgcaaaaccatgccacatgagatattaaaaactgcactcacactggtcagaataattattattaaaaagtaaaaaaataacagatgttggtgaggttgtagagaaaagggaacacttacacactgctagggggaatgtaaattagttc

SEQ ID NO: 900882 - DNA, 591 bp, Homo sapiens
tatccatctgacaaagggctaatatccagaatctacaaagaacttaaacaaatttacaagaaaaaaaaaaccaaccccatcaaaaagtgagcaaaggatatgaacagacrcttctcaaaagaagacatttttgcagtaaaaaaaatatgaaaaaaagctcatcatcactggtcattagggatatgcaaatcaaaaccacaatgagataccatctcaagccagttagaatgatgatcagtaaaaagtcaggaaacaacagatgctggagaggatgtggagaaataagaacgattttacactgttggtgggagtgtaaattagttcaaccattgtggaagacagtgtggcgattcctcaaggatctagaaccagaaataccatttgacccagcaatcccattactatgtatatacccaaaggatgataaatcattctactataaagacacatgcacatgtatgtttattgcagcactcttcacaatagtaaagacttggaaccaacccaagtgcctatcagtgatagactggataaagaaaatgtggcaaatacgcactatagaatatatgcagccataaaaaaggatgagct

SEQ ID NO: 900883 - DNA, 619 bp, Homo sapiens
ccacttccatatattctattggccaaaaatagtcacatgcctggctgggaatggtggctcacacctgtgtaattccagcactttgggaggctgaggtggacggattacttgaaactaggagtttgagaccagcctggacaacatggggaaactctatctctataaaaatttgtcaggtgtggtggtgagtgcctgtagtcccagctactcaggaggctgaggtgagaggatcacctgagcccagacaggtcaaggctgtagtgtgccatgatcacaccactgcactccagcttgggtgacagagatcctgtcttaaaaaataaaaaagagctcagcctctagaaccacagccctgggcttaagtcctgactcacttgctattgattttgggcaagtgccgctcctctctgagactcacatttcccttctataaaacaggtgctggggccgggcatggtggctctcacctgtaatcccagcactttgggaggccaaggcaggcgaatcacctragttcaggagttcaagactagcctggacaacatggtgaaatcccgtctctactaaaaatataaaactaagccaggcgtggtggcgcacgccagtaatcctagctact

SEQ ID NO: 900884 - DNA, 573 bp, Homo sapiens
aatgtgctacaaaactctatgaagtttcagggctgtcacatttataaaatgtatagaaatccaatagtctggagcatgaagttcaatgtaaaaaaatgaatcaatcattgtatctcaacttccaccgtttaaaagaatcacaatgtcctgtgagacacattgagttgttaagacagtatattctacatgggaatattgtttcaacccatataaaaatgtaataaaagttgctagagttgagtaaggctcagagtaggaaagggctgagacaagtgtgggctgtagtataaatgatattggagatactagtaatggtaaaatatgctcaatgtgacttatgcaaaaggtagacaccccagagtgctgaacaaggctatgttaagtggcagagtatttattatatatgtcaagtggcatagtatatgttatatctgttaagtrgcatatgttaagtggcatatatgttatacatatgttatttatcagttatatataacacaagcatatatgttatatataagtggcatatgttaattggcatattatgtcaaatatgttaagtggcatattata

SEQ ID NO: 900885 - DNA, 628 bp, Homo sapiens
acaggggtaaaattattgtctgcattaagcctttattatgatggatgacaatgaaactgggtcaaaggcaaatgagtttgccaaataacatgctatttgtaatcatgttgaaagatggtcccaggactcctgaatcacagcgagtaccatttgtgctcacaattataaatgctattacttgaaacgtctgaagaagaagactaggaacagaataatataattcctgtgtgtgggccaatatttacattagcataataatgttgacaggtttctcagcaatctcttagctaagcacaaaacatttacaacaaagtgttgatagacccagaaatggaaatccctttggaaagctcagtgagtgtcaaattccagacagagctaatatatttccgtgagatctgagtccaccatttaaacctccaattttgaaaacaccatattcatcatttttagagtttaacagtttcatcactgtcaaatacgtcatactaaaaaatggaaaatcagratcttcaaaacacgtagaattcattcaattcaacaatgaagcagcatttatttcaatgcagcctggtggagcaaaccttgctaaacttcaagaaagaggtaggtaaagcacctgccaaat

SEQ ID NO: 900886 - DNA, 684 bp, Homo sapiens
catttgttcatagagccaattaaaaatgatttttttcacaccaygtcactgtatacaaaaaactaaaacagatacaacaataattatacactgcagtagtacacattgaatacaatgaagctttggactaaaggaaagaacaggagaaataataaggcagttatgtggaaaacttcctacaacatttgttgattaattgaattgtagaaaaaaggaaagatattaagagtgacttctaagtttctcattggaacctcacaagaggatagtactataatggggaagagtagaacagtgaaagttgaaggtgtatgatatagtttggatatttgtttctgcccaaatctcatgtataaatttaatccctaatatttggggtggggcctgggggaagtgattggattatggggagcagagttttaatgaataaagtgagttctctttagatctggtcatttaaaagtgtggcacctcccctgtcatttctctcgctccctttctcaccttgtgacatgcgtgctccccttttgtcttctgtcatgattataagcttcctgaagactccccagaagccaagtagacattatcaccatgcttgctgtagaaacgtgagccaattaaaactcttttctttataaattacccagtttcagatatttctttacagcaatgcaagaacagcta

SEQ ID NO: 900887 - DNA, 639 bp, Homo sapiens
gactgcaggcagagagataagcccagccatcccagtctctccgctgacctgctaaccacatgaggggccacctgcaggctggcagaagaacagcccagctgagcccagctcagattgaagaacagttgggggtggtgattttttaagccactaaagttttagggtaagtttgtcagcaatacttgacaaccaaaaacactggtcattcatagatgccttttttctaagtacaagacaattactcaaatgcaaggaaaatatggcaaacgttttcccaccacaaccttctcagtcaacagctgaactataattggtcatcgactgaaaaaaaataaaaaagccacgcctcttatcttagttcataaatatccatgattcttttcctatgactctttaatgccaatgcaaaagtagaccagtcagcttctgacagtctcaggcactggcttagttctcatttggccaaaaatagaagccatcaaaatgaattatacactactcgatacatgacggtaaatgagattgttctcacttttctaggatgtcgttacttaattttcccagatcatttcttcttatcatcccccacaatgaggaaaaaaamttaaactggttaaggttataaaaagaaaaaaaaaa

SEQ ID NO: 900888 - DNA, 531 bp, Homo sapiens
taaatggtgaatgatggggcaagatttctaaatattggagtgagagattataggcaagtaaggaaaagaggacagaataatccaggtggtcatggattagagttggagacatcaatacaacatgtttagtttaatatagaaaaatgcagttaaatacatgtgtgtatgtgtgtgtgtgtgtgtacatgggttgatctatccacatatgcttatttgctttaccagaactaataagcatacttaactttcatagcttggcttctaatttaatgtcattctcaaaaatgtaaccaaaccgtcttggagaaaaaaaaggtgattctaggactcgagcaagaaatgcataaaattagcatggatttcatgtagtaccagaaagttttgaaaacaacaacagcaacaaatagacaaacaacaacaaaaaacagcaatgatggcggtataccgaaagaatatcagagtcaaatttaagcaacaaaaaatgttgtacgagatmataacttaaattatcaaataaatatccttcggtgc

SEQ ID NO: 900889 - DNA, 632 bp, Homo sapiens
gcgtccacacaaatacttgyatatgaacgttaataaccatttcatttgtaacagccaaaaacagaaaacaacccaaatggtcatttgcagatgcccagataaacaaattgtagaatatgcaaacaatggaataccattaagaaataaaaacaatgaacttctgatacatacaacaaaaattaattgtccaataattatgcttaataaaatgaagccattaagagtacataatctatgattatatttatataaaattccataaaattcaaactaatcgatagtgacataagatcatggttgcctaaagacagggaaagggtaggaagaaaagattaccaaagggataatcccttgataatcatttagggagcaacggatatcttcattatcttgattgcattaatggttttacaagtgtgcatgtatgtcaaaacttagcaaactgcacactttaaacatgtgcagtttattgcatgtgggttataaaaaatggaaaaagaattattgagtcccaaaataaatataaggcaatgttacatcacatttttagtagactttatggaaagaaaaggtaattaaacactgaattagagggacaaattagaattatcaggctttccaaaggcaaagaa

SEQ ID NO: 900890 - DNA, 567 bp, Homo sapiens
tcgaaatttttttgacctatctatgtatcttaaagacctttaatttcatcaataagattgtatttctaattttcatcaagctagtgagcaggtaacaattttcaatagaatttttatcaatagaaaacaatttctgatgtccaatatactaattagaaaagcatggcttgatggagattgggataacagaagagcctgtggttgctcctcaggagtacttgttttctgatgtaacactagctcatctgcaatatagcataagctaagtaacacacatggtatcatactatatgtgcaaaaaaaaaaaacttcaaagtaaattatagatatagtgacagttgaactcatacttcgctttttagagccaaatacatcccaggtaaagcattttttgtgtaacgtggattttaaaaggtagttgaggttactaaagattgctaaaagaaaataagagaaacattttgaactcttattctctctctkaacaatcaaacagaaaccagaagcaattaaaataagatatatttggcttcctaaaaacaaaaattttaacataaattggttcaa

SEQ ID NO: 900891 - DNA, 549 bp, Homo sapiens
gtctgcagattgagtcatggaatgaaaaatgttgagtgaggtaaaagcccaaggcaaaaagataatgaactcaactttctgcaacttcttttcccagcaggaacccctaaatgaattgccaggtctctttaagactggctcttcatggccttttaatgcctgcagctgctgtggggaggaaggcgttcaattatcaattcattcctcaagtcagcaaatacttatggagctcctactatgcgccagacacttttctgggtactgggatgttgtggtgaacaggataaacaagatccctgctcttacagatggtacaggcaagttggagagagaatgtatactgaagccaaaacaggataactccagctggcaagaagtgccaggaacagagtggacgaagcagggttacctggtggagagcgactggggctctttaaggtaatcaggacaggcttctctgaggagkggggatttcagctgagctatgaaggatgtctgggtttcttttgaaccaaagtctgcctctccttctgaagctataatgttgga

SEQ ID NO: 900892 - DNA, 592 bp, Homo sapiens
cataattatgggtgtagaatgtactaactggttcatacccttcagaggctgtctgtggagctgatagtcaggtccctttcaccctaaccacatggcttggaatattgtgrtatataataaaagctggactatgaggaacaaacacaaggtaagcaacaaataataaatacttcctacacagggcgactaggtttctatttgaaaataatcttcatacctgtaattaaccttcttaagagaatggcattcaagcattcttacaaacctcacaagctcatcacaagatacatctagcatttaaagaaatggaatctatgaagaagcaccaccgactaaactttgcagaaaaatctgtttttatcacagttggtgggaaaaaaatttcattaagtattcaaaagatgttcaccagtttagactagtttataaggttcttcataatcaagccccatatgcctttctagctttatctcaagacgctatgctcacttcacactttttatacagtcaacatctttaccagacttctcaccatttcccccaaagcatcatgatttttacatgtccatgcttttatttttatttacttatt

SEQ ID NO: 900893 - DNA, 682 bp, Homo sapiens
cttggccccaggcttgtgtttgcaaatgctaagtgggtgcagaggctagaagtcccttaatctcatattggaaaaatttactgtaraaagaaatgtaggctctagaactaggaaaaaaaaattattctaagctcattaatctgttgagttatttgagcgaatcctgaatcacaggaggaaggtaaggggaggcttcagggcagccaaatgtttgcactttctgaaactttagtgtcagatgagagcagtggaagggaagctgaggcaggagtgggcatagttagagaaggtttacaacagcagtacaatgcgtttagggttaaaagaaggagtcagatatttaagaaggagtcagatattagggttaaaagaaggagtcagaatgggatgatgtcataatatatgggtctcattttggaaggaagagcctgatttaaagagagagagagagaaaggccaagaggcagcaggaccaacaaggaagaatgcccaagctgtgagcctgctgaggagttaatctttgttctgtggagcctcctctcaatctcctgtcaaaggatctgagcctgttacggattttccaactgaagaagagagtctttgatgcctagagactgagagctcacctactcccagggcaacatgtagccagcaggataattttatttcgagcatgcatagt

SEQ ID NO: 900894 - DNA, 629 bp, Homo sapiens
tatgaacttgccgactttttgtcctttttactgtaaaatgagaaaagtcacattgaaaactgcagaagttaaactggcaygtttcacctagtacccctaaggtaacttcagctgtgttttagtaaatgccgtgagtcacagtgctctctctcggttcagagctctttggtacctacaggtcttatttcatatcagaagcagctggatttcacacctacatttgtcacccttctagatacttccttctgagcttattaacaccatccagcagctaccttgaagatatgctgccaggaaaaatgaatgttttctgcaaggagcaaaaaggttttctattcccatatgtcagcacttcagttcaggcccactgccaataactaatagcatttaaacaatagttcattcaggtgagagttacgaaaatgctcctcttctgagatgattcaccagatattgttatgcaaaaatgagaagaaaattggttgatttttgcatctaaaaactactgaagcacatttaaaatgaagctacagatcaggttcccagtccatgcttcacactgaacttgctatttgacaatgaattttcacatgacttttcaacatctcccttttctcacatgtaaaatt

SEQ ID NO: 900895 - DNA, 628 bp, Homo sapiens
agtgtctgtcatgtgtatctggctcttggttccatagaaaccacctgcaatgtgaagttccttcattagcatctttgctcacaagagaagacaaggttgctctgatatatttcttctgaacaactacaactcactttgcgaatacacctgacatgtactctgtatcatttcagtgctcaccctacctcattgtcaaggaaacagacatcagcaccacttagaaagtggtaagaaacctgtaaaagaacagaagtatactgtatattgtgatggggtagagtccctttctctgagggacaacttcatgagattccaatgttaatgaatcaaacccaaactcactgcaaaggatgaaatcagagaatgatagataagatgctataaacaatgctcactgatggcaaaataataacaagggtgagctggccttacatttacagataggtttattaactaatatacccattatacacaacatatagtatgctatgttcacatagtgaaaattgtaaaactggcttaattcagttagtcattgttttgaaaaamttaataactaaaatcaagtatataagcaattgactgcatgcaactaatttatttcaatttagaaattcatttacttggg

SEQ ID NO: 900896 - DNA, 628 bp, Homo sapiens
agtgtctgtcatgtgtatctggctcttggttccatagaaaccacctgcaatgtgaagttccttcattagcatctttgctcacaagagaagacaaggttgctctgatatatttcttctgaacaactacaactcactttgcgaatacacctgacatgtactctgtatcatttcagtgctcaccctacctcattgtcaaggaaacagacatcagcaccacttagaaagtggtaagaaacctgtaaaagaacagaagtatactgtatattgtgatggggtagagtccctttctctgagggacaacttcatgagattccaatgttaatgaatcaaacccaaactcactgcaaaggatgaaatcagagaatgatagataagatgctataaacaatgctcactgatggcaaaataataacaagggtgagctggccttacatttacagataggtttattaactaatatacccattatacacaacatatagtatgctatgttcacatagtgaaaattgtaaaactggcttaattcagttagtcattgttttgaaaaacttaataactaaaatcaagtatataagcaattgactrcatgcaactaatttatttcaatttagaaattcatttacttggg

SEQ ID NO: 900897 - DNA, 623 bp, Homo sapiens
ttagagacttgttggatggctttgacaaaaatgctgatagtgatatggaccatgctgaggtccatgctaaggtggtctcagatggagatgtgaaacttgttgggaaygggagcaaaggtgactcttgttatcttttagcaaagagactggcagcatttttccccttccctagagatttgtggaactttgaacttgagatgatttagggtatctggcagaagaaatttctaggtagcaaaacattcaaaaggtgacttgggtgctggtaacggcattcagttttataagggaagcagagcaaaaaagtttggaaaatttgcagcctgacaatgtgatagaaaagaaaaacccattttctgaggagaaattcaagctgactgcagaaatttgcataagtaaggaggagcccattgttaatccccaagataatggggacaatgtctccagtgcatgtcagaggtcttcatggcaaccctctcatcacaggcctggaggcctaggaggaaaaagtggtttcatgggccatgcccagagtccccaagctgtgtgcagcctagggacttggtgccctgtgtcccagctgcactagccatggctgaaaggggccaacgtagagttcaaac

SEQ ID NO: 900898 - DNA, 654 bp, Homo sapiens
tttccagagacataattcaacctattacaaaagactacttcataggtgctcttgttcatcatcactaagtacattgtatctcgttgcctctcttcgtaatagtagcagtaattgatgatcgatatctggattcttaattcaatgtaagttgcaaaattgtgatataccaattttatcattttgtatatgtatgtatgtgtgtttcaaatatttcttataataaataatgctttatactattcattgcccagtagaagatatttgtgatgaagtaaatgaatgcttgactctttctatttatttaccagtgtcatttacattggaatcatggattattgttggtgctgtatatgtgcttggaaaggttgtctattttccatctttggcataatattctatacatgtctattagattaatctgacttaataatatttttcaaatcatgcatgtcctaatgaaattttgtctatttgttctatcaattactcagagagtattgtgaaaatctccaaagttgtgaatttatttatttgattctatcaggttttacttaaatatgttaaagatttataattatttgcaaaaactttaaggattgcatgcttccttgatatattcatcagttacyctcaatagcccatcctaatcctaat

SEQ ID NO: 900899 - DNA, 653 bp, Homo sapiens
ttgcaacctaacaaaaatactaaataattttctagaacattctttatgggtatgcaattartaattttcactcaaagttatctttctctgaatttagaaatacagtcctgtcttctggcttttatttctcatagaagctatactgtatttgttctccttatatatacaacataaaaaagaactttgaagatccagtggtgcacttattataatctggtacctgtctatttggtgctgtttcattcttttttttttttttttgagacagagtttcgctctagtcacccaggctggagtgcagtggcgtgatcgcggctcactgcaacctctgcctcccaggtttaagtgatcctcctgcctcagtgtcccgggttcaagtgatcctcctgcctcaacctcctaggtagctgggattacaggcgcccaccaccacacctggctaatttttttcatttttaataaagatgaggtttcaccacgttggccaggctggtcacaaatcctgaccttagttaatccacctgcctcagcttcccaaagtgctgggattagaggcatgagccaccacgtccggccataatagtctcacagtaaagaaaagttgaggacctattggcttcactgctgaattctactaagaagaactaatacca

SEQ ID NO: 900900 - DNA, 632 bp, Homo sapiens
ttaaaacaattattttgaattttttttgtcagcctatttatatatcttcatttttggggggtggggtgtggctgcctattgggagattattgtagtgttttggtgtttgctctggtttgaatatttgtcccctccaaaactcatgttaaaatttggtcactgtcgtggtggtgttagaaactgagaatttaggaggtaaaaaggccattagggctctgctcttattggtgggatcagtgttgttataaaggacaaatttggcttttttttttttttttcatctttactcttctgtcctccaccatgtgaagacaaagaattccaccctgagggaaaatgtgatattcaaggtaccatctcgaaatcagaatcactgaagctgccaacatcttaatgttgaacttctaagcctccagaactttgaaccaataaattcctgttcattctaaactactcagtcagttattctgttatagtagcactaatggactaagactattatgtctcctaggatttttatgtttcttgttgccttacattgatgtctgccgctttgaaaragtagggacttattccagtctttgcagcctggctttgcctcggaaagtccaggatcagtcagcccatataaa

SEQ ID NO: 900901 - DNA, 674 bp, Homo sapiens
ctatatctgttgcaatttttatttgttttatttttgaagtaattttgggtttacagaagagttgtaagrgtaattcattgttatatgtttcaatagcttcccctaatgttaatattttacataaccataatacagttatcgaaactaagcaattactgtagatacaacactattatctaagcggcagatttactcaaatatcatcagtttttttgttaatgaccttttttattgttgttccaaaatccaatccaggttttcagcactgtcatacctcattagttttcttcagtctgtgacaatttctctgtgttttctgtttcattaccttgataccttagaagcatactagtaactaatttttagaatgcccttcattatggacttgtttgatactttctcagattatactgaggttatatatcttagggaagaataatttagaagagatggtgtgtttcttagcacattgttttggggattcataatctcaatatgtgttattactggtgattgtaacattgatcagttgattaaagtgacgactgccaagtttcttcactagaaagcttttattcttcccttagtattttttaaattattgcaggagttctttttagaccatgtaatatccaatttttcttaaactttagaccattaattttaaaactatc

SEQ ID NO: 900902 - DNA, 649 bp, Homo sapiens
tcattaacttacataagtatggactcaggagtattgttttatttggggggtggtttataattcaacactataattatgtattttgttgttcaagttgttccagttttggcccttaggagttcttctgagtgagtactgacattctttcttcatgcacctattttttgtttgtttgtttgttttgtttttaattgacaacttcttcagtgaggcatgttttgttttgtccttgatccagctctggatcaaccacttctctaaggatttctggatcttttattaaaaaactaaggtctttagaagctgacatatgcatcctagatatgctcattgcttctggcatgacacaactgacaaagttaggaaatatacacatatatgtatactcatacatgtatgaagagatagtctatattgatttttgcgtctctctatatgtatatataaataagttcacactgaaacctgcaacatcaatccaaaagcaccaggttcattctagactcatccctctgctcacttgtaatttctttctccagaaacttagctctcattatctattacrtattttcttgttattcaaccctaacatatatatgtatattagctagttatagaactgctagcccgtattgctgtggaaaaattt

SEQ ID NO: 900903 - DNA, 649 bp, Homo sapiens
tcattaacttacataagtatggactcaggagtattgttttatttggggggtggtttataattcaacactataattatgtattttgttgttcaagttgttccagttttggcccttaggagttcttctgagtgagtactgacattctttcttcatgcacctattttttgtttgtttgtttgttttgtttttaattgacaacttcttcagtgaggcatgttttgttttgtccttgatccagctctggatcaaccacttctctaaggatttctggatcttttattaaaaaactaaggtctttagaagctgacatatgcatcctagatatgctcattgcttctggcatgacacaactgacaaagttaggaaatatacacatatatgtatactcatacatgtatgaagagatagtctatattgatttttgcgtctctctatatgtatatataaataagttcacactgaaacctgcaacatcaatccaaaagcaccaggttcattctagactcatccctctgctcacttgtaatttctttctccagaaacttagctctcattatctattacatattttcttgttmttcaaccctaacatatatatgtatattagctagttatagaactgctagcccgtattgctgtggaaaaattt

SEQ ID NO: 900904 - DNA, 622 bp, Homo sapiens
aagcacaggaatacagcattaaaccatcaaagctaagaaccctcatggagtccatttgcaacccctgccacctccacgggaacaggcgytggtatccatggctgaaagatccatagttggttcacatcacaggactgtgcagacaatccccagtaccagcccagagctgggtggacttgctgggtagctagacccagaagagagacaacaatcactgcagtttggctcacaggaaatcacatccataggaaaagggggaacacctcacggaacaaaataatctgaacaacagccttcagccctagacctttcctctgagagagcctagcgaaatgaggaggaatcagaaaaccaaccctggtaatatgacaaaacaaggctctttaacacccccacaaaatcacagtagttcaccagcaatagatccaaaccaagaagaaatccctgatttacctgaaaaagaattcaagaggttagttattaagctgatcagggagtccagagaaaggtgaagcccagtgcaaggaaatccgaaaaatgatacaagaagtgaagggagaaatatttaaggaaatagacagcttacagaaaaaataaaaataaaaataaacaaaaaattcag

SEQ ID NO: 900905 - DNA, 542 bp, Homo sapiens
ggtaattgaatcatgggtgggatttttccatgcttttctcatgatagtgaataaatctcatgagaactgatgggttttataaagggcagtttccctgcacacgctctcttgccttctgctacrtaagacatgtctttgctcttccttcaccttccaccatgattgtgaggcctctctagctatgtggaactgtgagtccattaaacctttttttttttccaataaatcacccagtctcaggtatgtctttattagaagcatgagaatagactaatatagtcaattggttgcacagagaatgcagcactgctgtaaagatactcaagaatatggaagtgactttggaactgggtaacaggtggaggctggaaccatttggagggctccaaagaaggtagaaaaatgtgggaaagtttggaacttcctagagactcgtttaatggctttgaccaaaaggctgatagtgatatggacaataaagtccaggctgaagtggtctcagatggagatgaggaacttgttggaaactggagtaaaggtca

SEQ ID NO: 900906 - DNA, 560 bp, Homo sapiens
ggacagtccattaacttttctgtgaggcggctgccctgtgctgagggcccagaacagccccttgtccccccagactctcccaagcttggagatggcaaaggcaagggctgctagacagcaaggatggmagcttgtccctcccacttggagttctgtcctagataagtgcagagctgctactggcttgatagcctcagcagggggtggtttgagacccaggcgagtggtcctgcccagtgaggagaaataagataggtgacccacagttgtttttttatgttgttgttgttgtttttttgcagtctgactgcattttcaaagggcagcagtgctgtgctgggggtctgctccagtccctagtcacctcgtactccctaaatgctgaaggcaaacaacagctaaggctgcaaaacagcaaagatgatgacctgcccctccctctgggagctccaacccacggggggatggggctgctgaaaacaccagcaaagggtgactggagaccctggtcctgcccagtgaggagaaatttcatcagggactcgcataaagaagcaggc

SEQ ID NO: 900907 - DNA, 587 bp, Homo sapiens
attagagaattgcaaattaaaaccacaatgagataccatctcacactagtcagaatggtgataattaaaaagtcaagaatcaacagatgctggtgaggttgtggaraaataggaatgcttttacactgttggtggaaatgtaaattaattcaaccattgtagaagacattatggcaattctgcaaagattaagaaccagaaatagcatttgacccagaatctcattactgggtatatacacaaagaaatataaatcattccactataaaaatacatcgatgtgtatgctcattggagcgctgttcacaatagcaaagacatggattcaatccaaatgcccatcaatgttagacttgataaagaaaacatgatacatatacaccatggaataccatgcagccataaaaaggaatgagattatgtccttttcaagggacatggatcaagctggaagccattatcctcagcaactaacacaggaacacaaaaccaaacacagcatgttctcacttataagtggaagctgaacaatgagaacacatgaacacagaaaggggaacaagcaacaatggggcctgttgggggag

SEQ ID NO: 900908 - DNA, 625 bp, Homo sapiens
ctgaaaaatatgtctctctaaataaaataagtaatatgcaataaatgaatcaaaaaatttaagcagcacctccttggagtaacttttaaaaggaaataagcattataaagaaatcagcagagtgttgctatactgcaccatatagaagaatcagaatcatgtgagaggtaattgtgtggagtgatgaagtacagagtcaatatagtttcaactcctaggttaaacattcattagctttacatccctgacgaggttattgaatatctcaaagttcaggtttttgttgttgttttttgttttttgagacggagtctcgctctgtcacccaggccggagtgtagaggtgcaatctcggctcactgcaacctccgcctcccaggttcaagggattctcctgcctcagcctcctgagtagctgggactacaggcatgcaccaccacgcctagctaatttttgtatttttaatagagacagtgtttcaccatgttcaccatcagagttcagtttttccwtagtatctacagcactggtggtgctaaagaatttagcaaatgctaagtaaatagtaagtgttaaataacatcaattattattattatcatcagcagaaagaggagaagggat

SEQ ID NO: 900909 - DNA, 570 bp, Homo sapiens
aatttagtgagataagattggaatgtcagagctgaaataatttagaccaatattctggttttctaaaagaaaacggaaccatgccattacctcacttcccygtttatttcttatttatttatttattgtgacaggaatctcgctctgtggctcaagttggagtgccctggcacaatcttggctcactgtcgcctctgcctcctgggttcaagtgattcttgtgcctcagcctcccgagtagctgagattacaggcatgagcccccatgcccagctaatttttgtatttttagtagagatagggttttaccatgctggccaggctggtctcgaactcctgacctcaagtgatctgcccaccttggcctcccaaagtgctgggatgacatgtgtgagccaccatacccggcctcacttccctgtttaaaaccctccatctctcaaaataaaattcaaagtgcttagcctggtcaacaacagggtttgtcaacctcagcactattgccactttgggctggagcattctgtgttgtgggagctgtcctgtgcgctacaggaagtttagcagcat

SEQ ID NO: 900910 - DNA, 554 bp, Homo sapiens
taggatagtgacatgaagggtgggtttagaagaggaaggagttgaggcagaagctgttccgatgggagatgcccgagaggataaggctcaaggtcttctttaccatgttgtaactttgaacttgggtagattacatacgtcttttttgaatcatgttttactaaaaatggaaattaaaaaataacttttcagttctgataattgagagagctactgtatataataaagtggttaatagatgtgcctcaagatgttgacttaacattgttttttcttctcctgttgcttagtctagtaggtggaaaaacacagctctgaaaaacctcaggaaaatcatggctagaggtgagtatgttgactaaataggatgaatgagacaggatgacaccaattgccaatgtcgttttctgtttattttttcttgacataacctaggaaggtgcttgctttctaagcatggactagccaatgggcgacgattagttttttggtgatgaccgtggtgtgacctaaacagaagtgggkaggagtgatatgctcaaaaacaccactgc

SEQ ID NO: 900911 - DNA, 587 bp, Homo sapiens
ctttatccagtatactattgatggacatttaggttgattccttgtctttgctattgtgaataatgctgcaatggacatacaaatgcatctgtccttataatagaaagatttacttttcttkgagtgtatacccagtaatgggattgctgggtcaaatggtatttctgcctctaggactttcaggaatcatcacgctgtcttcacaacagttgaactaatttacactctcaccaacagagtaaaagcattcctttttctccacagcctcaccagtatctgttgttttttgaccttttactaatagccattctgacgggtgtgagatggcatctcattgtggttttaatttgcatttctctaatgatcagtggtgttgagcttttattcatatgtttgtttgttggttgcatgtatgtcttcttttgagaagtgtctgttcatgtcctatacccactttttaatggggttgcttgtttttttcttgtaaatgtttttaacttccttatggatactgggtattagacctttgtcagacagatagtttgcaaaatattgtcccattctgtagcttgtccgtttactgtgtt

SEQ ID NO: 900912 - DNA, 510 bp, Homo sapiens
actttttaatggggttgcttgtttttttcttgtaaatgtttttaacttccttatggatactgggtattagacctttgtcagacagatagtttgcaaaatattgtcccattctgtagcttgtccgtttactgtgttgatagtttctcttgctgtgtggaagctctttagtttaattagatcccatttgtcatttttttatttcgttacaattgcttttgacattttcatcatgaaatctttgcctgtgcctatatcctgaatggttttacctaggatttcttctgggattcttagttttgggttttaaatttaagtttttaatccatcttgagttgatttttgtatgtggtgtaaggaaggggtcctgtttcaatttcacacacatggatagccagttctcccagtgccatttattaaatagggaatctggctaggcatggtggctcatgccaggcaggattccrtatttaataaatcccagcactttgggaggcagaggtggatggatca

SEQ ID NO: 900913 - DNA, 620 bp, Homo sapiens
actacagtaatccatctcttaaagatggagaaacgtttttaaaaatgtgtcactaggaaattttgtacttgtgagatcatataatccatttatacaaatctggatggtacgccttaccacataatctaagctatatggtacggcctattgctcctaggctacaaacttgaacagcatgttactgcagggaatactatggctattgtaacacaatggtagtatttaagcatataaaagccatagtaaaaatttgtattataatcttatgacacttctgtcatatatgtagtcctttttcaaccacgtatatttcatgtggtgcatagctgtattttgttaaggaagtgattcaatgttattaggtgctctgaaaggccactggatactgtagttgtacacaaatttatgtaaatttttggcttaaattgcaatcttttaggtaattctgtatcaatgctatgttgttatgaaaagtattttgtgagtcttcagataatgatacattcattgcaggcaaagaagccaagtacrtatctattatatatataaaattccagtgaaatttaatcactgtactttcactatacaaaagtctaaaatggctgtttggtccccaagaa

SEQ ID NO: 900914 - DNA, 569 bp, Homo sapiens
gtgacaccctgtctccaaaaaaatagaaagaaagaaatatgaaacaagccactctgctcttaactagagaatcaacccaggctgcctggttccttcmtgagacctgtgctcctgccagttcctcttcagtcctaggaaaaaggtggagggaaagtggaggagcaggcaatccctttctccactcctcatcatcccagttatgtcttattagttgaaacagtgtctcgctctgtcacccaggctggagtgcggtggcatgaccatagctcactgcagccttgaactctgggctcaagcgattctctcacctcggtctcctgagtagctagaactacaggcatgaccaccccgtcccggctaattttcttattattattatttgtagagactgagttgcactgtgttgcccaggctggtctcaaattcctggcttcaagagatcttcctgcctcagcctcccaaactgttgggattacaggtatgcgtcactgtgcctggccataaggtcattttatattctgttgtctatcaccatcagtacaatcactaccatatgctgagccaagtcc

SEQ ID NO: 900915 - DNA, 562 bp, Homo sapiens
tttcaccataggcattaaactgcgcacaaatatccctctgcagataatacaaaaggacgggttccaaactgctccatcaaaagaaatgttcaactctgtgagatgaatgcacacatcgcaaagtagtttctcagaaagcttctgcttagtttttatgtgaagatatttcctttttcacaataggccttaaaacgctcaaaatatccatttgcagattctacaaaaagactgtttccaaactgctcaatcaaaaagaggttcaactctgtgagatgaatgcaaacatcacaaagaactttctcagaaacatctgtctgcttttaagttgaagacatttcctatttcaccatagaccataaagggcttacaaatatccctttgcagattctacaaaaagaatttttccaaactgctcaatcagaagaaagtttcaacactgtgagatgaatggacatatcacaaagaaytttctcagaaagcttctgtctagttttttatgtgaggatatttatttttaatcataggcctcaacagctcagaaatatcactttgcagattgtac

SEQ ID NO: 900916 - DNA, 573 bp, Homo sapiens
gaaaagactgtttccaaactgctcaaacaaaggagagattcaactctgtgagacgaatgcacacatcacaaagaagtttctcagagttattctgcctagtttttatgtraagatatttcctttatcaccataggcctcaaagcactccaaatatccatttgaagattctacaaaaagagtttttccaacctgctcaatcaaaagaaagattcaactctgcgagatgaaggcacatgtcacaaaaaagtttctcagaatgcttctgtccactttttatgtgaagatatttcctttttcatcattggcctcaaagcgctccaaatatccttttacagattctacaaaaagactgtttcctaactgctcaatcaaagcaaaggcttaactctgtgagatgaatgcactcatcacaaacaagcttctcagattgcttctgtctagttctgatatttagatattcctttttcaccatagggcacaaacggctcaaaaatatccatttgcagattgtacaaaaagactgtttccaaattgctcaatgaaaagaaaggttcaactctgtgaaatgcatgc

SEQ ID NO: 900917 - DNA, 547 bp, Homo sapiens
ccatattagcacccccatctcaatatcaagagctgtacacctatggatttaagacaaggcccaaacccagaaaaaattagggcwcaagacagaaatatcaggcagtgctaacaaatcacatgccacagcctgaatcagcaggaaggcaggggactcttgcaattcacgtaattcttcagttgccaaaggcatactctcagcacatcggattctggatatcatgagttggtctagaagcaaataaattgctggcatgttctgttttccaacaaactccacaagtacagggcatctccagtgcaacaaactcagtcagtgaagttcacctgccccagcctggtcatgggacctctcaggcaaatttcagactcataccagttgtgccagccaggttcccctttctctaggcttgagatttttcaatcctgtacaaaagttatatcttactcttttttcatacagaaagtattggttattaaatatattaatactatcattttaaaaatttaattattataaagttttttttttttttttttttgagact

SEQ ID NO: 900918 - DNA, 547 bp, Homo sapiens
ccatattagcacccccatctcaatatcaagagctgtacacctatggatttaagacaaggcccaaacccagaaaaaattagggctcaagacagaaatatcaggcagtgctaacaaatcacatgccacagcctgaatcagcaggaaggcaggggactcttgcaattcacgtaattcttcagttgccaaaggcatactctcagcacatcggattctggatatcatgagttggtctagaagcaaataaattgctggcatgttctgttttccaacaaactccacaagtacagggcatctccagtgcaacaaactcagtcagtgaagttcacctgccccagcctggtcatgggacctctcaggcaaatttcagactcataccagttgtgccagccaggttcccctttctctaggcttgagatttttcaatcctstacaaaagttatatcttactcttttttcatacagaaagtattggttattaaatatattaatactatcattttaaaaatttaattattataaagttttttttttttttttttttgagact

SEQ ID NO: 900919 - DNA, 603 bp, Homo sapiens
ttcacgtttaaaaatgatttcttctgcttgatcaagcctgtttttgaaactatcagttgtattttttaaaatttcattcattaaattcctcagctctaagatttatctttggttctttttcatgatatctatctctgttgaatttctcattctgattattatttttttctgattttattgcattgtttgtattcttctgtatctttctgagtttcatattttgaattccttttcagatattctataaatatccttttcttttaggtgtattactaaagtcttactatcttgttttagtagtatcatattttcttgttttattatgcttcttgtgtccttatgttaatgtctacacatctagtgaaatagcctattttttctatttgatggagtagcttttgtagggagagacttttttcctgtagaagggtcctaaaatgtcagttgagtatgatgcagtggtttgcttgtgggtttactaagcctggtttccatgcagtttcttcagccataatagtcatctgtaatgcctgtgatttttctcagtggtctargctgtggattttgtgacagtggtggtgtgattttgcttgtagctggggc

SEQ ID NO: 900920 - DNA, 363 bp, Homo sapiens
ttccaaagggtttttaaatgcagtctagtccatttaagtgtgtttgtttakggactattcattgctttgtgtctggagacagctggtggtcatagaacaggtaagaaataagacctagttttaatttctggttactagctaggtgacatttttcagttatatatcctctccgagcttcagggatcttatttaaaagatgaaaaagacaatagctttatttgggggccggcatgaggattagttatttgtctagtacctggtacacagaaaaatgttagttattagtgttaatggagaagaaagttttcagggaaagcaaaaaaaactaaaccattagaaatttgtgtgaaaaggaagtgatca

SEQ ID NO: 900921 - DNA, 634 bp, Homo sapiens
gtgcccattagaagtgcctgaaactgggcagaatagtcatgctccagtatccaggatcatgcggggaggtcagaagctgaggtgtgttctgaaggccttgcagctggaagttgtcagttcaatgtattccttgccacatttaatctagatgttccaacaaatgcctgatttgaaggtaggtcagtctgactttaaagcccattttctactacagttttgaagcttaaagggcctcctgttatatattctgaaataaagttttaatgatcaaatgcatgaccaagtttagcataataccaacataaatacgacattaagcttaaggtcctttgtaaaacaagatacaaggtgaccttctagtcttggttccattactgtttcctctctcatgaaattgtcttggcaggacctacaaggatcatataatacactgaatgattaacagttattaaaatcccagatgattggacccactgattaagcaactgtatggacctccaaattacttaacaggctctcatggttgccaagtrttgtaaccctaggctagagaggcaaggcattaatacaagctggattgctgcttctgcttcctctagcggggcttggtctaagccaagtcttgattagccgt

SEQ ID NO: 900922 - DNA, 657 bp, Homo sapiens
ataaaaacccaattagtgttagttcagtaatctagatacacagtaaccatagatcaaatcatatcccataagatagtgcaatatgtaactccacctttctactacagcactaacggaacaatctgctactattaactcatcactttgtgttgataatacagtttctaattcctaggaaagaaacaaaatattacttggtaataacaccatacagtctctcaataaacgttttatccaacttcttttattactcccctgaaagtctgaatgatacaaattgttaccatcatgaagaggcagacacaccttggcgttgatttctggcatttttgaaggactcttcacattgcacaccagatgcaaaacatgccgtttttcctgctaaaagtaatacgaaggtacttaaggacctgaacctaacctggtgagtgcttaaaaacattcagaagttaatgtgtaagtgatgtacctttggaagcaagtccctgagacattggtgatccaacaacagcttcccagaataaattaacctctggtcctctggaygctgatcatggaaagaaagagtaacacaggtcagcatttcacccctacaagttcctaaacacagaataaactgttttatacaagtaatttgaatatgtgtgtttcccccca

SEQ ID NO: 900923 - DNA, 675 bp, Homo sapiens
ccctagatgtgactaatcaactcaatcttgctttgaaaaaatcacttctcggcagccataaaaagaaagaacgagtttatgtcctttgcaggaacatggatgaagctgcaaaccatcattctcagtaaactaacacagaaacagaaaaccgaacaccccatgttctcactcataagtgggagttgaacaatgagaacacatgggcacagggaggggaacatcacacaccggggcccgtcgggggtagggggcaaggggagggatagcattaggacaaatacctaatgtagatgacaggttgaagggtgcagcaaaccaccatggcacatgtatacctacgcaacaaacctgcatgttctgcacatgtatcccagaacttaaaggataataataaaaaaaaaaattaaacacttcttacagccagtttgagttcctctcctgaacagctcagtttaatgactgaatttcagcaactgtaaaaagagcctgaccccccagctccccaaccccacaaccttccaacagttgtgagctagactctcatctttycctctcttctgagatccaattccagccttcccctttccttcaaacacatcactatttccagttcctgccacaaggtgccccctgtgcacacttctccttgttttcaaaaagatttaaaatcacgtt

SEQ ID NO: 900924 - DNA, 665 bp, Homo sapiens
gcaaaggtgggtggatcacgagctcaggagtttgagagcagcctggccaatatggtgaaagcccatctctactaaaaatacaaaaattagctgggcgtggtggtgtgcacctgtagtcccagctacttgggaggctgaggcagaagaatcgcttgaacccaggaggcagaggttgcagtgagctgagatcaccccactgcactccagcctgggcaacagagcgagattccatctcaaaaaaaaaaaaagggatgaattcatgtcttttgcagggacatggatgaagctggaagccatcattctcagcaaactaacacaggaacagaaaatcaaacaccgcatgttctcactcataagtggaagttgaaaaatgagaacacatggacacagggcagggaacatcacacactggggcctcttggggggtaggaggctaggggagggatagcattaggagaaataccaaaatacctaatgtagatgatgggttgatgggtgcagcaaaccaccatggcacgtgtatacctatgtaacaaacctgcacattctgtayatgtatcccagaacttaaagtataatttaaaaaaaaagaatgatggtcacgctttttatctgttcacatttacacagtaatgctaactaggttttcattgaaggtaagggat

SEQ ID NO: 900925 - DNA, 599 bp, Homo sapiens
tttatttgataatatttaataataatggtttattgtgaaaaactgtattatatgaatgtaaagtattcataataacaaactatgcatggaatatgtgggaattctctacgtcacccttgcaacttttcastaaatctaaatgtttcaaaataaaaaaagaaaaagtttataaacaaagtaaaacagaaaacataaataatattctcaatatatcagagaaaaataaatgtcatacacaagggagtaaacaagaacaaatatttaatgaatgctagaaaacttgaaattccctaaatttatttattttaaaattttatgcttttattatacttagtttactaaaattttatttgaaaacacattgattcattttctatagtataatgcctcccaataattaaggactttaggactatagaacaggtgaggtgagatatacattttgtactggctttcaccttttcatgcatttacaattactattaacatatttcaaatactagtggctactctgggcattcaaaaatgaataatatgaatgtattctcttattgtaatgaattgaataatctcacagtctagtaagagagattaataca

SEQ ID NO: 900926 - DNA, 611 bp, Homo sapiens
agtattatcttattttttttctctcccttaatctttatcaacatctgctcatactggtcacttcrtcattcaccaaacaatatatatttaaagagaatgtatttcatatacatgtattatatatgttctaatatgtctctctctatatattttgtactatacacattgtacaatgtattatatacaggtggctgtccatatccatgggttctgtatccatagatgcagaattcttgaatacagagggttgactgggagatctgacatctgcaggttttggtatccgtggaaggttctgcaaccaatctctggtggatgtgagaggtgattgtacttaaggtaaaagtcaatggagaaggccactattggaatatggccaactcaaggtgaccctgcaaagaggaagtttggaaaataaaaaccctttccatgactaaaccctactggaagccagaaagtcaactgctgtgatcacacagatgagacttctggcttggaaacagaggaaaagtgtgaacagcaaactgggagggacaaataaaaaatatctaacttttccttcctaccacaaatttgaattatgccccaatctattctcatcctgacctgag

SEQ ID NO: 900927 - DNA, 634 bp, Homo sapiens
cctgacctgaggtctctttattccaattgtcttcaatcaaattctgactttgttgcagatgccagcaraagttatccaaatgaaatggaaataaattgattacaaataatattcaaataaaaaataaataacttgtgatacctgctgaaaaatttagtgactgacatatatcttaaatatgtgtctcctttaatttggtctttctgttaataatgtggtaaactaaaggctaaaggtagtccagcctatgaatcaggagtaacataggcatgagtttttcttgtgtttgcatatacacttaaaagttggttacttacaagatataactttaaatctcataaaaattattgttacacaactttgaactgtgttttttcttgtgtaaaagtgaaaaagtagtgaactaggcaaaacagaatgtagtaaaagatactctcacctggccatcaatatggaaacatttaatttaaaatagtttccagaaacatcaagagaagatgcatattagtgtgttaattattctcattctccatagcaggaactatgctttattcatccttgtactcctgaaagccaagctggccagtagaaggtttatagaaaatgtcttataaatatgtttgttttattgtac

SEQ ID NO: 900928 - DNA, 607 bp, Homo sapiens
gttgggcccatctattcacatgagtctttaagagcagacaaccttttccggctatggtcagagaaagagatatgataaaggatgaaagaaagggtcagagagatatgacattcttggctttgacaatggaggaatgtgggtggcatctaaatgctggaaaaggctagaaaacaaaattttccctagagccaagaacaaaagaagttgcaatcctgccaaagccttcattttagcatggtaagaccccatgctggacttgtgatttatgtaaacataaaataataaatttgtgttgctttcagctaataaatttatggaaatttgttacagcattaatagaaaactaataccaaaatcagtttatagaatacagaacttgggatactttggataaggaaataaaatataacagaaaattccacctgtcttggaaaagacttgataaggtcaaatgcctatcaggaaggatcctakaagggtgaaaaaaaccaataaggaaaaccaagtcagtaggtcaactgagtttggccagagaactatgtaaaaagtcaataatttatgagtagaaaagttggtattatttagaaactcaagactactcactttt

SEQ ID NO: 900929 - DNA, 607 bp, Homo sapiens
gttgggcccatctattcacatgagtctttaagagcagacaaccttttccggctatggtcagagaaagagatatgataaaggatgaaagaaagggtcagagagatatgacattcttggctttgacaatggaggaatgtgggtggcatctaaatgctggaaaaggctagaaaacaaaattttccctagagccaagaacaaaagaagttgcaatcctgccaaagccttcattttagcatggtaagaccccatgctggacttgtgatttatgtaaacataaaataataaatttgtgttgctttcagctaataaatttatggaaatttgttacagcattaatagaaaactaataccaaaatcagtttatagaatacagaacttgggatactttggataaggaaataaaatataacagaaaattccacctgtcttggaaaagacttgataaggtcaaatgcctatcaggaaggatcctagaagggtgaaaaaaamcaataaggaaaaccaagtcagtaggtcaactgagtttggccagagaactatgtaaaaagtcaataatttatgagtagaaaagttggtattatttagaaactcaagactactcactttt

SEQ ID NO: 900930 - DNA, 669 bp, Homo sapiens
aaagttattacattgcaatcttagctcaaggatgccaaaagagtaacttgtgctaatgtgggagccatttccagtatgctcccaatgtctatggcaaatgtgggtaattrgctcccacgctttcctgctgggcttcaaggagcctaagaatcatttactcagcactcaagattgtatctgtcaatagagaaggcaagaaaggtgaaccctgtttgccctccttggtttctagtttatagcctaatcaaagtccatgaattgttttcatctctcagctggatttgagtcagcttcagcaaaagccaaaatatccactttatataatgcttatttctttctttcttttttcttctttttttttttttttagtctcatcctgttgcccaggctggagtgcagagcactcggctcactgcaacctccacctcccgggttcaagcgattctcatgcctcagtgtcctgagtagctgggattacaggtgcccaccaccacacccagctaatttttgtattttttattacatgtttcaccatgttggccaggctggtctcaaactcctgacctcaagcgatctgcctgggattgcaggcatgagccaccatacctggccaactcaatattcttaataggtggtagggctatttccctttttcacttttgagactga

SEQ ID NO: 900931 - DNA, 652 bp, Homo sapiens
tctcagtctggggcagtgcttaatgtaagttagtatttgaattgaccactcttcaacctcagttgtaatcaacttccttagccctaacctgaccaaggcaatagccatcaaaatcactagaatacagaaacattcacaggcacaaagatgacagggagcaaaaatgagaaagaaggaaaggagagagagggtgcacaccctaatattgggggatagtttagatttcttgttcagcaaatatccatttcgtctgcctttgaccatttgcagaagatacttccctgcccattgcttttgggttcagccaagtgacttgcttttatcagtggaatattagcaaatgtgagataagcagagaacttaaatgtgcttttatggtttcttatgccccttctttggtgatcatcatgaaaggaagatgcctcaggtagccatagacccttgagtatggaccccagaaccaacatgtggagcaatcctaaaccctatcttcagccgtaaggccacgtggccaagcccatacaattgatttatagacccatgagcatgaaaataaatgcttattattgtaagatactgagtttgaggtactttattatgcaccattattgttgcaatagttgactaaygcaaatggtaacagctagtgcta

SEQ ID NO: 900932 - DNA, 666 bp, Homo sapiens
ttctcagaactcataaacataacttgatttccacgtggtccttaaccttttctttttaatcaattagtaaagactttttatatcttgttctttttattgtatttatgtcgtttccaggctatatgtactcttacactctgagatagaaaactgagaaaggaaaatggtctgaaaccctaagattcaaacatacttgactactgcagtattttgttctttgattataatgattaattttgtgaaaaagtcacacagctactgtagtcctcctcccttatcttcagtttcactttctgtggtttcagttacctgaagtcaactgcgatctgaaaatattaaatgaaatatttcagatataaaaattcataaattttaaattgtgtgccattctaagtagccatatgaaacctgatgccctcctgctcatcccatccaggaagtgactcatctctttgtctagcatacctacactgttcatgctacccatccatttgtcacttatcagatggaaaaaatgtagcatatatagggcttgatattatctacaatttcaggcatccactgggggccttggaacatattcctggcaaataaggtgggactacagtgttcattaagtaatattcaatttcttgatgggayattgcaaaagttaaatgggatatt

SEQ ID NO: 900933 - DNA, 605 bp, Homo sapiens
taggttggccagaaaaaaaactaatgaaataggaaataaaataatattttggcccaaagctgatcctagatgccataggcctgaaaatgtaatatgggaatttagcactggagttttaaaataaaggtaaaactcatcaaatcaatttcaagtgtgcattaacatttgtagaacaaagcccacaaacaggaaggtatttcatgttccttgttcaacagaggatgaacatgtatttttcagagctaagtagcatatgagttacaatattttgagccaatgttgtagttaaaacttgctgcagggacttcccatagaataaaggaaggtaatcatgttacagatttaagacacttagcaaattatgttacatctgcatgaaaataaaaaagaagaacattcttgaatattaaacctctctgggaatctgtataaagaaaaatagttaaataatttttacatgtattcttcttcgtataaaactatytttggattttcagtaggagatttctgtgtgcctatactatatcaaatatttttatattatcaccatagtcaacttctgtgtaagttcccttgtagcaccctctctatatatcatttgaagg

SEQ ID NO: 900934 - DNA, 621 bp, Homo sapiens
cttaagacaattaagcaatgtagaaatcactgtgcattaccttcttcttcraatcggacagatccccaatttgagccacctctgaattaaggtgtggttaaatctgagaatgagtgtgtgagtgtgtgtgagagagtgtctgtgtgtatacgttgtgtacatatacacacaaacacacagtttgtgtacatatatataacatatatgtacatatatatgtaatatatatgcttgtgtacatgtatatgtaactatttcttataaaatgctattgaaaatgagcaataattgatttgagcaattttttttataacttaatgtagccttacataatctctatgctaagtttgatatttcacagtcaaaatcaaatgtacaaaattaaagagcaaaacaaatagcaattacataagaaatgacttagcagctgtcagcttatgcaagaaatggcagtgcaccaattaccttggcatccatgaagctgttactatggctgttgttgcctctgtctctgctgaggttaacagcaatcataagacacttttttggttcatttactcaggctgttgattaacacagattcaatgccaggacagtgttacaatcaactgaactgccatc

SEQ ID NO: 900935 - DNA, 538 bp, Homo sapiens
gccccatgttaacaaattcattcatgtaatycttttccgggtctgtttttagccagtatacaattgtatgaaaacattagctgttaaaatattagtataaaagtttatgaagaaaaatctttactttttgaaaccatgttatttctgaatgttgcctagaagcagagccagagtgaaagcaggtggcatttggtagccgttaagcagaccaagaaagggtggggtatttttgtatgggaatgcggaagagaggtgaaggtgttgctgctctagagtggcctagggtagtcagggtcaaatatccccttggaagcctacactttccataggggagttttgttgaaaatactgacatcagtccagccttccctgtcacttcgtctgctgcattcaccaactctagtcaatattttaacagcacaaacttgagtagaggtttttccagttgataagaataatttttccagctatataaccagtaaataactacaaggtaaattctgttttttactgaacctatcataaaacagacataagt

SEQ ID NO: 900936 - DNA, 538 bp, Homo sapiens
gccccatgttaacaaattcattcatgtaatcyttttccgggtctgtttttagccagtatacaattgtatgaaaacattagctgttaaaatattagtataaaagtttatgaagaaaaatctttactttttgaaaccatgttatttctgaatgttgcctagaagcagagccagagtgaaagcaggtggcatttggtagccgttaagcagaccaagaaagggtggggtatttttgtatgggaatgcggaagagaggtgaaggtgttgctgctctagagtggcctagggtagtcagggtcaaatatccccttggaagcctacactttccataggggagttttgttgaaaatactgacatcagtccagccttccctgtcacttcgtctgctgcattcaccaactctagtcaatattttaacagcacaaacttgagtagaggtttttccagttgataagaataatttttccagctatataaccagtaaataactacaaggtaaattctgttttttactgaacctatcataaaacagacataagt

SEQ ID NO: 900937 - DNA, 633 bp, Homo sapiens
tcccaggtcgacttcagactgctgtgctgggcagtgagaatttcaagccagtggatcttagcttgctgtgctccatgggggtgagacccactgagcaagaccactcggctccctggcttcagccccctttccaggggagtgaatgtttctgtcttgctggcattccaggcaccactagggtacagaaaaaaaaaaaaaaaaaaaactcctgcagctagcttggtgtctgctcaaatggccacccagttttgtgcttgaaacccaggtccctggtggtgtaggcacccgagggaatctcctggtctgcagattgcaaaaactgtgggaaaagcatagtatctgggctggagagcaccatccctcatggcacattccctcatggcttccctgggctaaggcagggagttccttgaccccttgcacttcctgggtgaggtgacacctcatgctgcttcggcttgccctccgtgggctgcacccactgtctaaccagtcccaatgggatgaaccaggtacctcagctggaaatgcagaaatcacctgtcttctgcattrggctcactgggagctgcagaccagagctgttcctatttggccatcttgccttcagtcaactttcctcctttttatcga

SEQ ID NO: 900938 - DNA, 616 bp, Homo sapiens
aaataaactaaaaaccaaaaaatactgtacctagcagagctagcctttaaatatgaaggataaatttaaaaaaaaactttccggaacaamataaaattttattaaaaattttcacattaaagaaaagcccaagaactgatgactacactgctgaattctaacaatcactcaaagaagaactaatataaattcaactctaacttttcaagaaaattgaaaaggagggaatcttttcaactcattttatgaggccaacattttcctgataccaaaaccaaagacgcaacaaaaatagaaaactaaacatcaacatcactgatgaacacagatgaaaatcttgcacaaaatacttgcacactgaattcaacaacacatttaaaagatcattcaccatgataaagtgtaaaacatcccatagatgagtgatcaatacacatgaaagaaaatgtgatacattgaattagtagtcaaaaaaaaaattcaaataataatctcagtagatgctaacaacggatttgagaaaattaaacatccttttataattaaaaaacgctaaaaaactgggtatagaaggaacatatctcaaaataatgaaggtcatatatgacaagcctat

SEQ ID NO: 900939 - DNA, 609 bp, Homo sapiens
tcttttttgtaactagcttttgattgattgattgattttgaggcagggtctcactctgtcacccaggcttgagtgcagtggcatgaacacagctcactgcagtgtcracctcctgggctcaagtgattctcctgcctcagcatcctgtatagctgggaccacaggtacacaccaccatactccactaatttatttattttttatgtttgtagaggctgggtctcactttgttgcccaggctaatctcaaactcctggctcaagcgatcctcccaccttagcctcccaaagtgctgggattacaggtgtgagccactgtgctcactgcttttgatctattgaccaaaagaagatatgcatagtcctagaataggttcaagttcaagataacataaattcagtgcttctgccttaaggaaagtatcaggatttctttcattgtaatattgtgtttcctcataaaacacaaatgagggcagagggcagctttctgatggacactgctaacctcggggagcatggatcctggggatggagtgaaggagaggggcaaagcttccattctctgagttcctggtacaatgtggtcaagccatttcattatttatta

SEQ ID NO: 900940 - DNA, 606 bp, Homo sapiens
aaacaaatcttactaaaatcgcccttatcttccattagtttctcctcatatttacattcttataatctgtgcccctggaagcccaaatcccttttgcttcctcttgtgacttctccacaaatgtatcaccctttgttaaaatggtgtataagctgcagggtctaactgctcctctgagtctccatgccttttctgtaagggcacgtaaaaactaaaatgttaaatcaagtaaaatttgtatggcttttctcctgctaatctgttttttgtcaatttaatttgcaggccctaggcagtcaattagagggtagacagaaaagttttttttctctcccctatatagtaagaaagttggggacagagagatgacaggtaaggaagttgagggcagaggggcctgggccttctctggaactgctctatgttaactgcaaaatgatggagcatctgtacctggaattcaaacatggcactggttcatttaacttagaaggtccatgarggatagtcccatgggctggcaatgccatcatgtgattatgggttcaaactctcactctttcgtttaaagcagtgatgattaagatgctgtaagagggtaaacaa

SEQ ID NO: 900941 - DNA, 570 bp, Homo sapiens
gcctacttggacttctactgtcagactccaggggcctcccactcccaccctcacctgttttctcactgattgcagagcttgacaccaccatcctcacaaccccaaatcagacacctaccattcatttgtgatttgctaattggttgccaacctcctaacacctcttttagattctaccttccatcccactgtgttagttcaggtcctaatattttttgcctaagctattgcaacaatctcctaatcagcacttctctccctattctattcacacttccacaccatgtaatcgtcttgcttgaaatcctccaaaatcttcttaagggcctctcaattacctcaagtcaagattctaagtcttgaggtgaacacaacgatctggtctctctcttcatctccagcttctccttcttaactcctctaaacacattctatctacctacccacacacatgtgttcatagttctccacacatgacagagcctagactttgcatatgtgtttccttytgccatgctttcatctttccttcaactccaacttgtgtcaaacatcactttttttgccatt

SEQ ID NO: 900942 - DNA, 579 bp, Homo sapiens
gaagatcgaaaaaatactatcaagtttcatctgtggccttaagagtatagacatgatacagttgttctcaactgggagcaattttgcctcctagtgatgtctgaagacagttggttgtcacaaccaggaggtgagggtatgatcctggcatctagtgattcaaggccagggaggctgctcagaatcctaccatatgcaggacggccaccaccgccctcacccaccactgcaacaaagactgatctagccaaaaacgtaaagggggccgggcacagcagctcccacctgtaatcctagcattttgggaggctgaggcaggtggatcacctgaggtcaggagttcgagaccaccctggccaacatggtaaaccccatctctactaaaaatacaaaaattagccaggcgtggtggtgcgtgcctgtaatcccagctactcgggaggctgaggcaggcraatcactggaacccgggaggcagaggctgcagtgagccaagatcccaccactgcactccagcctgggtgacagagcaagactccgtctcaaaaaaaaaaaaaaatcaagggtgccagggttcag

SEQ ID NO: 900943 - DNA, 609 bp, Homo sapiens
ggtggtggtcggggacctggtggagatcaagggtggagaccgagtgccagctgacctgcggatcatctcagcccacggctgcaaggtgggcctgggcctagggcccggctttaccctccctcgggctgcccaggagctcaggcccagcccctcctccctcacactcaggagtccaggtcccaacccctcctccctcagacccaggagtccaggcccccaggccctcctccctcagacccaggagtttaggccctgggccacctcctcacccaacagtcaggagtccaggcccagccctcacctttcggagatccttagggaccctagaccttggccagcagcactgtgccttccccaccttcaagatcccagcctctggcctcccacacaccactcacccactgggcacccaggcttctagctgtgatctccaggcacacaggcttcagccccaagccctgtacacaaataccctcctgtcccaggccctggactgaaccctctctctgctgcacctacccccaggtggacaactcctccctgactggcgaatccgagccccagactcgctctcccgactgcackcacgacaaccccttggagactcgg

SEQ ID NO: 900944 - DNA, 588 bp, Homo sapiens
aaaaataattgggccctatcttggcccttaaaactaacttctacatccctagtgagaataggagcagctcaaagtgttcaacagagttctatcctgtctcggaccagatggacagttatatacttttcaaccttatgttacgaatatagctgttaatctatggggtcgagatttacttacagcatgggatatgagacttacaaatgaaactattgataatccaggatttaaatgttaaagaaaatgggatatcagaatggaaaagccttaggaaaatccctacagggaaaccctgatctaatatcaataactggacacacagatagaaaagggttaggacatcaggacttctgatggggaggtcattgatatttctcctccacctactgctttgccgctagagtggctgactgacaaacctgtatgggtggatcagtggcccctatcacaggggaaactgattcaactccatcaattagtaaaagggcaaytggaagcaggacatatagaagagtcggttggcccatggaattcaccagtatttgtgattcctaggaagtcaagaaaatggtgattgctgcatgattt

SEQ ID NO: 900945 - DNA, 627 bp, Homo sapiens
taagaaaagataaagaaaatataactttttagtgagggtcattggggtaggggtgatatttctcaggactgcttcaagcatgaccagggactgcrtggacaccttaaagaaaattttattatgagttagtccagtaagtttcaggtctagggtgcattttttatgtggctaaagaggtgccagttagcatattttttagcttggaactgccctaagaaaataagttctctaaaaacagtaatcaggcatattagctttaatgtaggtggcgatgagtttttagaccaaggaaggaataatgttttatgtaccaaagctttttgtccccattttccatcatatgaataggattccctgttgttaagccaacgacctattatattactctttttccataggtgtgggtggcaatgtgaatggagaagttcaatagttgtgattgcaaatcctatgcaggagagataataagtaaaataatctttgtttcctggataaagctgaggaagaataaatttttcatgagctaagagccacttgccctgagttggaaagactggtagagcaggttttcagaagaggagtaggtgggggtgatagagtagaaagaaaaatattggccttttggag

SEQ ID NO: 900946 - DNA, 582 bp, Homo sapiens
ctgctataaagacacatgcacacgtatgtttattgcagcactcctcacaatagcaaagacttggaaccaacccaaatgtccaacaatggtagactggattaggaaaatgtggcacatggaatactaggaatacaccatggaatactaggcagccataaaaaatgatgagttcatgtcctttgtagggacatggatgaagctggaaacatcattctcagcaaactatcgcaaggacaaaaaaccaaacaccgcatgttctcactcataggtgggaattgaacaatgagcacacttggacacaggaaggggtacatcatataccggggcctgttgtggggtggggtgaggggggaggtataccattaggagacatacctaaggtaaatgacgagttaatgggtgcagcacaccaacatggcacatgtatacatatgtaacaaaccttcacrttgtgcacatgtatcctagaacttataaagtataataaaaaaatataaagaatgttaaaatgagatttgaatacatacgaattcccaaaggacacataagaatttcttaaactatatgacaattaggcatgag

SEQ ID NO: 900947 - DNA, 567 bp, Homo sapiens
tagttacaagttttccaaaattrtaaatttcacttgaaatttccaattttataactagcaacaaagactgtcagctgttttcattgatgtggcaggattgctgtattcattttcaagacaatatctgcctgatacccaggtatgaataactatagttggtctgtcagttgttctttgaagtaaacatgatacaaaaaagtaggggaaaggagttgtttaccttgaaactcacacaatcttgcaaaggcttttcctgtagacaatggtcacatttcagtactcagcaaaagtgctttatgcataaaccccttttcatcacacagaatactatagacttaaaaaggattgacatttaataaaataatagaattagttatcattactgcttcatcaaggatgttcttaaatgaattggatactctctttttttactcataagtgtgtaaaatagagataaatacaatgatgactagtatagtttgatgctatcgtcatgatttgtgccaaggcactagcagttttactcaccactgtttgtggcatcagtacaaacgttaacagagtaaa

SEQ ID NO: 900948 - DNA, 659 bp, Homo sapiens
gatttccaaagaaatctttgtccttaaggtcaagaatcttagccaggatatgtctgtgtcaatcattttatcagtattctctcaggctctcaggaatttactgtgctatatgaataggggtcacactagttcttttgatctggctgatggatgacaagtgcatctgcaagttctaatccagtgtgataaatttgccttcccctcagaattgcgatttgagttctgagtgtgactttgaatccactcttctgtggcataaatgttagctgtgctcgtctccagggtagtccttactggggacccagattccgttccattttctgagatctcattcagtgccctgtaccagggcagggccagccctggcagctcatcccccttctgcctctcgtgtgatcctgttgtggtatttaggacttttatgctgaaggattttccttgaccttcccaggctgctcactcaccttacagtttgcttctccaacctggagtgtattagagagaattcacaggcttgtctagaaccactgtcttcccccagtattgcttctggatgtagagaacaggtgggaaggttagctytcctccggtggcaccagaaccttctatttcttcccttagccatgactttttgaagtttatgcatgatgttatcttcc

SEQ ID NO: 900949 - DNA, 617 bp, Homo sapiens
agatcttcctccatccctttattttaagcccatgtgtgtctctgcacatgagatgggtttcctcaatacagcacactgatgggtcttgactctttatccaatttgtcagtctgtgccttttaattggrgcatttagcccatttgcatttaagattagtattgttatgtgtgaatttgatcctgtcattatgatgttagctggttattttgctcattagttgaagcagtttcttcctagtcttgatgatctttataattcggcatgtttttgcagtggctggtactggttgttcctttccatgtttagtgcttccttcaggagctcttttagggcaggcctggtggtgacaaaatctctcagcatttgcttgtctgtaaagtattttatttctccttcacttatgaaacttagtttggctggatatgaaattctgggttgaaaattcttttctttaagaatgttgaatattggcccccactctcttctggcttgcagagtttctgcagagagatcagctgttagtctgatgggcttctttttgtgggtaacccacctttctcttgggatgcccttaacattttttccatcatttcaactttggtgaatctgacaatta

SEQ ID NO: 900950 - DNA, 564 bp, Homo sapiens
tctcattgttcaattcccacctatgagtgagaacatgtggtgtttggttttctgttcttgtgacagtttgctcagaatgatggtttccagctgcatctatgtccctgcagaggacatgaactcattttttatggctccatagtattccatggtgtatatgtgccacattttcttaatccagtctatcattgatggatatttgagttggttccaagtctttgctattgtgaatagtgctgcaataaacatacatgtgcacgtgtctttatagtagcatgatttataatcctttgggtatatacccagtaatgggatcactgggtcaaatggtatttcttgttctagatccttgaggaatcaccacattgtcttccacaatggttgaactagtttacacttccaccaacagtctaaaatcattcctatttctccrcaacctctccagcatctgttgtctcctgactttttaatgatcgccattctaactgttgtgagatggtatctcactgtggttttgatttgcatttatctaatgaccggtaatgatgaccatttttttcatat

SEQ ID NO: 900951 - DNA, 640 bp, Homo sapiens
tctcacctcaatactaacattgaatgtaaatggcctaaatggtccacttaaaacatacagaatggcagaatagataagagtttacccacaaaatatctgctgtcttcaagagactcaaccgacacayaaggactcacataaacttaaggtaaaggtttggaaaaagatagtccatgcaaatgtaccccaaaagcaagcagtagtagccattcttacatcagacaaaacaggctttaaagcaaaaacaggtaaaaaataaaaaacacaaagagggacattatataatgataaaagtactagtcaacaggaaaatgtaacaatcctaaatatatatgcacctaacactggagctcccaaattcataaagcaattactgcaagacctaggaaacgagataaatggcaacacaataataatggggaacttcaatactctactgacagcactagacaagtcatcaagacaaagtcaacaataaaaacaaaaaaacacggtggccttaaactatactctagaacaaatggacttgacaaatatttacagaacattctacccaacacctgcagaatatacaatttattcatcagcacatggaacattctccaagatagacacatgataggccacaaaacaagtcaca

SEQ ID NO: 900952 - DNA, 620 bp, Homo sapiens
tagctgcagacacacctgagtttgagttccatctccttgactttctagctgttactttgtcctttctaagtctcagtttcctcattagtaggatgaggctcatgatatctatcttacatggttgttgtgaagattaaaagagacattgctgcagcaaaacactttcttcctagcacagtgcctggcacccactcactgtcaaatgttggctattattacagctcagggattggagaagggggcagagttaaagaaaattactagacagaaaacatcaagtctgcataaattgttttgtatttcctgctcatgattaagcaattaaaataggatttgagtcattaaacctattaagaggttacagatcactaaaaacaatttctttttttagtaattggctgggacaaattatgcctccactgaattcagctccagatactacagggtgttggtgttaagtttgggaggcttctgcaattttgaagatattttcttagyttcttcgatttttccaaaggtgaatttgaaaaaataaggccagatttctatatagaaacagagataaacatcttaaaggaataaagctgtataaatttatgaataatccttataaaaccttg

SEQ ID NO: 900953 - DNA, 625 bp, Homo sapiens
tcacaaatacatgcagagtggtgaaaaatttgggttgcgcaacrcacaccttcccatataaggctgaacaaggtgacactctgccttcctgtctcagctctcctactatgcacagtgttctttttggggtccatgttttgccacttttttttttttttttttgctttttgtactttttcttgctgttttcattaagatgacccccaagtgtagtgttgaagagctgtacagtgttcctaagtgcaagagggctgtgatgtcgccaatatgtgtcagataagctttgctcagacacgaattatagttccattggcattgagttccatgacagtgcatcaataatatgtattaaataagatgtctttaaatagaaacacacaaaaaccaaattgatattgatcaattgataaaattgtgagcagaggctctcaggaacctaactctgtttccctttgggtgcagtgatttgctaatttagtgtttatggttactttatagaacctaaatatctcaagttatgagaatcaactgtattggccaggcatgatggctcttgcctgtaatcccagcactttgggaggccaaggtgggaggattgcctgaggccaggaatttgagaccagcc

SEQ ID NO: 900954 - DNA, 653 bp, Homo sapiens
atgtctgccaagatatcagaaatgctgaaggaccagaaaaaggggatgtctgttagccccagaatcagcccaagtaccatcattctggtcatttcaacagagaattggcatgggaasagaggagtaggattggaggtggatgtacatatgttttgagaaacagtaaagtagataagaggagaagttcatcaaagattaaaactcgttctccactacagcaaatgatcctgaaactttaatcagatttgtctttaggttctcttccaaatgcccacagaaccactgtcaaacaatgtaaccaatcaaacaaaagcatttctgcccctctacttaaggatgccctgaactttattatgggggaatcaaaaaaattgtgggttcaagcccagctctgatagctccaagaccttgggaagtcacataccacatagttctcatgggaagtcacataccgcatagttctcagtttaatcaatcactgtagaagaaaatcattgagtaatgagtccaatcaacataatgcttgaaaaatgaccagatcattcctgttttaattgagtaataggattttgaaaataaaataaggattattcctagatgagttaagccttcaggtaaaaaatgctttgaactagagacaaattattagactt

SEQ ID NO: 900955 - DNA, 557 bp, Homo sapiens
gctcgaggctaggagttcaaggaaacagaaatgagaaaattttcaatatagtcatggtttcatggtagaaaaggttagtaaagactagattctgtataaaaaaaaacttcaaaatcattagtttaatttttcttaactacagagactatgaaaaaaggctaagtttttaataatttttttcaaagctaatgccttattggctcttttaaaaattatttattgagtatcttctgatctataagacgtagttgatgatataactgtgaccagcatatagtgtccactctcaagggattctttgtgtcatagaggattgtggcagttttaagccatggctacaattatttgacactccacccatcaaaagatgggctctatgtcccctcccatgcacctgagtgggcctacaattactttccttctgaggctgagtaatataaggtcatgcacttgggaacttgagctggtaagaagcccaactaccatgatgtcaccatcctggaggsgcaagacacatactccatatgtaggcaatggcactcttactgacactccca

SEQ ID NO: 900956 - DNA, 557 bp, Homo sapiens
gctcgaggctaggagttcaaggaaacagaaatgagaaaattttcaatatagtcatggtttcatggtagaaaaggttagtaaagactagattctgtataaaaaaaaacttcaaaatcattagtttaatttttcttaactacagagactatgaaaaaaggctaagtttttaataatttttttcaaagctaatgccttattggctcttttaaaaattatttattgagtatcttctgatctataagacgtagttgatgatataactgtgaccagcatatagtgtccactctcaagggattctttgtgtcatagaggattgtggcagttttaagccatggctacaattatttgacactccacccatcaaaagatgggctctatgtcccctcccatgcacctgagtgggcctacaattactttccttctgaggctgagtaatataaggtcatgcacttgggaacttgagctggtaagaagcccaactaccatgatgtcaccatcctggagggkcaagacacatactccatatgtaggcaatggcactcttactgacactccca

SEQ ID NO: 900957 - DNA, 590 bp, Homo sapiens
tttggcctgagcaaatggagtttgatggaaaaacagttcagcttttgacatgctacattcaagatgtctgtctgtaagaattccaagtagaagattccaaacaggcaactagacaaacgaatctgggtgcaagaaaaaggttaaggctggaagtagattttggagtcattaacactaagatggtatgtaaagccatgggactttacaggagataagtgatagaaaaaggaaaacagatacacctggttacaaagccacagggacttcaccatttaaaataaagaagaagggaggattgtgctatacacttttaattgacctgttgctatacccagcagctggggttcttgaaagcaacagaaattgaatgagactgacaagtaaacaatcaatgtatggatggctactcgcacccctgaaggcaataggatggttgggcagacgacgtcagaaagtgggcaggaaccaaaaaatcaaacccagaaagtatgaccacacccagggaacagcccagttaggacacctctgcagctgaacactgagtgggagctcagcctscaggaagaatctctaactgccgccacatacct

SEQ ID NO: 900958 - DNA, 432 bp, Homo sapiens
gttgaaaaagctggcttcaatttattgagcaagatgctggtgttatcatctaacataaaacctatcttataataaagtgttgacacatgtaatgagtactgtactgaaaaatggtggtatgtatatggtttgtactgattatgtatcgcttttataccatcaaaaagttgaaaaatcataaagttgaatcatcctaaaatgggtacattctgtactatgtttccaaggcttcagaagtgttgcatacacattcctagccagctgatagtgctaggagccaacagtagtctcccccgggggccaagaggagggcgaaatctctactatggtatawgatgttctcgtgggccaagtatgagggtgatatttcattgttggcactgggtttctggaatccatcctcttcaccagggagatttaatgaaccaaatg

SEQ ID NO: 900959 - DNA, 539 bp, Homo sapiens
ttttttcttggccaaaacttttaaattctaaacagtggagggtgaaggaagggtaagagtttgcaatcacaaaatggtacctctcccttcactcactttcgccctcgtctttgactcagtcctcactctctcaactccttttttcccccttttctctttcctgtcctcctgagcccctgggaaccaatgacaacaccagtgtattctggttatttctggatgaaaatttaaagaaggtcttgcccagaaatccaacagctattctttttttttcttttttattttattgtaaattgactatttactattgtgtatatatttatggggtacaaagtgatgttatgatctgtgaatacaatatggaataattaaatcaagccaattaacatatccatcacctcaaatacttaacatttttgtggtgagaatatttgaaatttactcttagcgattttgaaatgtacagtacactattattaaytatattcaccactctgtgcaacagatctcaagaaaagccatgtttcttctgtctaaga

SEQ ID NO: 900960 - DNA, 648 bp, Homo sapiens
ggcatacctcaattaacatactgctatcactgtgggttatattkgtctgtttcatctgagcacttctttcatttatggcattactagatactttaggctcaacttacagatttccttccccagccctagaataaaccacttctctaaagaggcatagtttcttttattggagaatggtattagaaaccaagatctgggcaataggtgtgctcactatttctgcgatgtcattgtttcagggttctctcatcagacagagcaagaaaatatttctatgtaaactaatccacatatatacatagctataaatattcttaaatgtaaccatctgtatcaataggaagctaaacatgagctttcatactgatgttgccaactctaatccattaccacatggatcattctagcttcttctccttgcttatcaatgtactcctactccaacagtgagaacctatttcctccaaccatacatttaaataattgaccaattccagtgtacatgtatagcagtatcagaatttttaaccaataacccataagaaataactttaccacctagagtatagtacttatgtacattttcttctgcttttagtcttacagactgcactcatttccaaagatacttaggttggaaacttttcc

SEQ ID NO: 900961 - DNA, 574 bp, Homo sapiens
agtgttaacaccatgcaatgaaggacagaacagtgcyttcaacaaatggtacaaaaacaactggatattaacatgcaaaggaatgaaataaaacccctacctcacaccatatacaaaaattaactcaaaatggattaatgacctaaatataagtgttaaaattgtaaaactattagaaaaacaaatattatttttcatgatcttcaatctggtgatggatgcttagatatgccatgaaaaatatgaacaacaaaagaaaaaaattgttagatagggcttcatcaaaattaaaaactcttatgcatcaaatgatgttatcaggaacatgaaaagaaaacctagagaatgaaagacaatgttttaaatcatgtatatgataagcgcctattatccagaatatatttttaaaattcttacaactctgagtcaaaaggaccaaccaccccattttaaaaagaagaaaaccttgaatagccatttctctagaaaaaatggacaaacgaccaagaaactcatgaaagatgctcaaccttattaggtattatgaaaatgcaaatccaaaccacagtgaaat

SEQ ID NO: 900962 - DNA, 574 bp, Homo sapiens
agtgttaacaccatgcaatgaaggacagaacagtgccttcaacaaatggtacaaaaacaactggatattaacatgcaaaggaatgaaataaaacccctacctcacaccatatacaaaaattaaytcaaaatggattaatgacctaaatataagtgttaaaattgtaaaactattagaaaaacaaatattatttttcatgatcttcaatctggtgatggatgcttagatatgccatgaaaaatatgaacaacaaaagaaaaaaattgttagatagggcttcatcaaaattaaaaactcttatgcatcaaatgatgttatcaggaacatgaaaagaaaacctagagaatgaaagacaatgttttaaatcatgtatatgataagcgcctattatccagaatatatttttaaaattcttacaactctgagtcaaaaggaccaaccaccccattttaaaaagaagaaaaccttgaatagccatttctctagaaaaaatggacaaacgaccaagaaactcatgaaagatgctcaaccttattaggtattatgaaaatgcaaatccaaaccacagtgaaat

SEQ ID NO: 900963 - DNA, 616 bp, Homo sapiens
ttgtttgcagtgcttcataaagttaaaataaaagacattgcaggcaagcctgccctttcctactgactcagatcatcacagaaaatatggcatgtaagattgtaggatctgrtcagaaatatggattgtagggtccctcagttgccctcaatttccttcttttcctgacctagaaacgtagactgccttgaatgatctgtaactgaaccagatgtatgttttccccagcagacttggacccaagtctgggcctggaaaataacaggaaatattctaaggttctggtaaagttgtttagtttgatgcctgaaacactaaaagatcaaacaagtagaaactagcccagatcttagttagattctttaaaccctaatataaactttgtaacccaaccctctcctgatggccatgtctgggagaacatctttctcactatccgtctcaagaattctacagcccagtatatagaagttccctgaggatgtgctttggactgcttgtcctggcatttagtggtttttttgtttggaattccaactggcctcatcttgggatggtatggggcagtcttttgggggagcttccctgccactacttttggggtgactctagccat

SEQ ID NO: 900964 - DNA, 586 bp, Homo sapiens
tggtagtgtttgggaatactttagtaagccggtctaggtaatgccctggacacgtgaaacttagagtctagctgagggcacagacacagagcagatgggcacatgagggttgtaggatcacagatgggtgagcgctgtcgagtagaacatggcaaggggcctgccccaggctggcagtgttgggggagtgctccatgaagtgtacataccaagacctgagggtcaacaggggagggagggtggaggtggtggggactcctggagcagctcagacaaagccaaggtgggagggagtaagtttggtttgaggagcagaagggagttcactgtcttgcctgcaaatgacagaggggtgagtgaggtggagtgaggctggagagtgagtcgggtccccatacagccctgcaggccaggctgaggatggggccctttatcctaagtgtagtgcaaagctgctggagggctttcaggagcagctggagaatgattcctaaatgtatactttggaaagatcagaatggctgcaggttagtgactggcttstgggtcaagagtgggtgtggttaggaccctgttggagtaactc

SEQ ID NO: 900965 - DNA, 631 bp, Homo sapiens
taccttttaaaggggtgtgtgtgtgtgtgtgtgtgtgtgtgygtgcgtgtgatctttccttccattcacattcagtttttgacatacgtttgaatctcccttttctcctgggccccaaaggggctttcattattagcattgcatgttttatcaagacactttctcataaaaaattggtacagcaggcaagcgatagccactgcttgaacccggctaattccttgctctccaaataagaattcagttcagcttttaaatatgcaattgtgtgacttactccctacctgggctgaattcaggaggaaaaatcactctcagtgggccagaaccaaagagctggaaaatcaggtgacattctgcagtgatggctccctgccaggactgagatggaggagacaccatttggggtacttgaaagcttcgtttagagttttcctggatttgacctgcctccggggtgcagggattgatggagaaggctggcagctttgatgtcccagttacatgggacagtggagggctggtactgtggctgtcacctctgctggggtgtacagtacttcagaaccagcctcacaggagagaggaagccactcctcaggtgtctgcaagcagcaagtccagccagaag

SEQ ID NO: 900966 - DNA, 506 bp, Homo sapiens
aaaatcaagttaaaactccacagttctccaagatttttcattcattataagtaatcttggccaaacattgaggtgctagtcctttacaacacttataaaaatcaacctcattcatggattttgtgaagtttgttgaaatactgtaatagtgagagattggtttacatctagggtgatatttgctgggtctggaaagttaaagtgagaatgatctgattggttaatttctatgacatggatctaaactaaaataagatgcatacttaatgatagaaacttatgatataatgcccttatctaaacattatgtgccaagtgcctttaacattctgtgatattttaattttgtataatttgtatgaaaaatatgttggacataagaatgttttatatatatatatatatatatatatatacacataaatacacacacacacatataygtatatgtttgcttatgttatttgttaatgagtgcttttacctacacataatagagaatgcac

SEQ ID NO: 900967 - DNA, 506 bp, Homo sapiens
aaaatcaagttaaaactccacagttctccaagatttttcattcattataagtaatcttggccaaacattgaggtgctagtcctttacaacacttataaaaatcaacctcattcatggattttgtgaagtttgttgaaatactgtaatagtgagagattggtttacatctagggtgatatttgctgggtctggaaagttaaagtgagaatgatctgattggttaatttctatgacatggatctaaactaaaataagatgcatacttaatgatagaaacttatgatataatgcccttatctaaacattatgtgccaagtgcctttaacattctgtgatattttaattttgtataatttgtatgaaaaatatgttggacataagaatgttttatatatatatatatatatatatatatacacataaatacacacacacacatatatgtatatgtttgcttatgttatttgttaatgagtrcttttacctacacataatagagaatgcac

SEQ ID NO: 900968 - DNA, 636 bp, Homo sapiens
aaaaacatgcagatgaccaaggattcctgaagaaattccctaacctgaaagagatgaaaatacctagcaaaaacaacttagaggaaatagagatggtgctgagagaaaaaataaaaacaaactatattattggaagatatatatattggaagataaagttgaacagaaaagtagaaaaaataaagacttaggaggtgaataataggaaggaagagaaaatcagaaacaagtccaagaggtacaatgctgggaaaacaagagttccagaaatcaggaataaagaatatggagtgtaagaaaacatgaatacaattattcacaataattcctcagaactgcaagacatgagtttgcagcctgaaatggcccatcaatacccaattcaagggatgaaaccagatctacacaacatgaaattgtgtgattggtttatggttcttttcccctcctcactcttgtgttagttcactgtggacagggaaacctcattgctcctttgacttggacttggccatatgacttgcactgagcgatggaacacaactgggtttgatataccctacatctgccagaggctataagtgtgcccatggtgtttrgatgaaacttaaacactcttgcctggtgccctgagaa

SEQ ID NO: 900969 - DNA, 410 bp, Homo sapiens
tttgtgtcaaaaatgtgtaaaagatcagtctgacttcagtagccaaaagaaatgcaaataagagtatggaggccgggcacggtggctcacacctgtaatcccagcactttgggaggccaagatgggcggatcacttgaggtcaggagatcaagaccagcctggccaatatggtgaaaccccgtctctactaaaaatacaaaaattagtcagttgtggtggcaggtgcctgtaatcccagctgctcaggaggctgaggcgggagaattgcttgaacctagaaggcagaggtcgcagcgagccgagatggtgccactacactccaacctgagcatcacagcaagactccatcttaaaaaaaawatatatatatggatctttgtgatgtgactatgggaatatagaaatttgg

SEQ ID NO: 900970 - DNA, 640 bp, Homo sapiens
accagaacccttctgatgcagttttcttcctgcctcatgagcaaagaattctggcaagtgaaaactgagaaatgattttttctcagtgtagggctcgtgtatcatgacagcaatgttattaagttagtaaataattgatcccagacaaataagcagagtttgatgttgtacaacccatcacacctcacccaaagtcacattgcactgggccacgccatcctaactgctcaaaggggctctgagatgtgtaaattcctctaaattctgcttccaatcagaagacgccagctttgttggggtttaaccacgttcaaatctaggatgtgcccaaacatgacagaggcattgttttctctccctcagctatccgtatgttaaaagcatctattaaaatgtgtctgagatggaaggcacccaacacactgtcattaatttaaggaaataaaattacaccatatgaagggttatcataaggaagatggtgaccagctgttctccatctcctctgggttagaataagagaaagtgggagggagttcaatttgaaattgaatccggagtgggaacttgacagaaggatggaagcatagccaatgagggatacaagacagacaaayggtagagctgtcataaatgggca

SEQ ID NO: 900971 - DNA, 569 bp, Homo sapiens
ggtggctatggccttatagtatagtttgaaatcaggtagtgtgatgcctmcagatttgttcttttagcttagtcttgcttcagccatgcaggctcttttttggttccatatgaattttagaattgttttttctaactctgtgaagaatgatagtgctattttgatggggattggattgaattagtagattgcttttggcagtatggtcattttcacaatattgattctactcatccatgagcatgggatgtgtttccattagtttgtgtcatttataatttctttcagcagtgttttgtagttttccttgtagaggtcttttgactcctttgttaggtatattactaagtctttttttttttttgcagctattgtaaaaggggttgagttcttgatttgattctctgcttgattggttttggtgtatagaagagctactgatttgtgtacattaatcttttatctggaaactttgctgaattcttttatcagttctaggagttttctgggggagtccttagggttttcaaggtaaacaatcacatggtcagcaaacagggacagtttaa

SEQ ID NO: 900972 - DNA, 582 bp, Homo sapiens
tcaccctggctcatgtaaccgtgccctcatctagcccattttcaccactgtgacaagcrtgtctgtctaaccagcaaacctgatcctagcccagaagccctttggtagctccccagtgtctctacaataaaatgcaagcaagatttgttaggctcttcatggacttctgtctgcctctccagccttctctctcccttctgccagggctcagccctaccacaccctgggctctagccactcaccaacgctaagcatccacccttcaggactttgtatgtgccattccttttgccctccatgtcccccagctcctgatcatcccgggccagtgtgaccacactccctcaggacttggcagaggctgctcctctggatactgcagtggcctctgtgctcctctagcatgctaaagtttccctgtccattgatttgtctgacatcaccctgctacttaatccggtgactttcaacccaatcacacccaataccaccttatagcctaaatattttgtaatgttccttcttgaaataaaatttgtgaataacacatcttgtacactttgtgtacacagacacatatac

SEQ ID NO: 900973 - DNA, 706 bp, Homo sapiens
tattgggttagttattttatttttatgatgccatagtcactaatatttgtagggtttttgatcacatatgctttggtgtccagcttacagcagaaaactgtaaccttcacttataagatgaggtaaagaagtttgattatgctaaaaacccttgcatatataatgccatactttttaataagatgctctgttaagaagtcaatatttatagaataatcttatcatataactctgttatcgaaatagtttaaatgagaaaaagcaaagggcttagtgaaatgtgcgtggcattcaatttttctatttaatgagtgaccacatgaacagaatagattgatacaagttgaatgtaacctcataaactaaaaataatacacgaataatatctagaggttgccaaactctatacaccttaattattttagtatctcaagtcctaacatatagccatacatttctacaatgctttaactttatttggataaaatagcagcatgaaatggacattctcacctcaccaaatattgattcagaggtttttttttaaataaagttttaacctctcagttattctcagaatgattatttcctctgcaatagctacctgcccctrtcaaatacaaaaaaagataaaaaaataaagtaaattctttttatgtgggacaagtactaatagactaagttagaagttaaaaaattggcagta

SEQ ID NO: 900974 - DNA, 632 bp, Homo sapiens
tgcagagggacaatgttgacagagtaaatcaattaagaaaatgtatatttttgtgattcataagtataatgatggagttttcaaattcacgtgtgtgatgtgcccccctcaaacctctttatgatgtcagcatattgctcatctgacataaaaaaattacaaaaaaaatagaaaataaataatatagaggaatacatcactttagctgttttatatgtagccatagtcacaagttagtcaaatcaacaaaaaatctattaagatagtgcacagtaataattgttatatctatttttatgaataccttatttctagagcagtctcaggttcacatcaatattgaaagaacagtccagagatttttcatatacccccttcccccaaaatatgtgaatcctccccccattattgacatctcccatcagattgatacatgtgttacatttgaagtaccaacattgaaacatcataataaccccaagtccatagtttacattagagttcactcttggtgttrcacattctatgaatttggataagtgaataatgacatgcatccaccatcagagtatcatatagagtagtttcactgccctaaaagtcctgtgttctttgcctattcatcctcctcc

SEQ ID NO: 900975 - DNA, 615 bp, Homo sapiens
ggatttcggatttgtgtggagcctggagcccctttgttttggccaatttctcccatctgtaacagttgtatttacccaatgtctgtacccccattgtatcaaggaagtaactaayttgcttttgattttacaagctcataggcaaaaggtacttgccttgtatgagatgagattttgaatttagacttttcagtgaatgctggaatgggttaagactttggggaactgttggaagagcatgactatgttttaaaatatgaggatatgagatttggaggggccagggaagaaatgatatgctttgactgtgtccccacccaaatctcatcctgaattgtagttcccataatccccatgtgttttgggaggaacccagagggaggtcattaatcaaggaggtggtttcccacatgctattcttgtgatagtaagttctcacgagatctgatggttttattaggggcttcaccattctcttggctctcattcttctccttcctgctgccctgtgaaaaaggacttgtttgctttcctttctgccatgattgttaagtttcctgggccctcaccaacaatgttgaactatgagaattgactaatgcactgtgccagcct

SEQ ID NO: 900976 - DNA, 604 bp, Homo sapiens
ttggagcagtacaggagattgtagattgggtcagctttgattcttcccaaagcagattcasagatcaaaatttgggtgcaagtaggtttttgggaagtgatcccagaaagcacaaggtgggaatgaagaaatgagcctggaagggaggaaagcaaatgaagctgcatcaattagtgaattattcctattggaagtttggctcatttcatctaaggtccttctgagagactatagaatatgtctcaaaattgtctcacagagggagagtcagcaggggtgcctattgaccaaactgaattcctcattaggatgccctgggaaaaatcctggcctgctgacgtgtctagcaggctcccttgtgtcagagaatgccctctggcagatatgacagaagcgtgtgcagggactaggcagtgaccttcagggaaggctgaggtgatatgggtgggggttctgactgcacctgccacagagtaataaaagtgaacctaattttcagatatggagaaaatgtaaactgtagaacctttatattcacgaagtgaattttaatttccagaaaaaaagcctattttttaaatgttaggaagaaagcaatcaacga

SEQ ID NO: 900977 - DNA, 610 bp, Homo sapiens
aggtaattgctcaacaggatctagcatgttgatgaatgattacttgtcattcaaattaagtgtgtctagtcctttaaarccaattcattttcttttgaaaaatatgaaaatatctcatacccttgcatggattttgatgtgttactttagtggggccatgtcttccctcttggctatgagtgtctgtggcccacacgaaggtttataatagtatcctcaaaagctctgtcctgtcctgtttatttttataaacgctatggatgaagacagggaaggcaagtctgtaaattttccatcagggataaatagctactgtggtaggtgacacagatgggttcagtaaagctctcaacagcctggaatgattaactgaaattaatgattggttttattagggtagaaatataagctcttgcatataggttaaaaaaatatgccagctttgagacgaggagtacttggtttacaatagtgtataaagaaaaatctagggcttttagttcattgcaagcttaaaacaagccaatttatttaaggggccagaaaccctaaagcaatttcagactgaagatgtaaaatcatatgtccagaacaacgaggttctactcta

SEQ ID NO: 900978 - DNA, 624 bp, Homo sapiens
attcatcgtgctgtttgttgcctgagtatctttttttcgttgtgttattgttatataggtcctgtgagatttatgctttaaggagtgtctattttagtgtatttcaagaatttgtttcaagatttagaactccttttagcagttcttgtagagctggcttggtagggtgagttctctcagcatttgtctggaaaagactgtatcttttcttcatttatgaagcttagtttcactagatacataattcttggctgataattgttttaaggaggctaaaactaggacccccatctcttctagcttgtagattttctgctgagacatctgctgttactatgataggttttcgtttgtaggttaccagatgcttttgcctcacagctcttgagattctttcatttgtcttgactttagctaacttgatgactatgtggctaggcaatgatctttttgcaatgaatttcccaggtgttctttgagcttcttatatttgggtgtctaggtttccagcraggctggggaagttttcctcaattattccctcaaatgtaagcaggtcccactcccaatcatttggccatggaagcagaaccacctgtatttccctgtgttgtgattgtggca

SEQ ID NO: 900979 - DNA, 623 bp, Homo sapiens
agaccctatggctcttcagtcagcttgtggtgaatgatgcctcgcctgggactcactgttcagggcagtgggttccactctgccccagagcagatccagaaatgccatccaagtcctaggtcctggaattgggggctccaagagcctgcttggtgctctacgcacctatggcctagctggtacctgaggtgaaagacagagctccctttatttttccctccacttttctcaagcagaaggagtctcgccccatggccactacagctcagaatgtgctgagtctcacctgaatccagctagtctcagagtctcacccaaggcccacgatgtactacctgggtattgctggtggttattcagggcccaaggcttcttcagttagcaggtgatgaatcctgccagaagtaggtccttctcttcaaggcagtaggtccctttctggtgtagggtatgtgtagaaatatcatctgagagctaggacctggaaagggtgtctcatgcctctgaccaatgccgtaatcctgctgtggctgagctggtatccaatgtgcaaaacaaagacctccccactcttacctctcctctcctcaagcagaagkaagggagctcttttggagccatga

SEQ ID NO: 900980 - DNA, 627 bp, Homo sapiens
tctgtgacaggagaaagttgaaccaagtgatgaccaggagaaatattaacataagtctctaagaattcctagcaatcatagtgaaagaagggtggagagagcttgtcatatgcatgacagagtcatttaatccacttttgtttaaatctcaaaggatagggcaattgggatggcctggaaaacttgggccagaatcaatgcagtcaaaaacttgggccagaataaatgcagttaacagagaaggaaggggttaagtagaagataatgtattgtaaagccttgtgtcttgcatgtagaacagatatttcaccttcttaatattcttcttatccacttgaaaattgtcaataacttgactttccagaagccagaggaaaagcttttcctctggcatttcttagactcttgtcatccaccccatgttgtctgactggccaatgtggttgccttttaatttctaaaagcatccctgcacactcttctcactgtacacgaggtcacgtcaattcgtgcttctctgacttaaaagaaagcacagtacctcctctttgttctttaattcttaaaagaattctgatggagarcaataaaatttcagcctagtaaagatactagggtcttaaatac

SEQ ID NO: 900981 - DNA, 560 bp, Homo sapiens
gcttggcagctttcccttggagactggcaggctcagcccatggcacaggtgctgaatgtagcatttaataacaacgtggccttgctcagcacttgcacccctcctccttccctctcctggctgctttctgtggctggcactctgttgggcttatgaaactggtaattagatctccagacagtttgtgaacccctgcaatgttcatataactctgagtgagaagtcacagccggatgtgtgggcattgattatataaacacatacacacacctgccatctggcaaggaaggcagagagctggcatctcctttcttggcttaatctccccccaggttttacttgacttctcaattgggccacgttaatcctgactccaaatcaaaccatctcatttcagtttgattctgggtccaggggagttacagactcctgtgctttccactcacctttagggttggagcatcatgaaaaagagtgctgtgtctgtataatygtataatccaagaaggggtgggtaaacaaggagacaggaccttataaggatggaaaacaccacactc

SEQ ID NO: 900982 - DNA, 632 bp, Homo sapiens
gttcattgtctcacaaacactgagcacaatgggaggacagttctccatgggaaaatcagtgggccygatactagagatagaggaaattgatactggaaagacaacaacagaaggggagtgaacctaggtgtccattaaaaacaactactgattgatgtctaggtaaaggggacctttttgagactactcctgtctcatgagtagtttataagcaattgttttatcagcattaaagctaatattacaacaaaaagaaagatattaaaacaataatttaagctttcaccaaggccggttcaacatacacaaatcaataaatgtaatccagcatataaacagaaccaaagacaaaaaccacatgattatctcaatagatgcagaaaaggcctttgacaaaattcaacaaccttcatgctaaaaactctcaataaattaggtattgatgggacgtatctcaaaataataagagctacctatgacaaacccacagccaatatcatactgaatggacaaaaactggaagcattccctttgaaaacgggcacaagacagggatgccctctctcaccactcctattcaacatagtgttggaaggttctggccagggcaatcaggcaggagaaggaaataa

SEQ ID NO: 900983 - DNA, 666 bp, Homo sapiens
ttttgcactcacctaatatatcctccttagtttacttcgtaacccaatggtcattcaaaagcatgttgtttaatttctatgtatttgtactttttctaaagttccttttgtattgattttcagttttattccattgtagtctcagaagatacttggtatgactttgagtttttaaaattttgttaagacttgctttgtattctaacatacggtctattctggagaatgttttgtgtgttgatgagaatatgtattctgtagccattgaatgaaatgttatgtaaatgtcttttagatccatttggtctaacgtgcagtttaaatctgaagtttgttgaatttttgtctagatgatctgcctaatactgaaagtgggatggtaaagtcctcaactattattgcattagagtctatctctctctttggatctaataatatttgtttcacatatctcagcactctgatgttgggtgcatctatgtttagaactgttatatcctcttgctgaattcatccttttatcattatataatgaccttcttyatctctttttactgctttttgacttaaagtctgttttatctgataaaaatatagttactcctactcacttttagtctccatttgaatggaatatcattatctatcccttaactttcaatacat

SEQ ID NO: 900984 - DNA, 656 bp, Homo sapiens
tccttctgctttggcctcccaaaatgatgagtttacaagtgtatatcaccatgcctggcttttttttttttccttttttgattcaaagtttcactatgttgcccaggctagagctcagtgrctattcataggcgtaatcacagagcagcctggaacttctgacctcaagtcatcctactatctcagccctctgaatagctaagactacaggcatgtgcctttatgcctggctatagttaagctgtttttaaaaccaaagtcatttaatctttctccatttgtataacttataatatttaatttaaggttttataatttttattctgtatatcactttaattctcaagctatgaaacagtacatgaatatttcaatatctgagggaaatcattcatgaccttgattattattcctcaaattaaatcagtaccatcattataagcttttatattttattttctaaaatcataacagtttaaaaaataggatcattttcccaaaatagtatatatgtagttcatatcaccataatattagcaaattgctcaccacggtaactacctttgaaacatcacttaacaccctgcaaatgatattatttttaaaatgaccacaataatcaagagatttggttttctttttttttctttttaatt

SEQ ID NO: 900985 - DNA, 640 bp, Homo sapiens
tctaatgatcagtgatgttgagtgttttttcatgtttgttgrccacataaatgtcttcttttgagaagtgtttattcatgtcttttgcccactttttgatgggttgtgtttttcttgtaaatttaagttccttgtagattttggatattagacctttgtcagatggatagattgcaaaaaaatttctcccactctgtaggttgcctgttcactctgatgataatttcttttgctgtgcagaagctctttagtttaattagataccatttgtcaatttttgcttttgttgcaattgcttttggccactgcatcataaactctttgcctgtgcttatgtcctgaatggtattgcctagattttcttctagggttttcatagttttgggttttatgtttaagactttaatccatctggatttaatttttgtacaaggtgtaaggaaggggtccagtttcagtttttttaatatggctagccagttctcccagcaccagttattaagtagggaatccttttctccattgcttgtttttgtcaggtttgtcaaagatcagatggttatagatgtgtggtcttatttctgagttgtctattgtgttccgttggtctgtgtgtctgtttcggtaccagtaccatgct

SEQ ID NO: 900986 - DNA, 386 bp, Homo sapiens
aaaaaaaaaagataccatttaaggacagctgtaaaataatctctccatataaagtagccctctgtgtgaaaatacagtaagtctttwaaactgcagcaacagaagatactaagacctctgttattggaggtgttcagtaataggcttagtgactgatcactgagcaggtatagaaacagattcaaatacatttaataactgggtatcaggaataaacaagctttaaattctctatctcttaagagattacaatttaatgactattcaaattatttatcaataatctctaataatttccacctaaatttgaataggctatttttccccaaataaacccataaaacaaaacagcaaaattggggcaactaagtacacaatgttctatc

SEQ ID NO: 900987 - DNA, 612 bp, Homo sapiens
cagccttagttgtttcttagtcctctgtagcaatgccacactgtggcatcaggaaaccatgtatattcttttttcttctgtttccctattcactttgtaattattctgttttaggtggttatatggtagttactggggtagcatgttttcctttgtttttctctacttgcgtcaagctcaatgtcatggttttgttatgagcactgcttgctactggcagatcttagaagagacttcagcaagcagctccagagtaggggccataattctctatttgttttgtactagtaccacaagaggatgccttgtaactgctctttggtcatgatagtggtagtgaatccattcatgtaaaatgcaatatgcctgttggtttgggggcacttaagattccacagaggtttagtataatgctctcccttctttctttttgagtggtgaagaaactaaatttctagcacagcatgactgctcatagcctgtgttctgctgctatctgctatgggggggcacatattgttttcttaatgcatcttaatgyatttgctggttggtcaaggagggatgggacttttgaatttgtgtccagacacatagatcctacatatgggc

SEQ ID NO: 900988 - DNA, 631 bp, Homo sapiens
ccctatattccaaaagaaggcttctaactgtgcatrtatttctaattcctatatgcataatatctgaattatacaatccagacttgccacgaattcaagagtggccttcaggataatctgtttctacaaagtaaccatttctcatcaggcagctgttgataaactttcaccattctagtaaggtggcatgagaaaatgaccttcttgctttaataaaaaatattgttacactagatacaaaatacgtttctactgttaaattgtaacaataagactttggaaggtttactagtagaggaagggtgtccccctgtgataaacaatcattaaaaaaggagacagagagggtaatttgcctatccctgttatgtagataaaatgagccaggggggtgctcctcaaacatttatcaagtcactgctgagccttcagcaggccatttaactttggaacagaaagggaagtttcccaatgcataacagagtcttaaatccttcatacgtaatacgtaagatgaactttaaatagaaaagctacctgcacacaggacattgtgtcttgtactcgaactatgcagtcaagaagaaaacacaatactagcggggaaggcaccacgtacagaagctagcta

SEQ ID NO: 900989 - DNA, 608 bp, Homo sapiens
tagggaaactataatgaataagaaaaagatgaaattctttctatctttctcttatcatttttgtaggagatacatacaaataaataatgttgaaaaccaccaagtattttgtcttcaaatactttctccattttcaaacataactagtgtattcagaaccattaaaacctataatccttgagaatgtcagaaaataaaaagttcatttttctcatgttagtaaattacaaaataaaaaaaatcaaaatgaggaaagacatgcaaagtctttgtaaggagataaaatagcttccaatttgtctgactcaatttaaattagatagattgtgttaacatatttaaatattattctattgtcggggcaacattgatgaacaatgaacatgtaaagtaagcatggcaatttggagactgtttattcttgtactgtccaaaagagtggagcatattatcatccactgaccaagatcatttttgcaaattaaatgtattaatcagacatatcttcgtatctttgaaaattcataytatttaacttcctttattttctttaacaccaagtattgtttcttcattcttatgtagattttcttataaaaagactatat

SEQ ID NO: 900990 - DNA, 639 bp, Homo sapiens
atgaacttgtactgagtagagaaaataaaactttctttttattagacaataagataacaatgttgtttacatggtagcattactttgattatyttgactgcaaatagtcatctccccttttaatcttatttttttgtcattttattttttaatttctccattttatatatgtatatattatatacatgtgtgtacatgtatgtgtgtatatatgcatatatgtgtgtatgtttatatacacatacacatatacatgttacacacacacacacacacacacacacacacacatacatcctttttaagcctgtttaccataagctatgctttcctgtgttccactgaggatgccattatttcttaaaattttcttctgggtcccattagagaaattcttttgaggtattctttctttgtattttataaatataattttcttttatcatttcaccataattttgctatgaatcaatagaatttttctctgtattaaaacactataaaaggttgttaacaaacatgtgatactagctatcattgaatctaaatgaactaccctaaaactcaggcaacttaaataattatttattatatgagacagcaattacagcacaacaaaccattcctaaacttggtgtc

SEQ ID NO: 900991 - DNA, 574 bp, Homo sapiens
tcatcatctttcagaactttcccccatgtctggcctgcctgaagccccactccctgctttccagaacaacgatgggttttgctgagtggcacttactaatgggccaggtggggaatccattgcattgtgggggaaaggtgtcaaggttcgctggcagaaaaaaatgtggtaagttagttattgagggaagagtgttcaggtcaagcagacagtgggagtggcctccagtactaggggagaagccagtggactcatgggctgttttgtcttcctgcaatggttagcatcaagagagctgagaaccaagtattttactgagtataatcaaggccttgtcaaagataaaacctgactggctacacccctggttactgggatatgctgtccctccattataattagaaaaaacacacctgcgtggagtgaaggctcaatgtagggatatgctgttcctacattacaattagaaaaaacacatgtggatggagtgaaggataaatgggggcaratcaaactttcttcctgccttggagggaagtgtagaggtctgctcaggaaagagcatcagaaggaa

SEQ ID NO: 900992 - DNA, 582 bp, Homo sapiens
atgttgggtgtattcatatttataactgttctattatcttgatgaattgactttcttaccaatatctaatgaccttctttgtctcttgtgacagtatttaaagtctattttgtgtgatacacatgtaactgctactgctcttttttggttttcattttcatggaatatttttgttttttatccctttacttttagtctatgtgtgttattaaaggtgaagtgagtttcttgtaggcagcatttagttggatcttatttttataaatcaattcagccactttttgtcttttgattgacaaaatttgcttatttatagttggtaagtaaagatttattattgtcaatttattgttttctggttgctttgtaggtcctttattcctttattactcctttgttgttttcctttgtgatttgatcattttcctcggtggtatgctttgattcttttctgtttatcttttgtgtatttactataggtttttaatttgtggttgccatgaggcttacataaatattcttattgtttwaccaattcacttaaagacgataacatcttcactttgattgctaaagaagctc

SEQ ID NO: 900993 - DNA, 530 bp, Homo sapiens
tttgattggtgtacctgaaagtgacggggagaatggaaccaagttggaaaacactcttcaggatattatccaggagaactttcccaacctagcaagacaggccagcattcaaattcaggaaatacagagaacaccacaaagatactcctcgagaagagcaaccccaagaaacataattgtcagattcaccaaggttgaaatgaaggaaaaaatgttaaggtcagccaggaagaaaggtcaagtagttacccacaaagggaagtccatcagactaacagtggatctctctgcagaaaccctacaagccagaaagaagtgggggccaatattcaacgttcttaaagaaaagaattttcaaaccagaatttaatatccagccaaacaaagtttcatagatgaaggagaaataaaatcctttacagataagaaaatrctaacagatttttgtcaccaccaggcctgccttacaagacctccagaaggaagcaccaaatatggaaagaaaaactggtaccagccactgcaaaaac

SEQ ID NO: 900994 - DNA, 530 bp, Homo sapiens
tttgattggtgtacctgaaagtgacggggagaatggaaccaagttggaaaacactcttcaggatattatccaggagaactttcccaacctagcaagacaggccagcattcaaattcaggaaatacagagaacaccacaaagatactcctcgagaagagcaaccccaagaaacataattgtcagattcaccaaggttgaaatgaaggaaaaaatgttaaggtcagccaggaagaaaggtcaagtagttacccacaaagggaagtccatcagactaacagtggatctctctgcagaaaccctacaagccagaaagaagtgggggccaatattcaacgttcttaaagaaaagaattttcaaaccagaatttaatatccagccaaacaaagtttcatagatgaaggagaaataaaatcctttacagataagaaaatactaacagatttttgtcaccaccaggcctgccttacaagacstccagaaggaagcaccaaatatggaaagaaaaactggtaccagccactgcaaaaac

SEQ ID NO: 900995 - DNA, 623 bp, Homo sapiens
tgtggaagagactgggtgggtgagaataggctgggccagactctgagcctcagccctggctctgcctccgagttgcaggtgcccagcttgctgactgtgctctggagggccctgggccaacccctggatcttcttggggagaggagagggtggcctgggcagggtggggcaagggctgggcagaggccagcgggcagaatgccagggctagggaggagcagctggaggggtggagctgagggggattaggaaggattgtaggggttaaagcgcagccctggcagggctcaatgggaacagcttgtccttccatagaccccgggaacaggagaagtggggcagagtagggagatgacagggttgggactggggctcctgggtctctgcagggctgagccacctgagctggcttggagtccccacttgggttagtgaacactttttttccaccatcactgttcctcctctctgcattttaagcagaaggtgaagkctcaggggaggccctcattatacaagtgctgagctgcgcccctctggcctggcattttgttggtgcttacacaagcatggggaggggataattctgaatttatgtggcgccccctgccacccgcccctgc

SEQ ID NO: 900996 - DNA, 623 bp, Homo sapiens
tatctgctcatcaattttaataaaactgcctgaaatttaattgccagtaagtcttggaatttgtaattccaaagctatttttgcacatctatcatagaattgatcttgaagacatacrcagaattaattttaaaaattctatgaaacacaattactaccttttcataaataaacatccttgtttagaccattgctaacttatttagtatcagcccctcctatagtataattttttaatagtgaacactgctagtaataatatacaagatataaaagaaaaataataacattttaagaaagaaaatgtttttgtaagaaaaaatgcacaattccagctattttgttttaaaagctgtttcgtatgtaggaaaacaactggagagagaaacaaccaaattgtattattagcattgcaaacaccaatttttttttttttgagcctatcacctaggctagggtacagtggtgcaatcatggctcactgcagcctccacttctcaggctcaggtgatcctcccacctcagcctcccaagtagctgggactacaggcacacaccaccacacccagctattttcttttgtttgtgttttttgtagaggtggggtttgccatgttgcccac

SEQ ID NO: 900997 - DNA, 615 bp, Homo sapiens
ttaaaaatgacctatcatcttttgctttgaaaaaacagatgtttcctataattgtggtccttcattccttcattccagtgaaagcttctattatccaaaactgcacatccattacttctcagctctttggagatacattattttttctcctcttttttttttcttgaaggatctgtattaaaaataatctgtccttctgatgttgacaactgttatacttcaatgcatatgttagtagactttctccctccataccatccccctctctatcttcctttaaaacgtagctacaagagcttctctgtggtgaataacacttggcaagagtgtgctcattttttaggtctggtatggtgaggatttttaattagtagaactttcatgaaaacattatgtcattgacagagccgtatgttcatttttagttaaaagtgatgaagaagaaagaaagaggttatgtcctagaaacacaggtaaatgctaagtcgcatagataatctgcaccccgctccccccagtgtactaaatgtggcacatatgtattcaatgtgcaaygcataaggaagtaatggtttatttggggagggatgtggtgaagagactggagagtgcaca

SEQ ID NO: 900998 - DNA, 637 bp, Homo sapiens
tcttgcctgcactgtagactgtaagcatcaaggtgaacacaaaggataaagkgtaatcatcatgatagagattttcaaagctctagtaataattacctgccattcacttcccttcatgacactacatagccatttatgtgtgacaatatatcgtacggaatttaaatacatccacatattacctattattcatcttgctgtatcaacactactgaaacaataaacattctcgctttctgatctgtgtttggctgcatattaatttctttattttgtcaatggctttatttgtcaattattcgtgtataattttcttgttaaagaaaatttagaaaaaaatgaacgttaattaaaagattatatagattcttgagacaaacatggaggcacttaagaatatatatgtggggctttaggatcaaatgggggggttagaggatcataatctcctgttttagtatagtctaccttattctccatgctagttttatgaaaaaaaagtagcccctgattatggtgacaaccgcctgtgccaagccaggactagaagtttccagtgatgagcccaagttcagagagctctctatcctgtgcctccaattcaaactcagttctttcccactattttctagggcgc

SEQ ID NO: 900999 - DNA, 584 bp, Homo sapiens
accagaaatgctaaagggagtacttcagtcagaaagaaaaggatattaatgaacaacaacaaaaraatcatttgaagatttaaagctcactgctaataataagaacatgcaaaaacacagaatgatgtaacaccataattttggtgtgtaaaattgtcttgactaaagtagaaagactaaatgatgaaccaatcaaaaaatataattacagcaactgctcaagatacagacggtacaataagacataaagagaaacagaaaaagtttaaaagctagaaaataaagataaagaatagggttatcattagttttattttgtgtttttgttatgcaatcagaattaatttctcatcagtttaaaataataggttatgagatagtatttggaaacctaatggttatctcaaatcagaaaatatacaatgaatacacaaaaataaaaaacaacaaatcaaagcatactgctagataaaattatcttcattaaaaggaagacaggaagagaagaaggaagagaaaggccacaaaacagtcaaaaaacgagtaataaaattgcaagagtgagtctttacttatcaataata

SEQ ID NO: 901000 - DNA, 662 bp, Homo sapiens
agcacgaggccctatgcaactacgcaagatgcacatttctaaagctaaccctgtcaataaagaagaagacatttctggtttcctttagttttagaatctgactttatayaacttcttttccttcttctgtttcctctccttgtcttaattccctcttctttttcttctgtgatgtcacactaaggattacacaggggaggcactgttacaagagggactggggaaagggcagacatttgtatgcaaagcaagctaccatcatcaattggagattattagaaaggagtaaagagcccctccttcttctggtctgttctcttggcaactcctgtgggactctgtattatcaacatactgctaggatggaacatcacaacccaggagttttcactgctgtccttcccctaggatgctgcctgctgaaatgaaaaccaaagctgacattcatcagagttgtaatactctattttgaaacctctagagtaactgtatctatattcatcacacacggcaaaattccttcctttcttccctttcatttacttttgtgtatcacttgtcttcatttgtctctctcattacatggttaaatccttatttagccaagatcgtgattatagctatcctccacaatctcataaatagcataatattttgcagtg

SEQ ID NO: 901001 - DNA, 598 bp, Homo sapiens
aggcacagtgcctgaactaatcaagccagtatgtgactttcatatcatgcagaattaatcagaaattccatacattgacagctcgtgccactcgcctcaaagtaagatttgaggacaaagtagatgtggaatccatttaccctttcaaagtaatttaagactttggaaatctaagaaagataatcaattttgaactatacttgattatgtatgaggtatatggcccccgtaacgatggattaacgttctatgttaattttagggtggtttccaggcactttcaagatgtaaaacttgagctgagagcggtggctcatgcctgcaaccccagctacttgggaggcataggcagaagggaaacttgaggcaaggaaattgagaccagcttgggaaacatcaggagacccactgctattgaaaaaaatatttaataaattaagatgttttccacagaatctagtttaaaaaagaaaaaaaatgagatgtaaaatgtagagtagccaactcttattcccagaagtctgcaatcttcagacrcatacatctaacatatcctccttagaaaagttttttttttttttttgagacagagtctagc

SEQ ID NO: 901002 - DNA, 344 bp, Homo sapiens
gggttacccactggtacaggtctgtagcctgttatgaatcaggctggacagcaagaggtgatcagcaggccagtgagcattacctcattgcctgagctctgcctcctttcagatcagcggcagcattagattctcacaggagcgcacactctattgtgaactgtgcatgtgagggatctaggttgagtgccctttaatgataatctaatgcctgatgatctgaggtggaacagtttcatcccraaaccatcccctcccaacccccaccattcgtggaaaaattgtctttcacaaaactggcccctggtaccaaaaaggttggggaccactgatctatactacta

SEQ ID NO: 901003 - DNA, 626 bp, Homo sapiens
ggcggagagatgcggaaccagttaagctcaggcaacgggctcagggcaatggcagtacttaccaagcggctcgctcttccctgcagcgctgctccttctctcctcctcttcctctccgccctttttctcccgcagctcaggctgctccgcctgtattgggtcttggagttttcttttgctgggtctccccaccaaggcttccacggagaaggcacgcgcccgagagctcagagccatccctggagggggtgaagggattctttgcagcaaagtttcaacctgaactgggttagggagggagggggagacacaggcggagggcacagagggtgaaggaaggagggaaagcgggaaaaacaaaacaaaacaaaacaaaaccccaaacccaaaacccaaatctgaaaaacaatttctggatctgtattcaaagaaaataattgtgtgtgtgtgtgtgtgtgtgtgtgtgtgtgtgtgtgtaatttttttatatacatatatattttttgtttgaatagacaaaatgaaaggagaggaagatcaaactagtgtatatgtccttcaaagtctagtctcccttcctcccagtgsacatgtgcagaccattagtcctcaaatccctgattcca

SEQ ID NO: 901004 - DNA, 670 bp, Homo sapiens
ttttgtgacaagttcattattactacaactggtatttgagaaagccaatgcactaaggctatttataaccaagaaatctcacagtctgtgtcactccsctgtcaccccaatcagagctggtactggtagccactgctgggaatgtagaggacaattaacatcactggaccacttgcagacattccacagcaccagcctgaagtgtagcaacctcacttggtggctagacttagaggggcgctagcattcatagtagtctgtccctaagggattattaaacctgagggaaggagtgtgcaccacatcaaggaagtattccatgggacaaaattatccagatggcaggacttgagtcccagaacattccacatgtgggtcgtttctttcagcagaggcataggtacagtgctgggttaagtggggaaattctggctccaccctaatagtcaggcagtcctggtgttcatgaagtacattgtataagggtacttatttttcctctcatccatcactgaagacaaagatgggacttctttcctcagggatagacatgggtgcacctctagacagacttttaaaaacacatcagggtgaccgcatctccataggagaagtgcccttcaggttcaggcttaaatgaagagtagattcacaatacctttctatatga

SEQ ID NO: 901005 - DNA, 578 bp, Homo sapiens
tttcagaatgaatggtaccagmtcctctttgtacctctgatagaatctggttgtgactttgtctggtcctggacttttttggttggtaagctattaattacttcctcaatttcactacttgttattggtctattcagagattcgacttcctcctggtttagacttaggagggtgtatgtttccaggaatttatcaatttcttctagattttctagtttatttgtgtagaagtgtttatagtattctcttatggtagtttttatttctgtgggatcagtggcaatatcccctttatctttttttattgtatatatttgattcttctctcttttcttctttattagcctgtctagaagtctattttgttgatcttttgaaaaaaccagcccccggattcattgatttttttgaaggggttttcatttctctatatttttcagttctgctctgatcttagttattccttgtcttctgctagtttttgaatttgtttgtgttgcttatctagttcttttaattgtgatgttagagtgtcgattttagatattttctgctttctcttgcaggcatttagttct

SEQ ID NO: 901006 - DNA, 628 bp, Homo sapiens
agaatccacagaatggcattttattttttttttctataggccagccttrttgatgagtgtgtgctggttgactatagtctagaaagatgccttccttggttccttgatccctgcctaactctgtgccagtcaataggtactggtcgatattagagaactctagcaaaaacaaacaaacaaacaaacaaacaaacaaaaaacaaacttggagaaacttgaggaattgatttagcagtctcaagtttctttgtctctgggcatggaagactggccttaggagtgcacagtaacactaaaagggataatatttaaaaaaataattgtaggctgagcgcagtggctcatgcctgtaatcccagcactttgggaggccaaggtgggcagatcaggaggtcaggagatcgagaccatcctggctaacacggtgaaaccccatctctactaaaaatacaaaaagccaggcgtggtggtgggtgcctgtatcccagctactcgggaggccgaggcaggagagtggcatgaacctgggaggcagaacttgcagtaagccgagatcgtgccactgcactccagcctgggagacagagtgagattccgtctcaaaaagaaaaaaaaaaaattgtgatct

SEQ ID NO: 901007 - DNA, 583 bp, Homo sapiens
ccctggagggaaataacctcccagggtggcaaacctgagaggttatgattcaaaatatgaatatatgattcaaaatattcgtggatctggtcaaagtaatagggaccagatatattctctgcctgaaacaacagcaaaatacattaatcaacaggtgatctctgagggatgggaaacaaacaagataagccctacaactgccccagctaacagccttgagagagtttctaggctgcggtgccgggaggcagaactgaggtgggttccctaacatgaggagatgaagcttggtcctggaagacctgggcagtgagagttcacaggggagagttccagagaggagagagctgcacagacagccaactccagagatctgcagagggactctgatgggaatcagcacatgagtgaggaagctacccaggaaagaatcatcaaaagagggaacagagacggtgctgatgctgrcctggaaaaaatgcctgctcccaccaagcagacaggaaaaacataatgctcaaggcagtgggcaaagttctcaggaatattttgcctcacaagtgaagaataattaaccttagac

SEQ ID NO: 901008 - DNA, 583 bp, Homo sapiens
ccctggagggaaataacctcccagggtggcaaacctgagaggttatgattcaaaatatgaatatatgattcaaaatattcgtggatctggtcaaagtaatagggaccagatatattctctgcctgaaacaacagcaaaatacattaatcaacaggtgatctctgagggatgggaaacaaacaagataagccctacaactgccccagctaacagccttgagagagtttctaggctgcggtgccgggaggcagaactgaggtgggttccctaacatgaggagatgaagcttggtcctggaagacctgggcagtgagagttcacaggggagagttccagagaggagagagctgcacagacagccaactccagagatctgcagagggactctgatgggaatcagcacatgagtgaggaagctacccaggaaagaatcatcaaaagagggaacagagacggtgctgatgctggcctggaaaaaatgcctgctcccaccaagcagacaggaaaaacataatgctcaaggcagtgggcaaakttctcaggaatattttgcctcacaagtgaagaataattaaccttagac

SEQ ID NO: 901009 - DNA, 397 bp, Homo sapiens
tgggtctcaatatgatgtccttacaaacaggggaagaggcaccagatatctctttttctgcctgtgcacagagaagaggccatgagaagacatagcaagaaggcaaccatatgcaagccaggaagagagccttcaccagaatccaaccctgacaggaccttgatcctggacctccaggcttcagaactgttgtttaagctactagtctgtaatattttgttctggcagcctgaacaacctaatacacagtcttaagaggtagatatcatccccatttatagatgaagaaactgrggctcagagggtttgactttactaagattgacgggtagtaagccactctgagcatgtcctggatgtagtgccatgccctgtaatgcaccatccaatgagacca

SEQ ID NO: 901010 - DNA, 660 bp, Homo sapiens
agatagaagactagctaaaccaatcaagaagaaagaagagaagattaaaataaacacatctagaaacaacaagggggattttaccgctgacccccagaaagacaaacaaccatcagataatattatgaacacctttatgtaagtaaactagaaaatctagaaaaaatagataaatcactggacacatacaccctccctggtatgaaccagaaagaaattgaatccctgaatagatcaattaataggctctgaaatcgaggcagtaataaatagcctatcaaccaaaaaaagcccagagccagacatattcacaactgattatatcagatgtacaaacaagagctggtaccattcctactgaaacaattccaaaaaactgaggaggagagacttctctttaatccattttatgagaccagcatcattctgataccaaaacctggcagacatacaacaaaaaaagaaaatttcaggtcaatatccttgatgaatatcaatgcaaaaattctcaacaaaatactggcaaaccaaatccagcagcacatcaaaaagtttatccaccacaattaagtaggctttatcyctgggatgcaaggttggttcaacatatgcaaatcaataaaaatgattcatcacataaactgaactaaagacaaacac

SEQ ID NO: 901011 - DNA, 630 bp, Homo sapiens
actaaacaaaaatctaaaaattaaccaatgcccccatagagttataaattagcacagacaataaarcataaatcccagaagtacactaaaagaatatttaatagtgtcttttgcttttttaaggtttcaaataatttctcttataatgcaaatcacagtgagcatagattatctccatctcttggggcaaaacattgttgttgttgttgctgttgttttaataaactagaaaaactgtcctgggagaatgaggaaagttattttgttattaacattcagagtcagggccacttgctttttggtatttgtaaggcctgtgacaaaatggctggatcttgtctgctaactttaaagcaaaactgactggaaatatactgcccatgtatgcagagacctcatcagcatcctcatgctctttctgaaagataagtaaattgtcagcccccaccagatatttcaagaaagtcttcagaagaaaagataaaggtaggtaaaatcaacagaataaatttatttttttcttaatcaagggaaaatgtcaaatacctaataagaaacaaaattatatcctcatagatatataaaatttaaaaattttgcatcataaggtgagaacaggacactaagaaa

SEQ ID NO: 901012 - DNA, 657 bp, Homo sapiens
tatttgatagaaatgtaaaacgtagtctaagtgtcttacatgtgaaagtttcgggttcagcccagagcctcctggggcgccctgccctgtggccaccccgggcaccttagtggattgctttgggagcgctgcaatggtgccaggcctcctcagcaataaagtttgaagacgctatgaagaaaggataaaacttttacagaggccttaaagaaggtcttcatttcataaatgaacaattgcccagagaaacttacaggcaagagtagcccttttatctaaactgagatctggatttcaatccaagggatatttagtgtgaatgacaaaggagcctctgccgccctttccaggctgtgtcttctcagcagtctgagggcagattctctgcagctcccctgagccgagccaccaggagttgacagtcccagagaggcctgggggaggctttgtgggtgtctggacatagggcttttccagtgcgggctgcattccttcccattccaggggtccctggcacctcagctcaagctgcgcggtatggacagtctccctgggtagctgacrtgtggatctggtatgtttttatcggaaaggggagcaaatactgccagaacagcaaccaaccagtttttgaagctggctactgtcttagggagg

SEQ ID NO: 901013 - DNA, 594 bp, Homo sapiens
acctaggttgcttctgtgaaatgatctcatttgctgagttttaaaattgactaaatttcccaatttccaaatgaaaatatttagttatcttgtcttgctatgtgtttttggttaatatgatgattaatttttggtctattacttaacatattccatgattgttgatatggattataaggactcacaaaatagttttcagatgtctttaatttttttacttagtgtagatcctataaatggattaggagtattctattaactcccatgtattcagaaatcgaattggagtggtaaattctgtttgaagtaacaagggatatcaaaggaaaaaaataattttgtgactatgtcttctatacgtgaatttttcaggcatccttatcaatggcttatactaaagacattttctggatcatgggtgacacacagaagacatgcggataagtggcattgtgtacactactgcattttatcatctggttcatttttaaacttttatttctcttamagatgttttattaaccggtgcatcaccaggttaacagtctctggaacactaaacttaccagaaaatacttgttgattcaattaaca

SEQ ID NO: 901014 - DNA, 594 bp, Homo sapiens
acctaggttgcttctgtgaaatgatctcatttgctgagttttaaaattgactaaatttcccaatttccaaatgaaaatatttagttatcttgtcttgctatgtgtttttggttaatatgatgattaatttttggtctattacttaacatattccatgattgttgatatggattataaggactcacaaaatagttttcagatgtctttaatttttttacttagtgtagatcctataaatggattaggagtattctattaactcccatgtattcagaaatcgaattggagtggtaaattctgtttgaagtaacaagggatatcaaaggaaaaaaataattttgtgactatgtcttctatacgtgaatttttcaggcatccttatcaatggcttatactaaagacattttctggatcatgggtgacacacagaagacatgcggataagtggcattgtgtacactactgcattttatcatctggttcatttttaaacttttatttctcttacrgatgttttattaaccggtgcatcaccaggttaacagtctctggaacactaaacttaccagaaaatacttgttgattcaattaaca

SEQ ID NO: 901015 - DNA, 386 bp, Homo sapiens
gccatctccagctatcctcccctgaagagcccttctgctgcgctggattctggtggccatgtcatctcctcggccccgtgggagtctgaagatctggctgcagcctcacctctgaggtcctgctrgttgccacctcttaaacatgatctgaggctcccatgcactctgacctgtgcccacatggggcccacgggaaacacgctggcaagcaaactgtgggtgtgcagacggttctcagggctgcagcacctgtcctttgctctgcccccaaagcaaggccagcccatcttccatcctctagtgttccttggtggggccctgaccacagtccaccaggtccctaaccagaggggacacacaccaggtgtcctcaatgtattgccttg

SEQ ID NO: 901016 - DNA, 699 bp, Homo sapiens
tcacttcacatttgtcaggatggctattattaaaagaaaacgaacccctcccaaaaycccaaaaaacaagtgttgaagatgtggaggaagtgaaacccttgcacactgttagtaggaatggtgcagccttctcaaaaaaattaaaaatagaactaatgtgtgatctaggaattcaaatttgaataattatccaaaggaaatgaaatcaaagtattgaagacatattagcactctatgtcactagactcatggctacggaaagaataagagggcctttacataggacaatgaaaacttcccgaactgaaataaaaagaaaaaagaaaaaataataaaatccaaacagaacatcaaaaacttcaagaactgtggagcaattacaaaaagtataacctaagtatagttagaataccggaaggaaaaaaaggaaagaagcagaaaaaatattttaagcaataatatttgggaacattccaaaattaatgacaaataccaagtcacagatccatgaatctcagagaacatcaagcaggattttaaaaagccatctcaggtaccccacaaatatatacacctactatctacccataaaaatgaaaaattaaaaaaatgccccaaacacccccccaccggctgccaccccaaacacaactaggcatattgtagtcaaattacagaaaaccaaataaaatttttagc

SEQ ID NO: 901017 - DNA, 580 bp, Homo sapiens
ttttgcatgactgccattaytccatttttgctctgcaccctacattttacagagtttatggctatctggttttgggttttctctttgctcaccctctgccaatcctttcctagcctgacacacagtgtggtatatgtggatttggcattatgctatgtaaataggctaactaggcatctaaggtgaggcaagaaccacatctacatgcagacacccaaagccaaaatgttcaaaccaaggttaataaatccaaacaccatcaacagtcaaagcataaagcaagctgaaatggacaagtaggcggaaagtccaaaaatactaacaagtaagtctgaaggaaacagcaggtaatcctgtgcacaagggcccagatgaaatcttgttcaatggctggttctgttctaccatcctttatctgcggtgggtcctcatgttggtatcccaagccttagggcactgtggcccaatctcttacacttcaccaaatatgaaagaagaaaacagtagaggataaaccatagaggcagcaagcatgcttcatctcacaatctaactccagttgcttgaaatggctctttgc

SEQ ID NO: 901018 - DNA, 554 bp, Homo sapiens
gttatataaagggaagttcccctacacrtgatctctttcttgcctacagccatggaagatgtgaccttactccttatttgccttccaccatggttttgagtcctctccagcaatgtggaactgtcagtcaattaaacctcgttcctttataaattacccagtcttggctatgtctttattagcagtatgagaacagactaatacagtaacttggtaccagatagtagggagctgctgtaaagatacctgaaaatgtggaaatgaatttggaactgggtaacagtcagaagttagagcagtttggagggctcagaagaagatagaaaaatgtgggaaagtttggaacttcctaaagacttgtaggactcagaagacaagaagatgtgggaaagtttggaacttcctagagacttgttgaatgtctttaaccaaaatgctgatagtgatatggacaataaggtcttggctgagctggtgtcagatggagatgagaaacttgttggaaactgaagtaaaggtcactcttgctatacaaagagacacgacattttgcc

SEQ ID NO: 901019 - DNA, 599 bp, Homo sapiens
tggcaagaaagtaaaattatacgagtggctggaataccctaaatcactcctggtaaatctttctccatgagttaattcaccaggtttttcttgaaatggcttgcctgcctgcatctgcagatggcaaaaaataaacccaaaataagatggtggagttaatgccaatatattaagcatcataatacatgtaagcagattacatttaccaattaaagtataaagattataagaattttttaaagatcaacctaaaataaaaccaaaagaaagatgaaaaataaaggaatccaaaaagatatgtcatacaaatattagctcacgcctgcaatcccagcactttgggaggtcgaggcaggcgaatcacgaggtcaggagaccagcctggccaacatggtgaaacctcgtctctactaaaaatacaaaactagccaggtgtggtgacacgcacctgtaatcccagctacacaggaggctgagacaagagaattacttgaacccgggaggcggaggttgcagtgagccgaggtcatgccaccgcactccagccctagcracagagtgagactccgtctcaaaaaaaaaaaaaggaagaaaaaaaa

SEQ ID NO: 901020 - DNA, 647 bp, Homo sapiens
atttaaacagaagaaaaactccaggctgtctcatagaatgacagaattgaagtaacacatgttctktgtctttacagtaaccatgctatcattgcttatttcaaatcttttgattaaatgcagaaatatgtagtaccacaggagctggagatagtaactgtgcctgaagcaaacatgaattattctcaacccttaggaacttgttcttgaaacaaatgtgtgtagctaagacccagtgtgttgggaccaactggacagcagggaactttctgaattaacttctatgtagaaaatatttattaaaaggggaatagtagcaatgtactaatttgaaacttaccacagcaattgtttagacattaaaccaacaaaagatattttggagaggagtatttatcattggcagtatatagaaatgctgcaaaatgatcttgaaaagcagactaactttgagtgaatttaatcactgcttttaaattctccacagatgattcatccttgatgtcttagtaccatataagctcctgagcttggattcaaccttcagaaaaacatgagcagaaggcccagtttctgtcattgagtgaaaagggcttaaggtaaaaataatcctcagttattaaatgaagagttattttcttaaacat

SEQ ID NO: 901021 - DNA, 637 bp, Homo sapiens
atcagattttcaccacattacttcttaggcggaaaaaaatctttgtaccaaacgaattcattagatatgtcatagagtattgcatccaaagaactaatcacaatttactctttcacattttttgaagatcgttcatatttgttttactggcattagttcacagcaaaagatgctacctaagcacccatctggatgagaaattattactccacacatcccatcactgttattcagtgtgaaaagtgcctcattcgcggaagtgaggagggttcagtaaattgtctaacctaaggtgtaacaaagattgtgtgaatatccagggacagaatccaaacattccattttaagagcttttttttttctctaattattgtttcctactacactactaagtctttggtgataacacatgtatcctttttcttttttcagggaaaggggtactagacatcaatcatattcctctctctggaaaaagacaaagtggaagaaaatatctattttcactccacttagttttaagttgcatgttgtatgtaaactgtcattaagtttgagtatcaagatatttatttttcawaattaatatattcctaaggcctagtactgctgcccttcaccacacatagaaacccac

SEQ ID NO: 901022 - DNA, 625 bp, Homo sapiens
gcaatcaaagtcatcaggatccgatcaagtattattattttccacggaaaactagcacccccaactccctcatcttccaagttcacagttctcagaggtttggaccatttccttctctttttcacaccccctttaagatggcaaaaaatactgatgattttccctttttaaaaaatttattttattatttctaattatgattgtaactgctagtactgataaaccttaatttagtgttgagagaagctttaggaactatcactttccagtggcccccataattttggatttcactggattgttggaatatctgaaatgtattatatatttccaacagctcataaaaagaaaaaacctttaaatatcacaaaaaggaaggctaaaatagaaggataaatcatgtgtatcaaacttcatatttgtacttatgtttctaattttgattcagcccagcaaaaactcatatcttctcactcataaaggaatccatatcgccacaaatgggcatcaaccctctgcctggatttacagcactggaagcttcctgacccataagacagttctctccrtttttgaaatgttttagtttacaactgtcctttccaatgaccagaaacctggcttt

SEQ ID NO: 901023 - DNA, 667 bp, Homo sapiens
gctaggccatgatgagtgagggcagtcttccgcacctcttataaagtagtgttaatggccatgacacctccagcagcaatgcctccattggtcatgatggtgtattaagggtaaaaccgaagcttgtatgcactcgagcctctgccatggcgtgacttggcagtggcaaggaaatagtgaattctgtttttaacagaaatttttaaactaaatgtctatttgggacattggtttgggaggtacggtgccctttatgctctgtcttttgtatagagtacattctttgtttttctttttatttttattttagattctggggtacatgtgcaggcttgttacatgagtatattgtgtgctgctgaggtttggacttctaacgaacccatcacccaaatagggaacatagtattcaataggtagctttttaacccctgcccctcttcctccttgccccccttttggagtcctcagtgtttatttctccagtctttatgtccaagtgcacacttattttaaacctagtttccagaccttgtggttgtcccatcagatgggtatgaaggtaccatggaacccataaggcatctgcacaggtacctctgctcggcccagctcttcaaagttcttggcatccaaaactaggakaaaattgctttcattctagaaa

SEQ ID NO: 901024 - DNA, 602 bp, Homo sapiens
ctgggatgcaagcctggttcaacataygcaaatcaataaacgtaatccatcacataaacagaaccaatgacaaaaaaccacatgattatctcaatagatgcagcaaaggccttcaacaaaatttcacaccccttcaccctaaaaactctcaataaactaggtatcaatggaacatatctcaaaataaaaagagctatttatgacaaacccacagccaacatcatactgaatgggcaaaaactggaagctttccctttgaaaactggcacaagacaaggatgccctctctcaccactcctattcaacacagtattggaagttttggccaggacaataagacaagagaaagaaataaagggtattcaaataggaagagaggaagtcaaattgtctctgtttgcagatgacatgattgtatacttagaaaagcccattgtctcagctccaaatctccttaagctgataagcaacttccgcaaatgctcaggatacaaaatcattgtgcaaaaatcacaagcattcctatacaccaagaacagagagccaaatcatgagtgaactcccattcacaattgctactatgagaataaaatacctaagaa

SEQ ID NO: 901025 - DNA, 683 bp, Homo sapiens
attgatggagtttcttcatagtgtcattggtctttataatttggtgcatttttgctgtggctggtaccagcttttcctttcyatatttagcacttctttcaggagctctttcaaggcaggactggtagtaatgaaatccctcagcatttgcttctctggaaaggattttatttctcctttgcttatgaagcttagtttggctggatgtgaaattctgggttgaaattcttttctttaagaacattgcatattggcccccaatgtcttctggcttgcagagtttctgctgagaggttcactgttagtctgttgggcttctcgttgtaggtaacctggcttttctctctggctgtccccagcatctttttccttcatttcgatcttagagaatctgatgattatgtgtcttgtggttgacttcttgtggagtatcttagtggtgttctctgtatttcctgaatttgcatgttggcctgtcttgctaggtgagggaacttctcctggataatatcctgaagtgtgtttttcagcttgtttccattctccccatctccttcaggtacttgaatcaatcatcggtttggtatttttactaagtcctatatttcttggaggctttgttcattccttttcattcttttttctctaatcttgtctgcatgtcttatttcagcaaggtgctc

SEQ ID NO: 901026 - DNA, 537 bp, Homo sapiens
ctttccatatctgcttttattaactgttaattcttttaaaagagactcttaagaaatgaatttaaaatctctttattattgcaattatcagaataaaaatcctgtgcagtatgcacagttacgatactgtggctgccaaaagcttaatggacatctatttactgcataccaggccctttcctctaggatgaggataaaacaagcttctgatttccagtagattacattgttatttgaggagacagaaaatataatagacaaatataaaatcaaacactgtgtcaattggcaagaattgcatgaagaaaaaatagcacaggacaagggagagaaaattgtttcctacgaggaatattgtgttgtcttttcatcagtctcaaatttctgttcactccttggcttatttatttcttctgtatacagacaatgttaactctgaattcatactacatgtcacaaasgggccctaggggtttggaatttttatgaaatagatagattattgatattgattgattgatagataattcatgtata

SEQ ID NO: 901027 - DNA, 581 bp, Homo sapiens
aaagaagagctggtaccattcctgctgaaactattccaaaaagttgacaaggagggactctaccccaactcattctgtgaggccarcatcatcctgatactaaaacctgggagagtcacaacaaaaaaaaagaaaactttaagccagtatgcttagatgaacattgatgcaaaaatcctcaacaaaatactgaaaaatcaaatccaacagtataccaaaaggcttatccaccactatcaagtaggctttatccctgggatgcaaggttggttcaacatatgcaaatcaataaatgtgactcatcacataaacagaactcgagacaaaaaccacatgattgtctcaatagatgcagaaaagacttttgatgcagaagagccttttgataaaattcgacaccccttcatgttaaaaattctaaacaaattagatatcgaaggaacatacctcaaaataataagagccatctatgacaaacccacagccaacaccatactaaatgagcaaaagttggaaacattccccttggaaaccagcacaaggcaaggatgctaatatctagcatctgtaaggaacttaaa

SEQ ID NO: 901028 - DNA, 617 bp, Homo sapiens
tggaagttaacttggagagccaggtactggaatgcttttcatttatataaggaattaataagcccaattattctgaaaggaagggaggctgcagggacattaagagggcccatgaggacgtgggagttgtccttatgtgcccctgtgccggcgctgctgctgtggagcctatggaataaacaggtagcacaggcttggagatacgtaataccctcaagagctgccttaggaagctggcgtctgtgtctcccatgccactgtgcttcccacctttcttgcacattctaggaaacggtctgggtgatatcattcctagatttcctcatctctgctgctttccttatgctgttccaacagcttagaaactcttctatagcagttaattcctaatttgcatattgatgggaaagggagtttttctcttgttgcccagactggagtgcaatggtacaatcttggcttaacgcaacctctgcctcccgggttcaagtgattctcctgcctcagcctygtgagtagctgagattagaggcatgtgccaccacgcccagctaattttgtatttttagtagagacggtttctccatgtttgtcaggctggtcttgaacgcctgaca

SEQ ID NO: 901029 - DNA, 630 bp, Homo sapiens
aggttatctcacccagctgtctggtgagctaatatcctgcaatgaaaacagctaaaggtcagcattgaatcttagtcctgagactgtgatgatgctttcactttaaaggtctgggtttacctggaaagcgaaagcaaattcctcagtaaaaggaaacgtggcacgactatgcttctattttataagagaatcttcaaatggaacccaacagctagtctcccagatccacattctacttaaggctctcacatttcaattgttgctgtcactcatactgatccctagttgaacactgtgccctttaattttggccaaagtgtgagcacaaactcatttctttgtttcccccttagcacaattaagacctttcacaaatgttttcttttttttataccaagtaaaacaaacaaacaaataaataaaaggaacacaaaatatataaatatatgaaaactctctggaatataaactatcattttctgattttgtatatggtggtgtgcacccagggcttatagaccttgtcctagtttatgctctatctgagtggttttacttaaccctaaatggctgggacaaatttacagcctwgtacctgtgttcttacttccaaagttctggctcagcttc

SEQ ID NO: 901030 - DNA, 640 bp, Homo sapiens
ttctttcacccacccttccagaataaattcagtatctatcaacgcaaagcactaggaacatttgtatgcagaggtattgaggagctcatattctttgtaggctaatcatgagaggggataatgggtctccttgctgctatactgtgactgcccacaagaagtttcttctctatgtggtagcagaaagagggatttttaaatacagatcagatgatattgctctcctgctcaaaattctttgagagctgctcatcacacttagaaggatatctaaattctgaccatggcctgcacaggggtctctggttctcttgctgcctgcctctccaatctcatctatctctcttccctgtgatccttccacttattgcatactgacttcctttctgcttcattaagacccaactcaagtcttctgcacctgctgttccatcttcttgcaacactcccccataccttcatatgacacctccctcatttcacccagctctctcttccactatcatctgmgcagagatgccttccttggtgcttcctctaaaacagtctcccaatccctgacaggggatctttatctttatcttcttagcctactttatatttcttcatcatattttccctatctgacattatcatacat

SEQ ID NO: 901031 - DNA, 600 bp, Homo sapiens
acaaagttgtgcaaccattacyactataattccagaacatctttatcatcccccctcaaaaaaaaaacaaaaaaccatgcccattagcagttaatcccattccctttcccatggcctctcacaatcactaatctatttcctgtactgtggatttagctactctaaacatttcataaaaatgaaatcatacaatatgctgccttatgtgtccagcttcattcatttagcataacgtttttaagagtcatccatcttgaagcatgagtcagtatttcatttctttttttggcttaggaatattctattgtatggatataccacaatttgtttatccattcatcagttgatgggcatttgggtgttttctaccttttggaaattatgaataatgttgcagtgaacattcttgtacaagtttttgcgtgaatatacccttctctagggtatattcctaggagtaggattactacatcatatgttaactttatgtttaagcttttgaggaactgccaaactgtttttcaaagtgcctgtaccattaatgttctcagcaatgccttagggttctcagcaatgccttagggttccaatttttccgta

SEQ ID NO: 901032 - DNA, 572 bp, Homo sapiens
taaatcaatagtagttgcctcatcaattacagatgggtttccctgaggtcagggttctcaatagcagtggcctcatcaatcacagatgggtttttttgagttcagggttctctgttcccaaggttagagtgactggaggagcataggttggaagaggcatgatgagcacagaaagacagaagagaaagaagggtaatctgataaaaatgagatgtgttcttctgtggccataaaatgaatagctaaggggtgcaggacaggcttacatgacaccaatgcacaaaactatacagaaagactcctgccatatgatcaacaagcacaaaaaataaagatactttctccactctaggggaggtaaaaaccaggtagaatgactttgctcggcataaccatactgactaaaatgaaggatctatttgttttgaaagcagaaactacagcaaggaaaccccatgtayctacagcagtgataatgcccatcatatagacgaggtgaatgaatgtgaggagtttaatttttcagtgtgtattaataattaacctgctcattagctttattagacagaatt

SEQ ID NO: 901033 - DNA, 679 bp, Homo sapiens
tgttccaggcattttgctagatgctgcccttaagaagttcatagtctataattttacatattttatatctgatacatatttatgtttttaaaagctccatatactctcatgtagcaatttctccattttgtttatgtgtgttagtgtagacatgcccaactaggtctaacacccttgaaactacagatatcttcaagttcaaaagaaagttttatcaattttagacctattagacaaagagattaagagactgtttcatataaaaacaaataaatcaataataaaaaataatttatccaagcacattaagggaatactatagctatttttatcacatttttcaggtaaggtagaaatcagtaatttaagtgcctgattgtgagtgaagatgggtggaatgaaatccaaatgagattggagaaacatattttcctgcaaattctttctcactaattcttaaccgtatttgcctggaagtgctatgtcacaaatctttaaccattaccaatcattacttaaatttgtacagaaatctagtataaagttagatcaatcaggcaaayaaattcagatttcatttctgattatatttttatcaaattcgaataggcttcaaactccattagctagatttacaatttctaatccaattcctgtaagaccctataaaatgacctat

SEQ ID NO: 901034 - DNA, 678 bp, Homo sapiens
tctcgagttgaatttcccctgaagttcttttccagacatatgctaagttatagcagggtttattctaagtagcttttatttcctctttcttcatctgtagcagaaattaaaagaagtgtctttaatagaaagcaagatgccatcttattagtcatggtgccctaaatctattagctttgagtaggcaaagtggcagtgattctgatatgcctgacattgtccagtcacatttctaacagcatttaaggaggtggtcaaagtcatgtatctcttttgaccttggtaaaaattaatagtgtaatgcctagtctgcctgtatctaaaacccatctacaaaaaagtgataaagcagcccatgttctcaaggaagaggatacaggttctgtccagcagccattaggtggtgctgcctaaccaacattcccttccctgttaggtcacctacatgagtcctgttgcctttattgtggatacaatggagaatattatgtgattcacttacaaaaggtggaagtggctgaaatttctctatcacctctgtgaaacctatcagattctctttttttctggagagtagtcaatagctgctctaaggaggcagcagacacgaaaatggctgctcagactgaaaarcaagcattgatatttgagtagcactttccactttacaaagaattt

SEQ ID NO: 901035 - DNA, 506 bp, Homo sapiens
tactaaactaaccatccctgaaatagatgcttaataggyacatcaatgtgattcagtgcctgctattctactagaagataaattgaatttttccaccacttacctaaagtatgtggtagttcactcagaaaacaaatcccaaaatggggatgggggagccctacaagtctaatcagtaagaatgtgctgcctgagcccagaactctggcatatggctttcctgagaatcttagaagtggcctggaattttaacattgaacccagaaatgtaattcaactcttcagatttagttctttaatagaaatattttccccagagaaataatattttatttcttttgtcttttgttatctttttcacaaggttgttgggcagtggggcagagaggaggatgaaatgacaatcaagagcattctgaaaactacagaaaagtatgggcatccaaagtttaagggcttattctattttaaaagaggtcaaccacagcaatgccatctatcatcag

SEQ ID NO: 901036 - DNA, 663 bp, Homo sapiens
ttttgaccccctgacaccacatattttctgtgaactattttmtaaccctttcctttagacagtgaggaaactagccttcatggcagactatacagcatatggatcaatacttaaaacctacgcctggcaagccaccatcagctttgttgaaatgtctgttgattctcaatctgattaaggctgttgattaacaaccgagttattctttggtgatgttctctctgggaaggtagactcctgaggtgctggaagcagaccaaacaaaacaatttgctgctgtaatttgttttgcaaatgggaagcactgtaggttgtgtggaatggtggtagtctaggcatctagaagggattgggggaggggagggaaggggagactaggtctcttcctaggtaagtaattggctcacaggtcaagccttggtctggccagttcatccttaagctttcctgtttcttcatactggccctgctgtgatttcctgatggagtaatgcactaatcttagactaacacagatgcctacaggtgagatggagttcctgggattgcctcgttctcacctctccttccaggcagtatatcagtcatcccagattgggtgactcttttcattcacaaaaattcgaatgtcgtctgcataccagtctatgcacagagacacag

SEQ ID NO: 901037 - DNA, 528 bp, Homo sapiens
ttaatatcttgtattcaccttcacaaaatcatacagaatagtttcaccaccttaagctatttcctgtgcttcacttgttcaatgcccyactcccaatcccctggcacccgccaatctgtttaccatctctacagttttgcctttttcagaagatatcattggaatcacatggtatgcaattttttcaaactaacaatatacatttattaaagatttattcatttcttttcatggcttgatggttctttttttattgctgattaacattttattgcatggatataacatagttggtttatccattcccttgtgaaaggcattttggttgctttcagtttttgacaattgtgaataaaaccactataaacattcacgtagattttttgtggacgtaagttttcaatcagttggtaaatacctaggagtgtggttgctggattatatggtaatcctgtgtttaactttataataagctgccagactatcttccaaagtgactggcccactttgcattctcaacatcaatga

SEQ ID NO: 901038 - DNA, 552 bp, Homo sapiens
tgcattgagctgtgatgtaggcaaaaaataaatccttgttatgataagccactgagatttgggggatgtttcttacaggggcttaccaatacaaaccagatatcaaagaaagggctcaggcccgatattctgtgtcaccttagcatggttcattatcaaaaactaacaggagatataaaagggtgcagtgaggaaacggtgaatagtgagggctggcagcagagatcgtataatgcagaaaaagcatatcggagagtggaattgggaacttagggaaactaaggctgttggcaactcaaaggaaacaatagcagaagtcctgtagctggctcccttgttagggctcaaaaggcaggccaccaacagagaggtgggcccctgaggacttttctgactttacctggtgtttatctctctgatccaagctagaaagtgagctcctgcgtagtcagatcatttgaaatgcctactgcagtccagacctytgagaaagacagtctggtttgcatatctaatttggagatctagatattggctcagaattccaaggat

SEQ ID NO: 901039 - DNA, 623 bp, Homo sapiens
gaccagagcaaacatggagaaatsgagtcacatcaagttaaaaagcttctgcacagcaaaggaaacaatcaacaaagtgaagagacaacccagagaatgagagaaaatatttgcaaactacccatccgacaagggattaataaccggaatatataaggagctcaaacaactctacaggaagaaaatctaataatccaatttaaaaatgggcaaaacacttgaatagacatttatcaaaagaatatatacaaacggaaaatgggcatatgaaaaggtgttcaatatcattgatcattagagagatgcaactcaaaactacaatgagatacctcgctccggttaaaatggatttatctcaaagacaggcaataacaaatgctggtgaggatgttgagaaaaggaagcccttgtatactattggtgggaatgtaaattactacaaccactatggagaacagtttgaaggttcctcaaaaaactaaaaatagagctaccatatgatcctgcaatcctgctgttggatatatactcaaaagaaaagaaatccttatatcaaagagatatctgcaatcccatgcctgttgaagtactgttcacaatagacaagatttggaagcaaccta

SEQ ID NO: 901040 - DNA, 654 bp, Homo sapiens
tataataatatcaccacctgcattttcatttgacttagttttcaaaacatgttcatatatattctgtggcttgattccaagaatagttasaatgcttagccatggagggaggtgtcattatcttcagtagatcaaagtttggagaggttacttgacttgcttaagggcacaaaactaaaatccagtagttttagtttggcttgtggaaattgactctttttattataacccgatgctgttcttgactctgatatctttatgacatttcttgaagtctttgaatcattctttaagactctattttaggaggcatactccattctaacttaaaacttctccctcagaattgcttgtctcaagcaatttagctgtctttgaagtaaggaaaatatggaagtcatctaatttttctgtcaaaatatcacatactcattacatacaaaaactgtagaagagatatgctttattcatatgcacagagctcactaaccaagacacatactggtccttgaaataagcctcaaatatttcaaaagactaacatcttacagagcatatatcgtgaccataataaaagacatttaaaaaacaataagaatgaaatatctataaacactccatctccacagctatcttttaaagttaaacaacatt

SEQ ID NO: 901041 - DNA, 647 bp, Homo sapiens
acagatcccattatttttggtgtttaaaatacacacaggatttactgtgtacaccataacccagcaaacacaggtgaagcatcaaacaaaagcaggggtggggtggccaggactcctcaatractgttttaaaattagacccaacctgataagcctgcttgggatgatctgtcagtgagcctaaggggcaggaggaacctcgggcaccagtatttcacgccaatccagggcttcctatgtaactagtcatggagctgactcagtgatctgctttgtatatggtaggactggtctctaacacatgaagatgagtttcaagggccactgctatcagctttctaaatcctcaccagaaacaacacttgcttggcttcttctgtctctgggggaaccaggagggcagaaatgatgcccctcttgatgttcaggatgtaagtaggttcatctttctccgggtaaaggaaaacctgcttcccttctggaatggccagcttgagctcatacctgtcccagagagaggatggtcacggaaatgtccttctccattacaacttgctggaagtaagctgggtggcactgaagtttcttttctcatatttttttaaccaattgttcttctgacatcatttatttgtaaatatagaata

SEQ ID NO: 901042 - DNA, 602 bp, Homo sapiens
cttgacaaatacattgtactgttatgccatctgtagcaagctgttgtaattacccatctgtttcaaattgctattttgctagtacattcttgcatttkgtgttttgcataattaagttcattaaagcagcacccttgagttttaatatttagggtaatatttttgaactctgctgtttcggagagtataagtcagtatgtggagttttgatgaaagtagatgttttattcctcactgatttgtgttaatttgagacacagtcttttaaaactaaactatcatgcgataatgcattgtgtaacctcctatcttgaaagattttattcttaaatgaaatttaggctaagtggaattgacaagtaatgatgatttcaattatgctctttttctcattgtgctttatgtaagcatttaatgaatgttcatctgaacttgatatttattttcatcttgccattgataattgttttctccttgcattgtatattgttacctctataatattttagtattcttatgattcaaaaatgctttatatatagtttgtatcaaaatatactgttttactttaaaaaatttttactttaagttccagggtacat

SEQ ID NO: 901043 - DNA, 596 bp, Homo sapiens
taggtgtgttataagcattttctacttatgatattttcaagatgggcttatcaggatgtaactccattgtaagtcaaggagcatctgtattaaaaacttcacaactgtaagctaagttgtaaaaatatcagattgaggctgactttcagagaggtataaactcctatctccctctcccacttctctccctcctgacttccaaacctggagatgacattcatgataagaattgaaagtgtctttataaggcaatcaaagggctttaacttgctgaccctccgttaggaagcagaaacaactgttgtgcagtaactagtgtcaaaaattgagctgttgacaaaaagttcactcctgccaaacttcctgcactcctaagcactagctgtgccctatcaatgtctgtcatcagtcagtcctcactatctacagtctacttgtttgaaccaaagtagacttcattccccasacgcaacattcactttggttcaagccaactgttctcagaaggaaacacctgttcctcagaaatgctaactcaatgtcctgcagtttgacaaaattaagccttttgctaggtacataggtgaccttatctg

SEQ ID NO: 901044 - DNA, 573 bp, Homo sapiens
gggggaaatattgcctactttgagatattagaggctcactaagctgagctagaaatagtactcccaaggcaagggacctgtagttctagatcttgataatttcctttttttttttttcttttcttttttttttaracagagtcttgctctgtcacccaggttggagtgcagtggtgtgatctcggttcaccgcaacctccacctcctgggctcaagtgattctagtacctcagtcttctaagcagctggattacaggtatgtgccaccacacccagctaatttttggcattttcagtagaaacggtttcgctatgttggtcaggctggtgaactcctggcctcacgtaatctgcctgcctttgcctcccagaatactgggatcgcaggcataagctactgtgcctggtctccatttttttttaaagtcttaatctcacatttaggaaaggagaactgcatagccaaaggagagtgtggggtgaaaatgaccaaaggagagtgtggggtgaaaatgggactcagtgtgcggtccatctttaggtaaagataaggggagccagagggataagtaa

SEQ ID NO: 901045 - DNA, 607 bp, Homo sapiens
aaacataaattaatggaagtcacagatgtagtgactatcattcaggggattcatctaatttttgacattagcttttcaagaataactatgttaatattgccacttctcataataagtactattttactggcagtatttctttaatcttgctattctcatttaaaagtttgatcatgaatggtacagcaatgaaatttgtcaattgatatggttccgtgttcttaacattgcatttctatagatgttttgatgtattcgtagtaataacatgttttaaataacttgttagtcatctctcaatctccacttaatagtttatatacataagcctcacggtaatttcctttcatgcttttgcttattaataattcatgtctttctgttaattttctgtatttgacatttaaccgaagtgtgtttgtaccacaaatgcatgtgaggaattattctactgttgggcactgatcaatcacaacacctaatactttacatttgaaacatgatccttttastttgtaaagtggtttaacatcacatcgtaagtagaaccacaagaaaaaactttgggaacatttgaggcatgagggagagagggatgagctattgc

SEQ ID NO: 901046 - DNA, 771 bp, Homo sapiens
catgacagagaagttctctggtgcattctgaagcaaatagaaagaaaacaacaaaaatcttagaaaactcgtaactgacaaaatcaactgcatttgttttagtttggaaacagcaccagcaccagtttctttcttctaaaagagtaagaattcacagcaagaatattatttttgtttacaagaattgtgtctgaaccctctaaaatacgactgtcaagtcaaatgtcaagaatgttaattagtgaaaggaaggggaggagttgacgggaggcaggccgtcagcaccagctcactctgtaaacagagctgtgtcttgaattccacagcaatggcatggaggcattctttgaaaagaggagataatagatgatgaagtatctagcaaaaaagatatgaaaagcttctgtccaaacactgtttatcaaacaaatatactctgattgtaaactgcctaaaacttgagtttcagtttgtttagctcaccagcatgtgagtgtgtatattcactatttgagttttatttcagttcttctcattgaggtcattccttgtttgaattagctcatgccctctgttcagaggatctcttcaaagtagattacaagattcagagatattttttaagtccattgataagttctccaattctaaatattccactgtttaaccatcggcccattagcccaggcayaaaacagggaagaaagatacacccgcattaaaaaccaacaggttttttatttcctcaatgctcctgtgtcttaccctatt

SEQ ID NO: 901047 - DNA, 668 bp, Homo sapiens
tatgtattgaaagttaagggatagataatgatattccattcaaatggagactaaaagtgagtaggagtaactatatttttatcagataaaacagactttaagtcaaaaagcagtaaaaagagatraagaaggtcattatataatgataaaaggatgaattcagcaagaggatataacagttctaaacatagatgcacccaacatcagagtgctgagatatgtgaaacaaatattattagatccaaagagagagatagactctaatgcaataatagttgaggactttaccatcccactttcagtattaggcagatcatctagacaaaaattcaacaaacttcagatttaaactgcacgttagaccaaatggatctaaaagacatttacataacatttcattcaatggctacagaatacatattctcatcaacacacaaaacattctccagaatagaccgtatgttagaatacaaagcaagtcttaacaaaattttaaaaactcaaagtcataccaagtatcttctgagactacaatggaataaaactgaaaatcaatacaaaaggaactttagaaaaagtacaaatacatagaaattaaacaacatgcttttgaatgaccattgggttacgaagtaaactaaggaggatatattaggtgagtgcaaaag

SEQ ID NO: 901048 - DNA, 651 bp, Homo sapiens
tgtcagtgaagaagtgaatctgttatctgagagaagattggttccctggtgtggacaaaggagagtacattatgaaattaaatttcagaaggttcaggttctggctttgccatttayttcagtgtaagctacttaactgctgcttcttggtctgtaaaatggagctcatgaatgcatgctattttatgtgaaataatgtgctttacaaaactgaatatttttgtatagttaattaatatttagtgaatgactactagttgtatttttataaatacctttttaaattctcacaacaactagataaaattgatatccttgcacatcagaatcactgggagtggtagtatttgaaaagtcttcttatggttataataagacacagtgaggattatgttattatttacactttcaccatgttttcgtgttcactgcttcctttcttttgaactctgcaatgtttagtggaagtaaagattttcctgttttatagcacataatggtctgcccaaaacatatctgtaggctgttcaactcagtactaacactcaagattctcttgttatatgtatttgttgtttatctcaaaaggatattcatctacttgtgttttaacaactgtgtggtaactgaaagttaagcagacacagaaag

SEQ ID NO: 901049 - DNA, 668 bp, Homo sapiens
agctgaattgacttgtgcattcatactctaaatattattttaaaatatctaattaatatattattcacygagcgactcttttttagtagaagctatcacatcagaaactctttattctgacaaagtgacatattgtataattttattcccaaagctaatttttttattttaagacatttcatgagatgttaaaagcccctagtgaagactgttaaatgagccattaaggttaggttatcaatgatcaactaaccaaactatcttaattttcttttgattgaataatagtaacagcaacggtaggaacacacatatgtgcaactaaaaaataaataaaagtaaggacaaactaaaaaataagaattatgcaatgggcattatttaactttgaaaatgtcctataagatttcaagggaaaaagtaaataaaatgtatatgcacgtgcttacattttctggaaacttctgggagcaactattttgcatttcaatatatttttatttaatataaaactaaaaagttgtcttaaatagaagttaaaagcagtttgctttccatacgcaattcattatatcaaattggatagtgttcttggctcagtcagcagcagcagcagcaacattgagtgcccttgggtgtggctctgtattagggtacagctagtaaaa

SEQ ID NO: 901050 - DNA, 591 bp, Homo sapiens
ctactctccaaattttaaagaggatgaaattgagacataaaggttaaggcatgtcatagctgtatggggctagaactggatttcaacacaggcttgtgtgaccccaaaracagtgctcattccataccaccatacttccttacctctgaatactcacactggggaaaaggaagcataatgattatgtataagctctgcatggtattatactacttcccttaaaattagaaagaaatatggttggtcataaagagaaaccactgacagtgagcccaagggaagttgtggactcttccatttgatgtctttaaagcataaagaattcagttgtttagcttcatgtttcctgaaggtagagaagtggaaatgacaaccccctccctccatgtctttctcaggccaaaaattccatttaacattgcccccaactaaatacctgtctcccttctgaaggacttgctgcagtcagctttgccggcctataggtgcaaacatctggaaggcaggtgtttgattttgtgggtgccagaggacacacagctgagcggcacagctgaggggcagggaggaaatgtcttacattgatgtagc

SEQ ID NO: 901051 - DNA, 652 bp, Homo sapiens
ttacctcaaacacgtattctgactccaatccaaagtcacttggaaattggcctcaaagatctaaccatagccttggcaccagacagaaaatcagatctcacttcctgcccctgcttttatttgcaatgtagcttccaaagcaagaaacaaaatctcaagctccattaataatgaaacaaggaggctcaaaagcctcacatcctaacattgggctcaatgaagaaggaggaagcatcagtgatgatgaggaaaggtacaagtgcagggtgaaggtgggagttggccttaagagagagcttattgtcctgattgcgacaggaaggtcttaaagaatggtgtcttctgggaggcatcattttccacagatggtcaggaatgccaaatcagtcctagacaaaattagagcctctagagaaggaaattaggagagactgtgggaaactggcatgaagaaattttaaaaggaggggagaacaccgaatcatctgatgacctgccatgtgccagaggctgtcttatgcacgtttcatacatctgtgatctcatgttctccagcctgcatcttgcctcctttgctgctgatgtgmtaagccattggagagcagacagctctgggtggtcatgttctagtagcagaaacccttcaggaatt

SEQ ID NO: 901052 - DNA, 653 bp, Homo sapiens
cctttctcatccctagcttcagtggtccactctgtcgggggtgctcggcacttccaggcagtcatcttaggcaggatctcttgaattggtccaggctgacttctttctaaggtgcacgtggccggcagagggacacgtgcccctgacattagtacaagcccattggatcttctttctccttgctgacaaaggcagctccagtcacagtctcttggctttagccttttccttggggtggtaagggtacctgcatactgacagagctcacttcaaataaatcctgaaatcctccctttcagtatctcattcgatacagaccagaggaggcctgtctctaatgctagagaacccattttgcactcacttagctatcctctatgggtggtccagcatgtagaatctggctttggttggcaccttttgaaattttcttggccttcagtgcttcagccagggctaaaatggaaccaatcccattttaacatgctgtaacacatgggttttatttagtcttcatagtgttgacccaatcagtgatttttaacgctgtgatttgtttgctaacatttttaaatcaaaggattatatattttaaaatatggacctttaactttcctctaaaaragaaagtaaaggccccttagcctcctgcc

SEQ ID NO: 901053 - DNA, 656 bp, Homo sapiens
ccctgtaatcccagctactcgggagcctgaggcaggagaattgcttgagcccaggaggcagagggtgcaatgagctgagacataccactgcactccagcctgggcaacagagagacaccctgtctcaaagraaaaaaaaaaaaaaaaaagcagcagcagcagcagcagcagcagcagcaggaagtcagaagaggtcatgagcactttagtgcatgaaggagacaagggatacagaaaagggaagctattttgcaagggactaacctctcccactttaaaatcttgccaaattattaaattggccacactgatgtagaataactacttcttaaaacaaatagtgtctgagttaaccaaattctctatatttaaaaatttttaagttagttatttcttgatttaagtaaagccatattttttacattcaaaattatatatgatcttgacttacacagttttacctttcttcatatgtacacagtttgtcgaaaactggtataaaattttcaattcacttatgtagttttaataaatataatgaacataaatacatatttatttatattgctcttaattcacattgacacaaatacatgactatgtacttgtattaccgtatgttaatatacatgcataggacctcccccaactgaaag

SEQ ID NO: 901054 - DNA, 609 bp, Homo sapiens
gtttcagctttctacatatggctagtcagttttcccagcaccatttattaaatagggaatcatttccccatttcttgtttttgtcaggtttgtcaaaggtcagatggttatagatgtgttgttatttctgaggcctctgttctgttccattggtctatatctctgttttggtactggtaccatattgttttggttactgtacacttgtagtatagtttgaagtcaggtagcatgatgcctccagctttgttctttttgcttaggattgtcttggcaatgcaggctcttttttggttccatatgaattttaaagtagttttttccaattttgtgaagaaagtcattggtagcttgatgagaatggcattgaattgataaatctataaatcagtatggccatttccatgatattgattcttcctatctatgaacatggaatattgttccatttgtttgtgtcctcctttatttttgttgagcaatgatttgtagttctccctgaagaggtccttcacatgcyttgtaagttggattcctacatattttattctctttgtagcaattatgaatgagagttcacccatgatttggctctctgtctgttatttg

SEQ ID NO: 901055 - DNA, 691 bp, Homo sapiens
gataaactcccattcatatctttttggataaaggtaacaagactgagaggcaaagtgaatctggattgcagccagatatgtaatcatgtatttctttgttgttgttgttgttgttgttgagacagaatcttgctctgtcgcccaggctggagtgcagtggcgtgatctcagctcactgcaagctctgtctcccgggttcacaccattctcctgcctcagcctcccgagtagctgggactataggtgcccgccaccatgccaggctagttttttcgttttttgtttttttttttcggtagagatggggtttcaccgtgtcagccaggatggtctcgatctcctgaccctgtgatccgcccgcctcggcctcccaagatgctgggattacaggcgtgagccaccgtgcccagccataatcacgtatttcttgataaccaagaagcaggctatagaagtggggactagatgatcattttgtgaggtaaaattgaggaggtacaaggtggttgttctctgcctaacaactgtgctgaaatagtatatcatgaaaagcctgggcttcaagtcagaaatctgagtaactctttaccactgactagttcggtggtcccacaaatctaacccactgcccatttttgtaaataaatgttggaawacagccacacacaatttttttttttacctattgtct

SEQ ID NO: 901056 - DNA, 619 bp, Homo sapiens
taattactttttgagcatggatttttataagtatattttgctcaatttttattaagaaaaatttcaaatatatagaaaaatwaaaagaccagaataataaaatatttatctgcacacaacttagcatcaacaaatgttaatatttttacttcacagatattttttccaaaatgtgtgttagataccatgatacttcaaccccagatattttagtatgtgtcttttaaaaataaggactactttctttataaccacagtatcacttttacccccagaaaaattaatgaaaattctattatatcagctaataccagtcttatttgaatttctctaatcgtgtcccaaatgtcttttatagctgcttattttgcactgatgcccagtcccattagttgcatttgtcacgtctctttcaatctatgatagtgcctctacttttttaattctctatgaacactgactttttgaagacctctagcaagttccatattccgctatgcctaatggtttccttgtgatgtcatttatctgttcctctatcatctttatttcctgtaaggtgggaattatagcaaaggccttgctcagactcagattaaacatgtttttttgcaaaaat

SEQ ID NO: 901057 - DNA, 565 bp, Homo sapiens
gtgtaaacaaatgcactgcaccgtgataaagacaattgaagatgtaactgcaaagaaaaatgttactcagcagaggctgctgctttgaaaataaccctttaaaagatgtctcacctcagcattgaaggctcctcctggggacacactttactaactcagctctagttaataggaaaactgcaaaaatgatgcagctacaattctctggaggtaggagggaaacctcatgcactcagactggattgtaccagcacctctccccttcattctcaagtcacttttgccacccaaacctcaactaatggaaagtaaccaagttaaccagaaggtgaaggcacgggtcctgcaggaggtgtttctggctgttacaagcacgggaaggaaagctccaccactgtggccaatgaaaacttgtcattcgctctcatgcaaaagagaacacaacttccatcacttgactaagccagaggttaactcacttagtcaagtgatggaaagtttcctyactttagtttttctcaaaaaagtgacactttaattatatgagcacacctattttatcctt

SEQ ID NO: 901058 - DNA, 643 bp, Homo sapiens
gtgcaggatgaagaactgtgcaaagtgaggaacatcctgtcacaggtcttcacttgggaagagccaggtggaaaggagatcagttgtccttctagcccaggacaactggaaattacagcccaccaagtagactgctagagttgctttgaatgacctgtgctcaaaagaggtttttatcatcaagtttgcaatcataaaaaaattctaaactagattctaccttttctaaaatatttgcataatggctaatgaaaatggtaaaaatgagagaagcttgagtattcattaggtcagcctaaattacaccttgatttctgggaactttggtcttgtgaacactaaaataaggtgactcagggtcacaactgctgttttctgtaccttagactttagaagtttacacgtctgcatgtgcataacataaaccaaggcattcctgcttttgcctttgaggcaggaagagctatggtaagatgtgcctagaggtcctaccctctcctcccagcatgggatagaaacatttcttacagtggtaaaaattctcatagactgcacaaaattagccacagctaataaaataaaggtagtccttggtttatgaacatttgrtttataaacacacagaaacggtcactgccttcca

SEQ ID NO: 901059 - DNA, 602 bp, Homo sapiens
tgtagaaatacctgagactgggtaatgcataaagaaaagaggttaaattggctcatggttacacaggctgtatggcttctggggaggccttargaaactttcaatcatggtagaatgcgaaggggaagcaggcacgtcctacatggctggagcaggatggggaagacagaaagtggggaggtgccacacacttttaaacaaccagatattgcaataattcactctgatgacaacaccaagggggatggtgttaaccaagagaaactgcccccatgatccaatcacctcccaccaggcccacctccaacattgggaattacaattcaacatgagatttgggtggggacagagatccaaaacgtatcacaaagactgaccctctggcctgagttctgttttttactttgccctccctgccaggtcagaactgatggatctgtccatggaatccatgcatgacactatgatgttaaagtcctcagttaatgggactggtggattccatactacaacagtattgaacaagcactcatatggaagattctggtagggaagatttgggactgaacctccaatttagtttaatgcccattttgcctggg

SEQ ID NO: 901060 - DNA, 603 bp, Homo sapiens
gtcatataagaaactgaaagtagcttcatgattcctgacctgtttgmaggttatatcactgtagcttctattataagaaaatattcatcttaaaattgttttcttgttaatagttggttcaccccaaacttcatatggaaataggattattttccatcaaatgtgatgatctttaaatttaatttctgtttataagattgtggatatttggtttgcaatggtacagtggttttcaaacccagtactatatgtacacacagacacacatacacacatacatgtaaaaaattgggtcagagaaacaattatcctattttacgttctgggatacatacgcaggatgtgcaggtttgttccacaggtaaacgtgtgccatggtggtttgttgcacctatcaacctatcacctaggtattaagcccagcacgcattagctcttttgcctgatgcgctactccctgacaggttccagggtgtgttattcccctccctgcatctgtgtgtggagaaacaatttttttaaaaatccatagacagtagaagttgactgcactatttatcctattagataaaactgatatcatatttccctgtactccatcaa

SEQ ID NO: 901061 - DNA, 589 bp, Homo sapiens
aaatttatcttggacctctattggaaagctcagatcattcaactggaaagctttggtgaattttttcctttcctcctcttttggtttttgcttcatcgttttttaaaaatggtattttgctacaatttcacttgtgtccatttggtatgtggaaaaacagagtctgttcctaataatgctgctcgcccacactatgactgcaaagggctctccaccctattacccccatgtttcaagtttatgtccattggtggctgttgcatatgtagtaactaatggcttctgctggcagtgactggctttgccctagtccatctttggaggcttaggatcctttctggatttatcattatgacttgggagtctcaccatcactccaccttggcagttaagaagtcaggagaactatttgcatatgccctacagatacagaggagaaatgcagagcaaattgtcaacaccttcatcagcctaaagagcagaagctcaaaatgctgtctgtaacargtgcagtgatgcctagttttaatgttaacttacatttgaatgacattttacagcctgtgtttgaaaaatgttcagaagcatc

SEQ ID NO: 901062 - DNA, 592 bp, Homo sapiens
agaggctgttcaggtaccagtcctcctgctcttgagtaagagaagaaaatgctgtatttgtagtgaaaagggtgctggttcaacgctarcaggattttccaattgaaggggtcaaggaaacatgtgcagattaaacaagcacaatttttagtttcattatatttatatgatgattgtagctacttattagttatttataacccaccacagctggttcggtggctcatgcctttaatctcagcactttgagaggctgaggcaggaggatcagttaagcccacgagttggaaacctatgggcaacatagtgagatcttgtctctacgtttcttttttttttaattatccaggcatggtggcatgcacctgtagtctgagctactctggaggctgaggtgggagaatggcttaagcccaggaggtggaggttgccaccagtcaaaatcacaccactgtacttcaatttgggccacagactgggaccctgtctcaaaaaataataaatgaataacccaccccattctaagcaggactatgatgaaagatatataatagaaaagtatgatatgaatcaattagtgaatagtggaaaa

SEQ ID NO: 901063 - DNA, 592 bp, Homo sapiens
agaggctgttcaggtaccagtcctcctgctcttgagtaagagaagaaaatgctgtatttgtagtgaaaagggtgctggttcaacgctagcaggattttccaattgaaggggtcaaggaaacatgtgcagattaaacaagcacaatttttagtttcattatatttatatgatgattgtagctacttattagttatttataacccaccacagctggttcggtggctcatgcctttaatctcagcactttgagaggctgaggcaggaggatcagttaagcccacgagttggaaacctatgggcaacatagtgagatcttgtctctacgtttcttttttttttaattatccaggcatggtggcatgcacctgtagtctgagctactctggaggctgaggtgggagaatggcttaagcccaggaggtggaggttgccaccagtcaaaatcacaccactgtacttcaatttgggccrcagactgggaccctgtctcaaaaaataataaatgaataacccaccccattctaagcaggactatgatgaaagatatataatagaaaagtatgatatgaatcaattagtgaatagtggaaaa

SEQ ID NO: 901064 - DNA, 646 bp, Homo sapiens
gttcttttttatggctgagtagtatcccatggagtatatgcatcacattttctttatccaatccactgttgatgggcaccggggttgatcctacgtttttgctattgtgaatagtgctacaattagcatacgcatgcatgtgtctttttggtagaacaatattttttttcctttgggtatatatcaaatactgggattgctgggttgaatggtaattctattttaagttttatgagaaatctccagactgatttccacagtgactaacctaatttatgttcccaccattagtgtataagcattctcttttatctgtagccttgccagcatctgtaattttttgagtttttagtaatagccattctgactggtgtgacatggaatctccttgtggttttgatttgtatttttatattgattagtgatcttgagcattttttcatatatttgttggctgcttgtatgtcttcttttgagaagtgtctgttcatgtccttttcccattgtttaatagggttgtttgtttttgcttgttaattcgttaattcgttwaagtttcttacagattctggatataagacttttgtcagatgcatagttttcaaatattttctctcattctgtagtctgtgtgtttactctgttg

SEQ ID NO: 901065 - DNA, 577 bp, Homo sapiens
taataacatgacacagtgcctggcaccttgcgtgtgtgtgtgtttttttatttgagaakgcatgacatgaacacactatacagcctaaataaatccctgttttcttttattacagccataaagcagttgtaaaatgaagaggagatggtctgggtgctttgacatagtgggtggatgtctgaaggtgaaggtgggaccgattttaaaggaggtgtctataggagcttccaggtcccctaaatcccactggctctgccagtgtttggccttcaggtctgtgaacttgtctcccgaggaccccagggttaactagactcagggatgctgatcaagacaaaccaatcccccagacaccaatggtcataaccagaatcatgatttattaatttgcagggggagctgcatctgttggaaagaccagatacagacactcctgtaagactatcacaatccctacctgtagaaaagccccatgggagccaaatcataatcagagggctgcttgtggagaatgcaacccaagcagagagatgtagtaaaggaaaaaactgtccttggcatcaggctgaaaccactg

SEQ ID NO: 901066 - DNA, 688 bp, Homo sapiens
attgaagacccacactggccccagaatgaagaagyaaaccactgattaattcactaaatattagtttacaagaacttcttaaagtacatgtgttatatcaaatgaggtaatagacatttacatttaacatactatatgaaagctttttcaaattatacattagttaaatacatgttattttggttgttgtaaatgtgaacatttaagaacaaaagtgaattaaacttaatccttccatcataaacaaatgtcagctggcttgggtacctttggctcatttttatcatgtttgttgagagctctgtcttttatcaaaagttgaatttgcattactattgataaatcctctacaagatttttcaaagagttctttaaattttgttgtaatttcagacacaatattcaagcactgaactcttcagcccagtgattttcctgtggattactcatcagaagatacacacttactatagtaactccagaggctataaatccctggaaagttcattcgaatgaaatttctatatcctcattttcctagtaccaggatagaaagtattgaatatttctgaaagtctctctcactgcagaatagcaggcaaaattaaaaaagaaaaaaaccaaaaaaaacacaccaagattcttgagtagagaagagctagagataggctgatatttttcattccat

SEQ ID NO: 901067 - DNA, 622 bp, Homo sapiens
tttaactataaccatttaaagtcatttccatattaattgcttaatgctgacacagtttctgaaaacttcacaaacacacaaaatcrtagaatatagtgtcttctaggaggttcatgaaaagatggaaaggaccctgaaagcactcttgaatataggtttctaataactctaaaatcattatcatttggactgagtaagaattcctgaaactttaatgaaaagaacattgtcaggaggctttcatgcttctagatggatatcatttgttaggtcctttttctatgatttggattcagagaagcaataattagaaatgtatctcccatgatgggatctattgcagatcctactggaaaggctaaggttacacaaaaaattttaaattctcttgggaacttctgctaaataatagaattcttctagattactttctggctaaacagaagtatctgtgcagctgctggcccttgtggacaatggaaaaatatattacatcaggtattacagcgatccagttgtaggggattagcgaagatactctttagttaagagagtagagtccatccggctcattcttttgtctgtttgattttaggtggtttaatttatggggaccctgggt

SEQ ID NO: 901068 - DNA, 623 bp, Homo sapiens
tcagagcttggtaatgagtggctacatagctttaatggcagtgctacctggacatgagtgcttagcagacagttcttgtgggaagcaaggggcaaatcccagatggccaatgtttcaaagcctagcaacaccttgcacccatcccaccacatgacattaaactgcccattatttagactgaaatcatcacctatgtcctaccaaaggagacactgattaacaggattcccaactctaccagactcccaattctgtgtgcattaggtcgacctgagaaatgtggtggtattggctggtaagtgaacactgggccagctaagaggtcccgggcaggagaaagaaggccaacatatggtcttagtgaggtatgactttgggaagccacttatctaccttgagcttcacttggctcatctatccagtgtagatacacataattttccaacaaatcatggtaggttacatgaaattaggcacactccaactgtttggccttaacatgtatrtgcacatgcaaggcatgtactcaaaaacactttgtgtctatttgttctttaaaaattacatttaaatatttttaatttttcaattaaaatggtagatgcttttacacatacaagaag

SEQ ID NO: 901069 - DNA, 623 bp, Homo sapiens
tcagagcttggtaatgagtggctacatagctttaatggcagtgctacctggacatgagtgcttagcagacagttcttgtgggaagcaaggggcaaatcccagatggccaatgtttcaaagcctagcaacaccttgcacccatcccaccacatgacattaaactgcccattatttagactgaaatcatcacctatgtcctaccaaaggagacactgattaacaggattcccaactctaccagactcccaattctgtgtgcattaggtcgacctgagaaatgtggtggtattggctggtaagtgaacactgggccagctaagaggtcccgggcaggagaaagaaggccaacatatggtcttagtgaggtatgactttgggaagccacttatctaccttgagcttcacttggctcatctatccagtgtagatacacataattttccaacaaatcatggtaggttacatgaaattaggcacactccaactgtttggccttaacatgtatatgcacatgcaaggcatgtacwcaaaaacactttgtgtctatttgttctttaaaaattacatttaaatatttttaatttttcaattaaaatggtagatgcttttacacatacaagaag

SEQ ID NO: 901070 - DNA, 551 bp, Homo sapiens
cttttgatttgaggtaaagagtctgtatcgtgttaagtctccagtgctagtttaccgggatattttatcakaaatgaattttgaattcccttaagataatttggttttctcctttgaccctaagagattgtttatattaataaatttcctaagatcagaaagttagaatgaatgcttaaaacagcacactgtgggtgaagccactataatgtgtgcttccaaataaaacacgtaaatagatattccttaattttttaactctttggttttattttattgactaaacacttggttctgacttgctttctcacccatattccaacaacttattctagtctactgtaatcccagttataaaactgtcactgacatcatctgttgcaaaaaaattatttacaactggatccatcatcaactcagtctacactaccagctttgaattccaaagcaattccacaccacaatccacatctgtattctcaaatccactttgatacagtttcccaagtccactttgatacagttacctctttagaaagatattagaatga

SEQ ID NO: 901071 - DNA, 614 bp, Homo sapiens
aaatactcttcttcagccacacttcatcttagtagaatgatcctatattaaatgaacgttcctgttcttgcagttggttagacttcagtctagtttcatgcacatcaaacttacctagtggtgccttcargttttagcgctaatagtggatttgaagtatgtgaaatatctgttacatggtaagtgctcatttcctctgagtttgtaggtgaaactttaaaattactggttattgattgggtaggggagaaaaaacacctgctgaaacttgttggccggaagtttttacccctgggaagaagaaaggaacggggtgggggagataagggaattcagttcttggctggcaacactccagaaccgtcctgatggaagggttgtggccagttgaaagcagcagtactggagaggggactgggggttgttctttcaaaggcagggttgaaggttattaatggactaagttaaatttctagctgttccttcctgttactctagatactttttatatatttattatgtcacagcagtattgacgccctgaaaagaaagaaaagtgaaagaatagttcacgtaagatcccacaagtcctacaaattttaactttccaatag

SEQ ID NO: 901072 - DNA, 628 bp, Homo sapiens
atgtcaagacaagtttcagtttgtgctttctttagctcccattacaacccatctctttaattaaagtttgctgacacatcccagaatttggcataatcctttccagtcttggctcaaataaaataatctgtgaagattttaagtgactgagctgctgggatcagtgcaggatctactgacatgggttctccagggctttgccatgcttgatgtttttgcaaagactgccattgcagaggcaggattgggaacactaactagaattcagcaggtctggagtccaagagggtctccaaaatagtcactacctaagccaatgcaaactcctcctgcctccaaccaccgtgacaactgaacactgggtaacctacataaagtctccttctctgttaagagggatgcctatgtgttcttatagcccttcattcattgcctgaattgtcactcatatgcatgctacataattgtataaataattctaaatgagttgaaaaatagaatatgaattktatttaatttgccaaatgcttgatgaaattaagcagaaatgcaactttgatggtgttttctttactcctttacaaaatggaaggaagaaaatcttattttcaggtgatctgacaccaat

SEQ ID NO: 901073 - DNA, 607 bp, Homo sapiens
actccagcctgggcaacaagagtaaaactccgtcttaaaaaaaagaaaagaaaagaaaagaaagaaatacaaggcagggcagagcatatgggtacagatgcaggtaaggagggtggatttggaagatgaagcagatggaagcccttttccaattgcttacattttctagtgaattaagaaggttatcagcagagtgtggggaaaagaaaaaggacctagtgaaggtttgatgagagagaggcagtatagaaaagtgggagagtgagttggggaacttaaataagattgcagaaactatttgagggaggaactgtgaatttaaagtgagattgatcattattgatggagagatgtattgtctaatataggtttagagtatttctcattacacttaactctcaccatcctctgtagccaaccccatcacaaagaaataattgtcgcttcctgtattaataatactatgataatatttttaaatgggagcatgctatgccaactctttgcaaccgttttatcttaaaatttagaatgagcatttttatatcagtgatatgcatytacttcatactttaaattgccaaaagtatttccttgaattactcta

SEQ ID NO: 901074 - DNA, 707 bp, Homo sapiens
ccaccaggccccctctctaaaactggagattacaatttgacatgagatttgagtggggacacaaatccaaaccatatcagtacacaaatatgtataaataatatataaacatacatgcaaacacaaacgtgtgtgtgtatatatgtatgtatgtgagtatatatgtattatgtatgtgtgtgtgtaagaacaataaattaatgtcttaaaagttctcagcacaagtgatataaagtataaacatgggcaagagaataggatataaggataataaagtggatattgtccacacttccttacttgctctctttatgtaagtgtgtatatgtgtgtgtctataacaggtttttttcctaacagttgtatgtgtgtttggaagtttttaaaatagatttttcaaggctattttatgtacactttttttggttagtattttggtgatttttagttaaagaaaaacaatgttttccaagggcaaaaaaaagaactgaagttcggaaggaagctggatgtggacttcttacaagctcttgctccaaaacctggaaacgaggaaagagggccctcccgggaaacctgagaaacattggcacagcmgagggaatcctttggtggggtgggcggagatgccagcccacttgtgtgactgtattgttttgagtgggctctaaggcaatttctgtgtgccactccattgacttaattaa

SEQ ID NO: 901075 - DNA, 626 bp, Homo sapiens
aatctttccctaacacagcctggtatcttccacaatgacgttcctaatataagcttgtgaacttcaagtctggatcaccatctctatgtagcctgtgtctgctaaacttaattcagattttcacagtgcaagccctgtgtagaagtccacctcaacccaatatgttctggagactccaggtgtgagaggcaagtgcttgtctctgagggacaagagttaggataactgatggaagatttgtgtgtctctgtgggaagaaagggaatgtgaccagaatacagtctcaataagagctactgggctcccatgtagagttatttcaggttaaaagacttagaggctactgtaaaaaccaacttcgtttctcaggaccatggctagaagaatagcaagctccaagaccagtgataagaggacttattgatatgttggtattattaatggttaataattgagcaacaataacattgagagtgattcctcaatgatctcattggatcaccccacccagtgaggtgggaaggactgggatttttgtccccacaacaagaaaccattcaaagaamggagaggttaagtgccttgtcaaggtcacaagctgagacaaacctagatctgtcacctat

SEQ ID NO: 901076 - DNA, 670 bp, Homo sapiens
ctatgaacacctctatgcagacamactagaaaatctagaagaaatggataaattcctggacacatacaatctccaaagactgaaccaggaagaaactgaatccctgaacagattagtaatgagttccaaaatttaagcagtaataaaaagcttactaaccaagaaaagcccaggaccagatggattcacagccgaattctaccagatatataaagagctggtaccattcctactgaaactgttccaaaaaaatgagcagggactcttccccaactaattctgaggccagcatcatcctgatacaaaaccaggcagagatgcaacaaaaaaagaaaaccccaggccaatatcccaaatgaatatagaagcaaaaatcctcaagaaaatactaataaactgaatctagcagcacatcaaaaagttaatccaccaagatcaagtagactttatccttgggatgcaaggctggttcaacatacatagatcagtaaatgtgattaatcacataaacagaactaaaaaatttcccaaaaccacataattatctcaataggtgcagaaataaaagagatgtgaataaaattcaacatctcttcctgttaaaaaccctcaataaactaggcattgaaggaatatacttcaaaataacaagagccatctatgacaaacc

SEQ ID NO: 901077 - DNA, 670 bp, Homo sapiens
ctatgaacacctctatgcagacaaactagaaaatctagaagaaatggataaattcctggacacatacaatctccaaagactgaaccaggaagaaactgaatccctgaacagattagtaatgagttccaaaatttaagcagtaataaaaagcttactaaccaagaaaagcccaggaccagatggattcacagccgaattctaccagatatataaagagctggtaccattcctactgaaactgttccaaaaaaatgagcagggactcttccccaactaattctgaggccagcatcatcctgatacaaaaccaggcagagatgcaacaaaaaaagaaaaccccaggccaatatcccaaatgaatatagaagcaaaaatcctcaagaaaatactaataaactgaatctagcagcacatcaaaaagttaatccaccaagatcaagtagactttatccttgggatgcaaggctggttcaacatacatagatcagtaaatgtgattaatcacataaacagaactaaaaaatttcccaaaaccacataattatctcaataggtgcagaaataaaagagatgtgaataaaattcaacatctcttcstgttaaaaaccctcaataaactaggcattgaaggaatatacttcaaaataacaagagccatctatgacaaacc

SEQ ID NO: 901078 - DNA, 627 bp, Homo sapiens
ttctaagaatcaaattcaatcacaagaagacttgggacatgaaataawctgaatttatttattcattcaacaaactcttagtaaagacaccagtttagagacattgcagctgcactgaggaggaaacactacactcccctgtacgcacggggaagtgattttacctgcaggatgaccgaatgtgtggtttcaggaagtgaactataatggggttttaatgtcctttgggtcctgcctcagcattgttcattttcagtaaatgaaagcaatacaagctttgcaaagggatttcgaactataataggggaaacttagaaacgaatccagataccaccatggatataagattctgggaactacttatcttggagagatctttaatctgaaatcactgcaagtttcatgaatatttaaggagcaaagactcagagaagacagttaaagggaaaattgctgttggctgatttttaacaaatagatccttcctagaactcctagttctcactaggaattgcctcagagacaatttccacctatagtcattactcaaggattagagcccaagacaccacactcaggaggcccgtttattgcagacagatggttcaaaaagcagctctcccagca

SEQ ID NO: 901079 - DNA, 596 bp, Homo sapiens
ttaggtttggtggtatagagtgacaataaagaaaaaccatgtaaataagatgttagcatttgcatacattgatatggtatatatttacaaaaacatgtaatagaacatccaagagttaattcaaggaatcactgtcgttttataacaaattataattcaaaagcttagagtttttaccttatactggttcatgtaatacaataaagggattaatatccaccaatatcaatccaagggtggatataaacacacattggcatttgagaaaccatagtcactatttttaataatggaattttaggacatctggtaggatttcagtttgattcatcatttactgtatttgaataaatgatctgcaaccttaataagcttatgccagtgcagaaatggaatggcatcccattctttacagtgaaatagcaattagtaagaacttaaaaactattagataactagattttgtaattagaatttaataamagcactgactcaaatagcagataaaaataaaaaccttctgctggagatttttcacttgggattcacctcagcccaggcaaattcaaaatatctttatgttggtcttcctcaat

SEQ ID NO: 901080 - DNA, 609 bp, Homo sapiens
gtatgaagtgatgtgtacgtggatttttgttatgctttgtattttgattggtggaggaagaagccaaagttgcatggccaagcccaacatcaatggaatgggtaaatattctcctcccatgcacaaggtagctgggcttactcttttgtgcttattctagggaggatacttctctcacttaggtagtcaatttttttttttttttttttttttggagatggagtctcactctgttgccaggctggggtgcagtggcgcagtcttggctcactgcaaccttcgcctctggggttcatgccattctcctgcctcagcctcctgagtagctgggactacatgtgcccaccaccacgcccggctaattttttgtatttttagtagagacagggtttcaccgtgttagccaggatggtcttgatctcctgaccttgtgatccacccgcctgggcctcccaaagtcctgggattacaggcgtgagccaccgcgcccggcctaggtagtcaaatttttwaacaaccaactactacaacttagagtcagactaggaatgtgaagacaaatgagcaaatagaggattccatgctttccccctaattctagccccaaga

SEQ ID NO: 901081 - DNA, 475 bp, Homo sapiens
attccacgaatcctgaattttaaattgattcctcaggggtatattgaagggttcyctattagtcagcctgcttttttaacagtcatttttaaggttttcattttcttttaaaaactctatttcatataagccatatttatattaacatttgaataaatgttggtgtacaagaacagagttttcatataccttgtgaaataaaatgttcatacaattatataatcttctgttcatcatgtgaatagggtaaagaatgtaggtataaattccaattctacaactttctaatgaaataacatgggcaggtcctttctataatatttgtttttttatctgtaaacaagagaatgcttctactaagaagaaaaaaagaataaaagattgaacatgcagagaatatatgcacttgggcaagttacgagcctcgttgtgatttggctttctgacctgtgaaacatgggtagtagtatctact

SEQ ID NO: 901082 - DNA, 699 bp, Homo sapiens
ctttggtatcaggatgatgctggcctcataaagtgagttagggaggattccccctttttctattggttggaatagtttcagaaggaatggtaccagctcctccttgtacctctggtagaatttggctgtgaatccgtctggtcctggactttttttagttggtaagctgttaattattgcctcaatttcagagcctgttattggtctattaagagattcaacttcttcctggtttagtcttgggatgtgaaggaactcttcaaggagaactacaaaccactgttcaacgaaataaaagaggacacaaacaaatggaagaacattcaatgctcatgggtaggaagaatcaatatcgtgaaaatggccatactgcccaagataatttatagattcaatgccatccccatcaagctaccaatgactttcttcacagaattggaaaaaattacttttaagttcatatgggaccaaaaaagagccctcattgccaagtcagtcctaagccaaaagaacaaagctggaggcatcatgctacctgacttcaaactatactacgagactacagtaaccaaaacagcgtggtactgataccaaaacagagatatagaccaayggaacagaacagagccctcagaaataataccgcacatctacaactatccgatctttgacaaacctgacaaaaacaagaaatgggga

SEQ ID NO: 901083 - DNA, 502 bp, Homo sapiens
ggaagatctggcaccatccctaattcctgttttccagatgcagagacmtggtctcaacttcatcaggaaacttcattcctaattacacactaaatcaactcaatccactaaaatgtacaagtgattcctgaaaaaataatttgccttggaaatattacatacatcatatgtacaattttacagacaagcgtacattgtaaatagacttatacaatcccccaaaacaaaatcttgttttgggaataaacactcttggcataatttagttgaggtatgaaaatttcacccagtgtttcattctgtactttgtaatcatcggccatccgtttcttactgggtaattactactgtgtttgtctcttatcattaccagcaaagtccctattctttaattggatattaaacacggagccacagtccatggaaagtagaaatgcttttcataatgctggtcagctggagctccagcatgttaatttctggcacagaatttgaggtttga

SEQ ID NO: 901084 - DNA, 636 bp, Homo sapiens
tggggactttcctgacccacaatttattttccctcgtgtccaactcacacatttataagaaaggaactcaggttgatgtatgtcagaaggactattttaatccagttcagatttgaaagaaagcattttctaacaacaagcaaagaaagaacaaagcacaagtccattttattccactactattcagcaaaaacaacaggaggcatcatggagcggactggcttggctagcatacatttggcttcataatggtttctgaacgtattcatgaataaatatgattgaaagaaaaccttgcttgacctagaaccagatgttaatacttgatatagactcagcgatggatctaaaatttttatatatttacctttatatttctagtttcaagtaactctcatatcaactcctttaatcatacatttgaaaagaataaaagcaacagtagataaagaaggactccagggagagtagactatgtgtgatagttgggcaacggattcctgcagacactaaatcagacatcccagatttagtaaagtggccttcgtgaattggcaatcatctgtctcatcacagcagaatcctgaccaargagaggtcatggctaacctctagacatgctggaatttcttacag

SEQ ID NO: 901085 - DNA, 579 bp, Homo sapiens
cagagaaattttagttttcctctccaccatccccagtgtgtggcctgcaagaacatggcccaagatggaactagagacatcatgttctagtgcaggtaggttgaatagagacaggaagaaaagaggtgagggtcatatgtcagtaatcttataaggaaggtcctcagaagctaactgaccactgctgaggggaggccgagagatattgtcactattctggaaggtgatgttctttggcaatagaggttatttctaagagaaatgagaaaaatggacattgagaaacatccaggagcctctgttacactagtcatttttatccttagcacttatcacattttcttccaatgttaaaaaatttttctgggaaaactcaagctctgttctcagctctactatgtactaaatatatgactggttaaatcacttaacctctctgagatgtggttttctcatcagtaaaacaagcttaacaatttttcctctttcatcctccaaggattaaattaggtaagcrtatgtgaaagcacccacaaagagttgattgccagtgactatactctacaaaatacggggtga

SEQ ID NO: 901086 - DNA, 604 bp, Homo sapiens
acattctgggcagagcttgaagagcagagagatactaaatagaaacaatgacaaagagaatccgtataggaatttgcttattcctctgaacaagaaggttgctcttccctaatctgtataatcaacaataatgaatgatcagggaaagccagaagaggattttattagtctattttcttactattatgaagaaatacccaagactgggtaatttataaagaaaaagaggtttataatctgtatatcaacaataatgaaaaatcaaggaaagccagaagaggattgtattagtctattttcttactggtatgaagaaatacccaagactgggtaatttataaagaaaaagaggtttaatggactcacaatcccacaaggctggggaggcttcacaatcatggtggaaagggaagggggagcaaatgcacatcttacattacggcaggcaagagagcatgtgcaaaggaactgtcctttatagaaccatcggatctcatragactgacttactatcatgagaatagcacaggaaaacctgtccccacgattcagttacctcccacggggtccctctcacaacaaatggggattatgggaactacaa

SEQ ID NO: 901087 - DNA, 662 bp, Homo sapiens
gaagcattttgtagatagatagatagatagatagatagacagacagacagacagatagacagacagayagatagatatttgtggggaatacatacattatatatatatgtgagtaaattagtgagggcaaattggagtcaaattataattaaaaaaataggaaggcctcaggacacttgcaatcatagcagaaggcaaaggggaattaaggcaccttctttacaaggtggtaggaaggaaaatgaacacaggaggaactaatgaacacttataaaacaatcaggtcttgtgagaactcactcactatcacaagaacaacatgggggaaacttcccccatgattcaattacctccacttggtctctcccttgacatgtggggattatggggattataattcaagatgagacttgggtggagacacaaagcctaaccctatcattctgcccctagcccctcccaaatctcatgtccctttcacatttcaaaacaaatcatgctttcccaaatgtcccccaaagtcttaattcatttcagcattaacacaaaagtccaagtccaaagtctcacctgagacaaggcaagccccttctacctaggagcctgtagaatcaaaagcaagttagttacttccaaaatacaatgggagtacagacattgtg

SEQ ID NO: 901088 - DNA, 532 bp, Homo sapiens
ctgcccaaacttagttccagtgttaggttaacttggaggcttccmtttaaaatacttagaagctgcccaaacttagatccatattcatattgtgaactagttaaagtatagtctaataattacaatttattagaagaggcttttttttcatccagagtcaatttctaagggagattagtttcctttttgctatagttgacaaagaatgaaaccagtactaaggtatgctttaatcaagaatgtaccattttgcaggacgtagcttaatacttgtgtctagaaatctgactctccaccatacacagagcccaaggccttttctcctgtgtcctacctggccattaatatttgttactaatgggtgcttaaggcagactatagtttagtgttgagttttcagcttcctattcccttctgtctgcattacatttactttataaataaaaaattatttatgtttgagatactattgcaaggtgtttgcaaagaagttcttttttttttataatttctattctgccagtagccctat

SEQ ID NO: 901089 - DNA, 532 bp, Homo sapiens
ctgcccaaacttagttccagtgttaggttaacttggaggcttccctttaaaatacttagaagytgcccaaacttagatccatattcatattgtgaactagttaaagtatagtctaataattacaatttattagaagaggcttttttttcatccagagtcaatttctaagggagattagtttcctttttgctatagttgacaaagaatgaaaccagtactaaggtatgctttaatcaagaatgtaccattttgcaggacgtagcttaatacttgtgtctagaaatctgactctccaccatacacagagcccaaggccttttctcctgtgtcctacctggccattaatatttgttactaatgggtgcttaaggcagactatagtttagtgttgagttttcagcttcctattcccttctgtctgcattacatttactttataaataaaaaattatttatgtttgagatactattgcaaggtgtttgcaaagaagttcttttttttttataatttctattctgccagtagccctat

SEQ ID NO: 901090 - DNA, 640 bp, Homo sapiens
aattttgctaaaaaaaaaaaaaatagaggcacacaaaaatgtgatgagtaaatgaaacaactgttattagtgacggatttggcrtgttttacgaagtctgaatgattactcatccactgtacatttgcagaagttctttaataaaaaccagacgcatatgtagtagcaggggttagtaggtggatgggaggattaaaccctgtgcgtttctggagcattggtttgtaactgttttttggcttgtcaacaggctatttttctgagtcagcctataggatggcttcccagggtaagtctgattttgcttttctggttttaaaatataaagtggtaatggagagctgactagttgctctctgcattagattctgtaaatcaatattgcctgcatttcttctgtaagaaagacattggtcgcatttcagcatattctagtgttcctgctgctcatttttgtagctttgccttacctccccctaattttaaaagtcaaatgcccaagtgctgaaagaatttgcaaggggaattgcaaaggtcatgtgtaagttctgtggctgaagtgtggagagcagtatgattgagctgcagcccttcatgaacctttcttttcaagaggaggtttccaataaattagggtagc

SEQ ID NO: 901091 - DNA, 632 bp, Homo sapiens
aaatataatctttcaaatatcttgaattctgtcatcktcatcactcctccatcatcttttctttggttctgcaatagcttcatcatcttcttgtttcctcccttttccccatatatcctgctttccactctatagcaggaatggactttgaaaaatatgaattatattttatcaaatgccatataattatctataaggttcttcatgatctggctcctgcctgcttctcccatgttattgtattagttactctgttctttgttatccctcaaacacagagagctcatgtcctcttcaggggtcatgacattggctagctcagcctggcatatgcttcactaatgtatacattctaatagccccttctcagatttgggtgtcttcaaatatcagctcatctagagagtctttcctggctacattatttgaaaaaagaagctcttagtgactatcacccaaccttgctttgtgttcttaatgttacttagcaataacaaattttttaaaaatatgcatactttcttaaaataatgtctggtccatgtgaatgtaaacatcatgatggcaaggacatcatatatcttgtacatataatccaagtgtctgggacagtggcacgattagaggaaaat

SEQ ID NO: 901092 - DNA, 511 bp, Homo sapiens
cctctgccctattagctgaattcaatgaaaatggaaactgatgtattcaacctagtaagggaggacttttctgttgccayatattccataataaacaaatgcaatatttgtagcaagagcaacctccataacttcaaatgaaattgttataccaggacatcctctttctctgacaggacatatccatattcccattaatttctctagcacaagaaggagaagggagttgaggacctttttgaatgcgtaatgtatgccagcatcctatgaagtttaaaataaggaggactttattctattgcttgtgggaatattggtgtcacctattacatatctgcatttgaaagatgctttcgaaacttactttaaatgtggtctcagtttcctcatctgtaaattgaaaatgtaaaatgattcttactacataatgtttttattagaactaaattaaataattgatctaaaacaattacatggctctgctcaataaattgcatatttatgactatca

SEQ ID NO: 901093 - DNA, 632 bp, Homo sapiens
ttccatgaagtactagcctattatttcacattcatccgctgaaagttaaattttatatcccaccttctcaatcattcttctgtaaaactcctcagtgagaaagtgaagaaaaaaaagatttaaactgcaaattaccctgctattttcaattgtaatccacacaggaacctaactagataatgttttctccattttaactgatgagaaaaataagattcaaagtgataaattatctttaacagaagttagttaatgatttgtgtaatttagataaaaactatatattgtcttttgtgaaagcttggaatctctcctacactcctcttcctagatgggatagcacatgatttgtggagcagcagactggaagagaagaaggagaatgaggaagagccatagatagggatgacttagaaaagaaatggccaaattctactttattcatttttttcaaaatagtttgaattcgtgacatgaagctgtgttattttcagaaaaaaatggtacracattttcatataatggaaaaggcaaataaaaatgtttggccacaaagataacagtaaaattttgaaataattgtttgtggggtagaaatttacaatcactaaaaacaaacaaaactaacaaaa

SEQ ID NO: 901094 - DNA, 632 bp, Homo sapiens
ttccatgaagtactagcctattatttcacattcatccgctgaaagttaaattttatatcccaccttctcaatcattcttctgtaaaactcctcagtgagaaagtgaagaaaaaaaagatttaaactgcaaattaccctgctattttcaattgtaatccacacaggaacctaactagataatgttttctccattttaactgatgagaaaaataagattcaaagtgataaattatctttaacagaagttagttaatgatttgtgtaatttagataaaaactatatattgtcttttgtgaaagcttggaatctctcctacactcctcttcctagatgggatagcacatgatttgtggagcagcagactggaagagaagaaggagaatgaggaagagccatagatagggatgacttagaaaagaaatggccaaattctactttattcatttttttcaaaatagtttgaattcgtgacatgaagctgtgttattttcagaaaaaaatggtacgacattttcatataatggaaaaggcaaataaaaatrtttggccacaaagataacagtaaaattttgaaataattgtttgtggggtagaaatttacaatcactaaaaacaaacaaaactaacaaaa

SEQ ID NO: 901095 - DNA, 609 bp, Homo sapiens
ttagtttctgcctaatttcctcctttagatttagtttgttgttgttgttttaaaccaggctaacagcatttagtgaatagtatttgctaacatgccctcttcttgaaattctctctctgtccactgaaccagacctcttactctcactctctatgtcttttaaattccattagtgatgaattgtcccggccacaagcttctgcaccacctcacagcaacgacgcatgggaggcatttttagcatcagattctcatcatactgttgtctactcctcacacttttaaccaaaaagtgactttgcccctaatttgtgggcctgataaataatctcaccataggcaataatctgtgtggtctctacaagtggttgaaacgtcaaagcaaattcacagacattataatttttcccaatctcaaactttattaatgattcaaagactacaagcaaacatgcagtccagggtttggcatttcttgtttggcatacatgctcaaaatagtctgcaaaatctttcackttctctccttttcggaactggagctcattgttgttttagaataagagacaagagctaataaagtcagcgctacatgccagtgcagtagaa

SEQ ID NO: 901096 - DNA, 718 bp, Homo sapiens
ttaaatatcattttatatataatataaaatactttatagaataaaatacataataatatataataatatattttgtgtaagaatcctgtatatttgtttagatttgcttctatctgtgtgatgtttcttgatgccattgtaagtgatagaatttaaaagttattttataattgctggtatccaataatattgtatctagagacattgctaatttcatgtttattctcatagcttacccataaatatttaagggaattacaattatagtaacatttttatttcttaatttaaaattcttaaaacctaatttcaatttcttctcttgtagcactaaccaggacctccaaaaaaatgtttaaattaggtgaccttaataagaattcttgtctcatttctgaattcaaggagcaagtgattcatagtttatcattaagtatgataactcagggttttctgtagttatcctttgacttttaaggcatctcctggtgtacacatgtatacaactccatccccttgaatgtgagcaaggcctgtgaataagatcgattttccctttacattgggtctctaacccacacacatgcatygatctttagttatttctactttctctctctgtgctttcacactgatacctctgattccattcccataacgcagggctcacatgaatcttcccttttccatatctgtaacttctttctctaacagtaaa

SEQ ID NO: 901097 - DNA, 602 bp, Homo sapiens
ttactgatttgttcaatcctagcacacacatmgcttcagaatactaacctatgcctttttaggagataaatttactggatacagtatttctgtgtagttctttttgtctttagactcagagtattcaagcccaaaacctgttttgcaaggttacttacgtatgttccttcagtttaattattcacttttaatgaggtaagtttatgttttttttaatttgctgttcttcctagttttatttgtcaatatgatttctcaggacttgagtgttgttataaagccataatcgagggtcaagtgcaaacactggagtgtgttacttttggagatacactggctagtaaagaaatgaactatcaaaccataaacaacatttaaaagcacagcataaataaatgagcctttaaccaaaaatttatctgaaagaaagagcattacattaaaaagttaacagagcagttgttcaatatctgacgtctaaacattggtgcattagagattcccatacatagcattttatctataatgtagttgctaagcatgtacaattgccaaatcattattgccaaaaactgtatcagagatgcttgtttagaaaagct

SEQ ID NO: 901098 - DNA, 673 bp, Homo sapiens
actataaaccttgaaggatgtaggaattaaaagtagaattgttgtattacctaaaatatccatttttaataaaaatataaagaaaccgaatagtatgcctatacatagagggaagaaaaacagcaaatagaaaatgtctttcaggaggcatatattttgaatgtagcaaacaaagtcttttagctattataaatatgttaaaagaattaaagaagcagaacagatctcatttgcaaagagtgtgtttttttatttttattttttattttacttgtctagtggctccctggatgaccagctcaaagggcttgcctttatctcttcttacccagatctctcctaatctcatgccctggggaaagtttgttgaaaatatttaaaatatttataggtaaatatattagtcattgctgcatgtacccataaatagtagttgtaaacaacagacaaacaaagaagattgagaggaaaatctgtgatatcagattctttgaggaatgagttttgaagtatcccaacatatttctggtaatttctaagccatgtaatgcaaagggctgtgtgcatgttcaggaaasgtaggagaagcctgtaacctgttgcttctggctgatcttcagcctctgagctagcagaaaatggaacctaaggaagaactgaaaactccctgacc

SEQ ID NO: 901099 - DNA, 633 bp, Homo sapiens
gttacaagcaaagcctcagcagataagcttaaggaaaagtaactttctacttggcatagatttctagacatggattgctttataaraagtaaatactcatttaattttgctaactattaccaaagtgccaaagtgttctcaacagcaggtatatgatttttcactcccatcaggaattgtagatgtctctttcttcaaattcttaccagaaaatgctgttgagatttagtttttgataatgtaaaggatgaaaaaatggtaacttatgtagttcaaatttctatttctctttgagtgaggaaacacatctttttcttgaaaaattggtctttttctaaattagcaggttttattttttagaacagttaaagacttatagaaaaattgagcagaaagtacagagagattttcctcttgcctcaccacatgcacatagtttctctcttagcatctgggattattgcagtacatttgctacaatagattacaaacactgatatattactactgacttaaggccatagttcacacatatatattccatatttaaaatttttattgtgactagcttgatttaaatcaaatcaatacaaactacattttgaatgttgctgggggcaaaaaaagagataa

SEQ ID NO: 901100 - DNA, 633 bp, Homo sapiens
gttacaagcaaagcctcagcagataagcttaaggaaaagtaactttctacttggcatagatttctagacatggattgctttataagaagtaaatactcatttaattttgctaamtattaccaaagtgccaaagtgttctcaacagcaggtatatgatttttcactcccatcaggaattgtagatgtctctttcttcaaattcttaccagaaaatgctgttgagatttagtttttgataatgtaaaggatgaaaaaatggtaacttatgtagttcaaatttctatttctctttgagtgaggaaacacatctttttcttgaaaaattggtctttttctaaattagcaggttttattttttagaacagttaaagacttatagaaaaattgagcagaaagtacagagagattttcctcttgcctcaccacatgcacatagtttctctcttagcatctgggattattgcagtacatttgctacaatagattacaaacactgatatattactactgacttaaggccatagttcacacatatatattccatatttaaaatttttattgtgactagcttgatttaaatcaaatcaatacaaactacattttgaatgttgctgggggcaaaaaaagagataa

SEQ ID NO: 901101 - DNA, 605 bp, Homo sapiens
ggattttaatcagacagcatatgccacatgcctttttgaaaggtgcccttttgatgctggctatgttattattataaataaatttcccaagaaaggctcagtgaggtgtagctctggtgtgatgcagtgaccaaagcctggaaggcaatcaacccagacatttttcttttaccttcaagacagtaatggaaagcttttggagagaaagggaaagcacatgggatggataggggatccatattctaggatttcctgggttcaccctcatatttactattgtagaacactaccatatttctggacatttaaacaacatgaggacagagtgtttttgctcatgcttatgtcactagtgcctagaacagtgcccggcacgcaggaggtacctaacaaacatttatcgaatgagtgaaagacattggtcctgaaataaatcattctcttcattcgaaacttagctggattttcagaacaaagcataagcgaaacaatatttctagtacctttctcaaatgttaaaaagacggatcttttttttaaaaaaattgtcacttcagtgccataaaatrtctctttggttctcctgggagtgcaaagttcactca

SEQ ID NO: 901102 - DNA, 563 bp, Homo sapiens
gggtgaaagtcaggaggagtgaagcaagactgatattcctttgcagacccagagtaaatgacaaatgacattttccctttgtgatctttgggatttttgttgacttatttggaggcttttgttggatcccaagaaatggcctgtggctgaggcctattctaccgatttccacgctccatctgtggaatccatcagcagggcatttaccctcattcagggttctgacacctgcctggcagggcgcaggagacacaaagaaagctggagtggatgagaaaggggaggttggggtgggtttttttttcagagagagaaggaggggggaggttgaaatggatacacagtaggggttaatccaagtcagttgagagacttcagcacctggaagcttctcttccacattaattcacaagctaagaagtaatcagcgatgttatttttaatttattttaaaattgtatatatgttgagaaaagaaaacagatatgcaggtggaaaaaaaacagagatttaaaataaaattttaacgtgtasctagaactgtacattgtgtaactatcaag

SEQ ID NO: 901103 - DNA, 607 bp, Homo sapiens
actggaggctcagaagggtgggaggataggagggggtgaaggatgagaaattacytaatgggtacaatgtacattatttgattgatggctatactaaaagctcagacttcaccactacacaatatatccatgtaaacaaaactgcatttataccccttaaatctataccaaaaaaaaaaaaccataaacttgcatttaccatatatcccagcaacctcattctaggtatttccccaaaagacgtaaaaacacatttacctcaaagatttgtgcaccaatgttcacagacacaataacacaaattccccacctaacagttttatagatggcatttacttaaggaatgatcaaagaaaataccaggctggatatgcaagacccatctctgtataacttctagaattcaatcccttcccagctatttagccaaaattcctagagaaagtcacaattttctaaattgccaaagaaccaatatctgtaccaacagcagatatccttttagggtcatacatgattttggcatgatgtggaaaaaggaaatttcctcatgtctgatgcccccagtaaaagtaggcagaaaacacacaaattattaaaatccttc

SEQ ID NO: 901104 - DNA, 599 bp, Homo sapiens
tgcttgcatcttgtaagatagcagacacacagccagatttctgcaacagtcaaatggctgaggttgcataatggggtgcaaggagaatttasctggggaatccacactctatcaattatcatcttaccaatcattgccatgggaacttgggggtacctgagaactcatagttctatccaatattatctctcatttcttgctttaaacaacttcttaagttctgtatctttttcaataaatttcaaaatcacttcacaatctcttactatgattactggcattttattaattacatttctgggggaacaatgattcaatctgcaaaccaataaatgagatccctcagtcagtaaaaaggccttatttaagaaatagaatgtaactgtgttgattttaatacagttttcaaggtatttaagaacaatactttcaaactaatgacattattatcaataaaatcctacttttattaaaggagtagagataaagatgaatgaattaatttgacaaactttttctaatcatctaaaatattttacaatatttaacttctcagtctaactttattctcttttttccctcctattttctagcccaac

SEQ ID NO: 901105 - DNA, 650 bp, Homo sapiens
gtgtctaattcagttcttagttgtaaacaagaaaatccaatctggctagtttccctttcaaaacggtaattatgaaagaacattaagtattttgcagaatctctgggaggattggtgaacaacgttctgaagttatatttacagaaacaatgcccacacacatgcagccatctctacctaaaagattgctgtctcagtcacacagcaatcatcacatctgggattgggctccaaaacacctgctaccacccagagaaccttcaccatcatgcttatcagaatacaaattcccacacatggccacctcaaaatgttgctaatctctgaatcatattgatttcacagaaaattggtcacctgcttgcatcccagcaacaaaggcactagaggatgtgcatttgcagaaggtgggactcactggggaaagtatcaaaatgtaaggagaacattccaagatgacggctggtcacaaacaatcaatgtccatccaatatgggactagttcgatttttgtctttatatgaargagtgactgtgtagtctttccagggtttgtagagtaccacagcaatgggaataggaaattaatagccaatctctctttcttaaccaaatgtttactggtttttttcctcctctatatgcccaca

SEQ ID NO: 901106 - DNA, 692 bp, Homo sapiens
tgtaatttgcatctgatagctttgtttctgatagtaattatgtatctagaaaaatgaaagaatgtagtttctgataaactagtgttggattcaagaaaagaaagmattttctttattaataaatggtatgaaaaggaaaatatttgactattgaactgcctatgcaaaaaaaaaaaaagtatcgacaaacagattaattgaaaaagttgctccaaccacattagggaactggtttggaagaagaaacaaagacatgattgacattttagctttttagctaattgctttggcaatgtattcaaacaaatgtggtttcatggctttattttttctctggcactcttgaggaattcaccaccatctaacccaagtggaaaacaacgtaaaacaaaccaagaaataataataaatcttttcatattaatataataaatacacaagtatacttgatgtcagaattgtttataggatgatttcctccaacgtttgctgaacaactggaaatttcagccaaacagacaaattgcaaaactcaaagcttagtggaaatgtggctagacagaaacaagatcagatgacaacacagattaagtacaaagcaaagatctgctatgtttactgagtgtgttagaggaaaaataaatagctgtttatttggaacaaagatgcaagaagacttaggccaaaaaatg

SEQ ID NO: 901107 - DNA, 687 bp, Homo sapiens
aggtctcagaaaacttacaatcatggcagaaggcacctcttcacagggtggcaggagagaaaatgagtgtcgagtgaagggggaagccctttataaaaccatcagatcttgtgagagaactcactcactatcaggagaacaacataggggagaccacctccatgattcaattatctccacctggccctgtccttgacatgggaattattacaattcaaggtgatatttcagtggggacacagagccaaatcatatcattctgcccctggtccttcccaaatctcatgttctcacatttcataacacaatcatgcctttcccacagtaccccagtgtcttagctcatttcaggattaacctaaaagtcctagtccaaaatctcatctgagataaggcaagtcccatccacttatgagcctgtaaaatcaagagcaagttagttacttggaagatacaatgggggtacaggcattgggtaaatacacccattcgaaatgggccaaaacaaagaggctacaggccccaagcaagtccaaaatccaataaggcagtccttaaacyttaaagttccaaaatgatctcctttgactccatgtctcacatccaggtcatactaatgcaagaggtgggctcccacagccttggtcagctccacccctgtggctgtacagggttcaatccccttcc

SEQ ID NO: 901108 - DNA, 594 bp, Homo sapiens
ctgcgaagagataatttgacttcctctctttgtgtttggatgatgggcayttttttgcactaaaaaaattaattctgccaccaagtggtgttcttgattaccatagtctactgatacaattagtgtaaatactggaccactaagtgtgacctcctgtgaattaaaaactaatgcatcttcataaagtctctgttttgacttgagaatgcttctattattttgcattcattttatatgttaatattattctgagttcttctattaagcatatttttgctactctatacaaataaaatttaaaataccttttgtgaacaacaatacacaattcaagaataaaatatcttatgacacaaggaaaaatgaggaaatgaaagtctatactattcatttttatttgtgttacattgaaaaaaaaacaactaaaggtaattaactgaattgtcttcagagaaacttttgtgatggcatattgacccaatattcattttcctattgtaaaccaatgaaatgtattgttagagtttctgcagatgcataaactatttttattcttcatatattaaacagagcttgaaaataagtagtgaattt

SEQ ID NO: 901109 - DNA, 548 bp, Homo sapiens
tttcccatcctccctgtcttggtatgagggataactttaagcaaatgttagaasagacagtttgttattgatcaaaggtgtatctctgacatctttcacttccctgtatgccattgcttactggtgtccctctcctctggggtccctgaccctcaagctgccctaagcttcccatataggaatctgcccaggtctgttcaactctcactgtgctccatgatccaaacccctttggatatcttgccatcactccaaataataagccctttggagacaagggagccaagctaggtgttcagagtaaagtaacgaaaaagaattagttcatggtaaaatgttaatgcttccaacattctcaaaagccttgtggcattgtttagaagataaaattgaatagccctcacgaatctctgtttgttcaactaaatgaaattccttgaagtaaaataaagaaattcaggtcataagcttgtattcttagggagagtagctaccagtatgcagagtaacctttctgggagtctaaacaaggaactgatggtagaata

SEQ ID NO: 901110 - DNA, 614 bp, Homo sapiens
aaatatgacacttcatgaaacaattgccatgctttttttctattctgtctgctttgcatttacgtttaggttctgagacttcaaaaatatcacttccatcttcctccttttaaactagctctgataattttttcctgccttaactgttaaaaatcccattttcagggtcaatgaagggctcagtaatatgttttggctacatcattcacagaaatgtctgccaagcagctcaacttttcaataacccagactcactcaaatttaatttcaggggagcataaatgactggagaaaatgttctctctacactgaagttttccattgtcttctaaggccatgcattcaaggtgatgcttgaatctagaatgttccctctcttttggttggagatctcagaagaaaacaccaaaaaaaaaaaaaaaaaaaaaaagtttctcaatgtaatcaataagagcatctttttttaccatgacacaggatctctgtcaccaacatgggaatattcaaacctcagcaagaacaaaaggtttcccaagttcatatttctctattattgttcctggtagcaataaaaaccmcttggatatttgactacatttgttttcttcccgaaa

SEQ ID NO: 901111 - DNA, 578 bp, Homo sapiens
actggaaaatcaaacaccaagagggtccagctgaccttctagtaaatatgctaccygccaaaatgaagctcaatctttaacagaagacagtaaaatccagactctcaaccttgtagcattagccatagccagtataaaattaaaagtaaaaaaatgcttagatatgcaaaggagcaagaaaatgtgaactgtagccaaaaagagagagagatctagagatgaaacatatgttggactttacagacaagactatgtttaagaatttaaagaaaaagaaacatacagtggatgaacaaagaatcttagcgcataatgagtagtgatagtctgatatggatgttctatgcactgatgattgcataacctgcgatgaagtctgcagatatctgagatatacagacatgtttcattgtaggatcaaggcacattagaaatatcgtaaggtttggtattcaaattttagcttcacaattcactagtcatggaatttggggcaagttacagtggtagattaattttcttctgaactgtacagcatcacacttcccaagctatttcttctggctttactttttgtc

SEQ ID NO: 901112 - DNA, 563 bp, Homo sapiens
aaaatgctcaacctaaagatgaccaattcttctttacctcataaaatttcaccttattcatgcataactacatttagcacatctgccttagccaaccaaaattccaatctatgtccccacaaccagagagattatcatgctatatatgggtccatctccctgtgctgtggtgtagaaaagtcctctaggccaataactggggtgattgtaaggttggcctcaattgtatataatatattatatatgttagtattatatatattatatataaaaaatataatataccagaacctgggcatagattagttcattagttaatattattattgctgtcattatttaaaaaatagattatctgagaagtaataaggtcacagacgaagtttatatatattggcagttgggggagagaggaggtaagtgggtagaagtttccaaaatacaagatgtgataagcataaaagaaagacagagaggatggttgatagaagggacaggaagtaggaagcctaaataagatgtatagaagataagaagtargcactagaagatctgaggaccat

SEQ ID NO: 901113 - DNA, 627 bp, Homo sapiens
gatttttgacaaatgtgcaaaggcaattcaatggagaaaagatagtcatttcaacaaacggttctagaataatgaacctcaacccatacctcacgccttatacaaaaattaactcaacactcctagatatatacccaagataattaaaagcatatgtgtactcaaaaacatgtacatgaatattcatagattattcataatagccaaaaagtggaaacaacccaaatgtccatcaaatgataaatggataagtaaaattgatatatccataaaatgaaatacttttcagccataaaaagtcatgaagtactgatacatgctacataatggatgaaccttgaaaatattatgctaagtgaaagaatctacagagacaaaaagtagattaatagttgcttagggctgaggggaggagaaactaggaattccagcaaataagcatgggaataaaatgccctagaattagatagtggtgattgttgcacaactttgtgaatatactaaagatcactgaattatgtaatttaaaggagtgaatattatgrtatgtgaattatatctcaataaaacaaatatatatacagatataattaattctagatggatcataggctggatgcagtggct

SEQ ID NO: 901114 - DNA, 588 bp, Homo sapiens
tgtagatcaagacagagtgggacttttggccaggctttttctgggtccctccaatcaaaatcctctagacaaaagagatccatatactagtccagtcacactctttgttattcttacctgggactttgagccaaacccttatattaagccatacataaattccccctcagccttgctttgtcctttgaaaaaggtagatggttaagaacaggatctgatttccaggaccttttctgtataaatatctattggcagtctaattctgtgcaatacccagcacgtaatagaacaactatgaaagagatggcttctgtgtcttacaatcattttctgtattctgcctcatgtttttttaaaagcaaatagaaaatgctataaaatacttatttacataatttagcaaacagcaaacatgacagtgttctttttccatatctatatagttttatcttcaagaataytatgccattttcagttacaaattactttgtatatattatactgcctttccttggtatgtttaaaattcatataatttcagttgttgcttattttttttttgtcattgagttggattcattttgtgtt

SEQ ID NO: 901115 - DNA, 559 bp, Homo sapiens
atgggattttcttttatatcacattgtcaggttgcaaattttctgaacttttatactctacttcccttataaaactcaatgcctttaacagcatccaagtcacctcttgaatgctttgctgcttagaaatttcttctgccagataacctaaattatccttctcaagttcaaagttccagaaatctctaggacaggggaaaaatgctgccagtctttttgctaaaacaagagtcacctttgctccagttcccaacaagtttctcatttcaatctgagaccacctggatattattgtccatatcgctatcagcattttgggcaaagcccttcaacaagtctctaagaaattcttagctttcccacattttctgtcttcttctgagccctccaaactgttccaacccctacctgttacccaattccaaagctgcttccatgttttttagtatcttcagcagcaccccacacctggtaccaacttactgtattagtccattttcacaytgctaacaaagatacctgagactgggtaatttataaggcaaaagagatttaatgg

SEQ ID NO: 901116 - DNA, 563 bp, Homo sapiens
aaaccacaaaaaagcaggagaaaatggtgtggrctcttttttctaaagaagtaatcattggacttataaaaataacacttgatatttatctgtctgtatacacacacatacactcataaacacgtatcttcataaaatgggttaagcaagtattaattgaggttgtttcttagtgttttttgtaatttgcttcactttattttctataatgagtatatattgctttttcaataagagaaactaaaatcattgtgggaaaaaggacttttttggaataaaaatacaattgaaccaacacacagagtatgtgttgaacatgtaactatcataatatctcatgtatatatcatcaaacctagttaaataaggtgttttgtgtaaataaatcttctggagagactgttccttcagcatgagattctattttctttcagccatttcagttgatgctttgtaatgtatactaggcatttccccaccttgtttttgcagcctgttccttagtgttggactatatggccctataccgaatactcccaggttgccaaataatgtagtagatc

SEQ ID NO: 901117 - DNA, 607 bp, Homo sapiens
accctgcttttggcttactttcccctctgccattacctttactaactgaccacttacagcactgcagttctattccaattacgatgttagtcattatgggaagcacaaacatgaacaaactcagacatattccccactgaggaacagaattaagtaatatgcccaaacagacttggttgggtctatcaaggaccagtaatgttcatttggataacctcactgcaccatacctcctaacctccatagtggctcaacccacagcaatttttcttgcctttccttacaccccagactccctcaaagaagtgaggccttgcttgtcccaaactccccagctcatttggctagtgttctcaagtaaatacttgttagccctcttcctgatccccacatctgtcattagtggcaaaagtgatgctatgaaaggctagaccttctagaatcacaacacagctcttccagactctggtgtcctgcccactgcctaaactcttttgatactattttacaagcactagactggaccactcaataccaacatttgyatgagtgacatctgtgcctactaaatcacattaggataccctggaagtccttgccagggcta

SEQ ID NO: 901118 - DNA, 616 bp, Homo sapiens
cggccactggggctgaagattcactttcaagattttttttcactgacatttctggtgccttggtgtttcttggcttcccttcctctctacatatttcattatctcattatccagggctcctccatgtggcttctcatgacatggcagtctcagggtagctagtttcccccagagtaaataatcttagagtgagtatttcaagaagcccaggtaaaagctacaaagccagtggggcacggtggctcatgcctgtaatcccagcactttgggaggctgaggtgggcagatcacgaggtcaggagttcaagaccagcctggccaacatactgaaaccccatctctactaaaaatacaaaaattagccgggtgtggtggcacctgcctgtagtcccagctactctggaagctgaggcaggagaatcgtttgaaccccggaggcagaggttgcagtgagccaagaccacgccattgcactccagtctgggtgacagagtgacaytcgatctcaaaaaaaaaaaaaaaaaaaaaaaaaaagctaggaagccttttgtaacctagctttggaagttccagaacatactcctgcattcttatgatcaagcaagtcactgcagcc

SEQ ID NO: 901119 - DNA, 574 bp, Homo sapiens
gcactaggacctccctaggagttgcagtccytgtggcctagacttcaagtttatttagaaccccagagccatttagcctgtcgtggcgaggcttgccaaaacctaagttttgaccactgggatggacgattctcttctggctagggctagcctaaatggtccctctgtaggtgtctgcagagttctgcctggtgttgctttctgctgtgactgggcagaactgagttctattgcaaagtcccacagtcactgtgctctccctcccacaagtacaaagattctctatgccgtgcggctgctactgggagatgggggagtggtgttgttggtaatacaggattatttttcctaccatcttcagtgtctctttcagtgatgtcaagttaaaaccaggtgctgtgattgctcaactggtttttgattcttatgatggtgctgcacatcttatgatgtgtagatagttgttaaatttggtgttcttgcgagggggacaatcggtagaggcttctatttggccatcttgctctgactctgcatgaattttctaattcatttcttaccagtcagtaatccc

SEQ ID NO: 901120 - DNA, 449 bp, Homo sapiens
actgccccaggtaatttatagattcaatgccattcccatcaagctaccaatgactttcttcatagaatcggaaaaaactactttaaacttcatatggaaccaaaaaagaccctgcatttccaagacaatgccaagcaaaaagaacaaagcaagaggcatcccgctacctgacttcaaactatactataaggctacagtaaccaaaacagcatgatactggtacaaaaactgagatgtagaccaatggaacagaacagagccctcacaaacactaccacacatctacaaccatctgatctttgacaaacctgacaaaaacaagaaatggggaaaggattccctrtttaataaatggtgctgggaaaactggctagccatacgtagaaagctgaaactggatcccttccttgcaccttatacaaaaattaattcaagatggattaaagact

SEQ ID NO: 901121 - DNA, 543 bp, Homo sapiens
tttccatttcaattctgttatttcagccatattytgattttttctttttaaactttaatcaacctttataagctttttatcccaaacacaaaatccagtagcgccagttcagcccaaaaaaaaaaaaaaaaaaaaaaaaaaaaaaatcagagtaatttgcacagccaaggggcatagaaaagtatttttctcatttaattataccttcttcttgtcgaaatataatttatcaagcaattgtttaaaattaaattttaaaaagtagaaagtgttgggaaaagtatgacaatgaattgaaataaatctagtaaacaattttctctaggataaaatagaggaattgattagacaattcacacattttcctttatagtttagacagtaaagcaatcattagatgtgatcatgttatatttgttccctttgttggaccacgagtactgacaaacagagagcatctgagcaaaaccttgatgtacttggggtttaaaaatatgtggttagcttattttccctttcagtgtttcactcttggcgctttct

SEQ ID NO: 901122 - DNA, 626 bp, Homo sapiens
tcttttagaaatggaacaaagtctaaaaatcatttagcctctatccacacgttatagatgaggaaactggtttacagatatgttaagggttttgattcaagtaattcaagtaattagtgacatcatgtgattaacttcatgacccaaactctgagcctgggtcttttccaacttcatcatattttgctgtactcattgtgaaacaggagagttccctgacccccacttgcagaacatgcaacaggggtgtggctctctgttcagccaccacaagctcaaaccccttacgggacgggaagcacgcagatgggcaggtgcaggaaatgaggggagctcttttgggctctggccccacagcagcatctaagggtaggagtctgagactcccaaagcccaagtgggtgtgtgttacagtgcactcttttagccttgccatccatggatggcttaagggttaaccagctcagtggaccctctgcctttttgcaagggcaggggacgattgtgccagctttctgtatcccaagatcttgtccagcatcccagaagactcaggtcacacacggacttgaaggatgaatatrggggttttattgagtggtggaggtggctctcagcaggctgga

SEQ ID NO: 901123 - DNA, 564 bp, Homo sapiens
ttaaatttcatatggaactaaaaaaagagcccgtatagccaagacaatcctaagcaaattgaagaaagctggaggcatcatgctacctgacttcaaactatactrcaagtctacagtaaccaaaacatcatagtgtggtaccaaaacagatatatagacccaaggaacacaacagaggcctcagaaataaggccacacatctacaaccatctgatctccagcaaacctggcaaaaacaagaaatggggaaatgattccctatttaataaatggtgttgggaaaactggctagccatatgcagaaaactgaaactggaccccttccttacaccttatacaaaaattaactcaagatggattaaaaacttaaatgtaagacctaaaaccataaacaccctagaaaaaaacctaggcaataccattcaggacataagcatgggcaaagacttcatgactaaaacaccaaaagcaatggcaacaaaagccaaaattgacaaaggggatctaattaaactgaagagcatctgcacagcaaaagaaactatcatcaaagtgaacaggcaa

SEQ ID NO: 901124 - DNA, 571 bp, Homo sapiens
tcatacccatcaagtcttgtgcttcaaatctccccatactcaaaaaatgttatattgtctaggtaaaccatatgtgtgcargttaattacttagaagagaagctgccagatctctttgagttgttatctacatgtctattaaagatatgtcttatagatgttatctatatatctattaaattatgtttgttaccttcctattattttaaggatacttagaataggaaggtaacaaatacaatttaatccagtgaccagctctaattttcttgtatggaacaagtagaattaggtaaagcaatgtaagcattgtgtttcctgtgataatgattatgaaaagaccaagaggccatcaacctctatctactgtgtagcatttacactaattttcacattgacttccccaccaaatacagtaggcatctttaggtatattttgtgtatggaaatccaggctttgaaaggttgggtatcggccaggcatggtggctcacgcctctaatcccatcactttgggaggctgaggtgggaggatcacgaggtcaggagttggagaccagcctgaccaaca

SEQ ID NO: 901125 - DNA, 618 bp, Homo sapiens
tgtgagctccttaccatggtttgtccagtacctaggacagtgcctgtcaggtgctcagtaattgtttattgattaatgaatgaatgaatgaacgaatgaatgaatcctttctattattgcaacctgttgttttcatcatttaacctttctctgtgtatgctttatctcccaaactacagactaagtttttttaaagttacctctctgatcagcatttcaggattactatgaagatcaaattaaattacatgtggcagtgtctagcttggagtttggtgtatattgatgtcaattgcatattcctaattcatactttcttctctccgtttcataaatatttgttttccaggtatcacagaaagaattgaaaggcaaggttgtcagacagatatggcagctaagacaccaactgaggaatgttatcaatgtagctccgtgaaattgccatattttacatcctgcagttctgcagtcaagtggtggtatttttgtcacagcccacatcaaagcccagatggcatgagggagggatggaaatggggctccataacccycaggaactctgaagatttcatctcctaagtggtattgtccatctgtttctgcaacttccttagc

SEQ ID NO: 901126 - DNA, 548 bp, Homo sapiens
gaagaaatgattgtatcaacccagaagcatctgctgtcacaccttacctgccagattaagtctcttgggtaatactgttggcccaaatcagacccaacttctttakacattgtgattcccaacccttcacagtatcgtggctcactgtgaagcccgcatgagttatggcagactctgagttttgacaattcaggaactcagcttggaaaaatctgtccatctgccaactcagggaaaaaaaaaactatgaacaaaaatgtcagtttattaatttgtaaaattttgtctttttcattgtcatttctctttgttccagggcattccatctcaaaattaaaactcaaaggaagtcagatagatcagtcatcagcagcctacttgacaagcccagaatgagagcaaagaaaattgaattgtcttagctgatatttcattcagaccctgaaagaaacattcttgctccttccagtgaacagaaccctcctccttacaagtaaatctgaagatctaggttcaaggccaggctctgccatttattatccctgtag

SEQ ID NO: 901127 - DNA, 579 bp, Homo sapiens
gctgttttctgagttgtttacttttttwaaaaattgaattatacaagttattgatatattgtggttttgattttcatcctgtatatgagttgctgataatttttccaattttgtgacttttctccttgatgtgatcttttataaacagattttcttaattttaattcactcaaatctgttgatattttactttgtggtttatacttttcatcttatttataatctgctttcctatccatgggtaattaagctatttgtgtatattttcttctgaaagttttatgttttgccatttgcttttggaactttaatcctggagttgatatttgtttgtggtaggagtccagttttatatttttccctatggataattgccccagcactatttactgaaaagtcagcttttttttcttaactgatttacagggttaactaactatgccagacatcaaacatccatatgtgtttgggacatgttgtttgctataggtttatctttaattatttttattagttagaaaagttcccttctatttcaagtttgttaagatttgttttttttaaacaagcaccgcatgt

SEQ ID NO: 901128 - DNA, 599 bp, Homo sapiens
gaaaatctagaagaaatggataaattcctggacacatacaccctcccaagactaaaccaggaagtagttgaatccctgaatggaccaataacatgttctgaaattgaggcagtaattaatagcctaccaaccaaaaaaaaagtccaggaccagatggattcacagccaaattctaccagaggtaaaagaggagctagtaccattccttctgaaattattccaatcaacagaaaaagaggcactcctccaaaacacattttatgaggccagtatcatcctgatacgaaacctggcagagacacaacaaaaaaaagaaaatttcaggtcaatatccctgatgaacattgatgcgaaaatcctcaataaaatactggcaaaccaaatccagcagcacatcaaatagcttattgaccatgatcaagtcggcttcatccctgggatgcaaggctggttcaacatatgcaaatcaataaatgtaatccatcacataaacagaaccaatgacaaaaaccacatgattatctcaatagakgcagaaaaggccttcgataaaattgaacaccacttcatgctaaaacctctcaataaactaggtgttg

SEQ ID NO: 901129 - DNA, 609 bp, Homo sapiens
taaaacccttttttcctcctaggcctctgggcctgtgatgggaggggatgctgtgaaggcctctgacatgccctggagacattttccccattatcttggtgattaacatttggctccttgttacttatgcaaatttctgcagctgcaacaggcttgaatttctccatagaaaatgggtttttcttttctgttgcattgtcaggctgcagattttccaaacttttattctctacttcctcttgaacgctttgctgcttagaaatttcttccaccacatacactaaatcatctctctcaagttcaaagttccacagatctccagggcaggggcaaaatgccatcagtctctttgctaaagcatagcaagaatcacctttgctccagttcccaagaagttcctcatctccaactgagaccacttcagcctgcacttcattgttcacatcactatcagcatttgggtcaaaaccattcaacaagtstctctaggaagtttcaaactttcccacgttttcctttcttcttccaagccctccaaactgttccaacctctgcctgttacccagttccaaagtgacttccacattttcagctatctttacagaagtg

SEQ ID NO: 901130 - DNA, 590 bp, Homo sapiens
aacccatgcaacgctggtcacatttattagatgaatctttatgtctagaagctttaaagggttgagcttctggggaccttgcctaatgtctgatctaatatccacataacaaatgaggacagagaaaatcaatgacttatgcatgtccattccgttttctggtagtggagtcagttccaggttttgttctcttttgatgtcatttttctgccttatttcaaacatgagaattataggaaagggaatttttatagtgatcagtaaagggcattgcagtcatgaggaaaatcagtggttttcaaaatatgagtttaattacagtcatgtgtcacttaacaacagggatatgttctaagaaatgtatccttaggtgatttcattctcgtgtgaacatcatagggtgcacttatacaagtgtagatgtgtagcctactgtgcccctaggctgtaaggtatagccgattgctcctaggctgcaaatctatacagcatgttactgyactgaatactgtaggttattgtaacacaatgataggtatttgtgtatctgaacatgtctaattattgaaaagatatagtaaaaatatggt

SEQ ID NO: 901131 - DNA, 632 bp, Homo sapiens
catttgcatggtaaatattcctccatccctttattttgagcctatgtgtatcgttgcacatgagatgggtctcctgaatacagcacaccaatggatcttgactcttcatcgaatttgmcagtctttgcctcttaattggggcatttagcacggttacatttaaggttaatattgttatgtatgaatttgattctgtcattatgatgttagctggttattttgcccattagatgatgcagtttcttcatactgtcaatggtctttacatttcggtatgtttttgcagtggctggtagtagtttttcctttccatatttagtgctttcttcaggagctcttgtaaggcaggcctggtggtgacaaaatccctcagggcaatcaggcaaggaaagcatcctgaactgtgttttccagcttggttccattcgccctgtcactttcaggtacaccagtgaaacataggtttggtcttttcacatagtcccatatttcttggaggctttgttcattccttttcattcttttttctctgatcttgccttcatgctttatttcattgagttgatctttaacctctgatatcctttcttccacttgatcaatttggctattgatacttgtgtatgctttgc

SEQ ID NO: 901132 - DNA, 599 bp, Homo sapiens
attgccatttgcatgctaacaactacaatattcaaaacaacctatatcatttttcatcacattaagctcttgtgtcctaaacaattgatatgctgcacagttacctatctctgtgccagttcagctgtgtagggaagctaatttgcagggacaaggggaaccactgaaatacattccattcccacattctctttaaattaaccttttatgaaatgttattttctggccatgacgattcttatagttccctttagtctcagatctcctatagcgttcagttttagccattgagcttttgtgttttgctttaaatctgcttgttttctttacccagtcatattgtaaattcatggtaagcagagattatattctctaccattatatccctaagagcgtccttcactgggcaagggtaggtactcattaaatactcattgaaagtttttaatcaaattggtgggattttccccatattttgaattcagctcaaacatcatttaatacatatccwtttttagtttaaaaaaatcacaaactaagactttttaatctggttactggcctttaatttaatgttaactgccactattaggttgcat

SEQ ID NO: 901133 - DNA, 631 bp, Homo sapiens
accttgagttcttatccatttctaactcctcccatctaccaaacctaactaaatatttgtcaatgacaaattgactttggtcaattcacaacagctctctaaatgcagaaactttagattaatggctaagaaagattgcaaagaatacttggtaacaaaacacttatgctttagtgtatcagaggttaggaatgcacagtgtgatatgtgctcttgcataatcatttgcgcaagtctccagaggatattaattattaaccaacagaatcatttgaacactctgtgccacttttaccttcaggcatttcaaagggttgcctccttcctgaacctgacaatagactcattggttattgtttagaattgtttagaatggtaaatgcttgtctctaagttataaaaaactgaactgtctgtttctcacttagtcattcctcacctaaaggctctcagaatgctgccagttctttagaattccagaaaaaaatagttcagagaggttgcctttgatatttwttatgatcattttgcctccacgtgtaaaacaaacccctaaaagacagttaaaacactgaactatttttgtaacactcagtgttttgactaattttatagataccttttattatgc

SEQ ID NO: 901134 - DNA, 629 bp, Homo sapiens
tgagtggatgaaggaaagagttgtcagaaattaactcagacaagtttggggaaatcaggtactgkagaaacctttaatttaaataagatggtaagtaattggaggatctgaagcaatggaggggcatgatctgacttacatttcagcagggtgactgactgctccatcacgaaggtggtaagggtagaagcaggggaaaaaatgagcagaatataacataagcctgggtgcaagagattaatggggagtagacttgagagattctagaggtggcagtgagaatttgtttctgaatatattttaaagttagagccaataaaatttgctgatgtgttaaatacataaggcaaaagagaagtagaggagttaaggagagtccccaagggttttatactgagcatctggaagagttgctactaaccaagacagcaagagaagcaggtttggaagaaggagcagaaatttgtttttggacatgttacatttgagatgcgtattagacatccatgcagaaattttaagtagatagttgtgtttatatgtataggatcccagaatagataagtttggaagtcatgaggatatatacatacatagtaagaaatgccatgatagtacacatagaggag

SEQ ID NO: 901135 - DNA, 606 bp, Homo sapiens
cacacctaacaaaatagctaaaatttaggaggctgacagttccaagtrtttgtgacaatgacaaggaagtggaaatcttacactttgctgacaagagtgtaaaaaggtttaaattcattggaaaactgtttagcagtatctgctaattgggacactcaatacgctttgattaagcaatttcattgctttctatttacttaatagaaatgtgtacatatatatattctccaaaagaaaaatagaagaaggctcctaacagcattatttttaatgaagcaaaaactgaaaacaaccgaagtggccatcagtaataaaatgaataaataaactgtggtatagtcatagcatacaatactacacagcaagaagaaacactattatttcatgcaacaatatgaaactcacaacccagatgttcttcagtaataaaatgaataaataaactgtggtatggtcatatcatacaatactacacaagaagtagaagcactaactactactgcatgcaacaatatgaaactcactatcataatgttgagcaaaagaagccaagcacaatagaatgcatacacattataccacattattccatttttcaaataccag

SEQ ID NO: 901136 - DNA, 567 bp, Homo sapiens
  misc_feature 400: n = A,T,C or G
aaaatgataatagatgttgatggggttttagagggaaaaaaccacttatacactgttaataggaatgtaaattagttcagccactgtggagagcagcttggagattttccaaatmactgagagttaaactgtgattcaacccagcaatttcaccgctgggtatatacccaaaagagaataaactattctaccaaaatagcacatgcacttgttggttcatcactacactattcataagaggaaggacctgaatcaacctacgtgcctattcatggtaattttttatttttttgagatgacgtctcactctgttgcccaggctggagtgcagtggcacgatctcaactcactacaatctccacttcccaggttcaagcaatcctccttcttcagccacccnagtagttgggactataggcgcatgccaccaagcctggctaacttttgtatttccagtacagacggggtttcattacgttgtccaggatggtctcgatctcctgacctcatgatccacccgccttggcctcccacagcactgggattacaggcatcagccaccatgtc

SEQ ID NO: 901137 - DNA, 638 bp, Homo sapiens
acaacaatcagagaacactataaacatatgtatgcacataaaccagaaaatctagaagaaatagacaatttccttgcaaaataaaccctccacaagactgaaccctgaatagatcaataatgtgttctgaaactgaggcagtaaaaactagcctaccaagcaagctgaatttgagcagaggtacaaagaggagatggtaccttttctcctaaaaccatccaaaaaaaattgaagacaaagaagttctctctaactcattctatcaggccagcatcatccagataccaaaacctaacatagatactacaacaacaacaacaacaacaacacatcatgccaatgtctttggtaaacactgtgcaaaaatcctcaataaaatactggcaaaacaaatccagcagcacattaaaaagttcatccgcaacaatggagttggctttgtccccaggatgcaaggttgattcaacatatgcaaatcaataaatgtgactcatcacataaagagaactaaatacaaaaaccacatgattatctcaataaatgcagaaaaagcatccaataaaattcagcattctttcaggtttaaaattctcaataaactaggaagtgaagaarcatacctgaaaataataagagcc

SEQ ID NO: 901138 - DNA, 654 bp, Homo sapiens
aatcctcaataaaatactggcaaaacaaatccagcagcacattaaaaagttcatccgcaacaatggagttggctttgtccccaggatgcaaggttgattcaacatatgcaaatcaataaatgtgactcatcacataaagagaactaaatacaaaaaccacatgattatctcaataaatgcagaaaaagcatccaataaaattcagcattctttcaggtttaaaattctcaataaactaggaagtgaagaaacatacctgaaaataataagagccatatacaacaaacccacagccaatatcatactgaatgtgcaaaagctagaaacgttccacctgaaaactggcacaagaaaagaatgccctctttcaccactaccattcaatatagtatcagaagccttggccaggaaaatcaggccagaggaagaaataaagagtattctaatagaaagagaggaagtcaaattatctttgtttgcagatgacctgatcctacatctagaaaacctcattgtctcaggcccaaagcttcttaaggtgataagcaacagtagcaaaatctcaggatataaaatcaatgtgcaaaagtagctagcattcccatrcacaaacaacaggcaagcagggagacaaatcatgaatgaactttcatt

SEQ ID NO: 901139 - DNA, 620 bp, Homo sapiens
atctcactggggagtgtcaggcagtgggtgcaggacagtgggtgcagcacactgaatgtgagccaaagcagggcgaggcatcacctcacccgggaagtgcaaggggtcaggcaatyccctttcctagtcaaagaaaggggtgagagatggcacctggaaaatcgggtcactcccaccctaatactgcacttttccaacggtcttagcaaatggcacaccaggagattatatccagtgcctggcgtggagggtccaaggcccacgggaaccttgctcattgctagcacagcagtctgatatcaaactgcaaggtggcagcgaggctgggggaagggtgcctacgattgctgaggcttgagtaggtaaacaaagcggccctgaagctcgaacaggggtggagcccaccacagttcaaggaggcctgcctgcctctgtagactccacctctgagggcagggcatagacaaacaaaaggcagcagaaaactctgcagacttaaatgtccctgtctgacagctttgaagagagtagtggttctcccagcacatggctggagatctgacaatggacaggctgcctcctcaagtgggtccctgacccccgagtagcctaactgggag

SEQ ID NO: 901140 - DNA, 536 bp, Homo sapiens
aatggataactagaataaccaatgcagggaagtccttaaaggacctgatggagctgaaaaccatggcacgagaaatacatgacraatgcaaaagcctcagtagccaatttgctcaactggaagaaagggtatcagtgatggaagatcaaatgaatgaaatgaagtgagaagagaagtttagagaaaaaagaaaaagaacaaagcctccaagaaatatgggactatgtgaaaagaccaaatctacttctgattggtgtacctgaaagtgacagggagaatggaaccaagttggaaaacatactgcaggatattatccaggagaacttccccaatctaccaaggcaggccaatattcaaattcatgaaatacagagaacaccacaaagatactcctccagaggagcaactccaagacacttaattgtcagattcaccaaagttgaaatgaaggaaaaaatgttaagggcagccacagagaaaggtcaggttacccacaaagggaagcccattagactaacagcagatctcttggcaga

SEQ ID NO: 901141 - DNA, 587 bp, Homo sapiens
cagagagcatacacatcacttgagaggaatgatttttacagcttccagggcatcagagtaattccagttgctyactgtgtaacccagggccacagctgggcaggatctgccccactcagtgactcccagcctaggagagacctgggagctgaaatctaggctgatcctcagatcgccaagtcctggaggggagctgattaaggaagggaggcctttttctaattgttaaagggtactgataacttccctaaggcacacacccacagggcaaaggctcctgagagagcacttttttttttctttctttctttttttgagacagggtcttgctctgtcacccaggctggagtgcagtggcgtgaacgtggctcactgcagcctccacctcttgagctcaaatgattctcctgcctcacctccccctgtagctgggaccacaggtgtgcgtcaccatgcccagctattttttgtgtttatttgtagagacgggatttcagccatgttgcccaggctggtcttgaacatttgaagaggaaggatgaccaaaattagtttgtagagctaataggctttagttttatattatt

SEQ ID NO: 901142 - DNA, 625 bp, Homo sapiens
ctcagtatatatttatttttattttwattttttttattttactttaagttccgggatacatgtgcagaatgtgcagatttataacgtaggtatacatgtgccatggtggtttgctgcacctgtcaactcatcatctaggttttaagctccacatgcattagatatttgtcctaatgctctccctccccttgcctggcaccccctgagaggccccagtgtgggttgttcccctccctgtgtccatgtgttctcattgttcaacttccatatatgagggagaacaagcagtgtttggttttctgttccagtgttagtttgctgagaatgatggcttccagctttatccatgtccctgcaaagacgtgaactcattcttttttatggctgcatagtattccatggtatatatgtgccacattttatttaaccagtttatcattgatggacatttgggttagttacaaatctttgctattgcaaatagtgctgcagtaaacatatgtgtgcatgtgtctttatattagaatgatttgtaatcctctgggtatatacccagtaatgggattgctgggtcaaatgatatttctggttctagatgcttgaggaatgccacactgtcttccac

SEQ ID NO: 901143 - DNA, 625 bp, Homo sapiens
ctcagtatatatttatttttatttttattttttttattttactttaagttccgggatacatgtgcagaatgtgcagatttataacgyaggtatacatgtgccatggtggtttgctgcacctgtcaactcatcatctaggttttaagctccacatgcattagatatttgtcctaatgctctccctccccttgcctggcaccccctgagaggccccagtgtgggttgttcccctccctgtgtccatgtgttctcattgttcaacttccatatatgagggagaacaagcagtgtttggttttctgttccagtgttagtttgctgagaatgatggcttccagctttatccatgtccctgcaaagacgtgaactcattcttttttatggctgcatagtattccatggtatatatgtgccacattttatttaaccagtttatcattgatggacatttgggttagttacaaatctttgctattgcaaatagtgctgcagtaaacatatgtgtgcatgtgtctttatattagaatgatttgtaatcctctgggtatatacccagtaatgggattgctgggtcaaatgatatttctggttctagatgcttgaggaatgccacactgtcttccac

SEQ ID NO: 901144 - DNA, 627 bp, Homo sapiens
taacacctcacacctgtctgaatgagtaytatcaaaaagatgaatgataagtgttgatgagaatgaggagaaaaggaatcccttgtacactgctggtgaaaacataaattagtacaggcactttggagaatagcatgaaggctcctcaaaaaaactagaattaccatattcagcaattttcagctagtttacagcaatttcacgtctgttatatccaaaggaattgaaatcaggatgtcagagagatatttgaactcccatgttcatttcagcattattcacagtaggcaagatactaagtgtccatcaacaaatatatggatttaaaaatgtggggggtgtgtgtgtgtgtgtgtgtgtatatatatatacactatatatatatagtatgtatgtatagtgtatatatatatacactatatatagtatgtatgtatagtgtatatatataaaatatgttatatatattatatataatatatacacacacgtacacacacaaaataggatactatacagccttaaaaaaaagaagaaaattctgtcatttgcaacatcagtggatactgcatgattatatgtggaatctaaataagtcaatctcatagaaacagagaataggaaggt

SEQ ID NO: 901145 - DNA, 501 bp, Homo sapiens
ttgctgagacgggaagcacaaggggaaaggtgaagggtgaggattaatggctgtcagcaggctagcatcaaaagaatcaagtcaggttctctattatagggacaaaactgcctggcagtggaatattcaagtggggagggtggtgatggaaatggctcactccaatgggaggaataattttatcattgatattgtttaaaattgctggtgcatggtgataataaaaagttgataattacatatcaacttgtaattaggctttattattttttaaaatgtctaccgacaaagcatcctattagtatctggagctacaaaatacagctcccatggcaccctccccaacccaccttggtatacttcatgcagctagagaaacatagratctctgtttcttgcatactagtaaaacacttttctattataaagaaggcctgacactcagaataggttcctgatcttacaagcctattccccatggaaaaatatagggtgggattt

SEQ ID NO: 901146 - DNA, 665 bp, Homo sapiens
ttgatggagtttcttcatagtgtcattggtctttataatttggtgcatttttgctgtggctggtaccagcttttcctttcyatatttagcacttctttcaggagctctttcaaggcaggactggtagtaatgaaatccctcagcatttgcttctctggaaaggattttatttctcctttgcttatgaagcttagtttggctggatgtgaaattctgggttgaaattcttttctttaagaacattgcatattggcccccaatgtcttctggcttgcagagtttctgctgagaggttcactgttagtctgttgggcttctcgttgtaggtaacctggcttttctctctggctgtccccagcatctttttccttcatttcgatcttagagaatctgatgattatgtgtcttgtggttgacttcttgtggagtatcttagtggtgttctctgtatttcctgaatttgcatgttggcctgtcttgctaggtgagggaacttctcctggataatatcctgaagtgtgtttttcagcttgtttccattctccccatctccttcaggtacttgaatcaatcatcggtttggtatttttactaagtcctatatttcttggaggctttgttcattccttttcattcttttttctctaatcttgtctgcatgtctt

SEQ ID NO: 901147 - DNA, 588 bp, Homo sapiens
agagatcctatcaaagaaaatggatgtcatgaaaacagaaatggttcaggcagagaaaacggctgctgagattattaggaagctggagaaacaggagtagaaacacttaaacaaggaaaagaaatgctagctgcacttgccgtcccatctttggaaaacagaactccagaggagtgtgcaaagacaagtgtaaaacccaaaaagaagaaaaagcaaaagccccaggaggctcctcaggagaatggaatcaaagacccatctaactctttctccaaacctaataaaaggaaatctttttccaaggagaaattggttagcagccatcgagaagagaccgctggcagcatcagtcttcccaacaggaagacgtcttcacccaaggaggaagcagttaatgatcccaaagaggcaggcaacaggagtgtcactaagaaaaaaacaggaaattccccttcaaagaggaaggagctggtcagcagtggacctgaagaggctgctggcagcaagagcagctccaagaagaagaaaaagttacataaagtaccccaggaagatgagartgcaaacggacgtcccccgtcaggcggg

SEQ ID NO: 901148 - DNA, 646 bp, Homo sapiens
ttgccctcagagagcagaccaccaaatagatgagaaaggaaatgtatagtkaagaaatttttatccactttattaatttattttatggccaaataaaactttatcaatgacagggttagagggccatgtaggcagagaataatccaaggcaatggagaattaggcttccatactgaatgatgaagagcccagctgagccagaataaagatttctgtaggacactgacaacactagaacagtgagttgagggcagagtctagagaccttgaatgtcagggcaaaacttttatgagcagaggaatgacaatctaaatgttggtaagtattatcagacagaaatgtatggaaggagaatacagagacagtttcccatcataacgcaggtgaggagaacagtcaaaatcagtgtggtagtaaagttaaatgtaaatgccatctacagttaagtttccctttgtactataactagaagaaaaactgctttgcaacaatgttcagaaacccaagtcttctttgacctacttcatatagtaatgaaaatataatgatcctttcctctgtgtgtacactaaatactgcttagagaaacttcatcttgataccatttgtaaatacttaaatgagtcccatgggtctccacggatc

SEQ ID NO: 901149 - DNA, 647 bp, Homo sapiens
ctctgatgctagtttcttttgctgtgcagaagctgtttagtttaattagatcccatttgtcaattttggcttttgttgcaattgcttttgatgttttttgtcatgaagtctttkcctatgcctatgtcctgaatggtattgcctaggttttcttctagggtttttatggtttggggtttttacatttaagtctttattccatcttgagttaacttttgtataaggtgtaaggaagggatccagtttcagtttttggcatatggctagccagttttcccagcaccatctattgaataggagatcctttccctattgcttgtttttgtcaggtttgttgaagatcacatgttgtagatgtgtggttttctgaggtctctattttgttccattgttctatatgtctattttggtaacagtactatgctgttttgcttactgtagccttgtagtatagtttgatgtcaggtagcatgatgcctccagctttgttctttttgcttagaattgtcttggatatacaggttcttctttgacttcatatgaaatttgaagtgttttttttctaattctgtgaagaatgtcaatggtagtttgataggaatagcattgaatctataaattactttgggcagtatggccattttcat

SEQ ID NO: 901150 - DNA, 682 bp, Homo sapiens
tccaccaaagttcatccagaaatccaggcacttgatccctgacatcaaagaaatggagcactttgccccctggattatatgattttctttggtacaggggttgaggcacatgcaaaattgaagcttccatgatgttcttggggacagtatgagagtgaagtagtatttcaactgtaaaaacctctcagtgtgtctctcttcagtagattcctgggaaaatgcccactgcttcagttacctaagctggctcccaataacaatcattgttatacagaaacataaccatttcactttatacattctcaggcgccctcccttggattttctatttactcctcagcaaaatccagagggagaaattggtaggactggacggccttcaagatgagatttttgaggaaaagcaaatattattattcccaagtgagaagatgagggaaatacttcccagaaaaggtaaatacttgccaacatgtcatgattaaattatgacagttctgggatcagaaattgggatttcagattccaaccctctatccaagctgctaagagaaaatgaacccacagattaatttggtgttatcatcatctggcagtgaaatcaatcygcaaagcctagcgtttgagagccaggtgggattttgtagctcagtcagttctgaggtctctgttttatcggtaa

SEQ ID NO: 901151 - DNA, 646 bp, Homo sapiens
atgaaaataaaatgtgaaaaccatgtattttaaaaatactggcaaccagtggtattgttactgaaactttaaacataccctgtattagtccattttcactctgctgataaagacatacctgacactgggtaatttataaagaaaaagaggcttgatggactcacagtttcacatgactggggaggcctcacaatcatggcagaaggcaaaagtcacatcttacatggcagcaggcaagagagaatgagagccaagtgaaaggggaaaccccttataaaaccatcagatcttgagagacttactcactatcatgagaacagtatgggggaaaccacccccatgattcaattatctcccactgggtccctcccacaacatgtgggaattatgggagctaggagctgcacttcagatgatatttgggtggggacagagcgaaaccataccattctggccctggcccctctcaaatctcatgtcctcacatttcaaaatgaatcatgccttcccaacagtcccccaaagccttaactcatttcagcattaactcaaaagtccacagtccaaagtctcatctgagacaagataagtcycttccacctatgagcctgtaaaatcgaaagcaagttagttacttcctagatac

SEQ ID NO: 901152 - DNA, 681 bp, Homo sapiens
tttaggccaaagaatacaaaatagcacatgtgttggattactaattaagagatctcatgtacaacatgaggattaaagttaataaaattgtacagtattagggatttttgttaagtagattttagctgctcttgtcacacacaaatagtaactatgtgagatgatagctatgttcatctgcttcactatatagccattttactatctctctatatcccatgtcatcaggatataaacctcaaatacacaccatgaaatgtgtttttaaaacacttgcaatcataggttatttagaaaatagtaacaccattaagggaataaacaaaatggtgcaccttatgaggtgcagccaaagctgttctcatggcaaatatattagtattaaataatttcactatgaaacaacaaacaacaacaaaaaaccccagcaaatcatttaggtattttttaaggtaaaatttaaacataatctagcaatgttaaggagaatgaggtatgataaaatataaagttaaagaatcagtaaaaagtggagtttatatatgcaagagctggttcttaaaaataataatgacaaatgtctgaaaatatagctaaaaatgttaagtacagttaktttaaaaatgagtaaagaagtttaaatgaaatataaattataataaaaatagaaattataagcta

SEQ ID NO: 901153 - DNA, 629 bp, Homo sapiens
tcagcaacagcagagcattgaaccaagtgtggggctcttctaagcttggggcacatgttacgtgcccacgaagctagcccttawagatgcctttgcgtggttcctgagagctgctgtcaaagaccgtattcaccatgtaacctggtgaattgcaaagaaaaattcacatgataaattcctctttgttctcagcaccagaatagcatttatcacccgaaatgacctattacgttcctgtaattgagcaataggagctaccagaattaaatgttgtgctcaaatgaggtcgttttgctcagtctgggttttgggatgccatttcgttgttgctatttgactttgattttatatgcaatgttaatgggttttggtctttgtgttctaaggcatctcaaatccttttttggaagtagagacagtacgtaagtaaacaaaactcttaaaagtagttttaaaagttgattttaaaagcctatcatcaacattattcactggtggcagtaatagctctattaatgagattaatgcgttccaacaacataattattttttagagacttcataactacaggcagaaataatccaggaaagcagaaggatgtgttccacataagcaagaatatataaca

SEQ ID NO: 901154 - DNA, 611 bp, Homo sapiens
tcagaattgtgcaaagtgaggactacctgttttgcacatagagatcatgcatataaaactgtaacctgcttttaatttttttacgtcaacaatcccatgatcagctgtcttatagtcacatccaaattcacttccagcattcactgtctgtgctttcatctgtcatccagttctttcttttgattacctacttttgttaaatgtcatgtggatttatcatcagaaggcaaggcaaggcaaccacacgttttgctgtctacaagtgaactaaatctggatgcacagtgacccatcaccaaaagactttgaaagaagtgatgacttatcacttatcactcacatttggcttatctatttcctgagtggcagaccttaattgcttccaattttctgctgccatgaaaaaatgaagtgacatatatgtcccctagagtggaccactgaggattcacatagctctaagtactgccaattgctttacagattggttatacggtttacgctctcataagcagtgcgtaaaagttcgtgcttccccatatgcttgamaacacttggttttatctattattatatgtatatatttgccattctcagtataaagcatttct

SEQ ID NO: 901155 - DNA, 623 bp, Homo sapiens
ttagcctagacttcagaggatgtatggaaacatctgaatttccaggcagaagtttgctgcaggagcagagccctcattggagaagccctgctagggcagtgtggaagggaaatgtggggttggagcctccayacagagtccccacttgggcactgcttaatggagctatgagaagtgggccatgttcctccagaccccagaatggtagaaccactgaaagcttgcaccatgcacctggaaaagctgcagaccctcaatgccagcccatgaaagcagccgggtgcagggccatacccagcaaaaccacagggacagagctacccaaggccatgggagcccacctcttgcatcagtgtaacctggatgtgagacgtggagtcaaaagagaatcgttatggaacgttaaggtttaatgactgccctgttgtattttggacttgcatggggcctgtacccctttcttttggcaaatttctcccatttggaatggggttatttacccaatgcctgtacccctagtgtatctaggaagtaactaacttgctttcaaatttacaggctcatagatggtggggacttaccttgactcagatgagactttggacttggacttttgcgttaat

SEQ ID NO: 901156 - DNA, 586 bp, Homo sapiens
aagacaggctaacattcaaattcacgaaatccaaagaaccccagtaagatactccatgagaagatcaaccccaagagacataatcttcagattctccaaggtcgaaatgaaagaaaaggtattacaggcagccagagagaaagaacaggtcacctataaagggaagctcatcagactaacagcggacctctcagcagaaaccctatgagccagaagagaatgggggccaatattcaacattctttaaaaaaaaaatgtccaaatcagaattcatatccagccaacctaagatgcataaatgaagaaaaaaataagatcctttacaggcaagcaaatactgagggaacttgtcaccatcaagcctgccttgtaagagctcctgaaggaagcacaaaatatggaaaggaaaaaccattaccagccactaaaaaacacactgaagcacacagaccactgacactatgaagcaaccacataaacaagtctgcaaaataaccagctagcatcatgatgacaagatcaaactcacacataacaatattmaccttaaatgggctgaatgctccaatttaaagacactgaatgg

SEQ ID NO: 901157 - DNA, 482 bp, Homo sapiens
caggcacttcattgccacattacatgagttgtcatttagtccccctaacaagcacatgcagaagatcctctttttaccctatttcacagatgagaaaactaagagaggtcacaagacttgccaaaaaacagagtttggcagggcacggtggctcacacctgtaatcccagcactttgggaggccgaggcgggcagatcacttgagctcaggagtttaagaccaacatgggcaatgtggcgaaaccccatctctacaaaaatacaaaaattagccatgagtagtggtgcacacctgtagtcctagctactcaggaggctgaggtgggaggattgcttgagcccgggaggctgagcmtgcagtgagctgagatcgtgccactgcactacaacctgggtgacaaagtgagaccctgtctcaaaaacaaaacaaaaacacagagctagtaaatggtaccattagcatatgacctcaggtatgattc

SEQ ID NO: 901158 - DNA, 550 bp, Homo sapiens
acagaaagaggatgtaagtattaaaagggaaggaacaaatgaaaaggcaagatatggactaaaaraaactatctgtaatacacagctgacaaaggatttgtgttccaaatatattaagaaactttacaactcagtaacacaaagcaatccaattttcaaaagagacaaaagacatacagacacacaaaaggagctataccaatggccaataggcacataaaaagatgctgaatatcattagtcgtcaaggaaaagctatttaaaaccacaatgagataccacagcacagccattagattggctaaaatacccagtatcggtaaagacccagagtaactggaatttccatacccagttgctgggaatgtaaaatggtacaaccattttataagaaaccacctgtttcccaaagttaaacatccacttaccatacgacccaataatcacaacttggtatttatccaagcaatatgaaaatgtaagtccaaacaatgacttgtacatcaatgtctggggcagctttattcacagttaatgaacattggaaaca

SEQ ID NO: 901159 - DNA, 604 bp, Homo sapiens
acctttaaataattttaaatctcacaattaatgttattaagagatattggataacgttctaattaaaataattttcactggagtctccttaatatagtatgaataatggcgcattttacaatttatgtcatctttctttttctggcagtttcttttttattagaaaataacctgtttatattttcacatgtgtgtttactttatgctggtaaataatgaacaaaatataggtgatttatgtgagcaaactttgtacactggacctgcctgagggcagtgtcaaggagtgacaagtggttgcctgggacactttgtgcctacaaggtccatgtaggtgtcaatcatggaatatttcctagaagagtggaagaaggaactccggcccctgttgactatttttttggcattcttctgtagtagataaaattctgttctttttcacagtcatctgtaagtgaaagatcaaagtgagcatagatctcagttratcgggtaataattaaaaagtagtaattagatgggatgatggttatctatctatctatctatctgtctgtctatctgtgacgtgggaaatgaagaggctaatgcatcttttcttatg

SEQ ID NO: 901160 - DNA, 641 bp, Homo sapiens
gtacagaccctttcagagtgtctggcctaaagcagaatagaaaaaacgaaataatctgagaaagaattttttaaaaacaaactaacaaaaaagtcaatatagatgtatytcaattgcaaatccaaatctctattccaacatcataaaatgcagacaactatgtacaatgatatagatagataaatactatgtacaatgacatacatagacactatagaatgatttaggctctaacatatatgcaaagacaaaaaaatacggtgtgtgtctttgacccagaacagtggtagtattttattccagaagcattattaaagaagttgattagcatctccataaagatagttaggtactgactataggggaaataaacttctgatgtatactcctcatgctgggggaaagaagaaaaattgtttaggcacgttgttatcttctcgtttccttcacaccctccaattctgcttagcatgcaaactactatagtggacaatctgccaacaaacagaaagaaaaagatgtgtctatcattcaagtgtgagttttttgtcacgtgagcccagaagcaagtcactctcttcctagcagataaagttgttccctggctatatacatggatgtttccctgtgtgccttgaaat

SEQ ID NO: 901161 - DNA, 624 bp, Homo sapiens
ctaaaaacattttttgtttgtttgtttaagtatattctggcctttggcctctaattaaaagatgatctgagtattttctttaataccacctgccctgagctagctactgttctatcaattttattattaactcattcatacctaacaacaaccaaatttggtaaatattgttattataatccctattttacaaattaggaaattgcgctgtgaggaatttaagtaatcttcccaagcccgcatagttaagaaatggcagagtagagtttgaacccaagaagtctggttccagagctgggacccatgcacattacaggtacaacatatagtttataatatatcatttattgtttgctcactgagggccaaatgctacgctaaactctgtatgtgatagatgtcattttattcctatcaccccctgaggtaaataatgcattttactgatcctcatcatagactgaaagagcccatgtcctttgttcatagtcacactgccaatacgtgacagagttgacacctattccaggtctagctctgtccaaaattcacaatgtaatagctccattamagagtttttcaggaaaagggccaaggaatcccttgataaggtatgaaaggaca

SEQ ID NO: 901162 - DNA, 608 bp, Homo sapiens
aacaaaacgaagtgggaaaatgtagggatagacgctaatgctctatctgtctgagctgggaattgtagagcagccattctctccttaactctactgtcgtcttagraggacacaaacccagaaagaatcctgtaaggctcatttagtccagtccccctctaactgaccacccagtaggaaataaatggtttatcgtccataataagggcaccaaatagtatcttctacagattacataaagcctgagaatgaagcagatcctgggtacaatagcgaaaaagctttttagtttcattcatctgtcctgacaattgccacttttcaccaggccagggacatgagagcattgaggctctttgactcagagcattcaagaagctgtcatcagagctggtaatgggaaaacaatgggccacttttaagaacatatttatttctgctgcaaagaacttctccccttttattttccattaccatcacccctgttttctccctcactagcagcacccgagcacacattattccccacttcgtgcactgccccctgccatcccagggagtgagaaattggaaatgaaacacaacactatatgcagattggttttaat

SEQ ID NO: 901163 - DNA, 613 bp, Homo sapiens
aattgtacttatctagtagggaggttracaggataacattatctaatgttcaaaaaaacatcagcagtattagggtagtattaaatcacatatgtacatatcaattattgagggtttcctatgtggccaatcagcatgtgaaacactttacacgtgtaaatcacttaatcctcacaacaaacctgagtttaaggattactgatttctacttaaggaaaaaacaagacttggagaagtttctactttaatcaggggaagccaagactcagcaaattaatttgcctgagattacacagctaataagtaggaagagtggtatttgaaatccagctaactgactccagagcccacacatctttgcacagcaagggcattcaatgaagggcatgactgacagaaagacatcattttagctgggagagggtacagaagaagcagttttcaatattgaaccatgcaacaagatgaaattgaaagactccgcaccaaggtggaaggcagggagtgagaaatcagagcacaatgggcaaatagatgcacagggatgtggccgcacaggggcatggcatccaaggcagggataaatccacggagctggagtgggagaaatgcg

SEQ ID NO: 901164 - DNA, 578 bp, Homo sapiens
aagaaaataatctgtttacataacttcaaacagagtgaaatacttaaatataaatttaacagaggaactgaaagatttttacactaaaaatacaacacatggtcaaaagaatgtaaggaaggtttgaatraatggaaaagcatcccatgttcacaggttagaagacttactattgttaccaataatagacagagccaaatcatgagtgaactaccatttgcaattgctacaaagagaataaaatacctaggaatacaacttacaagggatctgaaggactgcttccaggagaactacaaaccactgctcaaggaaatgagagggcacaaacaaatggaaaaacattccatgctcatggataggaagaatcaatagcgtgaaaatggccatactgcacaaagtaatttatagattcaatgctatccccatcaagctaccgttgattttcttcacagaattagaaaaaactcctttaaatttcatatggaaccaaaaaagagctcttatagccaagacaatcctaagcaaaaagaacaaagctggaggcatcacgctacctgacttcaaactatactata

SEQ ID NO: 901165 - DNA, 172 bp, Homo sapiens
tgtcttaaaaatgatatatrtatcttaatttaataatacttcactggtttaaaatgctaacaatcatctgagccttcagtgagtagaaatctttttgctggtggagggtgatgcctctgtgttgatggttgtttactggtcagggtggtgtttgctgaaggttagggtggct

SEQ ID NO: 901166 - DNA, 580 bp, Homo sapiens
tgtttaccagatttatcacaaatgctgtttttgattttatccccggcttgtctctaattttctcctgaggttccagtctcatttagctaaacccaattacaaagtcagaggtttggggttcttttttctatctttaaaaaatacctgttctcatcaagattttattattattattaaactgtccaagcatcttctccttgagttgtatttctattatgtaagtggagagctgcaaattatttggtgaatttgctgaatacaggcagttgagccacataaatgggatatcagaaggaaagaataggtctgaacatggggttccctcagctaagctggaaagctctccctacctcctgcttgggctccttccaattcctccttgacttttctgatttccagtcatcacaagttgttcattcttccagtattctcccctttaaaaagtgtttttattttaaaataggcataaaaggttatatatatatgtatatatatatatatatatatayatatatatatatatatatatatattccaaggaacataaccttaatgctggaattactttgttttgcttttc

SEQ ID NO: 901167 - DNA, 594 bp, Homo sapiens
gtgaatggataaacacattgtgatgaggacatttagtgagatactatatatatatgtatatatatgtatagtatatatatatatatatatatatataaaasctattctaattgttagctatagctcattgtgcttgtgatttacatttttctgataactaatgaggttgagcacctactaatgtgattattagacatttgtgtaactgtgatatttctgttccaaagttttcccaattttgaggggccaaaatttttgagatatggaagcttattagacatgtgttttgaaaatatatctgccaaggctgtatattattattttattttccaaatgatgttttttgaagatcactttttttttagttttgaagtctaattctttaattttatgctttaagcttttgctgtcttatctaacaaatgttattctttctccaacattttcttctaaatgttttatttcatagtttctagacgtgtgtttataatacatttcaactcaacttcagtacatgtaaagggtagaaggataaaggttcatttatttctgtggtatcagctgtataccatttttttttctctgattttatct

SEQ ID NO: 901168 - DNA, 594 bp, Homo sapiens
gtgaatggataaacacattgtgatgaggacatttagtgagatactatatatatatgtatatatatgtatagtatatatatatatatatatatatataaaacctattctaattgttagctatagctcattgtgcttgtgatttacatttttctgataactaatgaggttgagcacctactaatgtgattattagacatttgtgtaactgtgatatttctgttccaaagttttcccaattttgaggggccaaaatttttgagatatggaagcttattagacatgtgttttgaaaatatatctgccaaggctgtatattattattttattttccaaatgatgttttttgaagatcactttttttttagttttgaagtctaattctttaattttatgctttaagcttttgctgtcttatctaacaaatgttattctttctccaacattttcttctaaatgttttatttcatagtttctagacgtgtgtttataatacatttcaactcaacttcagtacatgtaaagggtagaaggataraggttcatttatttctgtggtatcagctgtataccatttttttttctctgattttatct

SEQ ID NO: 901169 - DNA, 610 bp, Homo sapiens
tcaacaaatggcattagaataattatatttttattaaattaaaacaaacttcactctataccttaaattatatacaaatattaactaaacataggtaataggtataaatattaaacctaaaaataaagtctaaaatattatattgaagaaactatctgaaattttggaaaagggaaagatttatgagaaacaataccaagagcatgttccataaaagaaaactggctgtgttgaattccatcaaaatggagaactgctcttgtaagacaatgtgaagagaataaagagacaaaccacaaactggtagaaaatatttgcaaatcatatatttcttttttttttttttaatttccataggtttttggggaacaggtagtatttggttacacgagtaagttcattagtggtgatttgtgaaactttggtgcacctatcacccgagcagtatacactgaacctgatttgtagtctttcatgcctcaaccccttcccaccctttcccactgagttcccaargtctattgtgtcattcttatgcctttgcatcctcatagcttagctcccacttatgattgagaacatacaatgtttggttttccattcctgagtt

SEQ ID NO: 901170 - DNA, 486 bp, Homo sapiens
gggcaaaatgccaccagtctctttgcataggaagagtgaccttcactccagttcccaacaagttccttatctccatctgagactccctcagtctgaattttattgtccatgtcactatcagcattttggtcaaagccattaaacaagtctctcggaggttccaagctttcccacatctgcctgtcttctgagccctccaagtctctaggaagttccaaactttcaaacatttttctatctgcttctgagccctctaaactgttccaacatctgcctgttatgcagttccaaagtcccttccacatttttgggtatctttacagcagtgccccactcccagtaccaatttattatattagtctgttcttatactgttaataaagacatacatgagactgggtratttataaagaaaaagaggtttaatggactcacatttccacatggctagggaggcctcacaatcatggcagaaaatgaagaaag

SEQ ID NO: 901171 - DNA, 626 bp, Homo sapiens
atcgataattattaattactgtggataataaaacacatagtagctawgtgatattggataaactgttgtatgttattctaccccttagattgtctctttgctctaattttaggtggctcagtatataagatgccctcccaagcgaaagctgtctttctacttctagcaatgcagacacctgtgcaaactatggaggatgcacatttgatcaatgatggcaggaatactagtgctacttaaaaattcttatgctaaactcaagttttctttataataaattgtttcaaagcattaaaaagttgaaaggaaaaaaaaaaacacttctactgggcttatacataagctagaatactccctttgaaaatctgggagttgttaggttggctaaaccacagacccggctcgtgactcctttcctgtgacctgttaggttgttttatgactggaatgtgatgcttgcctccagttaagaaccccacagcttcacatttaaaaagccactaatgtaggcaaactgagaacaggagtgtagagagcatgggttttgctgggtttgtggcttggatttaccattgattggctttgtggctttgggcactttccttctccctgtggagtatctgttt

SEQ ID NO: 901172 - DNA, 636 bp, Homo sapiens
gagatcaggccactttgctgtaagctttagaggcagagcctgtaccttggcactacaaaacagagttaatataaagctttctatactttaagatcaatggagaaaaggtgaaatagccaatgaaaaacagggcaaaagagaggaagaagcacttcacaaatgagagaaagctatttaaaaaacttacatcaggggtcaggcaaggtggctcacacctgtaatcccagtactttgggaggccgaggtgggcggatcacctgagttcaggagttcgataccagcttggccaagatagtgaaaccctgcctctgctaaaaatacaaaaaagtagctggacctggtggcacactcctgtaatcccagctactcaggaggctgaggcatgagaatcacttgagtccgggaggcgtaggttgcagtgagccgagatcgtgccactgcactccagcctgggtgacagagtgagactccatctcaaaaacaaacaaacaaacataaccttacagcagaatctagtatagttgaacatatacatcccctaagatctagcartttcactttcaggaacatgcacagcagaaattcacatatgtacgcaccagaagatgtgttcttgtattgcagcagcattgtttc

SEQ ID NO: 901173 - DNA, 609 bp, Homo sapiens
atatatatatatatatatatatatatatatatatatatatatataaaacctatcacagtctactggtgttgacatttaccaatttgagtgaggtgtaraaactctaccttattttaagtccctttacctttccacgtgtaattctgttaaatatttcttctacatatactgagaaccatgtcaatgttataatttttgcttcaatataaggcatatttagaaaacacagaaaaaaaggtctacagtatttacctatatttttattctttttgttgttgtttcttcctgatatactaagagtccttttaaaattttctttctgtttgaagaacttcctttaccattcttttagaataagtctgctggcaaaaatacctttagttttattttatctagaatgtcttgatctctccttcattcttaatggatatttttgctggataaaagggtccgggttgatgttcttttagcatttgaaaaacatcgtgccactttactcaggcttcaatagtttctgttgtgaagtctgctgtattccattttattcctattgataaggtatcatttttctcttattgttttcaagattctttctttgtctttaatttt

SEQ ID NO: 901174 - DNA, 615 bp, Homo sapiens
gtgtacctaggaacaaagcccagacctgcaggccctgaggagacaagggagctatagattattttgtgagacctgcatttcaataggcagcatttcacaggccttttgtagccctgcttatcttagaaactttgtgtgcggctttagactcatgggcaggcccagtcttagccatgttgtctagaggaaaccacttttctggcctctagtacatatacccatttgcctctgaaaacccttccttgccttacgtagttctctaaagaatcacatagaacaggctagcaacctgactctcttgaagaaattgtgtttacacatgcaatatgccacagctaatatctctagtctttggaggaaaaataaaaacaaagaatgcattattataacaggagtgtcctgttgaaggaaagatcttatgatatagagaaaagaatatgggttttagagttaaacattgattttatcccttaatagtttagtgaccttgggcctggagccttagttcctccatcagtaaattttggatatcatacccactttttcatacccacctgaaaaattctcatgaaaaaaggtaattaatgcwaagttctcagcaagcaaagcattatc

SEQ ID NO: 901175 - DNA, 634 bp, Homo sapiens
cctccattgctaaagttttcactggtggtgacctgtagccatgacctgctggtaatgggaatgccagagcaggtgtgatacttataggcatttgcaatatatcaagggatcagcgcccacaaagacatcagagttggtggttattgctaagttgaatttacatcttacattaggataatgaacaaatgaggctatcagcaagcgtgacaatctcagggctttcttctagcattcaaggaagattttatctcctacttggcagggcagacataactgaaagtaggctgaagacctaattactatagtcacagagatgtttggatgctcagcttattcaggtctgctatgcaaagaccaggggattctgaaaaatgggatgtggatatctttatagatgtcctgagaatttgaccttatgaccccctttctgctagctctgacttttatgtatttaacattttttaaaaattttctaaaacattttaatagacatactttccaagaatgttatgtactgcagttgttcactgaagattcattaagcatccatttattgagtgtcccctattgctgagaactctgctggaaggtgctasgtaggcccttgggacacaatagtgagaaagggagcctt

SEQ ID NO: 901176 - DNA, 659 bp, Homo sapiens
ttttatatttatcccttgaatttacaaatcttataactgttttgtaacaattcaaactaaaatggcctcttgattttggcactactgtaggctaaactaataaagaaaactttattattataaatttaaagaaataaggaatataatataaacaaattggggaaaaacatatgtctgatctgaaagaaaaataagagaaatctctggtgctaaaaacaaaaggagaacctaatagcagagctgtgagctcatgagctgaagttacgggatcctagagaggtatggaatatcttacttacagataagctctagggtgcaggatctggggttttaatcatggttccaggacagaaattgtgtctttggggcccatctgctctaggtccgttggatcctagagaggtatggaataccttacttacagataagctctaggtgcaggatctggggttttaatcatggttccaggacagaaattgtgtctttggggcccatctgctctaggtgtgttgctggacctgagacaactgcataaaactgagytctgggacagctgcctcctcaaaaaagggaatgttgaaaaactttctctgccagcacctctacccagggaagtgataagaagctgtgaatgaagaagaaaataaacaaaagtctga

SEQ ID NO: 901177 - DNA, 475 bp, Homo sapiens
attctttgtgttcctcatggatttgtgttggtatccatgcatttgaataaacagccacttctcccagtctctttgaattcaatagaaaaagacttttgtgagagcatggctggagattytgggagcttctcaaaccttttttatggttgtgtcttctttagtcttgtgtgtgtagattcttaattagagggacttactggttgttttttttttggcaggtgatcccataatctcttgctccctctggtatctaattgctgtactgtgggccaggacgttgaaggcacgctccactatcctccctgtttccctgtatagaaacctttagttatgtaccttctcctcatcttgtagagatgtgctgggtacagaaagatgcacacctcctttcctttgctcttaatcaactccataaaactacatcagttctgtcaatgctctgggtgagacaagataggaaacagcccctcagaaa

SEQ ID NO: 901178 - DNA, 637 bp, Homo sapiens
tgggggagagaggtgactcgctcacctagatggctcctgggcyttggaggagcccccttcgatcactggttccatgccctcacttcttttgttaggtgttctggtccatgggctccctcaggcagggaccacatttagtagacaggtcatatccttgccaggctggccctgtggaacaaggcacaccccaatcctctgccagcccatgaacctgggtatctccacttctctcagtgatctgagaacgagggctcacccttgcttggccaccaccaagtcctgatcatctaagagctgtgggatggggtggggtcacttaatcccctgtctaggtgctttccgggggttcaagaagttgtggccacacacagagttcaggcagatgtgggaatgctgggctggaagctctatcagacatggatttcctggctatgagtggcgggtttgggtgcagttgcctgacctgctgttgggttatattctagaggctgttcctgccatcagagttcagacagaagtgggactgctgggctggaagttctagctgcctggctatgagtggtggtgggggttgtggaatcacctatcctgcagtttttctgtttccctggataacaggaggctgtgtccactggca

SEQ ID NO: 901179 - DNA, 578 bp, Homo sapiens
cattagatgttaggagagcccaagaagcatccaagaaaaataaakaaaaaaatacaggtagaagcataggtaattcagtaagatcaagagtataaataggttggggccgggcacggtggctcatgcctgtatacccaacactttgggaggccgaggcaggcggatcacaaggtcaggagatcgagactatcctggctaacacagtgaaaccccatctctactaaaagtacaaaaaattagtggtggcgggctcctgtaatctcagctacttgggaggctgaggcaggagaagtgcttgaacctgggaggtggagattgcagtgagcgaagatcgtgccactgcaccccagcctgggtgacagagtgagactcagtctcaaaaagaaagagtataaataggttggacttttagcaacatggctgaagaagagtcaggggccacattatgaacagtcttttattccaagagaaaatctttgcaaaccacagatggtggcccaaattcaaatgacagacatccttttttttatttaattttattgtccacacacataatctttttcaactaaatttggaaa

SEQ ID NO: 901180 - DNA, 653 bp, Homo sapiens
ttctgaagaactaagacctcaagggaaaactagaaatagaascaaggagaggtctgggaatgctgtgacggtaagtaaaacaataaaaggtccacctgcatttaaacattttattcctcttgctttattcacaagtgcctaacatagggtagacacagaatattaagtatatggaagcagtttttatcaaatgatttcctaaagtgtgtataaaatagtataagtccctgtgatgtccccaagcaaagattttcagagtaaatcaataatttttaaaaattcaatgtctttttcttattttcaatgttcttttaacatatcaaaatatcttaaaaattgcatcttttccacaacaactttctgacaccaaagggatgtcctacaattcagtttaacctgaagttagtatagaccctacaagttaaagacaaagtcctttaattctgatatgaagtatccagggttagtggagaccctaccggttaagggctcagtcccacaaaactgctcccacttcagacttcagttgcaagttttcggtatctccaagttaccttcactttttttccaaaagactgcaaatttggggttcccaaaacatttcaccctaaagttcaataattcactagcacaattcacagaacttgggaaag

SEQ ID NO: 901181 - DNA, 620 bp, Homo sapiens
gtgtgtagaattagagtaggagttgctgtgggtcaacatgactggcccagggctaatacgttttaaggccctcctcttctcaccatttagcctcttgggattctagaacttaamgatgaggcctcatagtataggccagtagaagtttgcatcctgtctgcagcagttcaactgagtgccagattgagaagcctgccaaaactccaggggctttcaccacaaaaagtagggaaacaaacttcattttgtgaatgggtatattttggccctgagctgacattcactgaagccaagctgtacagcctctggtattctcaaatatgcttaaaaacccacaaacctgccttttttttttccatccaagtcaatattggcccaaagtcagaagccttgccttttttggtcatgttgtagatgctggaccaatgtcgacttggtaagaatgttgacttaggagggcatggacgcatcctggcccttataaacctcccagatttacagaagtgcctcttgagctcttaatgaaatgaagtaagtctaattctctgtattaggttgtttattgagcagactcatggcaaagcccaaaacagtatacctgtggggctgatattggcaaa

SEQ ID NO: 901182 - DNA, 648 bp, Homo sapiens
aaggaaaggattctctcctagagcctctggagggagtgtggccctggaaacaccttgattttggacttctggccaggagaactgtgagagaatccatttctattgttttaaaccattcagattgtggtcattcattatggaaaatacaggaaatgaatacactgatgcttgaagattgcactaactacttcttaaaagtctccttaacgaagcttttttgagactgatttggttcacctctgctgtataaacatgggtgggaaagggtaggaaaaatggctcgccacagacatcttgaaatttctttttatcttttagttattctcactgaactgtgcgtgcctatacaggcaggtaaactcagcagttgtatggtgcttactagtagatgttaaatattactcttcatttaaaaaagtcgtaaagtttttaaaatatccctcaaaaccttaggagactgaattcataagaaagataaacagcgaattcttgttaagtggctggtaaaaaaacaagcataatatggttcactcccaccaatggatgccttacagatggacgacatgagtcatgccgctggccttgactcccttctcaccagcaaagaccttacarcaatctgactgcctgtttagaatctgggactgc

SEQ ID NO: 901183 - DNA, 656 bp, Homo sapiens
gagatggctcatgcctgccttcccagcattttgggaagccaaagtgggaagatctcttgaggccaggagtttgagaccagtctgggcaaagtagcgagaccccatctctacaaaaagaagaagaagaacaaaaaaaaattagccaggcatggtggcctgcccctgtagtcccagctactcaggaggctaggttgggaggatcacttgagcccaggaggttgaggctgcagtgagctatgatggtgccacttcactccagcctgggtgatggagtgaaaccctttctccaaaaaaaaaaaaaaaaaaagaaaaagaaaaagaaaagaaaagaaaggaaggaggaaagagacagaaagaaaagaaaaaagaaaagaaaagacgtcaactaaattgactctcacccagaggctttcccttccctgaggccattagctctttctcctagcagagtctattaacctcatagagtctgtattagtctgttttgcattgctataaaggaatacctgagactgggtaatgtatataaaaaaaagaagtttaattggcttatggttccgcagggtgtacacraagcatgataccaacatctgcttctggtgagggcctcagggagcttacaatcatggcggaacatgaagagggaacaagctatc

SEQ ID NO: 901184 - DNA, 622 bp, Homo sapiens
acccagcccagcctagcctctccctgaccttgtgcaaatggtaggaagcctgacggtttgctctgccttaaggtcttgcctcatctgcccagagaactccaacctggcagtagggaaggctgaaaaccagctcaagtcagaacaagaacccccagcaaatgctcaggaattcatggaactagacacctctgaaaatggaaggcaagtgctgcttaaagcaagcagatttgttaaacatctgtataagaagcagttagaacccccagcagagggtaggagttttgtaccctggaaatgctgaatcagtgggactagactctggaaggaaactaaattcagtcaagggtaatggtactgtgctggaaacaggaagattatctagaagtctgcacactgttgggtagtacccaagcccctcccttcaactgggatctcagtcagccaggtttacattcctcagacaggatatggaaaataccctctctggaaagcctctctcatagcctggcttctgcctgggggcctragcatgccacaaaatacaaacaacagcaacaaaaactggcccatgtgcatcagttactgattgctacaataatgccacataacaaatcatcccaaa

SEQ ID NO: 901185 - DNA, 613 bp, Homo sapiens
ttttatttttttgtagagacagtggtctcactatgttgcccatgctgatcttgaattcctgggctcaagcaatcctgccatctcagcctcccaaatgttgggattacaggcatgagccaccatgcccagcctatcaaactatttaaatgtgacttttctctgacacatgctcattgggattctgaaggtagacatgctactctgagaaaccaaactttgaggcttaactgccctccagaaattagaactccatagctccatctggcccaattagagatacctgagttacatttcacaataagcgctggttaagaacctgtgataaattctgtggacctaaaagctgctcctcagatgctgtggaaattcttttttttccttcttctttttttttttctttttttttttttttttgagacagagtctcactctttcacccaggccagactgcagtggcgctatctcggctcactgcaagctctgcctcctgggtgcacgacattctcctacctcagcctctcgagtagctgagactacagagggaatttttcaaacaaggtttttcagtggaagcrctttgacctttgaggataaggctctgtcttttaacagg

SEQ ID NO: 901186 - DNA, 613 bp, Homo sapiens
ctctctctgataaatcttgcaatgttagagtttaccaaagagaacccacatattcttgtcagtagcatgggctttggagtcaggcgactaattctagatttactgcttattgctcatatgagtatgagcaagttactatactactgattctttttttaatgtctaaaattgagttaataatgtttagtatatattcatgaaaaatataaggagttattgtgtacaaagtgcataagacagtgtctaatcctcagaagacactcaataaagggagtctaccttagagttgagctgtcttgagtccaactacctgggataaagtctggactccatacctagcagctatgacttttgctaagttatataacatttctctgcctccatttccttgtttgctaagagggattcataatagggtctactgtgtaagttcatgagaagattaagtgagttactacataaagctcttagaacagtgctagacatagtaaaatcttaataaatgtttttgatgaaattgattatataaaaattactatcagcatgcagtgctgtcaaaggtataatggaaaactataatgaaaacttgayttctatccaaggagcttgtgct

SEQ ID NO: 901187 - DNA, 624 bp, Homo sapiens
attcaggtcatttctaggtttttttctytcattttcattttgaataattgtctcacactgattttttaatcattaattttttttttctcaacaattagaaaccaggttgcaatgctacagtgtgatgtggtgcttaaaaatatgggctgtggaattgcactgttgggtgttgatcctgaccctcctagtatcttcaggctgagtagtgttggcagtaacccaagtctcctaatttatggggcggatttagcaccatacttggcaccagcataagcatccagttaatactatttttttggtcacaaaaatattccttgatatataagaattatctctagtacagatttctgaaaatggtattatttaacaaaagggcataaacactttaggacgcttgataggtattgataaattgtttttcacaaattcttatcaatgtatttgcctatcagcagtatcataccaacaaccaatatgatatatttaaccccctttgaattagagaggcgataatatttaaatatttaattttttaactactagatcgatggaagattttttaaaaaataccatatatttaattgccatttagatttcttcttgtgtgaatttgtttattaatga

SEQ ID NO: 901188 - DNA, 644 bp, Homo sapiens
aaggtgtttctggaagagatgagcgctgaaactgacaggctgaattcagatcaccctcacagtgtgcgtgggcatcatccagtccatcgagggcctgagtggaacacaaagacagaggaagggaaaatgtgcttctgtttgagctgagacatcgccttctccagacctggaaccttaatgctcctgattcttgggccttcagactcagactgatttataccactggctttcctgcttttctggttctccaacagaacgtggcacttttcaacctctatgtgagccgatttctataatctctctctctctcatatatgtgtgtgtgtgtgtgtgtgtgtatggtacatatatatacatgtgtatatgtagtatatatatagtgtatatatacacatatgtgtctatacatgtatatatacgtgtgtctatatatacatgtatatatatacactatatacatgtgtctatatatacatgtgtatatactatatacgtgtgtctatatatacatgtgtatatactatatacatgtgtctatatatacatgtgtatatactatatacatgtgtctatatatacatgtgtatatactatatacatgtgtctatatatacatgtrtatatactatatacatgtgtctata

SEQ ID NO: 901189 - DNA, 645 bp, Homo sapiens
gatgagccttgctcaagtctaaatttcatggccactggagtcatttccagaactgactatttagaatggcaattaatttatggtaattaactctagtgttaaccacttgttaggcttggcaatgatgcttgaagtttaaagagagggagagaaaaggagaaggaggagggtttatccaggcaaatgacaaaaatatagctggaggactcacaaaagtaaatatgaagaatttgtttgcgcaggagtattttatatcaccattctgtgaaagaatccttcttttaaactaatgcccatagttaaaagtgacaaaacaagcttcttttgtttgactagggtcttggcttcaatcagcagtattattaagagctgagcaatgctcttcattaggcagtgagactcattaataataccattcattggtctaggggttcctctgggaggggacggactttgcagcatgcacattctcatccaaatggttcacgaggaccctacgtggtctgacagtgctggaggacacggttcagggtagagaggggtcaaacctcacccccagctcctgaagagtgcagaggaaaggggctagcccaagacrgagttgatgaggtgacagctatggctctttaccacccgaagtgcttg

SEQ ID NO: 901190 - DNA, 455 bp, Homo sapiens
ctagataaccacatggctaactatatcacttccttaaagttttttttctttttcaaatgatgccttctgtatgaagcttgctctaaacatcgtatttaatactgcaaattgccccaggactctaaatacccctttctttatgtattatttccccacagcacttaccacattcttacatattagataattaacttatgtattgtttattgtctacttcccactactacccaataaggtccatgaaggcagggatcttagtcagttataatcaacagtatatttcagtactgagatatgcctggcatattgtagatgcatagtaaatatttattgaatgaaaggaggagtaccatgaaatactatgcagccrtaaaaaaaagagtttatctcctttgcaggaatatggatgaaactggaaaccatcattctcagcaaattaacacaggaacagaaaa

SEQ ID NO: 901191 - DNA, 625 bp, Homo sapiens
tgctcgcacttccagatttaacatagcagttggaactaccccttggaagatgcagaaacaggcttaaaaaagatagatgaagacaaactatgattgcttagaacaagttrtgttcttattaaagcataattatttttcaaggaaagcagaggaaatttagaatttcaggtatgaagtggccgggcgtggtggttcatgcctgtaatcacagcactttgggaggccgaggtgggaggatcacctgaggtcagaagttggatacaagcctggccaacgtggcaaaaccctgtctctaaaaaaaaaaaaaaaaaaaaaaaaaaaaaaaaaaaaattagtcaggtgtggtgggcacctgtaatcccagctactccggaggctgagacaaaagaatctcttgaatccaggaggcagaaattgcagtgagccgagatcgcgccattgcacttcagcctgggggataagagcgaaactccctcaaaaaaaaaaaaaaaaaaaaaagccttcttcttttggtttaaaaaattcaagtaaaatccaataatatacattttatactgagaaattagtctcaaacagaggctgacttcacaaagtttccaccagtatatgcctttatatctaactt

SEQ ID NO: 901192 - DNA, 649 bp, Homo sapiens
acaacaaaaatcattaagaatataggatcttgtttctgtggtcttgggttcaaatcttggctctgccttttacctgactctcaagtcattttacctttctgagcctcagtttcctcatctgtgatatggggattatcatagcatccttagagaattgctaggataattaaagagatctccaaaaagggctgatgaagacgctgtgggtgactcacctaagccctcggcatgggccaggcatagctctaagaccactaagagtcagtgcatttcatcctcatgacaactttagggagcattttacagatgaggaaatggaggcccagagaggttaagtaacttgctgaaggttacacagttgaaaagccacgtaccgtgattcaaacccaggcagtgcagtgcctgagcctgcacttgtgcgcactccccagagcctgacctgcagaaggagctcattgaggggtggatcctctgcccactgggtgactctcttctctcccactgggtggtgagcacctctagggtcgggctgctgattcctgcctcccagtgcccgggactgggctggatccacaggaaggttgccaggatrggcaccaataccagtgtcactcttcttatatcctttaatgggatatgagtgctctga

SEQ ID NO: 901193 - DNA, 600 bp, Homo sapiens
tgggggaatctgaggggctctactcaaagtcatgtgatccccaaatgtgttctctttgcaggagccctctatgtctccctaagggatcagaattttggaagccactaccaggaaaacaacatttttctctgctttttatttttttaatttcaacttttttaaaattatactttgagttctgggatatatgtacagaacatgcatgtttgttacataggtatacacatgccatggtggtttgctgcacccatcagcctgtcatctacattagggtgtttctcctaatgctaaccctgccttagcccctcaccaccgacagggcctggtgtgagatgttcccctccctgtgtccatgtgttctcagtgttcaactcccacttatgagggagaacatgcagtgtttggttttctgttcctgtgttactttgctgagaatgatggtttccaggttcatccatgtccctccaaagsacatgaactggctgcatagtattccatgtatatgtgtgccaccttttcttaacccagtctatcattgatggccgtttgggttggttccaagtctttgctattatgaatagtgctgcaatacacatatgt

SEQ ID NO: 901194 - DNA, 600 bp, Homo sapiens
tgggggaatctgaggggctctactcaaagtcatgtgatccccaaatgtgttctctttgcaggagccctctatgtctccctaagggatcagaattttggaagccactaccaggaaaacaacatttttctctgctttttatttttttaatttcaacttttttaaaattatactttgagttctgggatatatgtacagaacatgcatgtttgttacataggtatacacatgccatggtggtttgctgcacccatcagcctgtcatctacattagggtgtttctcctaatgctaaccctgccttagcccctcaccaccgacagggcctggtgtgagatgttcccctccctgtgtccatgtgttctcagtgttcaactcccacttatgagggagaacatgcagtgtttggttttctgttcctgtgttactttgctgagaatgatggtttccaggttcatccatgtccctccaaagcacatgaactggctgcatagtattccatgtatatgtgtgccaccttttcttaayccagtctatcattgatggccgtttgggttggttccaagtctttgctattatgaatagtgctgcaatacacatatgt

SEQ ID NO: 901195 - DNA, 636 bp, Homo sapiens
ggcatcaaccccaggctacagctcagacttcattagaggtcctgatgaaggacagygaaggaatccagggcaattactagaactgtaagacctctttccatcaacacacctgatgggagaactaaaaattaattccagagggagtgatggtattaatcaagattttctggcatcttcctccaagaacgctagatagacccagttgtcttttcctagccaattttaggcccatccattgtcttagcaggaagagataatattacagttgacatttggaagattatttaaagtatcacgtggcaaatgttacaagtgtaaggccaaattttcagtgttgctaagttcgtgaaatttctatcactacttgaagaaaagaaccatagttgcattgaatccttcctgctggtaattcatgataacattttctaaaaaacactgaatatttgactttaaacaaaactgagttcaaaggggtggcacaaaaaatggtggataaagtaaaatgatgatcacacagttcttgtaaagtatcgcagaaaagacaaaatgaatttttttagcctagctgactgctttagaaagcaaattaaaacaaagttttctaaagcaacttggttttatggtctcataggtaca

SEQ ID NO: 901196 - DNA, 646 bp, Homo sapiens
gcggtgagacgatatctcgctgttttgatttgcatttctctatttgcacatatattaartatatgtatgacatatgtagatgatagatacagctataggcataaaatcatagaagcagaacacaaggcattggggaaagagaaggggtcaaagagttcatagcacaaaatgttgactggacagaattaaaattatccattctttgtatgtttatccattttgtcagtcaggataagccaggttttgctgtacaacaaatttcccacaaatcttaaatgtttacaatagaaaaagcttaattatcccttctattgcatgtccactgtgaatcactgtggcttcacttaacatctttttctctctggaacccaggataacagtgcagtcactacctagatcatttctgggcatcatgccagataaaaaacaggatgtgggaaaacacaatttatttctaaaagtgtctgctgaaagtgaccaaagttattgaggctcatgttttatggacaagagcttgtacattcttgagttcaagaggttgagcatgtatgattgtcccatggggaagagccatgcatgaaagagcacagaatgtgggtgaattcaggaagtacggatcacctgatttttattattatttttttta

SEQ ID NO: 901197 - DNA, 600 bp, Homo sapiens
ccattgaaaaccaccagaagacaaagatgtcctctcttaccactcctattcaacatagtgttggaarttctggccagcgcaatcaggcaagagaaagaaataaatcatattcaaataggaagagagaaagtcaaactgtctctgtttgcagatgacatgatcctatatctagaaaaccccatcatctcagccccaaagcttcttaagctgataagcaacttcagcaaagtcttaggatacaaactcaatgtgcaaaaattccaagcattcctatacaccaacaataaacaagcagagagccaaatcatgaatgaattcccattcataattgctacaaagagaataaaatacctaggaatacagctaacaagggaagtgaaggacctcaacaaggaaaactagaaaccactgctcaaggaaatcagagaggacacaaacaaatgaaaaaacattccatgctcatggatagaaagaatcaatatcgtgaaaatggccatactgcccaaagtgatttatagatttaatgctattcccatgaaactactattgacattctttacagaattagaaaaaactactttaaaattcatatggaagcaa

SEQ ID NO: 901198 - DNA, 591 bp, Homo sapiens
ttctcatttaatgtgacctcctctttctcaaaccctgcacactttaatttggtcattttttttttttttttgtcttctactgtggggattcagagtgttcaaaaccctacttccaacatcattgtttttccatttgttagagctaaggtaaactgacattacatcttgaggtgaccatgtctacatcttttgctcatagaatttactgaaattgattaagtttttttctgggttggccaggctgcccagacatgagaagggctaagtgctgaatggtgtttgccgagtatttgcattgtatgattagcagaatcatagaatcttagaatggaaacagaacttatctgtctttggtcagtttcctatcatgattccttctccaataattctatggaaatgtttaaatctttgctttaagcctttctaagattttagagctcagtactatctactgaagccttttacattgttggacaattataatgttataaagatctttctcatattaagcagaaatatcatgagctacattttcctattcccatattcargcaattctaataaatctaaatgcctttctaaggcatgact

SEQ ID NO: 901199 - DNA, 267 bp, Homo sapiens
ctatttacttttgagtttatacttgacttggcttatatttcttacagcaccaagctgagcatgaacaggaaagggaagccctgaggggtatacttccctcaaagcagcagcttacatgctgtgtggtaccctgtaacagcatttctctcatcccataagtctttgtttcttcatccttctgtagaaatagacaaatgcaagaggaaaggcagaatccttccatgaaataatgatgcaatatgcygactaatttttccagagtatcct

SEQ ID NO: 901200 - DNA, 646 bp, Homo sapiens
aactgagtctcaggcttttgttcaacaatttttaataccccaaatgaaagaatgtttccartcaaaaccaaattattccccagttttacttctcaggacatcttgtcttactttaacttcttcattcttggcccttctacctaactgaatctcattacacttagtaatgttctgatcctttgtctccttttatatctttaatacaacagcgctttatatatcatatataatatatgtaatgggcagttccacagaggctgttataaattcttcaggaatatagggaaactatggtgaagaaatacaagagctttatcaagtacaaatggaactggtggcttttaaagttgacttgctttttcctgaacaactttggtcagatttctttcttaaaaatgccctgctgaactggaatttacagaaccttatgcaagatactgaatgttctacatttcctggcacaacctatgagaagtcaagatcggggatggagctgtgtctttttttgtgcctggcctcacagtgatggcaactgtgattactgcacaaactccctggagtccagggtctctgccaggaactgcttcccttgacagaaagcaggtgccaagaacagggaaaggggcaggaaaacagagctccaagg

SEQ ID NO: 901201 - DNA, 448 bp, Homo sapiens
atatctgaaattgggcatgcctacttttcttccaggtccctggcgtgaggagccgaatcaatctagaagttgagctgtgttttggggtgtttggggtgttttattgccattattatcttcagtgtgtcaaaaacttaacattctgatgatggattgttgtgaccttgggcttcatgcagggcctgagatgcttgaaagtatttcttagttttggttttcagtgtggcttgaatgactgtgacacggaaggggcactccagatgcctttgcatcttctttacaaccagtcagctgttgcttatcagttggtgctagaatagtggtaagagggaggtggggattctttgctctcatggttaagtcccagacccagttaagccctgtgagcctgggcyttatgggtatggctttctcagcatcctttctcctactttcataggatggcaaa

SEQ ID NO: 901202 - DNA, 630 bp, Homo sapiens
tgcttatcagcttaaggagaatttgggctgagatgatggggttttctaaatatacaatcatgtcatctgtaaacagggacaatttgacttcctcttttcctaattgaatactctttatttctttctcttgcctttttgccctggccagaacttccaacactatgttgaataggagtggtgagagagggcatctctgtcttgtgccagttttcaaagggaatgcttccagtttttgcccattcagtatgatattggctgtgggtgtctcaaaaatagctcttattattttgagatacaccccatcaatacccagtttattgagagttttcagcatgaagggctgtggaattttgtcaaaggccttttctgcatctgttgggataatcgtggtttttgtttttagttctgtttatatgatggattacatttattgatttgtgtatattgaactaggtttgcatcccagggatgaaacccacttgatcatggtggataagctttttgatgygctcctaaattcagtttgccagtgttttattgagaatttttgtatcgatgttcatcagggatattggtctaaaattctctttttttgtgtgtgtctcttccaggctttggtatcaggatgat

SEQ ID NO: 901203 - DNA, 630 bp, Homo sapiens
tgcttatcagcttaaggagaatttgggctgagatgatggggttttctaaatatacaatcatgtcatctgtaaacagggacaatttgacttcctcttttcctaattgaatactctttatttctttctcttgcctttttgccctggccagaacttccaacactatgttgaataggagtggtgagagagggcatctctgtcttgtgccagttttcaaagggaatgcttccagtttttgcccattcagtatgatattggctgtgggtgtctcaaaaatagctcttattattttgagatacaccccatcaatacccagtttattgagagttttcagcatgaagggctgtggaattttgtcaaaggccttttctgcatctgttgggataatcgtggtttttgtttttagttctgtttatatgatggattacatttattgatttgtgtatattgaactaggtttgcatcccagggatgaaacccacttgatcatggtggataagctttttgatgcgctcctaaattcagtttgccagtgttttattgagaatttttgyatcgatgttcatcagggatattggtctaaaattctctttttttgtgtgtgtctcttccaggctttggtatcaggatgat

SEQ ID NO: 901204 - DNA, 588 bp, Homo sapiens
gtagagtggcatacaattttaatcrcttcttgcacatcaagagttacatgttcagggaacatgtatcagcctcttctggctacctctcagacttacctggtgtcctgacactgatataatccaaaatttaaaaaaattaatagaatgtgatggaggagggcttttttatctaaagatactatgatggcttatggctttgagtaccatatttaatttgggagtactgattaatgtacctccagtttattaagaattgaagactgtttttctcttctgcaatggtaacattgattactactcttcttgttcttaggtaaatacattgcacacatctttacaatgattttatgacagcagtgatcaatctctgaaatgccagtttgaaaattaggaaacaatatttcaaaactatatttttcaagaaaaaagtgatagtgagaaatcagattattttaaccttacctgttaattctataacaatagttttcaattctggctgtgcattaaatttaacctttactctttacaggatctgggattttaaaaaattatagatgtctgcttttaagatttataaacatgacactt

SEQ ID NO: 901205 - DNA, 617 bp, Homo sapiens
aaactacaaaaaagactcataattttaataaattttgccttcttcatctcttctcaagaaaacaaatgcctctgctttattgggtgacatgatcataargagatgtaacagctctgatttgtattactgaatctcattttcctcatttgtgaaacacgagtttaaaaatccttttgaaggtcaaatgagaatatttgatattattgtgtaaactgtcaagtgctacacaaatattagtcatttttttccacaattgtttttagcatgtgtatgtcacatggttaacgtagcattctcataaaagaaaccttgaaatgtctctcctactcaatttttattttgcaactattttcagtcattattatgtatgatatgctttttaggggcatttgaattttaaagagaataagtaaaaactgaaaggagaaggacaatgaaattatgagattacagtcataataatttcattgattaatttttcatagaactatattatattgctcccaaaagattttccgagaaattaaaaaatgctgcaccaccatttgaaatggctgtacaactgctgcttaggttagagttaacttttttttaagcctgaaaatacagttatattt

SEQ ID NO: 901206 - DNA, 596 bp, Homo sapiens
gcaccaatctagaactttccagtggcataagccactaaattcctttgtttccttaggccaatttgagttgggttctgttaccctgaactgaaagtctctaaacaccaaaaaactgtggtggtgatgccaataagctaactgctcacaccagctctttatggcttcccagaggagcaagcaacctaatgctgtagactggctggtgagtaagtagctatgaagccatcggaatggcagagttccagcttggccattccaggtctaaagcttgagtcccgtcccaggagtcaaatattatcaatctgcatgtcacctgagttcttcctgggccatatccaaaagccaaatatcgggccctcaggctgggcagccaggccaagggggtattgtggacagtgcacgatggatagtcctggagctcaccgtggcagggccctgctctgtgccaaagtacttcccttgttcaagaaacaggtgacaggaattgttgccattgctttcagcaaacatcaaggaaaaaaawtgatctggacctagtgtcaagcagaaattcttagaagagggctagttttttcagtagggacctctctgaaagc

SEQ ID NO: 901207 - DNA, 587 bp, Homo sapiens
gacatcagatttataacaaagtttgcattctaaagaagttaggaaaaatagtcttttaaataactcgtgtgctttgattagttagtaaasatatttataggaatcagatatttataggaaaaaatataatcttgattcctatctttcctatctttcagcatacacaaaaattaattccaggtagattgtagctctaaatgtgaacagaaaaagaaatgaagtttctagaaaatatcataagagaataccttaatgacattaggttttaaaaagttttcttaaacagaaaacaaaagtataaaccatgaaggaacatgataaatggactatattaaaattgtgaacttgttttttttaatcaaaaagcatctttaagggagtacacagtcaaatcacagattatgagaagatatttcaattcttatgcctgacaaagggttccaatctggaatgtcgaaaatacttctaattcataatgaaaagacagacaatcccaaataaaaatgacaaaagacatggccttgaactttataaaacaggatagccaccaaacatttgaacaggtgctcaacctcattattcatgag

SEQ ID NO: 901208 - DNA, 563 bp, Homo sapiens
ataacccacagatgactcatctccactgtacttcctaactttcctcagatgccatctttaataaccatcaaaacacaatccctttgaatgaacggaggctttggaacctgtgcagtgcatacaaaggaagtatgtttaccagaaatatatcttcccagctgatctatacttatcctctttcatctttatccacatttcatacaaagaaaataggcattgctgttaccacagaaaagcatgaatgctacaattctcaaagattctgtgctttcaaagatagctctaaaagaaccctgacaggatataaagggttaactctctattgggttgggcagaaaagaaggtttatccaagggggtaagctcagccatcctccctcccttccatagacacatccaaccacgactccctcactggattacgctgcccagttcacagccaggggcatttccacagctgttaaacctgcatcaggaaacaaacggccttatttttagctttcagtggtttgtgtaaaaccccrtaataattaggcctcattactctgtgcagctccatgccac

SEQ ID NO: 901209 - DNA, 581 bp, Homo sapiens
tggggaatctgaaaatccagatcacaggagaaggatttaaccttacccagagctgaaatgaatttagggagctgcgcaaaatatgaaagtggaagcagcagcaggaaaagccttgtaggcattctaggtccccagctcaagcccagggaagccatccctgactatattccactggggcccttggagaaggcagccaccaaaattaaagaggggtcacagggtgaaagaagcttccaattgaaatttgggataatttcgactgggcatgaattttcttaagcagaatccagaagcaaataggaactgctggagacatgagtgcaagagtccactgccaatattgtgggcagatggggagggagaggcctaaaagctgtgcttgctttcttagcagggaagcttactgtctgggggaaggtctgagcggggcactgtggagcaaggcttcttgccaaccatgtaggaactgggtaaggcctttcattagtaactatcccccaattccctggcaaactatgacactgcagaggcagccataatcccytatggaacttaactgtattggtctgagagccaccccc

SEQ ID NO: 901210 - DNA, 616 bp, Homo sapiens
gtgatttcgaacttagattttaaaaaacaaatatgactcttttgaactgtgtgaacataggcacattgctggatctgagtaatttcatgtgctaagagggaataatagcatcagccttaatgctgcattattgcatttagcattatttctttctgaagatgaaagaagacagacatcattatatttaacaaagtgcctggcacatataaaatagtcaataaatgttatctatcattgctattattacctaatactgcgcatagtaagccctgaacctgttcctggcatgtggagccatgtactatgttcatgacattaaacaaagtagtagctatataatgaatatataaatgtgacttttattattacatccctgtagttttggcaagtagtttactaaaaggaagttccaattttgacttagcatggagtttgtttttatcctgggcatgttatctacccagcttaccttattcttcctttcttcgaaacaggaatcatgcttgttaattgactgggatgttgcaaggccttatatctgagaagtatatcatcaaggaatagagaagatgagkcttagagaggaaatggaagcccctgtcaattaggagaggca

SEQ ID NO: 901211 - DNA, 593 bp, Homo sapiens
ttcctggttgggtgctatttctctagaccacatagtatatatctcatatcatgtttcctcacaaatatcagaatatcctggcacttaaaagagatttttgtaaattcttatagctgatagaatgtatagtatatgacattcagtaattcacttattcatcatcgcaataagcatataacttacaatgctgcaggccctgaagtggatagtgttgaaatatttgaggcattcacagaggtatcactaccgaataattcttattaaataaatctctaggagcattattggatataaatgcgtaaatttttctaagagacctataattcttcatttgaaagggttttcagaagtcacactatccatttcctacctccaagcagagctgcatccaactttgatgactgcaatcatgtgtagtatcactgatctaagattatatatatagagagtatagtatcactgatatatagtattgtatcactgatctaagattatatatatatatatatatatatakagagagagagagagagagagagagaaagagagagagagagatttaatccacaccataattctaacagatagatgtt

SEQ ID NO: 901212 - DNA, 649 bp, Homo sapiens
acacatgtatacatgtgccatgctgttgtgctgcacccatcaactcgtcatttagcattagktatatctcctcatgctattcctcccccctctccccaccccacaacagtccccagagtatgatgtttcccttcctgtgtccatgtgttctctttgttcaattcccacctatgagtgagaatatgtggtgtttggttttttgtccttgtgatagtttactgagaatgatgatttccaatttcatccatgtacctacaaaggacatgaactcatcattttttatggcagcatagtattccatggtgtatatgtgccacattttcttaatccagtctatcattattggacatttgggttggttccaagtcttttctattgtgaatagtgctgcaataaacatacgtgtgcatgtgtcttcatagcagcatgatttatagtcctttgggtatatacccagtaatgggatggctgggtcaaatggaatttctagttctagatccctgaggaatcgccacactgacttccacaatggttgaacaagtttacagtcccaccaacagtgtaaaagtgttcctacttctccacattctctccagcacctgttgtttcctgactttttaatgattgccattctaactggtgtgagatg

SEQ ID NO: 901213 - DNA, 595 bp, Homo sapiens
ctttcattttgttgattctttcytttgctgtgtagaaactttttagtttgatgtggtcccacttgtttacttttgcatttgttacccgtgctttttgggtcatatccccaaaatcattgctaagatgaatgtcaggaagattttttccctgtgttttattgtatattcttgtatttgtagataatattttgcatatttatggagtacatgtgagtgtttgttatgtgtatagaatgtgtaataatcaagtcagggtatttggggtatccatcaccttgaatatttatcatttctctatgttggtatcatttcaagtcctctcttctagttattttaaaatatacaaaatattcttaagtatggtcacctcagtctgctatcaaacataagaacttatttcttctatctgtgtttgtacccattaaccaagctctctcattccccaccctaccccacccactcaccttttccattctctggtatctgtcattctgttccctaggcccacaggatcaaggtttttagccccgacatatgaatgaggacgtgcagtatttggctttctgtggctggtttattcacttaacataatgat

SEQ ID NO: 901214 - DNA, 610 bp, Homo sapiens
actgtgccttctttctttgggggtggattcagcttctctatcttcatccttagagggctgcatagaggttttacacttttgcttttagttgaagattctgatagagatgaaaggcaagagaaaagaggaaatgggccactgtatgaccaaaagtggtgggcaccagcaataaagttactaacatgatttaattggaccaaataatttccttgcttctggtaaaattcatttttttctttgactgtggataagaagggcctgtctgtctgtttataaatgtagttaaggaaaacttccacatttctggaaaaaccccagctacaagtcaaaactaatcgaaggacatcaacatgagatttcctgtgacttggcacagtgatgtgtattccctagaggcctgttatgtttgaattaacttaatcatgctttataaaaataccatataattttcatatgtgataatctggcagcattaaaaatattaccgtatattttaagctaataaatctcttaggctgataataaaaatcagcctcttatacaatgattgataaaaccacaaataktatttcaataatcattaaaagacaaagtattaagatgattttcc

SEQ ID NO: 901215 - DNA, 623 bp, Homo sapiens
accaatactacataccatgctcttggatcagaagaattaacagcatttaaaattgccatactgcccaaagcaatctacagattcaatgtaatctctgtcaaaataccaacatcatttttcatagaattagaaaaaaaaattctgaaattcatatggaaccaaaaaggagtcaaattggctaaatttcttatgcctgaaatacaatctatactcttccttggcaccaggacactatattgatactttagaaaatgtgtgtgtaaatcacaaaagaattttgatcaatttgttatgagactgcacaagatagcagtcagacaggctccttgctctgaaaatcatctaccaaaaagattgacatggtcaacatttttaaaagtagttttaaaaaaggtatttttactgtcttgtctcctgtggaataagtgatttatatgatgtagtgtgggagatttaaacattcactgttcctacaatttgtgcacattaaaatatacactgcaaartcaggcagagttctgtagagagaatactaagttggtgagcttcaagaacgttgtgtttctatagcaccagagctaaccaccacaaatttctcaataaaataataaatctgttgaagc

SEQ ID NO: 901216 - DNA, 605 bp, Homo sapiens
tcaagttcctgttagagagagaaattgtgccaaatcttcagaggaatgctatattcaattggaggggacagagggaagacagagaggaaagagagagaaggagataaaataaagatgtgttaaagtcatggatgctgtttactgtaaggccctaaaactaacagggtttaagtaatcagaacattttgtttcatacattgagtattctcatataatattgtattttacttttcttctggtttgaaaattaacttctcatattctttataattttatggagataaatgtcaagcatcttttttttttttttttgggttgttgtttttattttggtttcctgggagtgatttcaagtttactgtttttttaacttaatgaaaataaatgctaatgtgtgtgtgtttgtgtgtatgtgtatatatgtatatatatatagcttttatcacagctatctatatgttttatctaagtaccacttacacctatcacaacattattcacagtcatttgatttatttatttttatttttctttctttattttttttgagacggagtctcgctctgtcacccaggcgggagtacrgtggcgagatcttggctcac

SEQ ID NO: 901217 - DNA, 669 bp, Homo sapiens
ttgacaaaatccagcatcccttcatgattaaaaccctcagcaaaatctatataaaagggacataccttaaggtaataaaagccatctatgacaaacccacagataacattatactgaatggggaaaagttgaaagcatcccccctgagaactggaacaagacaagaatgtccactttcgccacttctattcaacatagtactggaagtcctagccagagaaatcagacactagaaataaataaagggcatcctaagcagtaaagaggaagtcaaactgttgctgtttgctgatgacatgatcatacacctagaaaaccccaaagtctcatccaaaaagctcctagaactgggaaattaattcagcaaagtttctggatataaaattaatgttaccaaatcagtagccctgctataaaccaacatctccatttattgggtagaatgttctgtaaatatctgttaagtccacttgttctaaggtatagttcaagttcattgtttctttattggctgtctgtcttgatgacctgtctagtgctatcagtggagtattgaagcactccactcttactgagttgctctatctcatttcttaggtctagcagcaattgttttataaatttgggagctccactgttaggtacrtatatatttagggttgtgatatt

SEQ ID NO: 901218 - DNA, 656 bp, Homo sapiens
cccatcacctaggtattaagctcaccatccattagctactcttcctgatgctcttcctccccctgccccacctgacaggccccagtgtgtgttcgtcycctgatgtgtccatgtgttctcatcgttcagctcccacttacaaatgagaaaatgtggtgtttggttttccgtttctgtgttagtttgctgaggataacggctttcagctccatccatgtgcctgcaaaggatatgatctcattcctttttatgggtgcatagtaatccatggtgtatatgtaccacattttctttatccagtctatcattgatgggcatttgggttgattctatgtcttccctattgggactagtgctgcaatgaacatacgtatgcacctatctttgtaacagaatgatttatattcctttgagtatatgcccagtaatgtgattgctggatcaaatggtatttctgcttctagatctttgagaaattgccacactaccttccacaatggttgaactaatttgccttcccaccaacagtgtaaaagcagtcctttttctccacatcctcgccagcgtctgttgttccctgactttttaataatcaccattctcactggaatgaaatggtatctcattgtggttttgacttgcatttctctaatgat

SEQ ID NO: 901219 - DNA, 615 bp, Homo sapiens
gcgtagatcttacagggctgactttgaaagtctcagactccaagagctattcatgataagcctagggagaagmagcagaaaataaaatgttgcctgtggaagtggtgcactctcccagtcggcagggggcgtacccgtgccgggagcaatctcaaggaagactattcacatatttctaaaattcactgtaccatgacaactttcacagtgattgatagaaacagaatttttcatgctacttaattatttaaatacacaatgttaagtgtgaaaactcagagaaaaagaaaaagattcctccatttttgacatgaaggtaaaaatatcatcttacaagtttagattcagtcttttgtggcattcagataggaaatcttagtaagattcttagtaaggcttattctagctagcttgccacgtgtaagtgggtagcactgaaatattattgatcttgtttgggtttctgtttctgtatgttgttaaaaaattatacagtttggattggtaatctttgtgtttcctttcctcaataaaactatacgacttcatgttcatttatatttgtattatccaaacagaagagagactacgataatgtcagtttcaaaaaggaag

SEQ ID NO: 901220 - DNA, 615 bp, Homo sapiens
gcgtagatcttacagggctgactttgaaagtctcagactccaagagctattcatgataagcctagggagaagcagcagaaaataaaatgttgcctgtggaagtggtgcactctcccagtcggcagggggcgtacccgtgccgggagcaatctcaaggaagactattcacatatttctaaaattcactgtaccatgacaactttcacagtgattgatagaaacagaatttttcatgctacttaattatttaaatacacaatgttaagtgtgaaaactcagagaaaaagaaaaagattcctccatttttgacatgaaggtaaaaatatcatcttacaagtttagattcagtcttttgtggcattcagataggaaatcttagtaagattcttagtaaggcttattctagctagcttgccacgtgtaagtgggtagcactgaaatattattgatcttgtttgggtttctgtttctgtatgttgttaaaaaattatacagtttggattggtaatctttgtgtttcctttcctcaataaaactatacgacttcatgttcatttatatttgtattatccaaacagaagagagactaygataatgtcagtttcaaaaaggaag

SEQ ID NO: 901221 - DNA, 655 bp, Homo sapiens
aaaaaggatgagttcatatcctttgtagggacatggatgaagctggaaaccattgttctcagcaaactatttcaaggacagaaaaccaaacaccgcatrttctcactcataggtgggaactgaacaatgagaacacctggacacaggaaggggaatatcacacactggggcctgttgttgggtggcggtagtgggcaggatagcattaggagttatacctaatgtaaatgaagagttaatgggtgcagcacaccaacatggcacatgtatacatatgtaacaaacctgcatgttgtgcacatgtaccctagaacttaaagaataataataataataaaagaaaatgtggatatttgattcccctgaattatcaaaatgtaaacactgattagaagtatgcttactctgaataaaaacaaacatactggtatcaatgatttaatcttttcagctcttccctaatttcccatttttctaaaacatccacttttaattgcaatcttgcaattaataatcttaaattgagcttattgattatcagcaggaattaaaaacaaaaattagtcaccagagtctggatgaacatagagctatctcctaataccctagtggatatattggtgaattctgacagctagaaaaatcatcattaaac

SEQ ID NO: 901222 - DNA, 574 bp, Homo sapiens
atagatatagatatakatatagatatagatacacacatatacatatatacacacacacatatatacacacatacatgtattcatatatacatgtatttttgtgtgagatatatatataaaaatgtatagatctgtacaatatgtataaatatgtggagtataaacatatacataacacataatatagtctagatccctctttatgaacattactcctaatgaagattaattcttcctagtgtggccttcaaatgccattattgtaagaaaactttagtactacagttacactgtaatgttataacactgagactttgttttaatgaggctcttcaaataaagagcactttctgttgcagtaggaatgttctaatcaattgccaattggtctgtacgaaagctgctttctaagtgaagactgttcattaccatattactacagcatatactttatagaggctatcttcatggtagccccatctcacatgatgtgtctaatatactcataatttcagatacatgaacacaaaagcatatttgtgcatcctggttttgtttatggcaattccttgga

SEQ ID NO: 901223 - DNA, 647 bp, Homo sapiens
accaaaaagtcaaagaacaagtattggtgaagatgcaraaaaaagggaaccctcttacactgttaatgagaatgtaaattagtaaagccattatggaaaacatcatggatgttcttcataaaattaaatatgaaacttaccatatgatttagctaacccactactaggtatatactcaaagcaaatgaaattttcaccttgtaaatacatcttcactcccacattcattgtagcattattcacaacagcccatctatggactcaccctaaatgttcattggtggatgagtaaagaaaatgcagtatgtatacacaatggaaaactattcagccttaaaaaagaaaatgaaactcttgtcatccgtaacaatttggataaacccagtgaacattatgttaagtgaaataaattaggcacagaaagacaatactgcgtgatcttaattacatgtgtaatctaagaatattggactcatagaaacagaaagtaaaatgatggtcaccagaggctggcggaaagaaggtgttaaggaggtgttgttggtcaaaggatacaaaattttagttagaaaaaatatattgaaaagttatattgtatatcatgatgactaccattaataatattataatggtatacttgaaaattg

SEQ ID NO: 901224 - DNA, 624 bp, Homo sapiens
ttttttgtggctgtatagtattgcatggtatgtatgtaccacattttctttatccagtctatcattgatgagsatttaagttgattccatgtctttgctattgtggttagtgctgcaatgaacatatgcatgcattcatgtgtctttttaacagaataatgtatattcctttgggcatatacccaataatgggattgctgggtcaaatggtattttagtctttaggtctttgaggaattgccacactgtcttccacaatggttgagctaatttggattcccaccaacagtgtataaagcattccttttcctccatagctatacctacactatgtattatttgtttactcttaagattgagcataattgttttctacagcttccagttgcatacgagagttagtattgcagataaaattatataagttctataagaaaaccaatttgcggctgggtgcagtggctcacgcctgtaatcccagcactttgggaggccgaggcgggcggatcacgaggtcaggagacggagaccatcctggctaacacagggaaaccccgtctctgctaaaagtacaaaaaagaaaaaaagaaaaccaatttgcacagcaccctgctccatacattg

SEQ ID NO: 901225 - DNA, 534 bp, Homo sapiens
aagcatggttttactcctctttacagtccaaagggacttcatagactcactcatgtattcrgggttcattagctcttgtaaagttaatttcatatgtggatattttttcatatagatgtgtcgtaggggtatgattactggagagatctactccactaccttgctctgcccaaatccttcccctttccaacaagagtttgccaccttctagtattcttttttcttaaccaaactaagtttagccttttaatccttcaccctcctccacttcaaatgccattgcttctttgtatgcttattgtattttccatgctatatgactttcagctggttatttacagtatgtaagttttaatatcctgtaaaagggggacaataatggcatccatttgatagggatgttaaagatattaaatgacactgtccatgttaaataactttttgagatatattgagatgtttctgtacttccttgttctggccttcttgttgaaccagaggaatctattgccatgaaaagcaataaaactgtta

SEQ ID NO: 901226 - DNA, 645 bp, Homo sapiens
gttttttctttattattttcccaggtaggttttccaaacttttagatttctcttctttctcaggaatgccaattattcttaagtttggtcatttaacataatctcaaacttcctggaggckttataattttcttattcttttttgtctttgttggattgagttaattcaaaaatcttgtcttcaagctctgatgtttcttctgcttgtttgattctgtggctgagacattttagtgcattttgcattgctataagtttgtccttgatttccagaagttctgattgtttttcatttatgctatctatcactgaagatttcttccttcatattttgtgatatggtttggctgtgtcctcacccaaatcgcaacttgaattgtatctcccagaattttcatgtgttgtgggagtgactgaggggtaggtaattgaatcatgcgggccgatctttccagatctcttctcgtgataatgaataagtctcatgagatctgatggatttatcatgggtttccacttttgcttcttcctgattttctcttgccgccacaacataagaagtgcccttcacctccagccatgattttgaggcctccccagtcatgtggaaatgtaagtcaaattaaacctctttttgttcccagt

SEQ ID NO: 901227 - DNA, 621 bp, Homo sapiens
aaactgaaagaaggagcatgctttcaaaaagagttttcccagcctggacagtcacatatctaaccaagatgattaaacccacattcagtactttccccaaaggtctgtaaatgtcggtataagttccataaactgaaatacattgctgtaaggttaagagaatagcattgttaacgatgccccttagtgcacttacaatttccttctaagagttattggctgagggacattcccaagccatatggacatatattccctagtcattacggaaattccaatgtgagcactggtattctcaaatcttactgtgggctgcatgaggggcatagaatgtcctcagtttgcctttttttaaaaaaaaaatcatcttcaaagaggaccaatgtggcatacaaaatgaacttcttttaatgccaaaatttcttgggaatggttctgtactacgtttacatttattttccatttaggctggattattaggtcttttaagttgccgtcattcaagacatttttataactttgtgccaggtggctgctcctggaaaactcttggtcccactttacaccttaatatgcaaattccaatcatcaagatcytcaagcagtaagaagaatcagctc

SEQ ID NO: 901228 - DNA, 654 bp, Homo sapiens
gaattgaagatacagagttcatgaatgttcagtttgctcagagtaccaggcaaagttaatgagagaataagaaagcctattctayagatatttcagtcttttggttgacagggatactgggaaagatggtaaattttaaagccaagaatttccatcccaaagtactgatttattgtaatgattaaatacccctagaaacctaaatgatctcaagaattaatgaatggcatgactagcatcaaaaacacaaaataaattagcaggattcaaaagacaatattcttattgctcagtaacctggaaaacagagttcttagaggcaatagccagagttcccaagcatagtctctgccccatgtgtcctaatactgaaattacctataaagtaatgttttacgtttcattgagtaaaaatagaaataattcttatctgatatagacatagaatcagacctactatggaaaaaaattacagtttatcattaattgtatctcatcacatttaccatccacacttagagctctccaaagttcttcacatgttttgaatagtcctatcaactgacatgttaagtggatctgaaacactaaagtcacatataaagcttgtttttaacacctctgtacggtgtgacccaggactcatttatttat

SEQ ID NO: 901229 - DNA, 612 bp, Homo sapiens
taggatggggggttggtggagaaagagagagagggagggagggggagagagggagagagccaagaaagtcaactggtgaatggcagaaagaggatgggggaacaagcaattcttcygctatttgctgtctagctcaacatagtcaactagtataatccagctagttgtttctgctgcctaggaaggttattcgggttttccagtgggcactaccttgattatgtgatcatccatagtccagagtctcactctcatcttggcaaatggggaaacataattgaatcatgacacccagaaatggtcaggctcttattcacttgctcaactttatctactataaaatttatataccacttaatatataggggaggtgatgataattcctttccagggattcagatacacaattccataatttaagacatcctattaattatatcaaaatccatagaaagccaaattaacttccagattgcttggtaactatggaatttcagcaaaagaacctttggaaggcctggtcaatttctttttaaagaaggctctcaatttgcttttattgtatacacacataccatcttgtgtatcttctttatagcacttgatctcaat

SEQ ID NO: 901230 - DNA, 612 bp, Homo sapiens
taggatggggggttggtggagaaagagagagagggagggagggggagagagggagagagccaagaaagtcaactggtgaatggcagaaagaggatgggggaacaagcaattcttctgctatttgctgtctagctcaacatagtcaactagtataatccagctagttgtttctgctgcctaggaaggttattcgggttttccagtgggcactaccttgattatgtgatcatccatagtccagagtctcactctcatcttggcaaatggggaaacataattgaatcatgacacccagaaatggtcaggctcttattcacttgctcaactttatctactataaaatttatataccacttaatatataggggaggtgatgataattcctttccagggattcagatacacaattccataatttaagacatcctattaattatatcaaaatccatagaaagccaaattaacttccagattgcttggtaactatggaatttcagcaaaagaacctttggaaggcctggycaatttctttttaaagaaggctctcaatttgcttttattgtatacacacataccatcttgtgtatcttctttatagcacttgatctcaat

SEQ ID NO: 901231 - DNA, 629 bp, Homo sapiens
acatggacacagggaggggaacatcacaccccggggcctgtctgggggtaggggggtaggggagggatagcattaggagaaatatctaatgtagatgacaggttgatgggtgcagcaaaccaccatggcacrtgtatacctatgtaacaaacctgcacattctgcacatgtatcccagaacttaaagtatatttttaaaaaaaaggaatgaaatactgacatatgctacaacatggttgaaacttcaaaatattatgtcaagtgaaagaaaccaatcacaaaaggttacatattgtattgttctatctatatgaagtgtccagaatagaccaattccaagatacagaaagtaggttaaaatgtccggaaattgagtcactctaaagagacataaaggagattgcctgggactgtgggtcaggtgtgagactggagaatgaggagtgactcttaaagtgtattggtttcttttttggagtgctgaaaatgtgttaaaatttaaaaaaagcaatgacagaaataaacacagacacatacacacacacacacacacacacgtacatacacacactaccagatgcctgggccacactgcagagctgcagattcctaatatatagagatatatt

SEQ ID NO: 901232 - DNA, 538 bp, Homo sapiens
gggctacaggccccatgcaagtctgaaatccacaggggcagtcaaatcttaaagctccaaaatgatctccttygactccatgtctcatgtccaggtcatgctgatgcaagaggtgggctctcatggccttgggcagctccacccctgtgactttgcagggtacagccagcctcctggctgccctcacagtgtggcattgagtgtctgcagcttttccaggtacagagaacaggaaggctcatgggattcactaggtcccaagtagtgcaaaagctgttggtggacctatcattctgggatctggagaacagtggccctcttctcacagctctactaggcagtgccctggtggggactctgtgtgggaactccaaccccatatttcccttctgcactgccttagcagaagttctccatgagggtttcacccctgcagaaaacttctgcctggacatccaggtattctcatatatcctctgaaatctaagtagaggttcccaaacctttattcttgacttctatgcaccaaaaggcccaa

SEQ ID NO: 901233 - DNA, 635 bp, Homo sapiens
ggtggtggggtcttgctctgttgcccaggctagggtgcaatggcgtgatcttggctcattgcaacttctgcctcctgggttcaagtgattctcctgcctcagcctcccaaacagctgggattacaggygtgcaccatcacgcccagctaatttttgtattctcagtagagaaggggtttgccaggctggtcttgaactcctgacctcaggtgacccactcaccttggcctcccaaagtgctgggattacaggcataagccaccgcacccagccaacttttagacttctaacgtgtatttttttcctactgagtttaagtacacacacgcacacagacttatatgtacatagatgttgacaacagacatacagaaacatatgcatagattctgaagagtagtctgttggtggttttatataatacaaatatattttcctataatttgatttttaattttgttatggtgtttgtaatacagtttttaaatttcttgatttatccttcccctcatagtttgtggtttttatgccacacttgagattttttcctcaatcccaatgctataaatctatgctcgcatattttttcatttagaaaattttacactttaccatttcatatttaggtcatcaat

SEQ ID NO: 901234 - DNA, 666 bp, Homo sapiens
ttttatctcccacactaatcggaaactattagacatcgcagagtgtaactactttatttttcagttagaaaagtgaggatcactgaagttaagtgactttctcatgatcattccactagttagtggaaggaaaggaaattatcaagtggtggatacttttatagaagattttctgaacacacttacacacatgtatatatatgacctatttttcgttattcaaaacatggttttattttctgcatttaatttttgagcaaataggtcttcagaaacattctgttgctgggtttgaaaaacacatctgattctaagatgaaaccctttttaccatcccacatacttgacaagagacagtctagattcaaatgcatgtcttttgattcccaattctgacagtattttaaatgtggacactgccttgatacattttacttctcaaataaacctacagaggtgatatatccctaaagaagcaatctggtcaatggaatatggatacatggtgtatttttacatttttgctactggcggaagtaaggactgagtttggtctcatgccttcaaaagctctagtcaaacaacagacaactccttccacattagcaggttatatttaaaagwaaacgtttgagatccactttttaaatttatctattaaaaata

SEQ ID NO: 901235 - DNA, 649 bp, Homo sapiens
ttacaattttgaagtgtgcctttgcactatagatgtctgaggctacaatatacaattattttttaagggataaaacttctcacactttaacattgaattttgaaaatgaaaattgatatttttttwaaaaaatgagggttcattttaaaagaattatttgaggcatgcaatttaaaaaaaaaaaagttgtttccccttaaaatatggtctggtttgtcacagctcatctttagggacaagtatcgcagcccgaagctgaacggtgggctttgctgaaccaggtggtctttatttttacagactcacgtccagtttgctgtctgtcatcacaggacttaatgttgagaactgacaggtttcaaatattgatggggaaatgctggtggattcagaaacttggaacttgaccaaaatatccaaatctcacaagtctataacatcagcctggaaagcaggctgttttataaaatgtccttggtcgccctattttcacatggaataaaataaaatgccacaggagaaaactgcttctttgatattttaacacatgaattttttggagtttcagcacctggatttacagcctagtttaaaacaggtaatacatctctgcaagagagacagaatgagtttcttcaaatgtatttga

SEQ ID NO: 901236 - DNA, 611 bp, Homo sapiens
aggtactacatgagaatatcaaccccaagacacataatcatcagattttccaagatcaaaatgaaggaaaaaatgttaagggcagccagaragaaaggccaggcaacctacaaagggaagcccatcaggctaacagcagatatctcaagcagaaactctataagccagaagagactggggaccaatattcaacattcttaaagaaaagaatttttaacccagaatttcatatccacccaaactaagcttcataagtgaaggagaaataaaatcctttccaggcaagcaaatgctgagggatttttaccaccaggcctgccttggaggagttcctgaaagatgcagtaaatatcgaaaggaaaaaccagtaccagccactgcaaacatacaccaaaatataaagaccaatgacactatgaagaaacagcatcaactaatgtgcaaaataaccagatagcatcatgatgacaggatcaaattcacacataacaatactaaccttaaatgtaaaggagctaaattccccaattaaaagacacagactggcaaattggataaagaggcaagacccatcgaggtgctgtattcaggagacccatctcatgtgcaga

SEQ ID NO: 901237 - DNA, 550 bp, Homo sapiens
ccactatatgtgattcaatgctaagcaccttgaattaccactctttgtgtgcatttcagccccagcaacaasagtttaagcagtctgaggtcaggaacttgtaacctgctatattcctcactgctacaaaatttgtcaggtgtgcaatacatgctaatgaaataaaatagaaaacatttctatcagaagaggtcagaaattcaaatgactacagaaaccaggcaggtagcataattatatgaagtaagctgggtttcatagaaatcttgatgtcagggacatgatggggttgggagaatgttggcagggattatagtcatctgaatattcattgctgtgtaaagagacaaccactatgccaccctagccaaattattacataggaatagaggcccgggttgccaaattttccaaaattttgagagaaactggatatttggatctttatgtgaattaaactgattttcatatattgatttaactcatataaattttgtgtggactaagcaaagcaagtcagtggccttgctgcagcctaaaagttgcctaa

SEQ ID NO: 901238 - DNA, 649 bp, Homo sapiens
atcctgatttgcccgagactgagaggtttcccaggttgcagaattttcactcttaacaccaggagactcctgggcaaaccagaatggttggtcaccttatgcagcagcaggtcacttacttactaactggttatggaaaaggcatggctaggcctactgcactaaagctttgaaagcaactccacatggcagcaagcatttctttctgtgttatagggtatcttacttttttggagacagggtcttgctctgtcacccaggctggagtgcagtgatacaactatagctcactgcagcttcgaactcccgggctcaaaggagcctcccaccttagcctcccaagtagctaggatgacaggtgcctgccaccatgtctggctaattttttaatttaaaaaattttaaattttggggtctcactatgtttccagggtgatctcaaactcctggactcaggcgaccctccttcctcaccttcccaaagtgctgggattacaggcatgagttgccatgtccagccttatagggtatttttcattgtactgatttagatattcaaccctctccacycatccttagacctgagagatactcactccatatgatctgctaaaccatccaaatgtgaacatcctcccgtgcccctgag

SEQ ID NO: 901239 - DNA, 503 bp, Homo sapiens
agatgttgataattaggcagcctatctatgtgtggaggcaaggaatatatgggaaatctctgtaccttctgtttaattttgctgtgaacctaaaactaccctaaaaatactgtctattaaaaaacagtttggtgtatctatgtgaataggtataaaatgatatctatgaaataccctcttaaagagaaaaacaagtttaaaagtacattatgagtctatttattatttttaaaacaccctcaaatatatacatatttttaaaatatatagaaaccacacacacacacacacacacacacacacacacacacacacacacacacacagtgcctagaaaaaaaatcttgaaagatatatacatcaaaaaattactagtacccwaattgtggccttcaaatatcatttcacactaaaagagattagattgccctggacaaatgactgatacctacttggggaagtaatacacaaaatgagcctggacagcttgtcgtaccaaatag

SEQ ID NO: 901240 - DNA, 681 bp, Homo sapiens
tactatcttcccaactacattgtaaagttgtcttgaaggcgcaatcaggctcaaaagttacttgctttcttaatgaaaaggaggtaatccttgaaatatgaatatagggaaaactggaaagaatactgaacttaaaggcaagacctaaattggaactcagattccaatactagctatgtgatgatgggtacattatttaacttatctgagtctcctctccctacctgtaaaatgatacaacacttatttcacagcatttataaacagaaaagcatccaacatagtatctaatacttaacaggtgttcaatgaatagttacatagaaattttttaagcagcctatttctaccatatatatgtgttatttttatgaataattttaagttaggaaactctactatttaccaatagtttgccactggactctaaaattcttgtgtataaaatgtggataatataacccgttctgactactttacaggatgttgtagggctaaaaataagaaaatatattcaagcaatgtgaaaagctggtggtaactcatttatttaaaaatattatggtagcagttgtagtgttataatttgaatgataaaactaaaagtcacaaatgtccaaaaacaggattatctaaatatataaataatggtacatccwtacagttagataccatacagtc

SEQ ID NO: 901241 - DNA, 647 bp, Homo sapiens
gtctgcagagatagtttgacttcctctcttcttctttggatgccttttatttctttctcttgcctgattgctctggctaggacttctaatacaatgttgaataggaatggtgaaagtggacatcctygtcttgttctggttctcaaggggaatgctttcagcttttgcccattcagtatgatgttgactgtgggtttatcatagatggctcttattatattgaggtatgttccttcaatgcctagttgttaaggatttttttaacatgaaaggatgctgaattgtatcaaaagccttgtctgcatctattgaggtgattgtgtgattgttgtttttagttctgattatgtcatggatcacatttgttgatttgcacatgttgaaccaaccttacatcccagagataaaacctacttgattgtgatggattagcattttgatgtgctgctggactcagtttgctagtattttgttgaggatttttgcatcaatttttatcaaggataatgacctgaatttttctttttctgttgcatcactgccaggttttgttatcaggatgatcctgacctcatagaatgagttaggaaggagtcctcctcctcaatttttggaatagtttcagtaggaatggtaccagctcttct

SEQ ID NO: 901242 - DNA, 560 bp, Homo sapiens
ttcaccaaggttgaaatgaagggaaaaatgttaaggggcagccagagagaaaggtcggattacccacaaagggaagcccatcagactaacagtggatctctctgcagaaactctacaaaacagaagagagtgggagccaatattcaacattctcaaagaaaagaattttcaacccagaatttcatatccagccaaactaagcttcataagcaaaagagaaataaaatcctatacagacaagcaaatgctgagagattttgtcaccaccaggcctgccttacaagagctcctgaaagaagcactaaacatggaaaggaatgaccagtaccagccatggcaaaaacatgccaaattgtaaagaccattgacactatgaagaaattgcatcaactaacaggcaaaataacaaggtagcatcagaaagacaggatcaaattcacacataaaaatatttacrtttaatgtaaacgggttaaatgccccaattaaaagacacagactggcaaattgtatagagtcaagacccatcagtgtgctgtattcaggagacccatctcacg

SEQ ID NO: 901243 - DNA, 638 bp, Homo sapiens
gcaaatgctgagagattttgtcaccaccaggcctgccttacaagagctcctgaaagaagcactaaacatggaaaggaatgaccagtaccagccatggcaaaaacatgccaaattgtaaagaccattgacactatgaagaaattgcatcaactaacaggcaaaataacaaggtagcatcagaaagacaggatcaaattcacacataaaaatatttacatttaatgtaaacgggttaaatgccccaattaaaagacacagactggcaaattgtatagagtcaagacccatcagtgtgctgtattcaggagacccatctcacgtgcagagacacaaatagattcaaaataaagggatggaggactatttaccaagcaagtggaaagcaacaacaacaaaaaaagcaggagttgcaatcctggtctctgagaaaacagactttaaaacaacaaagatcaaaagagacaaagaaggccattgtgtaatggtaaaggggtcaatgcaacaagaagagctaagtatcctaaatgtatatgcacccaatacagaagcacccagattcataaagcaagwtcttagagacctacaaagaaacgtaagctcccacacaataatagtgggagactttaaacaccccactg

SEQ ID NO: 901244 - DNA, 626 bp, Homo sapiens
aagtcattaataaacaaattcacacaagaagaaatctaaatggcaattaaatatatggtattttttaaaaaatcttccatcgatctagtagttaaaaaattaaatatttaaatattatcgcctctctaattcaaagggggttaaatatatcatattggttgttggtatgatactgctgataggcaaatacattgataagaatttgtgaaaaacaatttatcaatacctatcaagcgtcctaaagtgtttatgcccttttgttaaataataccattttcagaaatctgtactagagataattcttatatatcaaggaatatttttgtgaccaaaaaaatagtattaactggatgcttatgctggtgccaagtatggtgctaaatccgccccataaattaggagacttgggttactgccaacactactcagcctgaagatactaggagggtcaggatcaacacccaacagtgcaattccacagcccatatttttaagcaccacatcacactgtagcattgcaacctggtttctaattgttgagaaaaaaaaaattaatgattaaaaaatcagtgtgagacaattattcaaaatgaaaatgaragaaaaaaacctagaaatgacctgaa

SEQ ID NO: 901245 - DNA, 573 bp, Homo sapiens
ttacacaacaaatgcaacatggcttctatttccatcacttcaactacccactttaataggatatactacacctgtacttgaacaaaactcagtcgtaacaggatttttcagctttatttgaaatctcttgtcttctcatggacaaaattcctctcccttgatttaatccaatgactatctgcaaatctaatagtgactaaatatacacattaaatatgtggttcttgtattggtaaatctccaaaagaaagttagaaaaaattaactatatatggatctttaaaggattatgatagtctgagttcaacgtatcatagcttatcatttaaaatgttttaaaaacttgcaagatgtagagtgaaagggactagaattagtcaaataacatacaaaaaatctaagttttattagaaaaagtaatttgagtttctaaatcatatgagacaattagttcacaacacaaaagacatagatctactaaagatgttgattaaattgcctgattctgattgtctgcatatgtgaaaaacacaaaaagaaaatactctataaaraaagttaaaatatacatta

SEQ ID NO: 901246 - DNA, 672 bp, Homo sapiens
gctaagtatatgatattaagatttagattatggtcattctcacataaatgcaatgagtaaatattgccaaacttgatgagaattaatatccatgagtctttattgaaagcaaattctgtatgacatgttcaaaccagaaaaaattcaaaatattctggaataatctctgattcaatggtgaacattgaattccttcaaatatagcaaaaagaccaaagaaatgtgaagcaaataagtgtcagaactattgacaagttataattatgacataaatgatataaattggagatgaaattacttccatagcagaagtttagctaatggctaaaattaaaatgcgtggttaaaaataatgactaaaactatgcatacatatatcatactatttcttaatgttagagacatctatcagagaaaaaaactatataaagatatatatctaaaattcagtagagattagagttccatttcaatatctttcagctaaatcaaataaaattatatttaaaattttatttaaaaatccacaaatagtactaatccatgagtgtggataacccccaaaaaatggctatcacactggccstttgctcttcctggtggagggcagctgccccacatgacaaggcaaagggcccacttagctgttaacacctaagccatccacagatg

SEQ ID NO: 901247 - DNA, 648 bp, Homo sapiens
aataaaattcaacactcttcaagttaaaagccctcagtaaaaataagcattggaggaacatacctcaaaataataaaagccatctatgacaaaacgactgccaacataatatgtagtgggcaaaasttggaagcattccccttgaaaactggcacaagacaaggatgccctctctcacccctcttatttaacatggtactggaagtcctggctagagatatcaggcaaaggaaataaatatagggcatccaaatagaaagaggaaagtcaaactctccatgtctgcagatggcaagattctatgtctagaaaaccacaaagtctgcccaaaagcttcttgttctgagaaacaacttcagcaaagtctcaggacacaaaaccaaagttcaaaaaccagtataatttctacacaccaacatccttcatgttgagagccaaatcaggtacataatcccattcaaaattgacacaaaaagaataaaatacttaggaatacagctaaccaggtaggtggaagatctttacaatgagaaccacaaaacactcctcaaagaaatcagagaagacacaaacaagtggaaaaacatctcatgcttatggataagaatcagcgttgttaaaatggccatactctccacagcagtttac

SEQ ID NO: 901248 - DNA, 618 bp, Homo sapiens
ccttcagtgaaaatcttgaggttccttgttaaaacttaacgctaagttttaaaagctctagcaccttaacttttatctttctaactacattctattctatgtgtttttctggttgtaactgttgttcctaccagttagtggttggaaaagtaaatgaaatatttacacagactgtggaatgataagcgccaatacaaagaaactagaaagtggaagtctttataccttgctttggaggtaagcatttgtctgataaatgtctacatgttacttaaatggcagagatgtgactcctgattctttctcccatctctggctaattattgaaatctgtatgtctttgcatctgtgtaaataaggcaataaagtaatttaaaaatgtcctatatctaacttcttcaatgacatctaatttatctacatttttacatatcactgtagtttcttcatttttgtactataatatcctattacataaatatacaattaaaccaaatttattcatataccacatagaaaaaattcaaaaaagattccaatatcacagtttctttaccataaccaagtagagataatamaaagacccacctaattttttacttcatactatatatggac

SEQ ID NO: 901249 - DNA, 597 bp, Homo sapiens
ctgagccagttttatatattgcagatatcttcctacagtttatgatggttttctyattatcttttaatatcagataatgaatcgtagattttaaatttaatggaagtgaatatattaatcatactctttataatttttctttatgttcctgaggaaatccttttctactatgaaattaaaaaaaggatttttatgctgtcttaatagaagctatggttttgcttttactttaaacatataaatttgtttaaaattatttattttttacaaaaattactggacatggtggcatgtgcctgtggtcccagctactcaggaggctgaggtgggagaatggcttgaacccaggaggcagaggttgcagtgagctgagatggcgccactgcactccagcctgggcaacaagagtgaagctctgtctctaaaaataatgataataaaataaattattttttgtgtgtattttgcagagttgagtccatttctttgcatttttttcattttttccctccttccttcttccctgactccctctcagcctacctattttctttttttctttttctttttattatactttaagttttagggtacatg

SEQ ID NO: 901250 - DNA, 672 bp, Homo sapiens
aatagcttggaaaaattacaagtaaataaataaatacgcacacaagttggtacatttggatgttcatcacattggagttgttcaatgggaagtgagacagaaagttcagttctgtttaaaatttgatttcatacttaggtttgttgcatagatgaatgttggagaaacagttggaatatgtacctggcatatagtaaccagctgaaaaatgctgcttcacattatttttttttctgtcttatttttctggttgcaaatgtttaatctccatgtaattaatattggtgttataaaattatataatattggcctgagaagataataaccaatgtcagagccctttatataaggaactaataaaagtagtaattataaaaatgataataaagtaatatttgtcaagggaatgtgctagtactgtgaaaaattctttacatgctgatttcattgaatactgacctcaaccatatgagataagttctataatccttccattttagaggtgagaaaaccaatatgtagaaggcatacataatttttccaaggttacaaatatagtaaatattgtaacttgtaagcaaatccaggtttatgcccactctcgcctccaagctcttatctccaatgatgttatgcctcctcttrtcattgtttactaattacttcacatac

SEQ ID NO: 901251 - DNA, 641 bp, Homo sapiens
tgttgagtaggtttagggtgaagaggaatagaggggttggtcttgctgtttcagggtggcagaggtgggaagaaaattcctgtataagtggattcagacagttcatacctgtgcyatttaagggtaaactagtcttttccaccgtttatattgtgtttaacaaatatatctaattattcaacaaaataatcactgaaattagaattaatgggttaaatgtcacttatattttaaaacttctggtacatattttcttattgctccgtaatagtgttggacatcttacagctctgtgaccctaagtgatttattatatcctcagccctcagtcagttttttcttcatcttaaactgagatttaaaatagtagctatatcacaagatatgagactaaaataaaacaacacacacaaagaacttatgacagctcctaaggcataatactcaataaatattagctgttttatgaatactttgccttgaataatagtgtgtctgtacagcaccttctagctaatttaatagaaaaaaattaactcactctagttttaacttgtatttctctgattacaaaacatgtggatatatttttcattattagtcgactggaattactatatacaaaattttctaagccttta

SEQ ID NO: 901252 - DNA, 557 bp, Homo sapiens
gggtaatgacaggtatctcatggggttattgtgaaaatcaactgagttaatataagtaatacacttagaataggtcttgcctcataataaatgttcagtaaatgtttctgtataatataaacatctgcagatacacatatttggaacatgtgcagaggagatcaggtagcttattgcctaagttggcttccatatgagctgctgagaggggcctgctgcaatcggtaataattgttacctgcaggtcttgtgatcaaattattccttccaaggcaaggctctgtgtagtttactgtaattcagttgcatgacattctctccctagccaactatcgttctcaaattattctcatattggttcagaataatccgatttgacccttatttactgttgccgggaagattaaactaaagtctttggcagccaaaaatgcaagagctcagaccagtagtcctggacaaatccttgtcattcacagccgtagggaagatctgtaccctgcccaaggaacaccttggtaggcacttggccygtttccttgaatgctccgtgacta

SEQ ID NO: 901253 - DNA, 557 bp, Homo sapiens
gggtaatgacaggtatctcatggggttattgtgaaaatcaactgagttaatataagtaatacacttagaataggtcttgcctcataataaatgttcagtaaatgtttctgtataatataaacatctgcagatacacatatttggaacatgtgcagaggagatcaggtagcttattgcctaagttggcttccatatgagctgctgagaggggcctgctgcaatcggtaataattgttacctgcaggtcttgtgatcaaattattccttccaaggcaaggctctgtgtagtttactgtaattcagttgcatgacattctctccctagccaactatcgttctcaaattattctcatattggttcagaataatccgatttgacccttatttactgttgccgggaagattaaactaaagtctttggcagccaaaaatgcaagagctcagaccagtagtcctggacaaatccttgtcattcacagccgtagggaagatctgtaccctgcccaaggaacaccttggtaggcacttggcctrtttccttgaatgctccgtgacta

SEQ ID NO: 901254 - DNA, 593 bp, Homo sapiens
ggttcagctccatcatttcacaaataaagaagctgaaattcagataaattggttacataatcagttaatgaaagctaaaaggtataaccaacagagacttagagcccagaatttttttttttttctccataagtgccatctcctcagagtcagagagtgaaaacatagactgggcatggtggcttacatctgtgatctcagcactttgggaggctgaggcaggaggattgcttgagccccggagttcgagatcagtctgagcaacagagtgagatcctgcctctacaaaatatttttcaaaaattagccaggtgtggtggtgcacacccatagtccgaggggctcgggaggctgaggtaggaggattgcttgagcccaggaggtcgaggctgcagtgagtcgtgatcatgccactgcactccatcctgggcaacagagtgagacatgtccttaaaacaaaaacaccctagcagcaggacccatattactgatcttgtatttgtcatgttgctgcctctttttcttcctcttcttttttttttcttgattmctagtgtgttcaatttttcctcagaactaaactttcagggttt

SEQ ID NO: 901255 - DNA, 606 bp, Homo sapiens
tatcctgatgctctccttccccctgcttcctgaacaggccccaatgagtgttgttcccttccctgtttctatgtgttctcattgttcagctcctacttataagtgagaacattcggtgtttggttttctgttcctgtgttagtttgctgaggataatggcttctggctctatccatgtccctgcaaatgacaacatcttgttcctttttatgactgcataatatttcatggtgtatatgtaccacattttcttatccagtctatcattgatgggcatttgggttgattccatatctttgctatttggaatagtgctgcaatgcacatatgtgtgcatgtatctttacaatagcatgatttatattcctttgtgtatatacctaataatgggattgctgggtcaaatggtatttctggttctaggtctttgaggaatcaccccactgtcttccacaatgattgaactaatttacattyccaccaacagtgtaaaagcatttctttttctccacagcctctccagcatccattgtttcttgaatttttaataattgccattctgactggtgtgagatggtatctaattaaactaaaatgcttctgcac

SEQ ID NO: 901256 - DNA, 466 bp, Homo sapiens
ttccacttttgcatctttcttatttttctcttgttgccaccatgtaagaagtgcattttacctcctgccgtgattctgaggcctccccagccatatggaactgtaagcccaattaaacctctttttcctyccagtcttgggaatgtctttatcagcagcatgaaaacggactaatagagtaaattgttagtagtagagcggagcattgctgaaaagacacccaaaatgtggaagcgactttggaactgggtaacaggcagaggttggaacagtttggagggctcagtataagacaggaaaatttgggaaagtttggaatctcctagagacttgtcgaatggctttggccaaaatgctcttagcaatatagacaataaggtccaggctgaggtggtctcagatagagatgaggaatttgttgggaactgaagcaaaggtgattcttgttatgttttggcaaagagac

SEQ ID NO: 901257 - DNA, 614 bp, Homo sapiens
ctgataaatttgccacttacttgctgatttatagatttgtcttaaggaacasttacggaacactgcaagttcctgtggactgtcattgttggtagatggggttcggggtcaagaggctgcaaatcccaaggtaaggacagccaaagtggttgtcagccatgaccagagaaacatgggttttaaaggaccagaattaactacaaccttccccagtttttcatttgcttgaaaatcacagaaacacagctcttttcaatattgcctctcctagtcttttcttttgctttgtaatagaagcaagatcatatataactgatccgctttcttgtggtctgtctgctcataatcttagacttcattaattagcagccacattcaacaggcatgcagcatggctgagttgaaagagcacagaattgagaatcaagaaaattgggttcactaggaatttatccttcccaagtaagtaataaaggagatgtacaaagttttgctggaaggaagcctaacaatatgtgagcaggaataaaaagtcagaaatcacttaatatcccgcaaatagggaattctaatcagtcatgaagcacatgaagtacaatggctttaaagacaga

SEQ ID NO: 901258 - DNA, 452 bp, Homo sapiens
tcctgcacccaacatataggaatcaaggttacttaccaaagaggacttaggagctgatatgttattgtttgaaaaatctatcwttgattgacaggccaagagattgcatttctgcctgaataataagagtttaagttcacagaacactctcagaaatgatatcttatttgatcgacacaatgcctataaactaggtattaatagtattctccatctgatagatatttccaaataaaggattaaggaacttaccttatttcatttaaaccacataaaactgtgtaaagcagttgttattttctttcatacatcaggatttttgctaatagtgttggttaggagaaagacgagccaaaatgcctaggttccattcccagttttgccacttaatgactgtgtgatcttgagcaagttgcttaacttctctgtgcctgagtttctgtacatgtaaa

SEQ ID NO: 901259 - DNA, 638 bp, Homo sapiens
gacaatgttatgtgacatacatagttgtaacttgaatcccagattgtgaccataggtgtatagtccattttcacactgctataaagaatgacctgagactgggttatttataaagaaaagaggtttaattgattcacagttctgcatggctggggaggcctcaggaaacttacaatcatggaggaaggcaaaggggaatcaaagcacatcttgtatggcagcaggagagagaaagagagggagaaagtgctgtgcttttaaaccatcagatctcatgagaactcactcactatcaggagaacagcataggggaaaccgcccccatgatccaatcacctcccaccaggttcctccacaacactggggattacaatttgagatgaaatttgggtgcagacacagagtcacatcatattagtagggatcagaaaaaaaatgtttgaagaaataatgaccaaaatttttccaattttggtaaaaactataaacccacagatataatcttaatgattcccaagttcaataaacaaagcaaaccatgcaaatgcatgatacaatcaactttctgaaaaccaccaataaaaatamaaacctttaaagctgccagcaatacaaacgcattacatagaaaataaaga

SEQ ID NO: 901260 - DNA, 599 bp, Homo sapiens
tgaactgaatttatagagttttgattgtggtgacatatggaaagcaatttcacacagtgcctgagacatggtaaattttcaaaaagtgaatgtttataaaagttattatccttatgtttgacctataattgaagtcagatgttagaagacatggcatgatatacaatcttacaaccaaaaaaaaattttgaatatctaaaatcatgccacaatctcggtagcttacacttcttgtttttttttcccccttaggatttcctaatcaaataagcttgcacattaaaatatacactgatgaaaatgttatatttatagaacaaagttttaaacttcaaaattggaagtaaagattacacagtatacataccgtcaactcagcattccccaaagtgtacttggtgaaaatataatcctgcaaaatgccctttgaaaaaaactagtcctgtggtcaaataaacatggagaatattgcacrctgtatgtttctttgggggattcacaaaacaaatagtatcgtaaagagtcttagaagtcttgcagttaaaaacaacaacaaaaaaagtgtttcactttatttgaccttatgtttttcaaactta

SEQ ID NO: 901261 - DNA, 636 bp, Homo sapiens
ctcacttaaataaaaagttttaatktgttaggtaaaaaatgtagaagataagatgaacctatatttcatgataaagaatttgtcatagtaatttcattatattgaaacaaaactttgacttacatacaaaggagaggaattctaatgaaactgacacttcctgtttatttaattttctgtacttttgttcacatagaagacgatttaggagcctttctcataatgtaattttaaatactgttctgtcctcactatgaaaatatttctccctctcaactacatatacttagcattaagttttagttacatgattgatagtacgaataaataataaacacttcaaaagttatcacattatggcaagagaggagcataatatcaataaaaacaaaaacaataagaaaaagaataagggtgagcagaccctgatataaatttttgaaaccataaactacaaatccacaaatacagaagacttcctgaccatctgaagtaaatatatacgtatgtatatatatgcttatgaatataatagattatacttagtactagttattcatgacattttataaagaatttttacataaggagatcgttgagcttttattaaaggaatttatctaactctttgagagt

SEQ ID NO: 901262 - DNA, 626 bp, Homo sapiens
aattaggcactgtgtaggtcttcacatatgttattaatcatttcttttctgatgtaatgactctttacatctctctactgaagtactcagattcctgattagatcttccagtgaaacatgcagtcttggtttctggctggtcttttttccacatttcatatttgctttttatactggcaaacaaaagaactatgcattctttctttctttctttttgctcatctccctgaaagcctaaattccagccaagtctaagaggtaagttccaatgattgcccattttcctgagtctcatcctggctgcccttgccttccaaagtggaaggtaccaacatattacttgtcttttatttttattttttaatattggaaaaacagaaataaatacaggaactctgagcatcacttttctgttctcttcaaaggtagaaatgagacttgaactctttatgaatcttagatatatatatacacacacacacacacacacacacacacataacctttggttattcaaatcaaaggtgaaataggacattttcagacaaaagttgaaaaacttttccttggtctaactgagtcttactttgacatatatcttataaawcccaaactgatagcacacc

SEQ ID NO: 901263 - DNA, 621 bp, Homo sapiens
ctagttttcccagcaccatttactgaataggagatcctttccccattgcttgttttttttcaggttttttgaagatcagatggttgtagatgtgtggtatttctgaggtctctgttttgttccattggtctatatgtcttttttggtgccagtaccatgctgttttggttaccatagtcttgtagtatagtttgaagtcacgtagtgtgatgcctccagctttgttctttttgcttaggattgttttggctataccgggacttctttgattccatatgaaatttagaatagtttttcctgtttctgcaaagaatgccaatggtagttcaatgggaatagcattgaatctgtaaattactttgggcagtatggccattttcaggtattgattcttcctatccatgagcatgggatgtttttccatttgtttgtatcctctcttattccttgggcattggtttgtagttctccttgaagaggtccttcacatcccttgttacctgtattcttaggaattttattctctttgtaacgattatgaatgggagttcyttcatgatttggctctctgcttgtctacggttggtgtaaaggaatgcttatgatttttgcacattgatt

SEQ ID NO: 901264 - DNA, 616 bp, Homo sapiens
tttctgatgtgggcatttagtgctataaatttccctcttaacaatgctttagctgtgtcccagaaattctggtacattgtctctttgttctcattgttttcaaagaacttcttkatttctgccttaatttcattatttacctgggagtcatgtaggagcaggttgctcagtttccatgtagctgtgtggttttgagtgaatttcataatcctgagttataatttgactgcactgtggtctgagagactgtttgttatgatttcagttattttgcgttagctggggagtgttttacttccaattatgtggtcgattttagagtaagtgccaggtggcactgagaagaatgtatattctggtgatttgggatatagtgttctgtagacatctactgggtccacctcatccagagctgagttcaagtcctgaatatccttgttaattttctgtcttattgacctgtctaatactgacagtggggtgttatagtctcacactattattgtgtggaagtctaagtctctttgtacatctctaagaacttgttttatgaatctgggtgctcctctattaggtgcatatatatttaaaatatttagctcttcctgttgaattg

SEQ ID NO: 901265 - DNA, 670 bp, Homo sapiens
agggtttctacagagagatctgctgttggtctgatgggcttcccttcgtaggtgacctggcctttctctgtggctgtccttaacagtttttcctttatttcgaccttggagaatctgatgattatgtgtcttggggttgatcttcacatgaagtatcttagtggtgttctctgtatttcctgaatttgcatgttggcctatcttgccaggttggggaagttctcctggataatatcctgaagtgtgttttccagtttgtttccattctccccgtctccttccggtactccagtcaatcataggtttggtctttttatgaggtcccatatttcttggaggctttgttcattccttttcattcttttttttttttttctagtcttgtctgaatgtcttatttcagcaaggtggtcttcaacctctgatatcctttcttctgcttggttgattcagttattggtacttgtgtatgcttcacgaagttctcatgctgtttttcagctccatcaggtcatttatgttcctctctaaactggttattctagttagcaacccctctraccttttatcaagtttctccgcatctttgtattgggttagaacaggctcctctagctcagcgtagtttcttgttgcccatcttctgaagcttacttctgtcaatttgtcc

SEQ ID NO: 901266 - DNA, 532 bp, Homo sapiens
taaaacagaatgtcctttaatattttttgactataaatgccatgagggctgggaccgtgtctgctgattaatgattatgccctgacatacagttcaatgcctggcacatagcatattcactawgtaaaattaattgaatgcatagataacccattatgcatgccataatgtccaggaaagtgaggaggcccaatcccttagccgattattcatgcacactgagtccagagtaaggtgcaaaatatatcctttcttcccttatcaagtccccagtagtcacgtaaagttcatcttggataaatatccacaagttctcttcacactctttgatctcttcctcttgttccttaagatttccttgatattttctgccctctctccactgccctcctttatcatggagggacagggtcttatatttcctaaggaagttttctatcttttaaatttttcaccatgaaacatcctaaaaggtaaataaaatgctttcttgcctattactgactgcctttcaaagcattactcagatgtg

SEQ ID NO: 901267 - DNA, 585 bp, Homo sapiens
ggtgcttttaaaatttttatttcctaatgttagagrtggttttctaatttattcatttttagattattctgcctgatactgtaataggtagaaagggatggtcttttaggatatctgttcgttttttagagtatgaaatttaggttgagttgctaactgacttcctgcttttaaccttccgtagtaaccctaacctccttggcaagagtaaaggcaaagaggaccatctaaatagcacaatacttcaatgggtttgagcccaggcctcagccttttcctgatgcatggtttactctaagcagagacatagactagcaaggggaaccagagagggaactggatccacagctttttgatttgtcaccacactgtttgggtcagcagggaaaaccatacactgttccacctcagatgttcgaaacatacctccttgaatttacaaatatacacaaaatctaaagaccctttttaaaattttctctattgtcttcatttgagttcctcttttttttaggtggccttgtagtgccaactatttgagaccattttaagcctttgcttataaatcttttgattatcatatta

SEQ ID NO: 901268 - DNA, 582 bp, Homo sapiens
gagaggtggtgagtacacgttcataaagtcacaatatgtgtattgagaaacaagttattggtgggagtaagcatcctagaagaatgcatgtgcccccttaatctcttggcataatagtgaaaaggagacttatattaaacattgctgggtgtaccatgattgtgctccaaagaagggtccttgccccgtctgttcatacttttagtacaagcatgagaacaaccttataagtagaaaaataaatatttagatctcagctatcaaagagtatgagtttagatcccagcaattttttttaacattatgaaagtgatctgtgcaagctttgacgagctgggggactgtggaatgttgcagtccctcgtgctggtgggagaaggtaagtggcattttggaaattggcctttgagtgccatctcttatgctggaagaagacacaacttcaattcctgtcagtgcattactaaccacatcagagaaagatcctgggggcatttgttatataaratacatgtttataggatagcgacagtctaatttgcatgaagcatagcatatgagcaagaaactgacagaaaacta

SEQ ID NO: 901269 - DNA, 640 bp, Homo sapiens
agccccatcaatactatttagataagaggaagaggagaacttttcaaaagaacaatggatagcattgaaaattgttgcaaattgaggaactacctctgaaatttataagccaatktgtgtgccaaaacttttcctctaaggttgagaggaattactggaattcagatcctggaaaggcataaaagaatttgtgcctggtagaaagaaaaagcactgtgtttgctggtggaagtagcaaaataattgaagttgttactgattctaccttgtgaactgttcttgcagcttgttaaatattggaaatctattacccattatgaaaccttatgattctttgaaattagagtcaaaagctctccttgttccaaagcaaatagccctacaacataaatgtttttctgctcatatttttaaatttactgttagctcaccttgtcattttgaacaaactacataatttattttttgtctcaatgtctctgtgtacctgtgtgagtaaaagcagaaaggatgcaatatcagctatttctgactttccagctttctgaaaatatctcagatagagttacagtagttttatattttggcaaggacattctagttgagcatacttgaaactatactttttcaattattcaaa

SEQ ID NO: 901270 - DNA, 592 bp, Homo sapiens
tgtttcacttagtaaaattctcgaagatgcttgagaaaatggagcagtacctagaagtaggrtggtaccaaatccattatcctccactaaacatgaaacaggaatttaggacatattaaacacaaaatgaaatacacaactatcaggggaaccagcccccaataattcaacataggttcttttctattttccctaagtgtcagctggtctgagaaataaagggaaagagtacaaaagagagaaattttaaagctggctgtatgggggagacatcacatgtcggcaggttctgtgatgccccctgagccacaaaaccagcaagtctttattagcaattttcaaaggggagggagtgtgcgaatggggtgtgggtcacagagatcacatgcttcaagggcaataaaatatcacatggcaaatgggtagggcaaggtcacaaggccagggtgaaactagaattgctgatgaagtttcatgtcccactgtgcatgcgttgtcgttgataaacatcttaacagtgttcaagagcagagaacaaatctgactagcattcaccaggctggaatttcctaatcctagcaagccttggggt

SEQ ID NO: 901271 - DNA, 592 bp, Homo sapiens
tgtttcacttagtaaaattctcgaagatgcttgagaaaatggagcagtacctagaagtaggatggtrccaaatccattatcctccactaaacatgaaacaggaatttaggacatattaaacacaaaatgaaatacacaactatcaggggaaccagcccccaataattcaacataggttcttttctattttccctaagtgtcagctggtctgagaaataaagggaaagagtacaaaagagagaaattttaaagctggctgtatgggggagacatcacatgtcggcaggttctgtgatgccccctgagccacaaaaccagcaagtctttattagcaattttcaaaggggagggagtgtgcgaatggggtgtgggtcacagagatcacatgcttcaagggcaataaaatatcacatggcaaatgggtagggcaaggtcacaaggccagggtgaaactagaattgctgatgaagtttcatgtcccactgtgcatgcgttgtcgttgataaacatcttaacagtgttcaagagcagagaacaaatctgactagcattcaccaggctggaatttcctaatcctagcaagccttggggt

SEQ ID NO: 901272 - DNA, 592 bp, Homo sapiens
tgtttcacttagtaaaattctcgaagatgcttgagaaaatggagcagtacctagaagtaggatggtaccaaatccattatcctccactaaacatgaaacaggaatttaggacatattaaacacaaaatgaaatacacaactatcaggggaaccagcccccaataattcaacataggttcttttctattttccctaagtgtcagctggtctgagaaataaagggaaagagtacaaaagagagaaattttaaagctggctgtatgggggagacatcacatgtcggcaggttctgtgatgccccctgagccacaaaaccagcaagtctttattagcaattttcaaaggggagggagtgtgcgaatggggtgtgggtcacagagatcacatgcttcaagggcaataaaatatcacatggcaaatgggtagggcaaggtcacaaggccagggtgaaactagaattgctgatgaagtttcatgtcccactgtgcatgcgttgtcrttgataaacatcttaacagtgttcaagagcagagaacaaatctgactagcattcaccaggctggaatttcctaatcctagcaagccttggggt

SEQ ID NO: 901273 - DNA, 542 bp, Homo sapiens
gctttagtataaaccctaaatagttttgctttctgtggtaattgtcaattagaatgtccaaatcactttgtatttttaattgaatttttttattttagcctctgatctgtggagcttataaactayagtgtgatattgaatagtttaattgaaataggatgagatttatttcttgaataatataaaaaattgttagttttaggagaattaaaaatgactcaacacaatttattgacaaaagcaaaattgaaactattatattcatggttttgctttgtttaccaagtctagaatattttattgcattgtcaatacataatatagacaaatatgataatgaataataactttaattccttgcaccatcagttatctaagtcatttcctcttcccaaatacgagatttagtaacaaatggctatatgtgaacttgatgttaaaaaatattaatagttaatgtcatttctaaatgagaagtaaatacaagaacttatggagaaaaaagataagtagaagatgaattttaatattcatgtgaagtt

SEQ ID NO: 901274 - DNA, 542 bp, Homo sapiens
gctttagtataaaccctaaatagttttgctttctgtggtaattgtcaattagaatgtccaaatcactttgtatttttaattgaatttttttattttagcctctgatctgtggagcttataaactacagtgtgayattgaatagtttaattgaaataggatgagatttatttcttgaataatataaaaaattgttagttttaggagaattaaaaatgactcaacacaatttattgacaaaagcaaaattgaaactattatattcatggttttgctttgtttaccaagtctagaatattttattgcattgtcaatacataatatagacaaatatgataatgaataataactttaattccttgcaccatcagttatctaagtcatttcctcttcccaaatacgagatttagtaacaaatggctatatgtgaacttgatgttaaaaaatattaatagttaatgtcatttctaaatgagaagtaaatacaagaacttatggagaaaaaagataagtagaagatgaattttaatattcatgtgaagtt

SEQ ID NO: 901275 - DNA, 518 bp, Homo sapiens
tattacttctcagttctcatactacatgtaagaattaaacctcaaaagattaactaacttgccaaagggcrtaagaccagaaactggtagagccgaaatttgacccaggtctgatttcagggcctggtctctcaaccaccacactgcattgactgcagcctcctggatctacacttcattgctctccaggacttcagacaggcttgtaacactcctaagaaacactttaaaagcctcagttgttttgaaatagtaatgatacaattaactttgtctttatagcacccagaaaggagttaggaagtagctgtatcattactacactgagcactgattgtctcagctcttagtacactggcttccctaaatgcaattaaaaatcctttccagagtagtttcctcttggaaatcctctaatctttggaaatagaaccttctctaataatctttgagggtgccatgtttctcctctcattcccttactctaagctcttgagataacacagattcacatgcag

SEQ ID NO: 901276 - DNA, 571 bp, Homo sapiens
atcttcatcactaagtcaatctacatctgttaataaagagagaaaagcaacacaaggaacgctggatactccaagcatgaatcaastttatcacttttgtctccagactttggagggcaaggggagcataaacaaagactgcagatggcagcaggatccacgtgagagaaagcaccaatgctcaatgaatggcacgacatgtcctgcagtcaccacgaaatactacttctagttgcctcttgctgtggcactccctccccatgcaaaaaagagaaggacaaggaaacaaacataaaaatatttattaactagtcaggcacaagacaaagctccattcattcaaccaaacaaatacttcttgaacatcaatatgtgtggtgtgctatggtgtgttgtatacaagagatgcaaaggtgaacaaaaatcaatccctaccctcaaagaattgcaaaatgtgatataaggcagcagaggctagagcaggactaaaagaactattcattattttaactgatatgtagattcatgcaagttttctctaatgttaacaacctgcagaatctgctcaaac

SEQ ID NO: 901277 - DNA, 568 bp, Homo sapiens
aaggatgcctccccatttataaccttccaaggtaaaacagtgcagttccgtcagcgatgacaaagaccaagcactaaaacatgaagaraaatcatcctgggtgaagcatgagctagtgctgctatggttgtttgatcctaaactttctcatctgtccacaacacatttttttccagaaggctttctaatttatggttatgttggggcgtgaaacaggaccttttttcaacctggctgcggagctgagcccattatgggcaggttttactcaaaaggtgacaaaagatatggaaagataggctctcccatctctctctctctttctctctctctccacttctgtctccctcctatttccccattctctttctatgctttgttgatctcttactttatttatgtgtttgcttgtttacttatttagtgctggaattcaagtcctgttgactcaagcttttctcaagctgcttatgtagaatcaggtgaaaagctctcttcttggtggtccatggtattgggccctcctggctaccccatccctttctggctgtccctttccatattttca

SEQ ID NO: 901278 - DNA, 568 bp, Homo sapiens
aaggatgcctccccatttataaccttccaaggtaaaacagtgcagttccgtcagcgatgacaaagaccaagcactaaaacatgaagagaaatcatcctgggtgaagcatgagctagtgctgctatggttgtttgatcctaaactttctcatctgtccacaacacatttttttccagaaggctttctaatttatggttatgttggggcgtgaaacaggaccttttttcaacctggctgcggagctgagcccattatgggcaggttttactcaaaaggtgacaaaagatatggaaagataggctctcccatctctctctctctttctctctctctccacttctgtctccctcctatttccccattctctttctatgctttgttgatctcttactttatttatgtgtttgcttgtttacttatttagtgctggaattcaagtcctgttgactcaagcttttctcaagctgcttatgtagaatcaggtgaaaagctctcttcttggtggtccatggyattgggccctcctggctaccccatccctttctggctgtccctttccatattttca

SEQ ID NO: 901279 - DNA, 490 bp, Homo sapiens
aataaattggtaagcttcctgtcaaatgataagaaaatgagaaatgagtatttttctctaataagttgaaaattttttcttccaaataattttctttgaaggacaaaatcaaccartgagggcaaacacactgtctttgagtaattctagaaggtcacagagtcctggaaggaaacattagcccagtgaatgcctatagacatccaggctataatatgagtgtattttatttctgaagtgttttgagactgtctattatgaaagttcttatatacacgcaaagtattacttttaaattttcttggatgtctaaagacaagtcatatggtttttattaatataaggtttattttgaccttgtagtagagagttataatcaacttgaaaaatatatcagtataatgttacgggggttaagattaatatggaatcttacaaaagaagacctgctttcttactttctataaacaacattgtgtgatgtcttcct

SEQ ID NO: 901280 - DNA, 567 bp, Homo sapiens
aatttaagtcttaatatgtctacatggagaacaggatgaggacagaaatttcaactgtrtgagtgacagcaatcctttgagaagaaataatattcagagtagaaactgaaaacagagttgaatgacataaccaatacgttgacaactggcacctgcattcctcttggggagaaatttgtctctgtttagggggaaagggcttaatcaactcagatttagaaggaagaactcagataatatattctggggtaaaagatacctgaaagagggtgccgcatggtattaaactctgattaatttaggaccgaccgtgagacaatagaaaatgtttacttaaaagctgaatattccagttcaaagattttaatatttgtaaattttacaagtatcatatattacctttgtaattaaaaaaataattattaagaagtttcgggccgggcgcggtggctcacgcctgtaatcccagcactttgggaggcagaggcgggcggatgatgaggtcaggagatcgagaccatcctggctaacacagtgaaaccccgcctctactaaaaatacaaaaaa

SEQ ID NO: 901281 - DNA, 323 bp, Homo sapiens
ctgtctgaaagcctattcaacctttattttcttcttcttgaaaacttttataggctgtgtagattttctgaatgcccagacttaagttctaaaattactacgtggccatcttactcactacataagaaatgctgtatgtgaaagaaaatcacttttttatttatacttcactgaaattttacaagatctacattacaacgataaactgtttcaaggtawttttcatcacatcctgctatttctgttgatggtctgagaaaactccaggttttttaaaatttacctgaggaggacatatccatgcttattctcatttaataata

SEQ ID NO: 901282 - DNA, 601 bp, Homo sapiens
caaatttgttttattagacgtaaaaattactgagcatttggkgtttaatatttaaaatataacttgagtctgctgggtcttttgttactatgggcttagaataatgacttcctctttttcaaaaacaatattttagtagcttattgaaaaacaacttacaaagtctatttcaaaagctatttgaattagaacctcaagattctctcaaatatagtttgatgaataaaacacaattgacaattagtcacatatggaagaaattttcctcctaataaatacataaaagatcaacatttcagagtaaataaaaagtaaagcaaactatgtcaactccattatttttagaattcatgtcaagattcagattatacccacaacatttttgatttctgtctttaaaacttacacaatggagaaattgcttcataggatgggtcattgaaatgagaactctgcaagcagttgagacttagtgggttttttacaaagtattccacaaagttcaatgcctttcttttcatgtatcaatcattcaactgagctgaatgttatatggaaaattgttctgggcttgaaaaaaaatatcctgagacccaaggga

SEQ ID NO: 901283 - DNA, 631 bp, Homo sapiens
ttatttaatcctcataataccaccatgagaaagatctaattattattgmtacttctattttactgataaatagactgaggcacagatgtcttgagtgatttgtgcaaagtcattcaaccaggagtgtccatgtcacattttttggtcatgtatgtctggtttcagggtctgagttactgattgataagttatcctccactttaaacgcatttttttcatactgagtacccagactgccttcacattcggtcaatgctaatgccagtaatcattttctctatctcctctctgccttgaaacttatggttaaaaagaattgatcttaaaaagtcttaaaggagtttgatctgtcttgatctgtcaggaaatctttagttggaggaagcttgaatttaatttccagtgctagtatgttgaattgttttctcatagagaaatatatctggatgacaaaatttcaggacactttgaagtacaataaattaaatgtcaggatggaaataggtaatacatttgaaatgccatatctacttgtcagtaacctacttactaagtgctaaatacatttgaattatttctttcaggccaccactgaagcatgtttatttattccctgttttgttccaaaaag

SEQ ID NO: 901284 - DNA, 710 bp, Homo sapiens
tcttttttgtgtttcagtttgctcatttataaagtgaggatcacaaaaatagtttctgtctcaagagctgttaggaggattaaatgagtcaatgtatataaagtgtttagaacttggcattttctacaataattcttttttttaatttgagacagggtttctctgtgtcacccagcctgaagtgcaatggcataatcatagctcactgcagcctcaaactcctgggctcaagaaatcctcctgcctcagtctcctgaatagctaggactacagacacacactaccatgcctggctaaattttcacttttgtagagatgtggtctcactatgttccacaggctggtcttgaactcctggactcaagtgatcctctctcctcagcctcccaaagtgcaagagccaatgcactcggcctacattaattcttattctcctcagctcacatatgttccttgagactgaatggatatttcatagaaagcttccttaaagaagtgtgctatggaaaagtattacttgcttaagatgattttgatatatataagattatgcttaactcatgacaaaacatgcaatggcgctgtccatcaatcagtcgagtgaactgctgtrtgatgaattatcttgataggtgatttctatcacctttccattcttaattaacctatcaagatagtctataaagtttatccccaaatatctcccaaat

SEQ ID NO: 901285 - DNA, 642 bp, Homo sapiens
gttgtgtattacatcattttaaggttattgcataaagagccagaatttcccagctggacatggtggctcatgcccgtaatcccaacactactggaggccgagrtgagcagattgcttgagtccaggaattcaagaccagcctgggcaacatgacgaaaccccatctctacagaaaatataaaaaagtacctgggcatggtggtgtgcttgtgtagttccagctacttgggagtctgaagttgggaggatcaactgagcccaggaggtggaggctgcagtgagccatgatggcaccattgcactccagcctgggtaaccagagtgggaccctctcttaaaaaaaaaaaaaaaaaaagcagaattaaaattggacatttttttatattcatgtttgggcccattaaaaaaaaaagagaacaatgaaaaattataggtgagagatttcagataagtggtaaaattacataatatgaatgccttgtttttttctgacattcttaaagttaagcaacttgaaaaataatttgttagtagtagtattatgttataaaattccacattgaaagtagatccttcaattaattttttaacttgtaaattgagaaatggtaacaaaccagaaaatttaagaattgtttttta

SEQ ID NO: 901286 - DNA, 654 bp, Homo sapiens
ttctcaaagaaaacttaagcttttaattgaattctctctgtgttttgagagtggagaacagaatggaagaaaccatttcccaaagaaaacttatgttcttaattttgatttctttgtgtttttttttaggaatggagaacagaacagaaaaatccagaagctatactgtatattaccctaaatgatgttacaaaatcagcaaaagctttggtttctttttgtttgcctgagtccctttgaaaaagcattttaaaagcatctgttcaaggaaagggaagggcaatgttatgtttagcacctcagggtgtctcaaatactctcaaggggcattgagatgttttccaaacacaagtaattcaaaatcacttaaaataaataagggccttaatcaggttttaagtagagagaaacttgagaaataaacaaagagtcatagcaggtggtatagaaattccagaaagttttggcttaacaaagaaaaagtcaggggatcggtggtgatatcccctttatcattttttattgcrtctatttgattcttctctcttttcttctttattagtcttgctagcgatctatcaattttgttgatcttttcaaaaaaccagctcctggattcaatgattttttgaagggttttttgtgtctctactt

SEQ ID NO: 901287 - DNA, 541 bp, Homo sapiens
tggctagcagggcctggagaagctggagctcctggggtgactgtccctggcagaagcagcctcattctttttcctagggtaccaagttctttgacctgaaatagtagtgctgtgcagagcaggcctgtgggccaaatttgccatgtagctggtctttgcatgctctctccccaccagctaagaatagtttacacttttaaatggttgtgaaggagaaaaggaagagaaaggagaaggatcagaagaaacagaaggaggaggagaagaaaatgatgaaggaggaggagaaaggaaaggagaagagggggaggaggagcagcaggatgagggtggtataatggtatgtggcttccaaagcctaaaatatttactatctgaccctttacagaaaaattttgctgacctctgatgtagacaaggagaaattgtttttaagaaaaggagcaatatktccaaagaattcattagggagatttagcataacaactgtatacagaaaagactaagtaaaaagagctggaaagagaagccaaatgttcaa

SEQ ID NO: 901288 - DNA, 627 bp, Homo sapiens
cattatggaaatttaatgctgctatacccataagtcattttaaactatttaccaactatgcaggcacaatcaagaacatcaaggtagaaaagtaacctgataggtcacacaggttaaraggtaaggaactattcactcaaaaacatctctctcatcttcccaatatgaaatttccaccattaaatttatctttaaggataatatactgtaatgccatgaaactcattttaaacgataaatactgcatgtttactcacatattaatacctaggtatgaattcagttacagattatttgaacaaacaacactgggcaggtcattttttgcttgccaaggaccaaggtgttgggagatctaaggaaaaggaaaggccacgtgattgataaggaaggaccaacagtgcacaggagaccctctgcatggggcagagaagatacaaaaaggacaggagtgggaagtcaagtctctgttgaccctgatcttttctagatactctataaacaaaatgtcagagtgtttttgttccatttcaacaaatatgtttgagtgacccaatttatagcattgggagaaacaaaaattggtcttgaggccagggctatgaatgcatatgagagattaatatc

SEQ ID NO: 901289 - DNA, 600 bp, Homo sapiens
accatatgagctggcaatcatgcttctgggtatacatccaagagaattgaaatcgggattgggaagaaatacctgcactcctttgtccgctgcagcattagtcacaatatccaagacatagaaataaaccaaatgttcatcgatggatgaatgcataaagaatatgtggtatatatacataatggaatactattcagccataaaaagaaggaaatcctatcatttgtaacaacagagatgaatctgaaggacattttgctagtgaaataggccaaacaaagaaagacagacactacatgagtccacttttaccaggaatctaaaatagtcaaactcatagaagcagaaagttgaacaggggttgtcaagggcttgggggagtgggaaatgaaaagttgttgttcaataggtatgaagtttcagttacacagatgaataagtcctacagttctgctgaacagtattgtgtctatagctaacaatactgtattgtgcacttataaatgtgrtaagtggctaagtctcatgttaactgttcttaccacaatttcaaaaaacaaacatttaaaaataataaataattttgcaataaaaattatc

SEQ ID NO: 901290 - DNA, 607 bp, Homo sapiens
cgttagtctgatgggcttcccttygtgggtaactagacctttctctctggctacccttaacgttttttccttcatttcaaccttggtgaatctgacgattatgtgtcttgaggttgctcttctcaaggattatctttgtggtgttctctgtatttcctgaatttgagtgttgacctgtcttgctaggttagtgaagttctcctggataatatactgaagagtgttttccaacttggttccattctcctgtcattttcaggtacaccaatcaaatgtagatttggtcttttcatatagtcccatatttattgaaggctttgttcgcttctttttattcttttttctctaatcttgtcttcttctttacttcattaagttgatcttcaatcactgatatcctttcttccacttgattaattcggctattgatacttgtgtattcttcacgaaattcttgtactgtgtttttcagctccatcaagtcacttacgttcttttctaccttggttattctagtcaccaattcgactaaccttttttccaaggtttttagcttccttgcattgggttagagtatgctcctttacctcggaggtgtttgttattt

SEQ ID NO: 901291 - DNA, 607 bp, Homo sapiens
cgttagtctgatgggcttcccttcgtgggtaactagacctttctctctggctacccttaacrttttttccttcatttcaaccttggtgaatctgacgattatgtgtcttgaggttgctcttctcaaggattatctttgtggtgttctctgtatttcctgaatttgagtgttgacctgtcttgctaggttagtgaagttctcctggataatatactgaagagtgttttccaacttggttccattctcctgtcattttcaggtacaccaatcaaatgtagatttggtcttttcatatagtcccatatttattgaaggctttgttcgcttctttttattcttttttctctaatcttgtcttcttctttacttcattaagttgatcttcaatcactgatatcctttcttccacttgattaattcggctattgatacttgtgtattcttcacgaaattcttgtactgtgtttttcagctccatcaagtcacttacgttcttttctaccttggttattctagtcaccaattcgactaaccttttttccaaggtttttagcttccttgcattgggttagagtatgctcctttacctcggaggtgtttgttattt

SEQ ID NO: 901292 - DNA, 613 bp, Homo sapiens
aggcccaacgcccagttcctggggtccagcccattttctttgtgcttgatcacaagaggtcaggtgtccgttccacactgggtgatatgagtggggataagggtctccaggaagccctgcacaattgggaacagcctccagaccactgccctccggtgtcatactgcccctgttgtagctgaagaggggactgaatgatggaggagtgtgtgcagccagttaaatggtacactaaatgtcacacagaaagacattctgtcctcttctcatccacacagggtcatgcctcttgcgctcttctctgcccacaggacaatcttccctgctgtgccagttgccagggacttgggttgcaggtgtttctatatagccctgctttcagagtgacatttgctcagagcaaagggtgactgttttttgttttcatcccccaatcctgcaacctgaagatcccagaagagtcataaacatgcatcccagctttaataaacttgttgcataatgacttacayccaaaggtctcaaaacatttttttccaaatgcacagttgtcttacaaatatatgtaatcatattgcactagtttattatttgtgatctaaataggattcat

SEQ ID NO: 901293 - DNA, 608 bp, Homo sapiens
cagaattatttttaaggttggatcaccatagataatgcctgaaatagtttctagcagatagatggagcccawcaaccaaccatcttaattcttacaactgcccaaggatgcccagcttgacaggagaaagtcaggcctttctgtcatctctgccttcctgcgttgttgaaaaagtcaaagaaatgatttaaacaacagtgcaaacatcatggtttgtgatgctgccttttgaaggtatgcgggaatgcatgctgccacaggtagtgccttcatcagatctttgaggcccacgaaatggggatgggagggtgtggggaagagggaggaggatgttcccttctctgaaaaagaaaaagaatgtccattacccatccctactggagcaagtgctctctgcaccacatcctgagctgcctctcctccaaggagcctgagccgggacctgtggttggcacagcctagagcaccaaggatagctgtgtggaggggcatatgtcatacagcatggggctgctccacctggaagaaggagtgtcttgatttcccttccttctccaaggggaggtcaagggatggagagagtagatgctgcaacccagctccagttc

SEQ ID NO: 901294 - DNA, 577 bp, Homo sapiens
aaagccaacttatatcacagagaaactctcaagagcatcaaagaacataaaagcaaaagccmcatccaaagaacagcaacttcaaaggctaaatgaacatcaacctacaaagataagaaagaaccagtgcaagagctctggcaactcaaaaagccagagtgtcttcttacctcccaacaactgcagtaacttcccagcaatggttgttaaccaggctgaaatggtggaaatgacatatagaatttagaatctggatagcaatgaagatcattgagaatcaggagaaagttgacacccaatccaaggaatctaaggaatccaataaaatgatacaagagctgaaagataacataggcataaaaaaagaagcaaactgatttgatagagctgaaaagctcaatacaagaatttcataacataataggaagtaacagcagaatagaccaagctgaggaaagaatatcagatctcagaaaccagtactttgaatcaactcagtctgacaaaaataaaggaaaataaataagaaagaatcaacaaaccaaattgagaaatatgggattatgtaaagagacca

SEQ ID NO: 901295 - DNA, 617 bp, Homo sapiens
ctctgcgatgacacaggaagtttgcagaaagcacttctattgctcacaccrgtaggaacattgtcttcaggaaaaatacgtgagattccttcagtcatgaactgaactaaccactttttttcataaagcgtcatttttacttgaaagaacaactgaaaaactgtaattacccagacctgggtatttgtcagacattttcttgaaagtgaatgaggtgagcttgtcacttcaagaaaaacaactgacaatatttgttgccaatgataacctgaagttttcaaataaaaattataattttgggaaacttgtacccccccacagtgagcttggcagcttcttgataattaaagactttgatgatgcaagcagtgagttcttaacagatgtgcttttttatactgtataataaaatgtgccaatatttgaaaggtctgcatagctcaatgaaaaccagtattgtccaaattgaccaatacaggaactataaagtcacacacaggtaaaagatccatccaaattgtaagatagaccaaatgtattttaatataacagaacaaaaaattcattgataaaagtacagattttacattacaactaacctttaataaactaccact

SEQ ID NO: 901296 - DNA, 680 bp, Homo sapiens
tagcatcaaataaactgcctaacagtcaacttcggcaataaaaaaggacaagaaataaaatctttaaatatgtccttttttccytctttcctgtaagaggtctggtggcttggtgatgacatgagatatgaggatggggacaattccagtcctgaaatttctttgcaacggttacaaagagttgccgaattatacacaaagatgttgcctcgataaaaaatcccccttaaaaagtaagatgaggtaaagaaatactcttagggacatagactgagacagaaccagatcaaaatgtacctaactggacaatgaggtaggctaggtggtaatgtaccttgtcaagtactagaatatgcattcaacgtttttatctagtagtcatttcttaatgtctttggaataaaatatttaaaaggaaggacactgggtcattgctcactcatagacaccatgtcgtgtgtgtgtgtgtgtgtgtgtgcgcgtgcgcgcgtgtgtgtgtccacctcttcatcggtctagctcataagaggagtttttagactttatacttgaaataactttagacttgcagaaaagttgtacagaggttttctttacaccctgacaccaaattccaccaatgtgaccatcttcataaccgtcagacaagagcaaaaccaggcgactaacattagtatgga

SEQ ID NO: 901297 - DNA, 205 bp, Homo sapiens
ctaagttttgtatttttagtagagacagggttttgccaagttggcsaggctggtcttgaacccttggcatcaagtgatcctttttcaaaaaaatacttacagaccttttcacatcagcatcattttacacactataaagctaacaaaatattgaattttaaaagcagagagtttcttgttgaatttttatcattctaaattatat

SEQ ID NO: 901298 - DNA, 541 bp, Homo sapiens
ccggtgagtttacgtgcccccacscatatccttagcgaagactgactattgcagtcttgtgaaagtacagatcccttgcttcatatagggacaaactcaaatacataatttgtactccaaagttgtcctgtgggatcataataaagccacttctgtagggctttgtttggaattacaccttagcttggctccttccccatccagacctgcagctttacccactcctttcctgattgatcctaggagtacctccttaactaatcactttcccattaagccacatctcagtgtctgtctctggggaacctgacctaagacatgtagtttacattgcaatgtacagagacaaataataaacaatataaataattattaataagtttcatactaggccgggcatgttggctcatgcctttaatcccagccagttgggaggccaaggcaggagaattgcttaaagccaggagttcaagaccagcctggccaacatagcaagaccctcatctctacaaataaaataaattagccaggcaaggtggca

SEQ ID NO: 901299 - DNA, 594 bp, Homo sapiens
gaccatcacagagtccaattagttcccctgccacttttaatggtacagatgctggtatccatggctgcgagacctgaagacagattacatcacaggactctttgcagacattctccagcaccagcstggaacccagccaccccactgggtggctaggcccagaatagaaataaaaatcacttcattctggctctcaggaagccctatccctagaggaaggggaagagcacagcatcaaggcatcaccccatggtacaaaagaacttgaacagcagcccttgagttccagatctttccactgaaacagtatacccaaatgagaaggaaccagaaaagtaattttggtcacatagcaaagtaagattctgtaagatacccaaggttcttcaagactcactctagctctccagcaatggatccaaaccaagaagaaatctctgaattgccagaaaaagaattcagaaagttgattattaagctacttaaggagacaccagaaaaagatgaaaattgtcttaaagaaatttttaaaaatacagcatatggatgaagaagtctccagagaaatagatatcataaagaaaagacgattac

SEQ ID NO: 901300 - DNA, 423 bp, Homo sapiens
ttcaatgtcacctccttggagataagtctaccctttctcaagaagactgctgtcactctattctttttctagcacgctgytctttttatgcataggaagaaattaaacacttacttgtttgcttcctggattaatgtgtgtcacaatgatcataatcttgatcataatcactccaagaggtcaaggcttgtgtgtccattttatttgcctctccacattcagcacctgtcaaatgtaagcattcaaaacatatttttatgaatgagtgatcttccattcattcccaaataatatttcttctttggcccaacaatcaggctctatcctattatccagtcctaattgtatgcctcattccaggtaaactgagataatcatcattttgcaaatatacactgtacttttttacttctgaactttctt

SEQ ID NO: 901301 - DNA, 659 bp, Homo sapiens
acactaattgtggttatccccaaatagtaagatttcaggtgagtttagcatgcttcctatacgttttgaatttttttttgtttgtttttctactttgtataacactatattttcaattaaaatttgtgaaaaaatgaattcttacgaaactcaaaaaccctaaaaatatcctcttcactccacccctccttccctgcttttacttctaattcaagcttgttttttattttagtgggaatgggggtggggtaggggtaggggattagaaattagaaaacatgctcaccaaggaacaagggctattggctgttcctgaatgagattcagatagaatgacacaatacagcacttccaaaagtttccattgcatctcttctcattcctattttagtaacctttgacatttggagaaacaaaagcctacattcatttttgtacttctctctccctagggccttattcaacaattgtcagagaatattttgtaccactgatagcaataacagcctctaacctgccttcccttctatcactttgagtccaagacaaggcaacagaatgcagggataagtgagtcttgtctttgccagtttatttgagattcatccttcttgttgtatttcagatttacagwcccactccccaccccggtgtcatct

SEQ ID NO: 901302 - DNA, 611 bp, Homo sapiens
acatatgaaaaggggcccaacttccttagcattagagaaasacaaaataaaacctgataatcagctactgctacataaccaacaaagggctacaataaaaaagactaacaataccaagtgttggcaaagattcagagcaaataaccctctcatacattatttatggtaatttaaactgatacaacaggtttttttttttaatttggctttagtatctactaaagctaaatatacacacaccatatgacccagccattccactcctaggtgtttatccaacagaaatatgtacacatttgtgccagaatatacataccacaatgtttttaggggcactattcataagtcaaaatctggggaaaacacaaatgtctatccacaagagaatgaataaaataaattgtgacatattcctacaaaggaatactatgtagaaatgaaagtgaataaacaaaatgcactagacaataacatggatgaatctcacaagcataatgttgaaaatgaaaccaaatgcaaaatacagtattctatgattcaatttacagtaagctcaaaaacaggcaaaactattctaggatgataaaagtcaggagagttatacttttagg

SEQ ID NO: 901303 - DNA, 643 bp, Homo sapiens
aagctgcaatgtgttcattggtaagaggagttgataatatagaccacagctccttcacaggttgtggtaaggatygaatcagagctctataaagaactctgctgagctctgtaaagagactagacagcgggcaagtgggggtgtggaaagtggggcagagactgtcttgagcctgcatggataactctgcatccccagagtcaggaagagagctgggcacatgcagcacaaccaacagtcattgagcactactgggtgcagggagtgttgtagtcttcaccgttctatgaatgagaacttactattgttcccattttacaggtgaggaaattgagacacaggaaaggtaagtaatttgctcaggatcatatagttggcaaatagcaaagtggggatttcgattcagcattccatatctccctctcctgctttattcttctccatagcatcctcatcatctcatcatctaacattgtgtgtgtgtgtgtgtctgtgtgtgtgtgtgtgtgtgtgtgtgtgtgtgtgtgtgtaacagtctctcttcaaccaaactttacttaggctcttctgagctctcttctcagctaggccttgaccttggctcctgtccttgctgggcctgcatcgaatcctgctaaagtgg

SEQ ID NO: 901304 - DNA, 402 bp, Homo sapiens
cgaaaatgggattctgcatttttaatgagttcccacatgatgccaatggtgctggtacatgraccacactttgagtactgagattttaaagtagtcaccctagctagtttggggaataaattggaagggagaagaaccaaggaggcggggatactagttggataagtgatgatgaggaagtggcaaatggaacagaaataaataagcagagttgggatattataagacttttgtggggatgaaaaggcagggatgatgcttcaattcctggcttcggcatctgagtgaacgaaggtggcattcatcaagatggggcagagaaggagaagccaagtttgagagagaagatgaattcacctttgtacttgctgcatttttgaggctcctctgaaattctaagtg

SEQ ID NO: 901305 - DNA, 609 bp, Homo sapiens
caaaaaaaagctgctagtttttgtagccagccccactctagcagtattaccatgttgaatgagctggggtgaggaacagcacctcaggagagaatgctacagactgcctgaagtcttacttcaagctcagtattgtttttaaataaagaaactattctcaatttgttatttatgattgatttctagagatctaaaatggtagtttttgacaaatttgcctggttttgttttattttatttttaagtatagaatgttgactttttccgttcttcatagttggaaatctgctttcatttggcttttggcctgctaaattcttaccggcatgtcagatcttaaaaggtttctaaagatatgctttacaatgtttttaggtttttctcagtcagaggatgagtctcgatatctagccaactatatagaagacagttaataatttatctgcttttatgactattaagtgaaactttaagcaaagaatttagcaaagtctctgtaacaaaggggctcaataaacagaatttacaatatctgaacacttacattrtaggaattatacttatattatcttaatatctcaaagaggtaggcaatcccatttcaatatt

SEQ ID NO: 901306 - DNA, 538 bp, Homo sapiens
tacaaatagagatagttttgtgtcttcctttccaatctggatgcctgttttatttcttttatttctttttgtttcttttctttttcttttttttttttttttgagatggagtcttggtcttgtcacycaggctggagtgcagtggcacaatcttggctcaccacaacctccacctcccaggttcaagggattctcctgccccagcctcccaagtagctgggactacaggcacgtgccatcatgcctggctaatttttgtatttttagtagagacagggtttcactatgttggccaggctggtcttgaactcctagcctcaggtgatcacccgcctcagcctcccaatcttttatttctttttatttatctttcttgcctaattgtccagctagcaccaccagtacaaacttcaacagacatggtgagagtaaacatccttgtttgttcttgttcttattgggaaagattttagtcttttgccattaagtatgattttagctgtaggcttttcatagatatcattttaaggttaaggaa

SEQ ID NO: 901307 - DNA, 618 bp, Homo sapiens
tgctgggataactggctagccatatgctgaaaattgaaactggactccttccttacacaaaaattaactcaagatggattaaagacttaamtgtaaaaacctaaactataaaaaccttgaagaaaacctaggcaatatcattcaggacatgggcacgggcaaagatttcatgatgaagacaccaaaagcaattgcgacaaaagcaaaaattgacaaatgggatctaattaaactaaagagcttctgcacagcaaaaagaaactatcaatggagtaaacagacaacctacagaaaaggagaacatttctgcaaactaagcatctcacaaaggtctaatatccaacatctataaggaacttaaacaaatttgcaagaaaaaaaccaaaccaccccattaaaaagtgggcaaagaacatgaacacatacttttcaaaagaaggcatatatgtggccagtaatcatgcaaaaaactcaacatcactgataattagagaaatgcaactcaaaaccatgatgagataactatctcatacccatcagaatgactattactaaaaaggcaaaaaattactgatgctggctattcttaaaaaggcaaaaaaaatatggattatggtt

SEQ ID NO: 901308 - DNA, 618 bp, Homo sapiens
tgctgggataactggctagccatatgctgaaaattgaaactggactccttccttacacaaaaattaactcaagatggattaaagacttaactgtaaaaacctaaactataaaaaccttgaagaaaacctaggcaatatcattcaggacatgggcacgggcaaagatttcatgatgaagacaccaaaagcaattgcgacaaaagcaaaaattgacaaatgggatctaattaaactaaagagcttctgcacagcaaaaagaaactatcaatggagtaaacagacaacctacagaaaaggagaacatttctgcaaactaagcatctcacaaaggtctaatatccaacatctataaggaacttaaacaaatttgcaagaaaaaaaccaaaccaccccattaaaaagtgggcaaagaacatgaacacatacttttcaaaagaaggcatatatgtggccagtaatcatgcaaaaaactcaacatcactgataattagagaaatgcaactcaaaaccatgatgagataactatctcatacccatcagaatgactattactaaaaaggcaaaaaattactgatgctggctattyttaaaaaggcaaaaaaaatatggattatggtt

SEQ ID NO: 901309 - DNA, 523 bp, Homo sapiens
tgggcatggtggcatgcaactgtagtcccagctactcgtaaggctgaggcttgaggatcacctgaggctaagaggtggagggtgcagtaagccttgatcgtgccactgcactccakcctgggcaacagagtgagaccctgtctaaaaaaaaaaaaaaaaaaaaaaaaaaaaaaaaaaaaaaaaaaaaaaaaagttaaatctgatgcatcagataaacgtttctccagctccttgctcatttagtcatacgcaggacttttgctctggttcctgattattcggctcttaataattttttaaactttttcatgaaaatttgctctttttttaaaaactatcttcttcagttattgcctccaacattcaaaagtcacctagttcttatcctaaagctgctaatagtatgaatttttctaaatgtattttatcaggtttctaaatatatcttcttatcatcaatacatgatgctttacttacagtgatttcttataccaattgctcttactatagagaatcaacaac

SEQ ID NO: 901310 - DNA, 643 bp, Homo sapiens
ccagggcatttgaatctcaggtaccgaagtcactaaaactgaccagacggtttatcatgtggagargtttgtttctctcactaactccaccttctcaatacccagtcttcaatcctgtgtagggctcctgaacaacctacattgtgtagcttattgttgctgttttagcgacgaattatggaaatgtctgaatggatagtagattgctagaaaaatttggggggaaaatgtgtttgtttccaagacttttgctaaggttggaattttgatgggtttgcagctaacatgatttcaagaattcattttgactttggcagaaccttcttatgagaagaaggagtgggcatcagccaaggcccctcacacaagcaagtctgatgtcaatttcatccactcattcattcaaccaatattcatcacatgctactgtgtagtaggcaccattctagatattaaggacaaaagagaaaacaaaacaaaagataaaatccttgccctcataaagcttacattctagtgaatttcttgataatttttcaatggagcatttttttaaggaagaaactagaagcgataaccaccagtataaactgaccaggtcagcagagaggatgtattttgttagagttgtcacttaaactat

SEQ ID NO: 901311 - DNA, 643 bp, Homo sapiens
tctgtagatagagttgtaaccacagatctgtaaaaaaaaaaaaagtaagttattgagttaaatctgatcagctactttcctgcttatgtgtatacagagctactaacaatttcatttgtaatttactagcagaagtcatatgtgtgtgtgtgtgtgtgtgtgtgtgtgtgtgtgtgtgtgatatctgtgtaggtatatgtgtatatatatcctcaatttaaaatttttcatgtccatctatatgaaaattttttaattgaggaaattatatccagtggcctattttcttcccgatgaattataaacgaacaccattttctactcatacaagcggaatgtcaatctacctcatgggcctatcaaagagcgaatttgaaaaaccactggtttagccagtgatatggttactaggtgatgctaggccccattgccactgttaaaagcttatccataagcgagatgagaaggcccttgcttggcatgtaaaagcaggagtagcaggggatggcaggtagctgcaggttgatgacacatgatgtgtctacatatctatatagaaccatgaagtccatgaacatacccacttttcataacaaayccaaagctattttatcatcaatcccagtcaacaatagtaagatcc

SEQ ID NO: 901312 - DNA, 605 bp, Homo sapiens
ttaattttccagaataaatagtttaataatattttaaaagaaaattatttatttttccaggcatttttatgacttttaaaaatggaagtcctgtgtcttcttttgcctatttcctttgtattgtgtggcatatatatagtatgtatactttctatagccaagtttttatttgccataatgtgacaattaatccagaaaaatctaggaaaccaattgggcaagaagatgtatgcttttataatcatttagaggcaaagtgagtcattcttcttctcctgcagggatatgtgctaagaatgcccagtacacgtagatacagatcaatatagtatctgtcagtagatcattcccttgcaaatggccaaatgtgactttttacatctagagctaaacagatcttttattctgaattctgaaattactgtacgcttaataacaaactgaaaaaatgcaattcttcatatgattatttgaaaataattgaaaggggaaagaaacctaycagagaggaattttaattcatgagttaatcattgccaaagaattttctttctcttctccgcccattctactggaacctggctccccctgctgtctctccactg

SEQ ID NO: 901313 - DNA, 611 bp, Homo sapiens
ctcttactaggtgcctataaataccataattgtttaattccccacagtaactgtcccttattttacttaactattctatctcaaattactcccagattgtcactgtgtttgtgtatatgaactttcatttaggttgaattatctccaaaaattacatttcagagttaagattattgtgagtaccagggcataaatagtcctattgcccctggtataaattgccaaactttatccccaaaggcttatgtaaaatttaaatgtcattaattatacaagaaagtgtccatttcattgcacctttgccagcacaaggtgtgatattttaatgtcattttgttgtttgactattttttaataaaagaactcatcattcctttgtttttattatttgtcaaaatttaacaactttccttattttagcttattagctctatttttcttttctttctgtgtccccccatttatttataaaattaatgtctcttttgccaatttgttgacctatttatttaacctcttactaaattataagaatcgttaatgcttacttttaaataaagaagtacaacttcccttcactckttaagcccgtaattttatttcaagaaata

SEQ ID NO: 901314 - DNA, 636 bp, Homo sapiens
ctcaggacaggaatattttctctaaatcaaactayaaggtcactgtttgaggtttaatccttaagtacaacaaccaggaaacaagagtatatatcaccactgattatctgttgtagcaactccttttttctttggccctactttctctgactattgagaaactagttgaacaagagtcagataacatttcccctcttcctttttcttcttcattatggaattgtgctatgaagaatggatttaccatttgggttttgaacgattcctgctgaagtggttcatctggagcagtgactttccttgttcattcttcccagatcctctgggagaatccagatggttcttgcatttttagtgaatgaacacttgctgtcttgcataaactaattgtctaaaactgcccacatgcttaccatctgaagtggtgctgtctgccataggtgtcaggttatctttcagatgactttaagaaagaaggcattttagcccgaaatcatggcatcaaaatgtgtctctcctggttagctaaaattgacagtttttaaacccctttatattaaaaatacaattcatcagtctgaaaaagagaatctaattatttaactgtcagcagttttccccatggaaaataaacct

SEQ ID NO: 901315 - DNA, 618 bp, Homo sapiens
atagagtaggggggcttaagcctggccggagaaaccattcttccctcctaggcctccagccctgtgataggaagggctkccatgaaggtctctgacatgccctggagacattttgcccattgtcttggcaattaacatttggctcgttgttacttatgcaaatttccgcagccagcttgaatttctcaaaaaaatgagtttttcttttctatcacattgtcaggctgcaaattttttgaacttttatgctctgcttcccttttatacataagtttcaattccaaaccatatctttgtgaatacataaagctgaatgctttcaacaacacccaagtcacctcttgaatgctttgctgcttaaaaatttcttgtgccagatgccctaaatcatttctctcaagttcagagttccacaaatttctagggcatggacaaaatgccaccagtctctttgctaaaccatggcaagattgacctttattccagttcccaacaagttccttatctccatctgagaggagcagcatttggtcaaagccattcaacaaatctctagcaagttccaaactttcccacatgctcctgtcctcttccgagccctccagactgttctgacct

SEQ ID NO: 901316 - DNA, 582 bp, Homo sapiens
catctgtgttttgtgaaaaatgatcatccatcttttacctgacaaactttgggagtctagtctctctctgaagcaggggccctatcttgcctctagtacattctgcattcytggtgggaagtgtatggtgactttgtggatagagaacacatttcaagatatcagattggattcactgaagcctgttctcactgggcttgaggttagaaggtagcagccacacacacacacacacacacacacacacacacacacacacacacacaggtatatatatattttcacaggtcccctttcctccattcccttgacccttatatcttgaaactagcgagggtgttctttgatacttcctctatcaaatcttcatattttatctggtgccttacgttggagttctatatcaattttatcttcatgcccagttgaaaccacatttttaacatcctcctaaatgtgccctgtgattctctgactttcatagtaaagctgttagatgggctgccttagctagtcccatcccatcctgtatacaaggtcttgacacatgatggaaggaagaaaatgttggtattcacccag

SEQ ID NO: 901317 - DNA, 573 bp, Homo sapiens
gtcagggacccacttgaggagrcattctatctgttatcagaactcgaatgctgtgctaggagaaccactgctctcttcagagctgtcaggcagggatgtttatgtctgctgaagctgtgctcaccgctgccccttgccccaggtactctgtcccagggagatgggggttttatctataagtccctgactggggctgctgccttttgttcagagatgccctgcccacaggggtggaatctagagaggcagttggccttgctgagctgcggtgggctccacccagtttgaagtttctggtggctttgtttacattgtgagcataaaactgcctactcaagcctcagcaatggtggacacccccccgccaagctccagcatcccaggtcaatctcagactgctgcactagcagcaagattttcaagccagtggatcttagcttgctgggctctgtgggcatgggacccgctgagccaggcactggaggaaatctcttggtctgccggttgtgaaggccatggggaaagtgcagtatccgggcaggagtgtactgttcctcccagtacagtctctca

SEQ ID NO: 901318 - DNA, 577 bp, Homo sapiens
atgtcctttgtagggacatggatgaaattggaaaccatcattctcagtaaactatcgcaagaacaaaaaaccaaacaccgcatattctcactcataggtgggaattgaacaatgagatcacatggacacaggaaggggaatatcacactctggggactgtggtggggtggggggagggatagtattggtagatatatctaatgctagatgacgagttagtgggtgcagcacaccagcacggcacatgtatacatatgtaactaacctgcacaatgtgcacatgtgccctaaaacttaaagtataataataaaaaaaaaagaataaaaaacaatgaagcatgcctacgggatctagaaaataccttcaaaagggcaaatctgagagatattggccttagagaggacatagagaaagagatagaggtagaaagttcattcaaagagataataacagagaacttcccaaacctagagaaagatatcaayatccaagtacaagaaggttattgaataccaagcatacttaaccccaaaaaagactacctcaaggcatttaaaaatcaaattcccaaaagtc

SEQ ID NO: 901319 - DNA, 648 bp, Homo sapiens
tcgggtactaagtactttatttgtgtgtatttatttatattgatttaattctcacaacaaatttatgctctaggtcctagtatttgccctcattttacagaggaggaaacagaggcactagaagattaactaccttgcctgatgtcatacagctagtgagtgataggactgggatttgaaccaaggcagtgtggcttgagaatccatgctcataatcatgatttttgctgcctcaaaatattgcttgtgatttgctccctccctatcactatatcaagaccatcttcccaactgttatatattcttctccaacatcatttgtaaagtctatagagtgtttcagtacatagatactctaatttttcaatttttataattttaatttaagttttttggagatagagtctcactctttcaactgggctggagtgaagtggtatgatcagagctctctccagccccaaactcttgggctcaagccattctctcacctcagcctcctgagtagctaggactgcaggtgcacaccaccatggcctggctaatttttaaaattttttattttggagacaggatcttgctatgttgtccaggctggtttcaaattcctggcctcaagtgrtcctttagctttgacctcccaaaatg

SEQ ID NO: 901320 - DNA, 623 bp, Homo sapiens
gatagttatacccacttttatttatatgcaaattaaagagtggtttatgcagaaatttctaggaaaagggtgttaatttccgattcatggggtggttgctayagaaagggatggtaacttcccagtgttgccatggcaatggtaaactgacatggcccactggtgggcatgtcttatggaaagctgcttccgcgctgcccctgttctagctggtcatcaatttggtctgttgtctgaggacaccttcgttgccaagtcccgcctcctacctcactggccttggagtaggactttgacaactgaatgggtagtttgcaaagagaagggagacggagaggacagcataaaggtatttgggaggaaaagtccatgtccttaggcttgttatagcagctgcttcctttataaaaggaaagacccagggacactgtgagaccctgcttgctctccctgcctccactgtgagactctccagtcctctctgccacctgcagcccagatcatctttcaaggggaaacctggtcatatcacctatctcctgagaagtcttcgatggcttcccagagctttaagataaggattgaaatcttccaaatggcctgtatggccctgcctggcccac

SEQ ID NO: 901321 - DNA, 592 bp, Homo sapiens
gtagaagtgtcatgtttataaatcttaaaagcagacatctataattttttaaaatcccagatcctgtaaagagtaaaggttaaatttaatgcacagccagaattgaaaactattgttatagaattaacaggtaaggttaaaataatctgatttctcactatcacttttttcttgaaaaatatagttttgaaatattgtttcctaattttcaaactggcatttcagagattgatcactgctgtcataaaatcattgtaaagatgtgtgcaatgtatttacctaagaacaagaagagtagtaatcaatgttaccattgcagaagagaaaaacagtcttcaattcttaataaactggaggtacattaatcagtactcccaaattaaatatggtactcaaagccataagccatcatagtatctttagataaaaaagccctcctccatcacattctattaatttttttaaattttggattatatcagtgtcaggacaccaggtaagtctgagaggtagccagaagaggctgatacatgttccctgaacatgtaactcttgatgtgcaagaagygattaaaattgtatgccactctac

SEQ ID NO: 901322 - DNA, 553 bp, Homo sapiens
gtagtggtagagctgagattaatacccaggtctcctttctcccagctccttattctatccattagagcagacaactttgctcttttctgaagaggcttctcaaaaagtgtagagaaaaaatcatcataacctcatggttaaatataaatattttcagaagcacaaggttcattgtcaaaaatggaattaaagcatctattcaatgatctatcctcttgctcagcctgtggaaagcatatggtaagattttcagccacatgattccaaactagacatttatcacttcttactggagttctgaaattactccatgctttccttgagttgtgaattgatcagttttcactttgaaaagtaattgcttttcccactggtgaagtcaactccattcgcttccaatatgagtgtggctcattgattctctctttgtggctttyacatctatttcaccgaggaggcaggtatggcagtgggactttcaaaaaggcttctggatgaccagtgaagaatcagttatataaaattgtggtagttaataacatttgggactccc

SEQ ID NO: 901323 - DNA, 613 bp, Homo sapiens
atcttcttatcacgtggtgtcatccttctacttttagaaaaatactcartttcactgcaaatatgaccgacagtaagtggaactaaaggtcaacatgcagcctttacaagaaatttgtctcttaggaagtatcatcaaaatggaacaggtgtacactgtggaattggctaatctttgggaaggcttaaaaccaggtactcattttgataggctggtgacaaaatcaaagttctctctggaggaaaggagctgatcccccacctcacccccagctacaaatcagcaaagaaattttaaaccctgtacataaagctttattactctaaccatattaagtacttttgagttaattttataatagctctctaaaatacacagaaatatacaaagaaaataagcaaattcattgactgttatataatatcaataaatatatcttatacactgaaataattactaacactttcatttgcaattaaataaactgttagcaaaagcatattctatacatcaattattatcaaattaacaggtctctgtattcattaactcttatattccatcctgttcattttacttttcagtttataatgcattcacagttacataatta

SEQ ID NO: 901324 - DNA, 616 bp, Homo sapiens
gtggttcctgattggtagattaagctactgcatcttgtctacaaatcccctrtatgctcccaaatgctgtctatagacagagtaaaaataagtctcacacatgcatgtaccactatctttcagatttccaaaggaattattgagattaataaattaaaatttcatttaccacttcactagattcactgtagcttttggttttaatatatattcttaaataatggacattgaaaggacaacctcttttttttatagtcacaaagggtcttttttttttaaatggaacccataggcataaagttcttacagggttagaagaacatcttagaccactttgaaatccctccgtgtccattaggaaatatcattcacgaaagattctgtcgattgaagaaagggaaaccaacaaaactctttcctcaaacatagaaatcatttatgtatttagtttttaccaagagtcaagaatgtttaccaaaaagacgagttggattagtgactgccatgcttctgtgaaactcttggtgtctgtttctacatgattcccaggctaaaggaataccaaggagagccaccacaacctggggataaggatagcaaaatggcggcactgacc

SEQ ID NO: 901325 - DNA, 610 bp, Homo sapiens
gaggtcaaagaagtgagtggagtacataaccttcaaggtgaagcaggaagcagatgcctccttcygagtataagttctcttaggtcagatactgggaacaaatttgtttacagcaccaagcacagctctttgagggttggaatacccactaaacatctaagcaaatgtggacatttacccttcagggatacatgctgacaaattccttcctatatgccaacctgaaagaccaaccttggagatatatgaagcattgcctagtccagagtgaggcagaagactgagtcaggggtttcgacttagtcaaggaatgctcaattttcaccttttccctcttcctgcataccttcctcatgagtcatgagcccagacaaggccccagggtttttcccaatatagttcttcaggaagtcactataagtcaagtggagttggtatttatatggcatttgttccttttaaaatgtatttttaattgataaataataattgtatatatttataatgtataatgaataaactgaaaaattcaatagaaagcttcaacagtaggttcaattaagcagaagaaagaataagtgaactcaaagacaggacacttgaaattatc

SEQ ID NO: 901326 - DNA, 607 bp, Homo sapiens
actttatatgtagtaggttctgcgtaaatatttgttaaataagtgaataactaaatgaatatgtgaagtgagattggcttgagcagaagggcatctgtacgaatctttcagaagcagaaaaagttttgaaattaatgtgaaacaaatcttattcttaatacacatctctcacaaaatcctttttaaaagacatcgatgaagcccgcaaagagaaaattgttatcagaggaaaggtgcacctgggcagaactctgtaacagaaactctgaggacaaacctgtagaagacttgatttctgttgtacggtagatgggaccattttagagggcaatttgtgtgccaaatgatcctcacatgtttttctcatttttgcttgcccatcgctaggtggaagcacccaaatctccatttagctgatgagaaacagaatgtcagcgagggaaacgacttcaccacgacacagttaacacgtgatgaggaagggccttgttcaaaacyacaatgctccttcaccctccaaaaatatagctctccctgtaatacaaaatatagacttgtgaaaaagattataaatatttaaaggatctagactacgtaaatagatatt

SEQ ID NO: 901327 - DNA, 695 bp, Homo sapiens
gaagttctcttttgaggaaaaaagggtggattaaatatacatataygttattaaatatacatatataagttctcttttacagaaaaaagggtgaattaaatatacatatatacatgcttgaacatacagactacgcttggaagggaacaggaaaccagtaatggtcatgagcaacatattctgcattcctttttgtattgcttgagaattttatcatgcacaggggctttttcaataaaagaaaggacctccaatggccaagaagctttaaaaacatcctcattctcttttagtcaatacttacccctaacaatggtagtcctcaaccactttttcctgttccaacagagttaagagagagcacacaggctcactacaaggagggatcattatgtcattgagtcccagtctatagaggtggacaggtcatttggaaagtatttccctcaccgctgccatgttatctgtctctctggatcgtataacccccttatgactcaaggccttaatgtcagaatgctcagaaccaagtaaacttagatcatcaacaatacaatagagtgcaaatacagtataataaaaaagtaataaaaatatcagtgctttcttggcaccagctccaagcagggtagggtaaaagaaatgtagaagctaatctatctaagtaggttcagggctcctaccacatttttctt

SEQ ID NO: 901328 - DNA, 595 bp, Homo sapiens
actatgtttactatgatggtaaaagttactactattttaggaaaagtttcaacaaaagtcaaaacaraatgatttctaatgtaaatcttaactataagaaaataagcacattttcaattaatggacatgtttctgtagaataaaaaatggctatttctatgtttgatcagtttatatataatcctttctgagtaaacattccactatctggtttaataacttcaatatacttcttaaagattaacacgattatttgcttcatttagtcttagtttttattagtgtacttgctgtaaattgtttatctcacttattttttatttcggacatatctgtgttgttgtataccaggtcaaataatattctaactggaatatacatttaagggttctgtattctctcaccatctaagttgataatgaccttagtcatttttgtctttaccaatttgcctgtttgctatatattcttaaggtagttcattgaggaaattataatcaaaatctatgaagtttgactaattattactctcaacataaagttaaaatccaaaagatctctgtggaatattggtcagacaatgtatgaaggcata

SEQ ID NO: 901329 - DNA, 426 bp, Homo sapiens
tggggtgggcaggttaatgttggaggtggacttcaccagaaggaagcagaaagcaagtaggggcacctgagagggccacatcccccacaccgagggaagggtcagaccaccctgaggtcagcacaggaggaagaagacttaggggagcactttgaggcaggaggctcctggcgtatgctcttctccccactccttcagtgcggttggcttagggggaagggagtgtcatctgcccttccccggggacactggaagaggagaggtctgggagagggacggacggatgctgccttyctcatcatgccacccctccttctccccagcccctggtgggcaccagcccgggcattctagcctacagcccaagacagatcaggcggacagcagctgaggctggggagagggggccagtgctgtggacaccca

SEQ ID NO: 901330 - DNA, 467 bp, Homo sapiens
atgtgtcttgtgggtcaagaaggaatttgatgtaatggctaagagccagactgacttggattcaaatccaggtgttaaatattagttctgtgcccatgggcaagtttttaaaacctctctaagcattttctcatctgtaaaatgaagataataatgtctcattcgcagagctgttgtgagggttaaatgtaataatatatgtgaaataattagcacaaattgactggtgcagagaaagcatgcaaaatggttgctcgtgtgattacaaaagtagatagaggacatgtggtggagattggggaacattcccagaagatgcatggtgataaggacaattgtctcagctggatgtgaattcatcttgctgtggcgggtctgtttgtaaagaagaataatcccatggatkaataggcagccagccaagatggcttgatcctcctcattgggtctagccaggaaatctgtgt

SEQ ID NO: 901331 - DNA, 608 bp, Homo sapiens
tagatttcctttcttgaaacacttttccctccttttaatgaaccaaaggattgcaaacccatgagtgattgttttaaattttatttttacagcccagcaagctaagaaccatgagtgatttttaattaaacaccatttttttgtttcttgaaatctaaagctccaattaaaaataagaaaccataactgcattaaacttcatcacttgagccccaagtcagcaagcagccataaaacagtgacatgctggagatgagttgcatgcatttatcagtaaatggggctatgtatgctaatgggcttcagcttgggaactccaggcctggctgcatcagactggttaaaagctcaattcattaataggagcccatgaaggactgacttgtagtgtctaatgcctgctccaggtcccacaaaagcagttgagtgtgtgcctttgcctttggaaggaattttgcagaattgtggttgtgaggggctggggttgagtggagacttctgagaaaacaggatcacactgacccaaccaaggcrtgggagcaaaagactagcacatatcaaattcctgggttgtgtcaattactgtactaggaactttatatttgtta

SEQ ID NO: 901332 - DNA, 647 bp, Homo sapiens
tcactgccaaagagtatttttcctaaagaatgtttccagggcccaagagtcctttaagctaaagtacttatttgttgattcattgttttttatgctgaaaggtacatcagatacatggtacaaaatgcagaagaaaggaaatgatctagagtgaagaataagtgtcccctcctctgctgcctcccagcaacccagctcctctttctagaggcaattcttgtctccagttccacatgagtcctcgcaggccagtgcttaaagaagcatatagaggacttcagggcttcatctgtagaaagcttccctgtttccagagcatgtccacatgcattttctcatctgaacttctcagcaaacaccccaaatgcatgaaagaaatttgttgataaactccatgcttgtccccttcatgtgattcatccagggtcctaagatgaggactggcatttaacctctggaaagtacgtggagcccctattttcattctcaattgcattgtttaacaaggtctgacctttctcttgcaagttgctgcwatctcttcacccttttgcaaaaatctgatcacaaaatgccccatgggcattaagtcataaaatccaaataaaatgggtaagacttgacgatgtcggcttaaaaaaaaaaaa

SEQ ID NO: 901333 - DNA, 647 bp, Homo sapiens
tcactgccaaagagtatttttcctaaagaatgtttccagggcccaagagtcctttaagctaaagtacttatttgttgattcattgttttttatgctgaaaggtacatcagatacatggtacaaaatgcagaagaaaggaaatgatctagagtgaagaataagtgtcccctcctctgctgcctcccagcaacccagctcctctttctagaggcaattcttgtctccagttccacatgagtcctcgcaggccagtgcttaaagaagcatatagaggacttcagggcttcatctgtagaaagcttccctgtttccagagcatgtccacatgcattttctcatctgaacttctcagcaaacaccccaaatgcatgaaagaaatttgttgataaactccatgcttgtccccttcatgtgattcatccagggtcctaagatgaggactggcatttaacctctggaaagtacgtggagcccctattttcattctcaattgcattgtttaacaaggtctgacctttctcttgcaagttgctgcamtctcttcacccttttgcaaaaatctgatcacaaaatgccccatgggcattaagtcataaaatccaaataaaatgggtaagacttgacgatgtcggcttaaaaaaaaaaaa

SEQ ID NO: 901334 - DNA, 665 bp, Homo sapiens
tgcttatgcatgacctgtagaagcttataaaagtatctyactcattcagctgcttcggatgacatgatagttaaaagcccatcaacctgaacttgaagttatgtcttgaccactgtcagtattttgaagaggatattattcacatgccattcaagacctaaacatgtttttatcatcactgccaagaaagtcataaataacaaatgtcatgtgtcaaattcttggtttattttagaagaatagcaatagctaaaaaaaaaaaaaaaaaaaaaaagactataacacaatctagtctagctgaattaggagttttggacttggcctgactttatgggctaggtacctcaggcgatataaaaaaattcctatggctcagtttctccaactgaaaaatgaaggctttgggccaaataatatttcaagtctctcaagctttaaaattctatcatttttttacttgaagctttagctgatgtgtttgtgaaaactattcaaaaagttatctctgtcctccaaaatgaggattttttttttttctaaacacagatagcagacatggccatgcaaagcttcccttcttcatattatcttttaatacaagaagtattatctcaaaaaagcacccctctgcattctacatatttgttttgtagctcatgctcttg

SEQ ID NO: 901335 - DNA, 645 bp, Homo sapiens
tttaaagtttactttttttctgtgtcctcctatagtttgcccrtcggtaatcttctttgacagtctttattttcccttctaattcctattagtattgtgtttgtttttctccctcatttgtatcaccatctcctttttttttttttttttaacttcttggcatctgttgagataactgcactacaatcataatctgtgtcacaataattacttgataggtatttctccatggatatttatgttagaaatgcttaggatccaaacaaaatgaaccagcagcatctattgtagaacctctcctgtgatctctctgatttagtggtgggagaaatttgggctggcttaattaactgaaagagagggcaagtgaggcagagtgtcatgtgatctgaatcaaacctttgtatttaaatgacatatacagctagcaaatgcagatggagaaaatatgtggaattctatcaccatcaacagatatatggtggattactaggaggactaggaagtgttataatatcatgaaaatattattcacatgtattctttcaatataccatgaccaacagcctatctgaccaggtgcttgttttttcttcttcaaaaatattacagggaaatgaatcaattcataataagtggacaagt

SEQ ID NO: 901336 - DNA, 592 bp, Homo sapiens
gccagttgtttggagttttctcmtcacctccatccaacagatatgttttctgagacttgcctttattgattctttccaaagtggtcaacttagaaacagcaatgtttctttaatgctcttatttcattcgttggcataatatttaattaagttatgtaatgacagtactgaatacatctgccataaatgatttagacagcaaatgcaatggtctcttggtcagtaaacaactcacatggtgagagtggaagtttttggggttgctgaaggatacctctatgggacataatgcatttgtctgcaaggaacagaatctttaactgaaacaagttttaagctttgctttcaaaaaactctcagtgcatagtaaaaaaacgcattttaaattgtcccttagcacatatgcaagagtataaactgaagcaaattttcacaagcagcacttacctttactttatgtgatgctacctaatatttttgtctattctttcctattttaattctattagaaatgctaatcatgacccactaatataatctcatgtctcattaatggagtgcaacccacagtgtgaaaaacaccagcttaacc

SEQ ID NO: 901337 - DNA, 629 bp, Homo sapiens
gtcagggaattcgctttcctagcctagggaagctgtgacagatggcacctggaaaatcgggtcactctcaccctaatactgtgcttttccaatggtattaacaaacggcacaccaggagatgatatcccacgcctggctcagagggtcccacgcccacggagcctcattcattactagcacagcagtctgagatcgaactgcaagacggcagtgaggctaggggagaggtgcctgccattgctgaggcttgagtaggtaaacaaagcagcctggaagctcgaactgggtggagcccactgcaggtcaaggaggcctgcctgcctctgtagactccacctctggaggcagggcatagccaaacaaaaggcagcagaaacctctgcagacttcaatgtcctcgtctgacagcattgaatagagtagtggttctcccagcacggagtctgagatctgagaacagtcagactgcctcctcaagtgggtccctgatcccygagtagcataactgggaggcacccccagtaggggcagactgacagctctcacggccaggtacccctctgagatgaagcttccagaggaatgatcaggcagcaacatttgttgttcagcaatattcgctgttctg

SEQ ID NO: 901338 - DNA, 651 bp, Homo sapiens
tgcagctacatgacaaccacaagaggcaagcttgtttgaatatagrgatgctacatcaacatggagagcacaaaatccagaaatgggtcctggtgccgtcatttgaggtccaagctgtaactgaagccaaacgtactgtcaggccttttcagtagggtgattactgcatttccttttttatttaagccacgtgaagtgagattttctttcactcactatgaaaagatgcagtccaaaaagatatagcccctgtttcttgcacttgtctctctgctctttccctatgtgcaagataacctttccttgccctgcttttagatcacagtgctagcaggaacatgacttcacgcaataggaaataacaatattaagcaaatgaaaattgttcagcctcactagcaatcaaagaaatgcaaattacaatgatctcatcctgattagattgtctccctaaaaaaaaaaaactttaaaaattataatagccaactccaacaaagttatgatgaaataggtacatttatgcactgcatgtgatggtgtaaattgtgacacctattttggaaattgtttataataatcttgtcaactctcttttgcctataactgttacttaaatcttgcactgtgagttctttacatgtttttagctca

SEQ ID NO: 901339 - DNA, 665 bp, Homo sapiens
tcatctgaagtatgccataagcagtttggtgcttctaataagaatatacttttaaacatcatgtgcgtattctaagttcttcttggattattttgactatttgctgaaatgatattagggtaattaaacatatctcctactggttggcattattgatgcaatagtcaaataatacagcagcaaatatgaccaacacacttttaggaataccagtcgtcctcaacctggtgctttgcttctgttaaggtttgagtatcatcaatttaaaaggttatactcttaagaggaaaatatctgtgtaagtcatgaaggatttactaaactttaacctaatcatgttttctttggactttttcaattcttgtagggacttgtatattaaacatttcatattagagtagcaggtaattgacaccttttagttttgttaacacgtaatcttggagttgtgaaagtaatgtgaattctaggtcaacactcccaagtcctctggcagtacaggtcaaatgtatgtggctaagaagagagaagtagtaacatttttttttycctaatcatattcccttgagtatttttcttctttcaaaatttagttgctccatttaaaaaaaatctgagccatcatcattttgacatatgtataccagtatgccggcactgtgacc

SEQ ID NO: 901340 - DNA, 602 bp, Homo sapiens
atctgtacatcttcacctcagggaattacaatgaccctcatattcaacatgtctaatatagaatgaaacatcttatctcaccctttcctctcccagtctctcatttgcttcatctcctctatttcctctcaaaagtggtcactgccatttacccagggaacatggctggaaacctggaagccatcctggactccttcctcacccttccccaatatctaaccatcaccaaccaatggcgattctatagatcttaacctgttaagtctctcacgcggacgactgaaatcttttcttactggttttcaagactgaagttagttcctatacccatgcctactattcaccctgtatacttcaggcaaagagacattctagagtgtaaatctgatgatagcatgcccttctgaaaaccttcatagctccccattctatactcaacggtaggaccaaactctcatcagggttttggctacccatttagccttaacttctttttccagcmatttgttataaaatgctcaaacacacagaaaagttgaaacaattttacagtgaacacctacagacgctttatttagataatgcaattaaaaatttcctat

SEQ ID NO: 901341 - DNA, 632 bp, Homo sapiens
acagttctactagtttttgcctcacatagcttgatactctttttaggtccatatacattaaggattgttatgtcatcttgaaatctgtacctgtttatcttttttaatgcctctattcttgataccattgtttgttgtgaagtctgctctgtctgaaactaatataattactgctgctttcttttgatcattgttagcctgatatattctcctgcatcatttatttttaatccatatttatctttatatttaaagtgggtttcttatgaacaacatatagttgggtcatgatttttaatccgttctgacaatctctctcttttaattgctgtatttggaccattgatgtttgaaatgattattgatatattaaattaatgtctgtcatatttgatatactttctgtttgttgtcctcatttgtttctttttaatttaacttaatttgaagttcacaggatgtgcaggtttgttacatagataaatgtgtgccatggtggtttgccacacccatcaacccaacacttaggtgtttagccccgcatgcattagctatttatcctgatggtctcactccctctgmtcccctgacaggtcccagtgtgtgttgtttctctccctgtgtccatgtgt

SEQ ID NO: 901342 - DNA, 635 bp, Homo sapiens
ccctctgaaacctgctcttaaccctgtgccctatgtcttaattcatagattgccatgggccctctacttctgttagaaatgtactctcaatatcttcttggattctcccctctcctttaccctgtcatatcaagaatttgtatttattctatttctgaaaatgtttttgaattcaactattcaaccccttccttggcactcatactgcacgtgacatagttcaaacccttatcatctctttctggaatagctgtaatagtctcctaactgcttcgagagggtaagtgacttcacagccctcaatctgtgaaacatcagatggaaacacaaggatagctgactgatattaaaatagagtgagaggaactagagaaatcaagaatttttgaggcaataacatttcttcaaacaaacaaaaataacccagaaggggttggggagagtaactaagtctaaggcctttagctgacattaaggtcttgaatttttcttttatattttaaactatttaattgacaagggtgaatatatccaaggtgtataacacgatgaytggatatatgtatatactacataatgattatcacaaattaacacacatatcaccacccatgctgtaccttggattcccagaa

SEQ ID NO: 901343 - DNA, 681 bp, Homo sapiens
aaagtattttctaaatcttttgaaattttttttataactctattttggaatttactagactattttatcacatcttctctgctgagcacagtactagcttgtaattggagaatatgaggaagattcatgttatttatttttaataaaacaggtattgttgtcactaagccagacctgatcacctgtctggagcaaggaaaaaaacccttcactgtgaagagacatgagatgattgccaaatccccaggtaggtgcgagtgaaaatgaatacaacagacaacacagataagaggtcccaaggtcaaagagaaagccggtccttaaaatgtgatttaggaagctgtgttccaaagagaatagttcctgggattctgttttttgttttgtttttaatttggctctcacaaagggacatcttctgtcttatgcttttaaattttctaaggattctacttttctttcggtgagcttccttcaacttcacagtgagagccagagtcctcttcatggcatataagagactgcacaatctggctgcttttacatcgtcttggggacacagaaatatctgcatgactttgagaaactaaactgtttttagtctttttgcatcaggcctgaaatgtgtgagggcagtagtatcagtttcatttstttgttcatttttctgcatggtccatt

SEQ ID NO: 901344 - DNA, 627 bp, Homo sapiens
actgtctttttctcattgagtactcttggcactcttgttgaaaattgactayatacataaaggtttatttctgggctattctatcctatggtatcctgttggtttatatgcattcttgtaccagtcccatgcagctttaattactgtagcagtataataagttttgaaatcaggaagcatgagtcctccgacattgttctttgtcaagtttgttttggctattctgggccgcctttaatttccagatgaattatatcatcagctggtcattttctgcaaagaagccagctagggattttgagatggactgcattaattctatagatcaacttgggaaatattgccatcttaatacttagttttctggttcataaacatgggatttcttttcattaaatcttctttcaacatgttttgtaattttcagagtataaaagtttgtccttttgttaaatgtattactaagtattttattttttttttgacactgcattaggccacttttgcattgctataaaggaatacctgactggtattcctattggtctattgtgcatccttataccagtcccatgctgctttaatttataaagaaaagaggttttattttggcacacggttctgcag

SEQ ID NO: 901345 - DNA, 666 bp, Homo sapiens
ttcccacaatggttacactccagggagtgctcaccaggttgattttctgcctgttgaaaagggagtaagtggtgactagaggctttttcactttcaccttattcacaggaattctcttccatgaggattctgccatatataggaagcacatgatcatgactgacatgtgtaccattttcagtaggtgcgtatgacttttgccctattagctttttcgagttgaataagctcactcctctgtccaaggctctattccttcccagcaaagggcttctttaatacagtttttctaatactgagtgaagaatgaatgaattatgtactaaatacttaactctaaaatcatatttacatagatgtttacttgtggttattctctgtgagccagcaagtgttaacctaggtttacagatttctccaatttcatgaaaatcaaactccaaactctcccgagacagctttctggtgaaagcctggtgcctgaattcttacccctgctttgggtgctgatgttttaactcattcagattcccagacttctactacaaagaccaggaatacttcctagtaagtcttaccrtgtttatgccattggatgtttttcccccaggaatgttctgcatagcaattgtatcttttggtttaagttgagtttcccagtctgaa

SEQ ID NO: 901346 - DNA, 225 bp, Homo sapiens
ttttccttgacctggtcaaaatggacacaaaaataaagatgcatttattggtcctgtttgcatattttctggaatctagaacataaaccgatacaaagaccatctccagttccttgcttcaaacgttcagcaggttagccttgttcatcragggacaactgtcctgggttttgtcttcaaagagaaaaagcaacgcctactacatataccttatattctcaggag

SEQ ID NO: 901347 - DNA, 687 bp, Homo sapiens
tgtacaagatgacaccccactggcctctgtrctgttgtagacccagtcagataaaacagttggaggtcatccgtgaaggatgcacaggaaagactaggggcagcaattgaagccaatcagcccagaaggattctgggtcagcagaacagtggtcctgagtgggtgatcacttgcccactggctcttgctgtagcttctgaggaaggtataacggagggagggccacacaagtcccaaatcttacgttcttccagggacccccctctcttcccactggtccactcgaccaaggaaacatgggaaaagagtagctggaaaaggagatacactggcagcaagggctctaacagctatctgctacagtttgaatgaggacatcccctttgcatgtgccccaaattccttgccctttaactggctgagccaccatcatctagctaagcacacctgttccccaccactcacacccaggttcagtcagggcaaaaaacaacacatgccccagaaactggggcagccaggccagtcttgaccccttctagtcttgaatcaccctcccaccaaaatctgctttggaaattactgcctaggtcagactaagaaaaaccagacaagaaaagtcttttatttattttttgagatggagtctcactctgtcacccaggctggagtgctatggcgtgatct

SEQ ID NO: 901348 - DNA, 595 bp, Homo sapiens
gcatttgaatttaggacttctctctctccccgtgaaagattatctgcaaacaccccaagtgatattatatccatattttcttccatggggatctctgaccatcaygatcaagccgactcccttgccttgatttggggtctatgtgatgggagggaaaaaggttcaagtcagggaacgtcctgttttctggggctactatttcccacacccaccactgagcagaaggaaggacattgagcactacacctgatcagtggagtgtctttgaccctctgacagctcttgcatcgaccacagctgcttgcagggctgttctcagtggcagtccccatagccaccaggctgcacagccccagctgagcaaggctcttctacctgcacctgcctgggagcagagctgctaggacccctggagaaaggcagggggcaggcagctggtggagggcagagagagatgttgttgatggttttccaattctcatctggaggtcttgttaaaacctcacccccagagtctctcactcagttggttcggggtgaaacccaggaatttgcatttcttacactttccaagtgatgctgagccactgtcctg

SEQ ID NO: 901349 - DNA, 574 bp, Homo sapiens
gagggccccaaattactacttaaattctttaaaaaaaaaaaaaagactcttcctggctttgatcagagtgaaaaatatgaagtgtcagagtgatgcgacattgtcagctttaaagatggacaaaagggccatgagtcaaagcacaagggtggcccctagaagctggaaaacgcaaggaaatgaattctgtacttgagcctctgatgtggtttagctgcgtccccacccaaatcttgaattgtagctcccataatttccacgtgtcatgggagggacccagtggagggtaattgaatcatgggggcaggtctttcccatgttgttctcctgatagcatataagtctcaggagatctgatggttttataaagggcagttcccctgcacatgctttctctcttgcctgccgccatgtaagatgtccctttcctcttccttcatcttccgccatgattgtgtggcctccccagccawgtggaactgtgagtccattaaacctctttcctctgtaaactacccagtcttggatatgtctttattagcagcgtgagaacagactagtacagcctccaaat

SEQ ID NO: 901350 - DNA, 598 bp, Homo sapiens
cctctgtattctccaatgcagtggttcatggcatcatttgtgggttccaaaaaggacttatggctcctcakaacaaaataaacactgatttgatattcaaagggggagcagaaagagagggcgccagcgatgttaccaggtgctaggccatgcagggcctcataagccatagtaagtggcttgacctcctttattctgaagggagtgggcatcaagggactggagatgagacgtgtgagaaaaactggctgagaacagaggaagagcttccccatttgcattcccttgaggtctggagttgtggaagaaagccaaggaggtccctatttaccaacccagattcctaggcattaccaggagaggccagcagagggcgctgtagcccagcatatggacatgaagggaaggggactttccagactaaaggccctgccacctcctctctggcgcattctagggtcccttttagccaccaaccttggttccttctcacgttctgatgccctacccgagattctgagactagtcagtttccctcccttgtttttgttgcccatctccccttcacaaggctctgagctcccaccagggaagattg

SEQ ID NO: 901351 - DNA, 668 bp, Homo sapiens
gcagtcatggcctacgaccgctatgtggccatttgccacccactgaggtacacagtcctcatgaatgtccatttctgsggcttgctgattcttctctccatgttcatgagcactatggatgccctggttcagagtctgatggtattgcagctgtccttctgcaaaaacgttgaaatccctttgttcttctgtgaagtcgttcaggtcatcaagctcgcctgttctgacaccctcatcaacaacatcctcatatattttgcaagtagtgtatttggtgcaattcctctctctggaataattttctcttattctcaaatagtcacctctgttctgagaatgccatcagcaagaggaaagtataaagcgttttccacctgtggctgtcacctctctgttttttccttgttctatgggacagcttttggggtgtacattagttctgctgttgctgagtcttcccgaattactgctgtggcttcagtgatgtacactgtggtccctcaaatgatgaaccccttcatctacagcctgagaaataaggagatgaagaaagctttgaggaaacttattggtaggctgtttcctttttagcgatctttgtcctctgctttgaattggagcttctaaaataaatcatcataacaggattccttggtaagccagagtgc

SEQ ID NO: 901352 - DNA, 655 bp, Homo sapiens
taaagccacatggacgcccattcctggcagcagcttcagcaatcatgtatcctccacgccccctgcacccactcctgcagtcccagacgcacagctcaccattttcagggtacacggtgctcgccacaccccggggcctttgcatggctctccccacttcccagtatgctttcctctgctttctacaaagctgttccccaaccttgtcatccagtccccagtaacggtccctgaccttgctgctcaagtgcacccccagtcacgcccaaagcacacccctctttcaattctctactgtctgatttttctctttattcacatttatcatctttctgcccctctagaatggaagaccatgaataagcacaggggaaggactcaataatcagttgtcatctggataaagaaaacaactttccaggcagaagaaacggcagctggaaccaagacacctggagcagccatggagcagcggtggaacccactggtcctgagcacatgcttcggcgtgaaaaggacctgtggccagctgtggccctgggcaagctgcttgaccttcctgagtctcgcctctgcrtctgcacagtcaggactggcacagcgctggcctcctgatgctgtgtgtggtgctgtttgcagagcacttgatagaatg

SEQ ID NO: 901353 - DNA, 500 bp, Homo sapiens
cgcggtggctcacgcctgtaatcccaacactttgggaggccgaggtgggcggatcacaaggtcaggagtctgagaccagcctggccaaaatggtgaaaccccatctctactaaaaatacaaaacttagctgggcatggtggtgtatgcctatagtcccagctactcaggaagctgaggcaggagaatcgcttgaacctgggaggcagaggttgcagtgagccaagattgtgccactccagcctgggcaacagagtgacactctgtctcaaaaaaaaaagatgcaagcattttgaactggaaggagataagagaaaggaacaagtgatccagttctaagtgtcatcttttcttttatgaaggcaataaaatcttgagcttatggtaaaatgcaaaattttccccccttctcctttttcagaagcagctttgaaatcctttaataaaaggaarcctctatcattaggtaagttacctcatttataacttttattcttcatgt

SEQ ID NO: 901354 - DNA, 625 bp, Homo sapiens
ttggtaagagctcctctgtgaacgtggaggatgtctgggaatttgatgcgttgctgcttggacagcagtaacaggtccsagacagaatccaggtcctgtctgggccaatctgggaagagcttgacgatggtattgtaggcacctccggtgaaggttgatgggctggttcaggcccacccagaaggcctgctgggcccactccaaagcctggctgaggccgcgggagggctggccccctgccgatgctccttctcaaagcccctcacctgcttgccgtgaactccatgccctgtggctgagcagcagcgccgtcatccaccttcttgagaaagcatatgaagctgtcaatcatgctctccacctcctgcaggtcgagggcagtggtggtgcagtgctcagggtcaggaacgagctggcacccaccatgtcacctttctcgcaccacccacctcccatgaccaggccacgtatccagtgttcgtcttcgatacccacatccactcccccaagtgatgcccaccttctcgctgacctgctctgcttggatcggaggcagttttcttattttctttcctcaagaggtgctgtgccatacagaaggccttcctcttgccttgtttccagg

SEQ ID NO: 901355 - DNA, 625 bp, Homo sapiens
ttggtaagagctcctctgtgaacgtggaggatgtctgggaatttgatgcgttgctgcttggacagcagtaacaggtccgagacagaatccaggtcctgyctgggccaatctgggaagagcttgacgatggtattgtaggcacctccggtgaaggttgatgggctggttcaggcccacccagaaggcctgctgggcccactccaaagcctggctgaggccgcgggagggctggccccctgccgatgctccttctcaaagcccctcacctgcttgccgtgaactccatgccctgtggctgagcagcagcgccgtcatccaccttcttgagaaagcatatgaagctgtcaatcatgctctccacctcctgcaggtcgagggcagtggtggtgcagtgctcagggtcaggaacgagctggcacccaccatgtcacctttctcgcaccacccacctcccatgaccaggccacgtatccagtgttcgtcttcgatacccacatccactcccccaagtgatgcccaccttctcgctgacctgctctgcttggatcggaggcagttttcttattttctttcctcaagaggtgctgtgccatacagaaggccttcctcttgccttgtttccagg

SEQ ID NO: 901356 - DNA, 591 bp, Homo sapiens
aaaataagacaggaacacgttgactgaaattataccctgtccaatgagttgacacccctttagacagctcaccccgatgtctccagagccaccactgcaacacatggggatgacatttagactctgcacagtggcccaggagagaggccgtctcagaggagggagggtgcccacagacccctggatggcaggaggaaaagccaggaatcaccggaacctgcaggacttccattccccatctgggtgaatgtcaccaccaggcagttccactgtcccttccaggacccagcttgctttatttgatcttgacccaaagaaggttagtttttttgtcattgttttgtatttgtgtgtgtgtgtgtgtgtgtgtgttttaaaaatgtttgagtgaacgtttagcagtaatgatgtttcacatgaagacccataacctttattttaaaaacaggttgctgtggcaacaccggcccagctttcccttatggcagcaccacaggaagagagcagaggctgccccttgaggccrggcatttgctctccagttttccacagtccccaccactccctattgtaccttaagagtctggctga

SEQ ID NO: 901357 - DNA, 591 bp, Homo sapiens
aaaataagacaggaacacgttgactgaaattataccctgtccaatgagttgacacccctttagacagctcaccccgatgtctccagagccaccactgcaacacatggggatgacatttagactctgcacagtggcccaggagagaggccgtctcagaggagggagggtgcccacagacccctggatggcaggaggaaaagccaggaatcaccggaacctgcaggacttccattccccatctgggtgaatgtcaccaccaggcagttccactgtcccttccaggacccagcttgctttatttgatcttgacccaaagaaggttagtttttttgtcattgttttgtatttgtgtgtgtgtgtgtgtgtgtgtgttttaaaaatgtttgagtgaacgtttagcagtaatgatgtttcacatgaagacccataacctttattttaaaaacaggttgctgtggcaacaccggcccagctttcccttatggcagcaccacaggaagagagcagaggctgccccttgaggccaggcatttgytctccagttttccacagtccccaccactccctattgtaccttaagagtctggctga

SEQ ID NO: 901358 - DNA, 580 bp, Homo sapiens
agctacctctgactttcttcacagaattggaaaaaaaaactactttaaagttcatatggaacgaaaaaagagcccacattgccaagacaatcccaagccaaragaacaaagctggaggcatcacactacctgatttcaaactgtactacaaggctacagtaaccaaaacagcatgatactagtatgaaaacagagatatagaccaatggaacagaacagagcctcagaaataacaccacacatctaccaccacctgatctttgacaaacctgacaaaaataagaaatggggaaaggattccctatttaataaatggtgctgggaaaactggctagccatatgtagaaagctgaaactggatcccttccttacactttatacaaaaattaattcaaggtggattaaagacttaagtgttagacctaaaaccataaaaaccctagaagaaaacctaggcaataccactcaggacataggaatgggcaaggacttcatgactaaaacaccgaaagcaatggcaacaaaagccaaaattgacaagtgagatctaattaaactaaagagcttctgcacagcaaaa

SEQ ID NO: 901359 - DNA, 575 bp, Homo sapiens
atcactgggctagtatcctaggtaatgttactcttctgttgccttggccctgcatacattatgtattgtgacacatcactggggccagcamctacgtgaagtgaccctcccgcatgggcttagcccacaagggtatgatgacatatcttttcatttttcactcaggtgatgtgactctccatttatgcctgggccttgacaaaatagggattgtgacatatctctggacccagcacctaggtaatgtgacttacctctattgccagggcatggcatattgtgagtattgtgatatatctctgggcccaacacctaggggatgagaggcttctgcctgtgccttgcccacaggaggcttgatggcatgtctctgtcttcattacctagaaaggtgtgactctcctcttttatctgcattcttcccacagagaagattgtgacatatcactgggcccagcaattagaaggtgtttctctcccacctgagcctttctctcaggaaaattctgacatatccttggactcagcacccaggtgatgggtctttgccacctatggcctgcctacatagacca

SEQ ID NO: 901360 - DNA, 352 bp, Homo sapiens
tcacagcaaagattgagactcttatacatgtattcagtccaccattgagattgtaactgatgtactcaaactcaacttacaaagggtgttgattctaatacctagaaatgggtcatgtgcaggattgttaatttttccctacatttactgcaactgtaattgtgaaatacacctctgaccagcacctgagtaatttgattctcttgcctagtgcccagcctatagattggattgtgacayatcgctggacccaacacctaggtggtatgactgtacatatgccttgacactgcccacagagggctttgtgacatgtgactgagacccacaccttggttatgtgactctcctg

SEQ ID NO: 901361 - DNA, 574 bp, Homo sapiens
tgtgtactcagtgggagacttatcaagggctcaaatacatttattcttttttctcttatctacttgtgatgcrgaagccccaacctcaagttttcccatcatacctgactaaaccaatgtacatcttaaacatattgattgatgtctcatgactttctaaaatgtataagaaactgtaccccaaccaccctgggaacatttcatcaggacctcctgaggctgtgtcacaggctcctacttaactgtggcaaaataaactttctaaattaatggaccattgcagggactctgctctcttgataacaattgtttcatttgaatggctgatgggcaggtttgtacctgagactgcagcactgagctcctgggggatgtgggatgttccaagcatcagctttcagccagtttatcttgtgactcttgaaagttatttagtgtagtgtgaagatgggaataaacggctcctgaatgttaacaatggctgttcattctagggtggtccaagggggccatgcagtggttctgggttcttctgtggcttctctgtctgtggctgatggagtggttttgttgg

SEQ ID NO: 901362 - DNA, 615 bp, Homo sapiens
tcaaggatctagaactagaactaccatttgaccaagtcatcccattactgggtatatacccaaaggattataaatcatgctggtataaagacacatgcacacatatgtgtattgcggcactattcacaacagcaaagacttggagccaatccagatgtccatcaatgatagactggattaagaaaatgtggcacatatacaccatggaatactatgcagccataaaaaaggacacgttcatgtcctttatagggacatggatgaagctggaaaccattctgagcaaactatcagaaggacagaaaaccaaacaccacatgttctcacttataggtgggaattgaagaatgagaacacttggacacagggtggggaacatcacacactggagcctgtcgtggggtgatgggagctgggagggatagcattaggagatatacctaatgtaaatgatgagttaactggtgcagcatgccaacatggcacatttatacatatgtaacaaaccatattgtgcacatgtaccatagaacttaaartataatgataataatgataaggtcaggaaacaacaggtgctggagaggctgtggagaaataggaacacttttacac

SEQ ID NO: 901363 - DNA, 613 bp, Homo sapiens
aagcaagtccttagagacctacaaagagacttagactcccacacaataatgggagtctttaacacccccctgttgacattagacagatcaaygagacagaaagttaacaaggatatccaggaattgaactcagctctccaccaagcatacctaatagacatctacagaactctccgccccaaatcaacggaatatacattcttctcaacactacgtcacacttattccaaaactgaccacatagttggaagtaaagcactcctcagcaaatgtaaaagaatagaaattataacaaactgtctctcagaccacagtgcaatcaaactagaactcaggattaagaaactcacttaaaactgctcaactacatggaaactgaacaacctgctcctgaatgactgctgggtacataacaaaatttaggcagaaataaagatgttctttgaaacaaacgagaacaaagacacagcagaccagaatctctgggtcacatttaaagcagtgtgtagagggaaatttatagaactaaatgcccacaagagaaagcaggaaagatctaaaattgacaccctaatgtcacaattaaaagaactagagaagcggccgggcgcag

SEQ ID NO: 901364 - DNA, 534 bp, Homo sapiens
tctacaataataataataataataatttataaagttagcctggtgtggtggtgcgcaccagtagtcccagccacttgtggggctgagatgggagaactgcttgagcccaggagttcaagcctgcagtgagccgtaattacaccactgcactccagcctgggcaatcaagcaagaccttgtctctaagaaaaaaaaaaaaaaaaaaaggccgggtgcggtgactcagcctgtaatcccagcatgcactttgggaggctgaggcaggtggatcacgaggtcgggagttcaagaccagcctggccaacatggtgaaaccccgtctctactaaaaatacaaaaataagctgggcatggtggtgtgcacctatagtcccagctacttggaaggctgaggcaggagaatcacttgaacccgggaggcggaggttgaagtgaaccaagatcatgccactgcattccaggstggcaacagagcaagactctgtcaaagaaaaaaaaaaaaaaaaaaagaaaaaaaaagccccaaaacagatc

SEQ ID NO: 901365 - DNA, 496 bp, Homo sapiens
gtggctcacgcctgtaatcccaacactttgggaggccgaggtgggcggatcacaaggtcaggagtctgagaccagcctggccaaaatggtgaaaccccatctctactaaaaatacaaaacttagctgggcatggtggtgtatgcctatagtcccagctactcaggaagctgaggcaggagaatcgcttgaacctgggaggcagaggttgcagtgagccaagattgtgccactccagcctgggcaacagagtgacactctgtctcaaaaaaaaaagatgcaagcattttgaactggaaggagataagagaaaggaacaagtgatccagttctaagtgtcatcttttcttttatgaaggcaataaaatcttgagcttatggtaaaatgcaaaattttccccccttctcctttttcagaagcagctttgaaatcctttaataaaaggaarcctctatcattaggtaagttacctcatttataacttttattcttcatgt

SEQ ID NO: 901366 - DNA, 671 bp, Homo sapiens
atgtgtatgtaccatttttatttgtaaatttataaagttaataataataatgacaaaaagaaaataatgccttctctaagaatgcgtgaccaaccaccatccttccctcatgggaatgtggagtttcccttgtcttggatgcctaacagacctgtcaatcaccacacatcccagacctaccacatctttccccacctcacgtaaaggtggctccagcccccttgatgtgcaatccacaagatttgtggggttatccttgattcctgcatttccctcacatgacacactcagtctctcaacaaatcctataccttaattaatgtgtttattgacatgaatttcacgtgacataaaattaactgttttatctgtacagtttagcagcatttggtgcatttacactgctgtgcagcagctcctctagctggttcctgtgcctgcatgtccagagtccaagttctgacatttgtacatactcatgaagtcattgccgtcatcaagaagctgaacatccccaccatcctccaacgcttccccaggctcttcatcatctgtccctcccacarctccatccctggacaaccactggtgttctctgtgtcattacagatcacggacagaattttcttttttctttctttttttcttttctttttttttgagacagtgtc

SEQ ID NO: 901367 - DNA, 664 bp, Homo sapiens
gcttcctaatacattaagattttttatgagatgggtggtaatattaacatgtgattttttgatgttgtatagtgaactacgtcaacatttcaaagatctgcataactctttgaatcagtattttccaaatgaccagtgtatgatgttacaaaattacacatggataaaagattattcaaagtgcaatgtaacatagtatgaaaagttcacagatatgattttatattccacattgtacttaacctgccagacactaccatttcttaagttttagggtggtgtcaaagaaaaatatccacagttatctgcatggactagtaaaatattctgccattttccaactatgtaccatgagaggctagattttcttcatatacttcatatatatgattttcttcatatatttcaacctaaataacatattgccatagattgaatgcagaagcagatatgagaatccaggtgtcttttattaaaccatccatttaaaagatttgaaaaaatttaaaacatcttttgttttgttttagaaaagattatttttataacaaatcatttatgttaacagttaatggtttattgttattttaartgaattagtaaatatcttaaaatttctctgtttaaatttttaacatgacaaatatcaaaatatataactaca

SEQ ID NO: 901368 - DNA, 538 bp, Homo sapiens
ttacttgtggctcaaaacttgttcatgagagaactcatagtaatgataaaccctacaaatataacgaatgtggggaagcctttctgtggacaacttactcaaatgagaaaattgatactgatgaaaccttatgattgaaagttgtaaaagaatattttgtgtgtgtgtatagacaacttatcataataagaactcttactcttgagaaaccttgtgaatgtaagggttgtgcaaaagccattcatttctgtttatgggcaattatcttgctatccagcaattcatactagtgagaaatattttgaatataattaatatgaaaaggcctttagacttctgtacagtcttattggatatcaatttatactgatgtaaaatcatttaaatgtaaggaatgtgtgaagatcttcattcatgacayaaggtctgattaacatcaaataattggtatttgttaaaaagagtttaaataggaggaatgtgggaaggacctaaacttaattcagttcttgctgcacatcagagaattcatactgct

SEQ ID NO: 901369 - DNA, 538 bp, Homo sapiens
ttacttgtggctcaaaacttgttcatgagagaactcatagtaatgataaaccctacaaatataacgaatgtggggaagcctttctgtggacaacttactcaaatgagaaaattgatactgatgaaaccttatgattgaaagttgtaaaagaatattttgtgtgtgtgtatagacaacttatcataataagaactcttactcttgagaaaccttgtgaatgtaagggttgtgcaaaagccattcatttctgtttatgggcaattatcttgctatccagcaattcatactagtgagaaatattttgaatataattaatatgaaaaggcctttagacttctgtacagtcttattggatatcaatttatactgatgtaaaatcatttaaatgtaaggaatgtgtgaagatcttcattcatgacataargtctgattaacatcaaataattggtatttgttaaaaagagtttaaataggaggaatgtgggaaggacctaaacttaattcagttcttgctgcacatcagagaattcatactgct

SEQ ID NO: 901370 - DNA, 692 bp, Homo sapiens
tgtaaacgatgaataacagcatggtgcccatacaaagcactgcttgtgatattcgaagtgctcccaggaagccgtgaaaagttattacattacaagaaaaagttgaattgcttgtcacgtaccatagactgaggtctgtggctgcagttgcctgccatttcagacagatgattcatcttataaacagattatgtaaatatgttattgataaatacagtatggtactgtaaatgtattttctctttatgattttctttaaaatatttttctttctcggccagcactttgggaggccgaggcaggcagatcacctgaggtcaggagttcaagaccagcctggctaacatggcaaaaccccgtctctactaaaaatacaaaaaattagctgggcgtggtggtgtctgcctgtagtcccagctactagggaggctgaggcacaaaaatcgcttaaactccagaggcagaggtttcagtgagctgagatcacgccattgcactccagcctgggtgacagagcgagactctttctcaaaaaaaatttttttttctttctctagcttcattttacraatacagtgtgtaatacatatagcatacaaaattgtgttaattgactgtttatgttattggtaatgctcaatagtaggttattagtagaagttactaattggtggagtcaaaagttacctctc

SEQ ID NO: 901371 - DNA, 589 bp, Homo sapiens
gaatatattttctttttcactgtaggtctcaatgcgctcccaaatatcccatcccagattctgaaaaaacagtgtttccaaacagctcaatcaaaagaaagctttaactctgtgagatgaatgcacaaaccacaaagctgtttctcagatatctttctaggtctatctgaagacatttaattattcaccataggcctgaatatattcttaaatatctctccacagattctacaaaaacactgtttccaaacttctgaatcaaaagaaagttttaactgtgtgagatgaatgtgcacatcacaaagcaccttctcagaaacttctttttagttttttgtgaagatatttcctttttcaccataggcctcgatgtgctcccaaatatccctttgcagattcaacaaaaacagtgtttccaagatgctcaatcaaaaaaataatttatctttgtgggatgaatgcacacatcacaaagcagtttctccaaaagcttctttctggttttcattcgaagatatttcatttttcaccatagrcctcaatgcactccaaaacatccctttagggattatataaaatcggtgtttcc

SEQ ID NO: 901372 - DNA, 616 bp, Homo sapiens
ggtgatgagcagagtggagattgaagaaattctttaaagtccccggttgactttttgataactcccttagccaccaccagcagagaagaggaggactcagtgatttggggaaaagaatcttacatgagagaagtacgtaaaaggcgacataaatcgtactgaaaacaactttcgtttataaacaaaagaaaatgttatatatttataaaccaatggcagaccaattggctagacctgtaaaactcaaaaataattaccctttggaacaaacctacaaagcaaaagattcttcagctattaaactattttcggtaagtcattattttatgaagctattatttgctctaccatctctactgatttagttacagatattttaagtctgtgtctgactgtgacaaaactcggtcagggtgaccacccagttatctgggctcatggacatggtattcttttaaccagttaaggttacatttacttaattagatctgagaagtgttctctttggctgtgggagtatgtgcaggtgtgagcttggcrcattgtccacaatctttccaattaggacttcctttttttaaataataaaaataacaataattgtggccagcacaca

SEQ ID NO: 901373 - DNA, 487 bp, Homo sapiens
ctgccagtgagatttatctggttgaccttagacatggcaaggcgagacccatctggttgaccttagacatggcaagctggcagctaagtccaatgctttcagccaacatctgtctcaaattaaaaagccaacagtaaatatataacaataacaaagatataataattaaaaaccaatacataaataagtgggagtgaacaatagtaaaaggtaattaatatcacaattaaggtctctctctctttctctctctgtttgtcacacccaggcttgagtgtgaaaaaatataaaccaaaatgtcaacttcagcatgcaggaaggagcataggagaatagagagaaaaaagaacaaagaagaaaaataacagcaagtcatcctaagtattgtagaaacaaactgaaattgtagttagagaaaaaaaaagaaagagagaaaartaaggttctatctgtcgcacggactcgagaggccgagatgggaagacca

SEQ ID NO: 901374 - DNA, 689 bp, Homo sapiens
cgaaaatggtgatgggatttccattgatgacaagcttcccgttctcagccttgatggtgccatggaatttgccatgggtggaatcatactggaacatgtagaccatgtagttgaggtcaatgaaggggtcattgatggcaacaatatctactttactagagttaaaaacagccctggtgactaggctcccggttccaacaaatccattgactccggacttcaacttcactgtggtgtctcagggacgtacgtggctggcaaagcacaagaagatgcggctgtctgttgaacgggaggagcagagagccaatctgatagttttataagggggagtttccttgcacaagttctctctcttgcctgctgccatgtaagatgtgcctttcgccttccaccataattggaaggcctccccagccccacgtggaactgtaagtccactaaacctctttttctttataaatcaccatgtctcaggtatgtctttatcagcagcatgaaaacagactcatacacatgggaaaacctgaacccagtgagcctatttcttgaagtgtcagtagctcagggtatcaggtattgtctattcatcgaggcactttgactytcctttgtccaagacccaatttctggcctgtagtttccagctaaccttcaggaaagcatgaaaggaaagcagaagtcactta

SEQ ID NO: 901375 - DNA, 622 bp, Homo sapiens
taacaatctggaccccgaccctcccaccctacatgtactttatgctccagacataccaaatgaccacagtattttcatttcactaagcaaacactctttttgactcatgtctttgcatatgactttgctccaactggaatgcttcttttcacatttattctcccttttcttgggctaggtcctatttttcaaaactcagttcaagcttttcctcctctaggaagcctctcatcaatcttctctctgtaatacccttcttttctatttctagagcacctgtacctctgtttttcataatagccttattcaccacccttcctttctacttctggagcacactgtgcctctgtttttcataatagctttgctcaccatcccagtataagttccttaagcacaagcactacctggttcaacttggtaccacttcctttcactgcctggcacatagtggggtctcaataccattttgataaataatttaatgcataaatgaatttgtgtatgaaaatactgagtctcccattgtgagcttagcttagttccatttgtttctctaagtaagaaatatcataktagcaattatcaatgatccccttttgaatggcaaaggaaccagcat

SEQ ID NO: 901376 - DNA, 662 bp, Homo sapiens
cgtaacaacctccaacctactttcttccttttttwtaaattgataattttaagtctaaatgttatttgttggcaaaatattatttgaactgatatgtggatgtaggggatatgtgaccttcactgatgttagttggaatgaatttatatatttatctgcaaaagtataattgatggctttaattacagcatgctgtcccaaaccattcatggcattgttggtgatacacagcttatgtgctccttactattatgtactgtgagtttagctatttaatgtttcctccatgcatgcgagagtttaaattgttataacatcataatttgataattgtgatggagaattacatggtgtcaagaaattatgctaatagaatagacttaggaattcaaagataatttagctaaagcctaaaagataggaattagccacttgagtggaatttgggaagattatgtaaaaaacagttttgaggccaagtgctggggttcacgcctgtaatcccaacactttgggaggctgaggcgggcatatcatttaagcccagtagttcaagacgaggctgggcaacatggcaaaacctctttacaaaaaaataccaaaaatttgctaggcacggtggtgcactcctgtactcccagctactcaggaggctgagtgga

SEQ ID NO: 901377 - DNA, 609 bp, Homo sapiens
tccctactgggcgccgctccgccctggccaggccgggctccctgtgccctccacttaccttcccaggaggcggcggcggcacrggctgcagcagaggtcgaaggagtgggactcaatgcgcaagcgcggtccggctcttattcgcgccgcagcacccggatgaagaaggcggggtttcgggtgcaccaaggaagacactcaaggtcactttgtaacaactttattggcaactagccgggaaggacaacgacaaccacctggtgatggggcaagagggagacaaaaagaaaaactgtagattcaccccggcagagaggactaaacagattgacttttgatatgagttggctgcaggatagtgggcctttttcttcacgttggcaccttgtaagatttggccttttatcagttgctgcttctctgtagtagaagttgacttgctggtcattctcttcctctgtgaaataggactgtggctggcgggaggaaagaagggtcattcactacttaacaggaaactagggtccccagcaaagagaagatatttatttcaaggaacctggaaaatggttccagaagtatggctaatccttcaggtgaaagagggcc

SEQ ID NO: 901378 - DNA, 609 bp, Homo sapiens
tccctactgggcgccgctccgccctggccaggccgggctccctgtgccctccacttaccttcccaggaggcggcggcggcacgggctgcrgcagaggtcgaaggagtgggactcaatgcgcaagcgcggtccggctcttattcgcgccgcagcacccggatgaagaaggcggggtttcgggtgcaccaaggaagacactcaaggtcactttgtaacaactttattggcaactagccgggaaggacaacgacaaccacctggtgatggggcaagagggagacaaaaagaaaaactgtagattcaccccggcagagaggactaaacagattgacttttgatatgagttggctgcaggatagtgggcctttttcttcacgttggcaccttgtaagatttggccttttatcagttgctgcttctctgtagtagaagttgacttgctggtcattctcttcctctgtgaaataggactgtggctggcgggaggaaagaagggtcattcactacttaacaggaaactagggtccccagcaaagagaagatatttatttcaaggaacctggaaaatggttccagaagtatggctaatccttcaggtgaaagagggcc

SEQ ID NO: 901379 - DNA, 609 bp, Homo sapiens
tccctactgggcgccgctccgccctggccaggccgggctccctgtgccctccacttaccttcccaggaggcggcggcggcacgggctgcagcagaggtcgaaggagtgggactcaatgcgcaagcgcggtccggctcttattcgcgccgcagcacccggatgaagaaggcggggtttcgggtgcaccaaggaagacactcaaggtcactttgtaacaactttattggcaactagccgggaaggacaacgacaaccacctggtgatggggcaagagggagacaaaaagaaaaactgtagattcaccccggcagagaggactaaacagattgacttttgatatgagttggctgcaggatagtgggcctttttcttcacgttggcaccttgtaagatttggccttttatcagttgctgcttctctgtagtagaagttgacttgctggtcattctcttcctctgtgaaataggactgtggctggcgggaggaaagaagggtcattcactacttaacaggaaactagggtccccagcaaagmgaagatatttatttcaaggaacctggaaaatggttccagaagtatggctaatccttcaggtgaaagagggcc

SEQ ID NO: 901380 - DNA, 711 bp, Homo sapiens
agattgtcctggtcagaaagtagcttactgaagagaaacttgagctaggacttgaaagatggcatgatttggatagaaaaaatttctaggtatctcttaaatagatcctaacactcccagatctatcaactgcctacactgctaatcaatttctagtgtagaaaattttgtgcttaaatttcatttttgactgttctacaaattatttaaccactttaatgacatctagtatactggactagaatatttactaaatgggccacaaataatttagtaagaaacaaaaagtaaatgtatgtctccatgtcctctttaggtctaggctaaactttataaaagagttacatgaaaacaatgtcataataaaataaatgttattctgtccttcttttctggtaagatatgctagttattgaggataaaacaattgtatgtcatagtgtataattaatataaaagactacttacatgaaaagaaaatgaacaagtatgtggaaatgaaatcaaattcctctgctaattcttgcccatctcaaatgtaagtaatttcctaatttttcaatttgtggcagacacagctacttgcctatccaatatccattctctcctttttttcttacttacagagatctgtccccarttaaaaaaatgctgagcttctcagattctcttatgattaggaatggtcaatgacatgtgagttgaagttac

SEQ ID NO: 901381 - DNA, 582 bp, Homo sapiens
aaaaaaaaggctctttaagccgcaaggttaccctgcatatttggtattcataagtattttaataagaagacaagaggaggaaaacttgatayatcaactaatttgctaggttttcccaactgatttcacatcaaaacacatatagaaatgataatattcgcacaatccactggagtgaatgggacaggtggctgaccacctgtctgctttgagggcaagagatcaaaaactcacacaccaaattcactgttgggaaggtctgaaacgatgaaaatgcagatacacaaatgaaatgttaacatagttttatgaaaaatgaaatggaacaaataaatacctgtttcctttcaggttttcatcaacaaatctattttaacatgacaatgatggtcctttattgtacttttgacactgctaaggttcagcttgatgctgataagaaacaatgaggtgagaagttaagtgactggaattagcttcctacagtagaagtcactcagttatgtcacttaccagctatgtgaccttgagcaagtaatttaatcatgttgtactttaatttacctaactacaaaatgcaga

SEQ ID NO: 901382 - DNA, 588 bp, Homo sapiens
ccataatagaaaattcaaaaataaattcacacatttcagcaactgatttcaacaaagatgccaagaacacacggtatggaaagagagtctcttcagtaaatgtcacaggaaaaattatacacccactttaaaatgatgaaactatactaatctctcaccacttacaaaaatcaattcaaaataatttaaacccttaaatataagaccccaaactatgaaaatactacaggaacacacagggaaaaattcttcatgagattgatttgggcagggatttttttaaacaagacctcaaaagcatgggaaacaaaagtaaaaacaaataaatgagattatttcaaaagcttctgcacagaaaaaaaaaaaaaggcaacccacagaatgggataacatatttccaaactatgtatctgacaagaggctaatatttaaaatataccaagaactgaaacaactcaaaagcaaaaaatgaaaaataaaataaaaataaagaatctcattaaaaartgggcaaaagatttgaataaaaatatcagaatctcaaaagaagacatacaaatggccaagtacatgggaaaattctcaata

SEQ ID NO: 901383 - DNA, 475 bp, Homo sapiens
tcccagatctatcctttgagagacatttccttttagataagaaatgtactatatttgcaatcatgcagctttgttagctcccttcctgcctaaagaaatttggagcccagaccatcattctcagcaaactatcgcagggacaaaaaaccaaacaccgcatgttctcactcataggtagaaattgaacaatgagaacacatggacacaggaaggggaacatcacacaccagggcctattttggggtggggggaggtgggagggataccattaggagatatacctaatgttaaatgacaagttaacgggtgcagcacaccaacatggcatatgtatacatacgtaacaaacctgcaygttgtgcacatgtaccctaaaacttcttctgtctccattaggtttggttgagactggattgatacaaagccattaatgttcctgtaagtcttctaaggaggacctagcaccctacgtatt

SEQ ID NO: 901384 - DNA, 615 bp, Homo sapiens
aaagtgtaaaaagaaatggtacattaatacccttgaaaatataaaggtaccttaagaaggcttaaaatactgtaggcataataccaataatcttcgattatttttatgtttagtattcctttcattaacaagtgacatttagcacagtatttttttccttaaaagtaatttaattaaacaattttaacctcatatattaaaatactatattgcaaaattctaagataagatacaagtttaaggtcattgtcaagggtcactgaaaaaggaaagatctttttttcataaccttttatttttagtttttaatattaacatttgttatgctactttgtttatgacatatgctggtaattgttctacgaataaataccacaacctttataaagaacctgaaagagtctggattgaatttcattattttgttcttatgagatagcagagctttcaaaacttgaaataaggtgacaacttaaatatatttaaaaataaagacctaaattaataaagttagcataaagtcaatgaaacatttcaaagatacctgtattgtgactttcacactattgccttggaagctgtgaacctgayacaaaatgttgctgcatgcttttg

SEQ ID NO: 901385 - DNA, 622 bp, Homo sapiens
tttataattttattttatttattttaytgcttaactaccctggctagcaccttcaatacaaggttgagtagaagttgtgggaggggacatccttgtcttgtttctaactctcaggaaaaactgtcagtttttcaccagtaagtatgatgttaattatgagtttttaataaatgacctttatcagaatgaggaagttctcttttattactagttcgttgagtgtgtttattatgcaagggtattggatttttaaaaatgccttgtcttattatattgagattatcatgtttttaaaaaattccttattttgttaatgtggcatatgatattgatttctatatgttgagtcaaccttgaattcctaggctaaatccaacttggtcatggggtataattctttttacatggtgttaaactttatttatattattttgttaagaatttttatgtctatattcatgaaatatatgtttgtagttttcttgtgatgtatttgtctagttttgaaatcaaaataatactagcctcatagaataagttgggaagtgttcccttctctactaatttttgaaagagtttatgaggattggtggtaattgctctttaaatatttggtagaatt

SEQ ID NO: 901386 - DNA, 580 bp, Homo sapiens
aacaatttaagaggtaagacaagcaatttgcatatacgaatatgmctggctgaaaacacacatatgcatacacacatggacatacgtgggtctaggtgtgtgtgcatatatataaatataggtaacatttccgtgaaaaacttaactttatctttgttggaaaagagaaagagaatatcactttaagttggtggtactgataagggagatttataccatataatggttataaacacacacacacacagacacacaccacccacacacacccactcaggcataaatatacataattgtcctcaaaataagaagggttgaatattcagtccaactgagaagtcgttctctgttgttgagatgcattcttaaaaatatatttgcatatctgtttatcaaaaatcagtaaaatcagacatattatttgcaaggaatggcatgttcctgaaattttatttatctgtatattcacttacataaatgaaatataaataattacatatagctatatatagttatatgtatagattcctatttaactatataactctctacatatagttacaaagtttcctgctggggt

SEQ ID NO: 901387 - DNA, 714 bp, Homo sapiens
gcaatcccttggctattgtggctatcacagagcggctttaagcacagacatatggatccacttacgaggcttcacactaaatttgttcagtgcttgatcttccatctctctaatggcactttttttttgtcaccaacacattcatggcctgcagttgactgcttttattgcttttaattaaagtctgaaatagaaagtgtctattaatcagcgtgtgaagccaatcatgagtaaggattttataaactctttacaagatggataatagttacatcaattgtcccacctttgtcatcttggcagaaagacaatcatttaagtcattaagggaacacctgtaatctggaaatttggaaggcagcaactattttgacaggccagctacatttttttttttttaggagcaagagatgtatttaaaaattcatcatgttatggttgttgtattcatttttgcggcacagtcgaggagaaaacggtgggggactattgtgtgtgttcctcttaaataagagtagagtcaactaatcactgaaaatgaattgcaggctttgaatattctgtcctccctttctctctctctctctctctctctctmtatatatatatatatacacacacacacacacacacacacacacattttagtttttaatttttatgggtacatacaagttgtatatatttatggggtacatgagatgttttagtaca

SEQ ID NO: 901388 - DNA, 547 bp, Homo sapiens
ttatgtgacagattgcatttaaaaatgcagtcaaaactttatttcattcacaaaattattaaaactattctatataattaccttcagtgtatttgtgtacagtgtacatgaaacagaaatgcattttgtgtttagacttgggtcccatcccaaagatatcctattatggttatgcaaatattacaaaaatcagaaaaagtccaaaatccaaatcacttctgatttcaagcatgttggataaatgatactcaacctgtaatcataatgacaatagtaataaacatttattaggaacttacagtgtcctagggaatgtttgcactgttgtacacggtgtcttgggtcaggttccttaggagcagggcttttatgatgcaccttacaaagtgaaggccctcaggaaagactcaataatgagtgagaaaagcaagctaaagaaaggactcccagcctggtgatctgyccgcctcggcctcccaacgtgctgggattacaggcttgagccaccacacctggccacagttctgcttttagccagaccccagca

SEQ ID NO: 901389 - DNA, 604 bp, Homo sapiens
ttgagttttgatcctttggttttagtttgatatgctaatattttatgcaastaattaataataactaattttaataaactcagaacatctgtagaaggtacaatttaggcaactactaaatcatgcacctctttcctggattcattccgtagttttaaaacaaattagtgtccattaaatacaacatatttccattttaaagaaattatttaaattccacgtaatactttatgcatgcatgaatatttgaacatgtaaaacaaaaacaaaaatgttagaacttgtagttagcactctgttcaatgttctagttcaatttctatttttttcgtctatcctataattgtttatcttgattctattattaaatgagtatgctgggtttataagatgaaattaattccaatctagcaatttctaaattcacaattttataagtcttagctatgtgaaaataaatagaaacagacctttttgctgattttataactaaagaaacctgaattgaataattaggacataaaaatatgtgatagtaaagttttctgagaaatggccaccaaaaacaagattcattttcaagtaaacaatgcaaaaattcact

SEQ ID NO: 901390 - DNA, 606 bp, Homo sapiens
tttatcctgatgtgattattctgcattrcatgctggtatcaaagtatctcacgtaccccataaatatataaaacaatgtacccactaaaattaaaaattaaaaaaatactttataaatactataaaatcaaatgctttgaatatattcatatgctgttctaattccatccattgcaggcagttaaaaatttactgtgataaataatgtatcctaatctccctaaatgggcagatagaattacatactttttaccctttaaccctggaagaatagacgtgtctattggcaatttagaggacaaagaaagaagtgtgcagaaaccctgaagcccttactgtccaattctttatggcaccaagagatgttctcacagtctgcatcaagatggctggtggctggtaataagttttatgctagtaagtacttccgtgaaattagttatttgctggatccaaaacttcattagcttatgttaagggagaattatcttcaaagcaccctctcaactagcagggtatgccccatagacgtttgggccagaaagctcatggctgagtctatccaccccattcccttcccctacatttgcatttctgttccttaaa

SEQ ID NO: 901391 - DNA, 653 bp, Homo sapiens
caaatcgtcaatctcattgttatcaataaacaatcccaactaactggaatgaatggtccaraaactcttcagacccatggttgcaaagcaatactattaatcagtatgttttgtgcctcgagtaagggtcattgtcataaacgaacgttagcaaagcagcccaagataatgacaaacctgctgtaattaaccttgaaaacacaaacatggccattctattgatgcatgccagttcaaaatggcatatgatgaagtctggccaacatcaactggccatgtcattctgtttgtttagtaatccagtgacacttccatggtggtgttttataatgggcatccacacttggtgctaatttccatatgccacccatccatgtgactctatccagagaaatttgtctctgatttgtctctccttttcttctaggcctctggccagatgagttgtagaagactagcactttcattagctctgactgctgggaaataaatttctttcaactgtaattcctggccaactgaatgtggctgtaatgctgatgtcatccatgtacagttagcacccacatactgagtgaacccattcataagtgaacctaggacttatgccttcttcttcaatataacacacagggacatccatacaaagagag

SEQ ID NO: 901392 - DNA, 601 bp, Homo sapiens
tttaaataattttaaatctcacaattaatgttattaagagatattggataacgttctaattaaaataattttcactggagtctccttaatatagtatgaataatggcgcattttacaatttatgtcatctttctttttctggcagtttcttttttattagaaaataacctgtttatattttcacatgtgtgtttactttatgctggtaaataatgaacaaaatataggtgatttatgtgagcaaactttgtacactggacctgcctgagggcagtgtcaaggagtgacaagtggttgcctgggacactttgtgcctacaaggtccatgtaggtgtcaatcatggaatatttcctagaagagtggaagaaggaactccggcccctgttgactatttttttggcattcttctgtagtagataaaattctgttctttttcacagtcatctgtaagtgaaagatcaaagtgagcatagatctcagttratcgggtaataattaaaaagtagtaattagatgggatgatggttatctatctatctatctatctgtctgtctatctgtgacgtgggaaatgaagaggctaatgcatcttttcttatg

SEQ ID NO: 901393 - DNA, 659 bp, Homo sapiens
cctgcaaggaattctgaagcatccagtaaccaggcgcaggtgctcagagctcctgaggtcctgtgtgtgcaygccacttcccatgagcagccccacatacatccacagactgggcttggaagggtagaggtttccagagaaccagtagttgaccttcaaaggtgggagggaggctggcagagggccagctgtagagcagcagctgatggcaaggaacaaaggtcctagagctggaaacatatgtggagactcagggctcctctttgaagatttactgctagaaagggccctggaaagcatttcggttttcccttggttcacaggtaagtacacgttgaggcgcaaagggaaaatatgacttccccaggaaccaccagaagaaaactgattgagctaaaaggataattcaggtttcctgaccctatctccatatcatatctgcttggaatttgcatatccttctcctgggtaaattatggtatttgcagttccagtgtaccccaagagccagcagtcttggtctagtggttctttgctttgtggttagtgctggaactttcataagctctaaatgggtgctctgaggagaaagaatggatgatttggggcagtgggaaggagggcagggccagagctgggtctctagggtccctgagacc

SEQ ID NO: 901394 - DNA, 592 bp, Homo sapiens
ataaaaagatcagtggttgccaggggctgaggggagagaggagtgaatgggtggagcatagaggatttttagagcagtcaaaaatttctgtatgaggccgggcacagtggctcacacctgtaatcccaacactctgagaggccaaggtgggtggatcatttgaggtgagcagttcaagaccagtctggccaacgtggtgaaaccctgtctctactaaaaataaatacaaaaattagatgggcatggtggcaggtgcctgtaatcccagctacttgggaaactgagacatgagaattgcttgaacccaggaggtggaggttgcagtgagctgagattgtaccactgcactccagcctgagtgacacagcgagactgtctcaaaaaaaaaataaataaaattctgtatgatagtataatgaatacatgttctcatacacttgtccaaacccatagaatgtacaacactgagagtgaagcctaatgtatagactttgggtgataatggygtgtcaatgtaggcttatcaattgtaacaacagtaattgtaacttatcaattgtaggcttatcaattttaacaacaacaattgata

SEQ ID NO: 901395 - DNA, 659 bp, Homo sapiens
atgttgataagatatccctgtcttacagcagcagtttccagaataaggcatgactgccaccactgtgtctagaagtragaagtatctgcagtcagcccaccagattagactctgtacagggctgtgtctttgcctccttagagtgaagttttatggtgcctgaatacaggatctaggtcacaagtccacactcgagctgcaagttatgttggtaaagtgagttgctggcatctctttgagaagaatgccttaaacttggaaaggatgtttcaagaagaaaggcaaatatgcgccacagtaaccatggagagtgatttgctagagactgtttagaaagcaaacctgaaaatacctttcttcatggccaggcgcagtggctcatgcctgtaatcccaacaccttgggaaggcctaggcaggtgaattacctgaggtcaggagttcgagaccagtctggctgacatgggaaaactccgtctccactaaaaatacaaaaattagttgggtgtggtggtgggtgcctgtagtcccagctacttgggaggctgaggcaggataattgcttgaaccaggaaggcagaggttgcagtgagctgagatcacgtcattgcaccccaggttgggtgacagagtgagactcctctcaaaaataaataaata

SEQ ID NO: 901396 - DNA, 612 bp, Homo sapiens
tagtctgttttatttgattcattttttaaaaatatatattttcctttattttctatcttctgaaatatattaaatagtcttcacaggtttggtgaaattttctcataaagttttctggaattatcatatgttttttgctgtttaaatttttcttccttcatggatattaatcggaatggacttactatttctactggggttgttttggtaatttatatttttttagtattttttttaatttaggttttcaaatgaatttgaatatattttttttaaaaaaatttcttttataattcttttgagaatttcatttgtttaaaatattgttttctctttgacatttttaaatgttgtgtaattgtgctttctttctctgtgtggattaaggtggctagtggtttggttgattcattgatctttcaaagaaccaacatttgcttttattgattcctgttcctatgttttcaataatttctcaataattacttttcttttacttcttgctgctttcctttggtttatttatgtttttcctaaatttttgagttgtaagcttattccatrtattatcattgtattattatagatatttaatgctctgatttttttctg

SEQ ID NO: 901397 - DNA, 587 bp, Homo sapiens
caacattgcataagtctgactttccactcagcatcagacatcattagactcatctacatcattagatcactcctactcacattccactggccagaatccagtcacagggmcacactacaactgcaaaggaggctgggaaatgtaatctttctccaggtcccagaactgggcacttgcacggccctcacagagactcctacattgatgctacttctgcctccacagtgttcttcacactctaggagactcacagagggatttccctttgctctttggcactacatggctgatagctgtagtctgggggaagatggtggcgttcacagggcagatggtggcattcacgagggttaggctgctgaccaggcctagagtaggatgggttcaggagaagccagacattgtactaaggtcccaaagtcttgatatgagcccctcacatggacactgggtggcacagccctatagagtatctctctgctcaccttttgagaagacaatgtggagagaaaatttactttataatttttctaggaaggtagcattttgtgggttgttcttcctcaaaaccagatgttgactaggac

SEQ ID NO: 901398 - DNA, 681 bp, Homo sapiens
atagccctggctttctgcccttttctacaaaatcatcagataacactcccataaggaccttcaaattaacagacactgtaagaatgctgctctgctagcatacccttggttagaaaaaactgtgaactggrgtgtaatcccattaatgagaagaatggcttcatcaagtggaatctgtttgaaatcatccctgtaaacaacccctaagcaacagaaggagaaggaaacatatgcagagaaagaagtccagatgctaaggagaatgccttttggcatgtaggtttagaacctccaaattatatcacaaaatctgaaaacaaccacacacacagtcggaaaatgaataattcagagagatgactctaggtattttccagaaataagtgtgttacactgttcccattagaatcaacattgtcagtgtgaggcttacacactaactgagctggtaaatgctcctgcatataatttaagcaatcaaggaatgatagtaatagcccctaacatctgcataaatgtatggtgtgcaatacttttttgcatatattatgttactttatctttaccacaatccattgagatctacaggacttccatttagatatagtaaaactaaggttcagattttaggtttcttgaattcagtccattgttttttttctattgctcttaactgcaaat

SEQ ID NO: 901399 - DNA, 623 bp, Homo sapiens
tgtgggagggggtccactggaaagcacattctggagtcttgtctctcatgctccaccttgaaccagagcaccagaaccctcaaagccaactcactgactcattcacactgtctctccaaactacacagaaactgccttttgagatagctagatccctgatcctctcttcaccccatcagctcctccatctgcagatcattctagaaatactattcccagcattaacatggcactatctctagatatttgggtgtgttgcaaagaaaacagttctgaaaggagtgcaagcaggaagaagggtgaaggaggtgggaggaatttctcagggcctttggttttcaaagattacattaaaaatgccctaattcagagaacacatcagtaggagcagaagaccacgttgctcaggcatacctacacttgaagggcacacctgagctttgggcttacatcccagaggaggggcctcctgttatcctggtggacactaagtggcactaaagatgctaatttctccagccctctctactggcaaacttgaggctaggatagacytaaagctcttcacggaagggtcagcaaacagaaagaaaaactatacatttatgaaaagattctgcagc

SEQ ID NO: 901400 - DNA, 572 bp, Homo sapiens
catgtcagttctccccagatgatttatagatttattgtaattgcaatcaaaatcttagcagtctgctttgttgaaatgaacaactgattctaaaatttatttggaaatgcaaaggacccaaaatatccaaaataatttttaaaataggaacaaagttatatgatttcaaaagttactaaaagctacaacaatcaaggcagtgtgattttggcaaaatgattgaccagttaatgggaaggaatacagggtcagaaatagacccacacatccatagttaatttttttacaagggtgctatgtcaatttaacagagaaagaatgatcttttcaataaatagcactccaacaactaacatctcatacagaaaaaaataagtaaaattcaatctttccccacatagtaaacaaaaattaccttaaaatagatcatacacgtaaatgcaaaaacttaaatataaagcttttaaaagacaacataaagaaaatatttgcaacatgaatgtaggcaaaaatttctgagataggacmcaaaaaccttaaccattaaaaaacttataaaattgactttatct

SEQ ID NO: 901401 - DNA, 694 bp, Homo sapiens
gttcctctcagtctctaaaattcaccccagacagggtctctaagtcccaacatcatgccaggccgtgccagctttgggcatacaacggggagcaggcctgcgccctggccttgcaaaggggcagaggcagtggccaggcctctgaattttcaggccccaggctcatgacaccccctcatggttgggaggccccaatgcagttccccaacctctttaacccccagtcttttcttcatatctttagcttccagcacgacaatgcgactctttactccagggcctccatgaacagccccagcccctttacctctcttcctggtccactctgctccagcaacaccatcctctctctgtggcccaatcctgtcaagcatgccctcaccagggcctctgcacttgctgtcccctgcacccggggcccccactcttctcctggatagttcctcctaatcatttagatttctgttcaaaggtcacctcctccaggaagccctcctcacttcctgagtggccacacagttcactcaatccattcccattgggctctctatcttcttcatttctctgtgtccttctcccctgcagtatcccctgagagcagcaccctctcagtggttcccagcactgagctggacatacagcaggtgcaccaygaacactagctgaaggcagggaagtgaaggcccaggcctgg

SEQ ID NO: 901402 - DNA, 697 bp, Homo sapiens
tatagaaatcctaaattaaggaaaaaaagttttcagaaaaaaatagtgcaaaaccttaacagcatatatcagacatgaggtagataaatataatttttttacaaaagtgagactgatttctattgcatttgtgcatgtgacaaacatcattttgtaaaagggatgtagtactccgttatcatactgctatgaggaaatgctcaagactgagtaatttataaagggaaagaggtttaatggactcatagctccaaatgactggggagaccgcacaatcatggcagaaaacaaaagaggagcagaggcatgtcttagataatggcaggcacgagtgcatgtccagggcactgcctttttaaaaccatcagatcttatgagacttattctctgtcaggagaacagcacaggaaaaacctgctcccatgattcaattacctcccactgggtccctcccatggaggatgagatgagatttgggtggggacacagccaaaccatatcaaggggagacagctttcattgcaagtggaaaattttagtttttattgcttgaatctatgatccatttggaatgaagagcctggagacatccatagaaaaaaggaccataattgaaaatttcytttttttaaaaaagcaccacaaaattaagtaaatttccttctgatgaacattatagaaagcagaatggcatgac

SEQ ID NO: 901403 - DNA, 460 bp, Homo sapiens
acgagatctgatggttttaaaagttgcagtttcccctgaaagctctgtggctcttgccaccttgtgaggaaggtacctgcttccccttctcattacgccatgattgttagktttctgaggcctcttagccatgtggaactgtaagtcaattaaacctcttttctttataagttacccagtattgggtagtatctttatggcagtgtgagaacagaataataaagagaattggtactagcagagtggggtactgctataatgataaactgaaaatgtggaagtaactttagaactgggtaacaggcagagtttggaacaatttggaaggctcagaagaagacaggaagatgtgggaaagtttggaacttcctagagacttgtagaacagttttgaccaaaatgttgatagtgatatggataatgaagtccaagctgacatggtctctgatggagatgagca

SEQ ID NO: 901404 - DNA, 618 bp, Homo sapiens
tgactgcaagcagaaaataactcttgtttccaaaagaggtttaaataatcctttaatcctcagtgtctgcataatgctgaccgctagggagaaaataattatgtcagaggggaaaaatagttactaagtgctcttataagaaagatgttgacatattgtgcagccatttgagataacaagtaaagtaattactatttttgcatagactattggaggcatatcacacttttataaagtctgtgaactttgagcatttgttgcaagaaaaacagaaaaggtgctaacttcaggaaactacctcctccatggtgttctcgttaccttgtacatatccatatagccaaagacttgattcacagcttatttgagtcttggcagaacatcttatgataatcaataatcttacaatagggaggggataagaggcctgaaaagagctactatgaggccatcttctactcatctccctgtcttccctgagaggctgtcatgagaaagtttctcaccacctctgtgttttgataagttatgaagctttctgccccactcycctcagattagagtgtcagaatataaaaatacttaggtgcaggctatatttggctccttagcaatgat

SEQ ID NO: 901405 - DNA, 663 bp, Homo sapiens
tgcctttacagcagtttagatgagagcttttccttttctcaagaagttataatttaactgtcagtaatccagccattcttgcctaagaaaaattccatatgaaccaacataactttcatgttttactaacaacattcccctttttaccaatcagacttaagttaataggtattgtaggaagaacagagtatataggcatataatactctttcttccctctgtatatagggagagaagagtagatcaaatacatctgtgacattaccatatgatttaagcctttgcgatttctaataattttgattcctgggtggatgtaagccaaaccaatggaataattttccaaaactttaaacttgtattaatccaaaatgtatcaatatcgactatcgctcagttacatttgaagcatttcacttggattgatatctttttatctcatgttgcaggaggaattctagctccaatatattttggggctctgattgataaaacatgtatgaagtggtccaccaacagctgtggagcacaaggrgcttgtaggatatataattccgtattttttgggtaagttgtcgtaaacacatttcattaatagattttttctttgtctatgttaatgtctaagatatagcatttttagtgtgatcgtaatattaatga

SEQ ID NO: 901406 - DNA, 581 bp, Homo sapiens
atgtggattaatttctggcttttctattctgttcaactagtttgtgtgtctgtttttatgctagtatcatgctgttttggttactgtakctttgtagtatattctgacctctggtagtgtaatgaatctggctttggtctttttgataagaactgctctggagatttgaagagttttgtggttctgtagacattttctaatattttctatttcagtgaagagtgtcattggtattttgatatgaattgcatgaatttgtggattgatttggatagtagtgtcatttaaacaatactgatttttctaattcataaacacaggatttctttctacatgtttgtatcctcttcagtatttttcatcagcattttgtacattttcttggagaagtttttacctccttggcaaaatttattcctaggtcttttttttggagctcttgtaaataggtttgtccttctgattattttagctaattcattgtttatttatagaaacactactgatttttgtatattaattttgcatccagcatctttattgaaatcatttctaatgtttttttgtaagtctctagattt

SEQ ID NO: 901407 - DNA, 632 bp, Homo sapiens
ccctacaagccagaagagagtgggggccactattaaacatttttaaagaaaagaattttcaacccagaatttcatatccagactaagctttagaagcaaaggagaaayaacattctttacagacaagcaaatgctgagagatattgttaccaccaggcctgccttagaagagctcttgaaggaagcactaagtatttaaaggaaaaaccagtaccagccactgaaaaaacataccaaattgtaaaagccatcaacactatgaagaaactgcatcaactaacaggcaaaagaacacaagctagcatcataatgacagaatcaaattcacacataacaatattaactttaaatgtaaattggataaatgccccaattaaaagacatagactggcaaattggataaagagtcaagacccattggtgtgctgtattcaggagaaccatctcatgtgcaaagacacacataggctcagaataaagggatggaggaagatctaccaagcaaatggaaagcaaaaaaagcaggggttgcaatcctagtttctgataaaatagactttaaaccaacaaagatcaaaagagacaaagaagggcattacataatggtaaaggaatcaatgcaaaaagaagag

SEQ ID NO: 901408 - DNA, 569 bp, Homo sapiens
accacagtgcaaacaaattagaactcagtattaagaaactcactcaaaagcacacaactgcatggaaactgaacaacatgttcctgaatgacattttgggaaaataacaaaatgaagtcagaaataaataagttatttgaaaccaaggagaagaaagatacaatgtaccagaacccttgggacacagctaaagcagtgtttacaggaaaattaatcgcactaaatgcccacaagggaaagcaggaaagatctaaaattcacaccctaacaccacaattgaaagaacttgagaagcaagagcaaacaaattcaaaagctagcagaagacaagaaataactaagatcagagcaaaactgaaggagatagaaacatgaaaaacccttcaaaaaatcagtgaatccaggagttggtttttgaaaagatcaacaaaatagatagacgagttgccagactaataaacatgaaaaaagagaagaatcaaatagacacaataaaaaatgataagggggatatcaccactgatctcacagaaatacraactaccatgagagaatactataaacacctc

SEQ ID NO: 901409 - DNA, 620 bp, Homo sapiens
tctctgggatgcagctaaagcagtgttaaaagggaaatttataccactaaatgcccacatcaaaaagctagaaagatctcaaattgacactctaatatcacaactgaaagagccacagaactgagagcaaacaaacccaaaagctagcagaggacaaaaaatatccaagatcacagtagaaatggagatagaaacaccaaaaataattcaaaaaattaataaattcaggaggtgttttttgaaaaaaaataaactagataggttgttagatagactaataaagaagtaaagagggaataatcaaataggcccaataaaaataataaaaggtatatcaccagtgaccccacagtaatagaaaaaaccatcagagaataatataaacacctctatgaaaataaactagaaattctagaagaaatggatgaattcctgggcatatacgccctcctaagactaaatctgaaagaagttgaatccctgaatagaccaataacaagttctgaatttgaggcagtaataaatagcctacaaaccaaaaaagaaagcygaataacagatgcatttaaagctgaattcaaactattccagacaattgaaaaggagagtttcctccctaa

SEQ ID NO: 901410 - DNA, 589 bp, Homo sapiens
tgggcgtggctgctcccaaggtctctgatgtgccctggagtcattttccgcattgtcttggcaattaacatttgtctcctcattacttaytcaaatttctgctgcctgcttgaatatccccccagaaaatgggtttttctttcctactgcattgccaggctgcaaatctttcacacttttatgttctgcttcctcttgtacactttgctgcttagaaatatcttccaccagataccctaaatcatctctctcaagttcaaagttccacagatctctagggcagaggcaaaattctgccagtctctttgctacagaataacaagaatcacatttgctctagttcccaaaaagtttctcatctttatctgataccacttcagcctggactttattgtccatatcagtatcagtgttttgataaaagccattcaacaagtctcttggaagtaccaaactttcccacatcttcctgtcttctgagccctccaattctctaggaagttcaaactttcccacattttcttgtcttcttctgagtcctccaaactgttccaacttctgcccattacccagttccaaagctgcttcc

SEQ ID NO: 901411 - DNA, 597 bp, Homo sapiens
agccaggtttgtatccttcccttcaatgcagtgagttcctctaggcctcaggctggcctacagatgctgtctgagagccaaggattggagcaaaaaacccttgcaatttacctgtaatagatatctgttttactrtggctacgctggcacccaaaccacagcacaaagttcttcttgctcttctctccccttgccacaggcagaggagcctctccctgtgtccaccaccaccacaggcccaaggaagattctgccaggccaccacccatgttcaattaaagctctagggctcttcagtcagtttattatgaatgctgccaggtctcagagactcatccttcagggcagtgggtctcttagtccaggactaggctattggacagcatttctagacttgcctctggcccagggcaggtctagaaatgctttccaagagcttagtcctggactcagggaccccaaaagccttcttgttgctctgttctactgtagctgagctgctacctaaggtgcaagacaaagtcgcctttatttttccaccacttctcttaaacagaaggagtctttcaccgcaaccaccatggctgggattgtgct

SEQ ID NO: 901412 - DNA, 559 bp, Homo sapiens
aaatgaatgtactgaagcattggaacaggcttctggatgatctccctgttgaactgacagatttaaacttaaaagattcagttttgactcccaataacctggcttgaattttttgttagagkaatcttcacctttaataacacttacgggactgtgaaatggaaaaaatgtaacagggatcagtcatttttaatcctgtatgtagacatttttatcatatcatggtagatatgtcttttatgaataataaagagatattaattcaagaatttaattctaaagcctgggcaaaattggagtgagttattgaggattgaaacattttgagaaatgtataaaggattttttagatggtaggatagaaatctcagagaaagaaagattttgtttttgttgttgattgccagaaaaaaagaaagctcctcatagaaataacctttttagacacgtaaatattcttagccactgcctttttcttgtgaggaagccaagccctcataattggccaaaataaattatttttgtctctcatgtgggtatacttgtcccttacctccac

SEQ ID NO: 901413 - DNA, 606 bp, Homo sapiens
gatgacaacatccagggatagaaagggaaacatatctatattgttctcttttcttcctttcattctttttttttgagacaggatctggttctgtagcccaggctggagtgcagtggtgcaatctcggctcactgcagccttgacctcccaggctcaagtgatcctcctgcctcagcctcctgagtagctgggactacaggctcgcaccaccacccccagccattttttttttttttttttttttttgtagagacagagtctccctatgttgttcaggctggtctcaaactcctgggctcaagcaatccacctgccttggcctcccaaagtgctgggattacaggcatgagccaccatgctcagccccttgttttctttttttaaaacagtgaaaacctttccagaggcttcccaaccaattttcttgtctcattggccagaattgtatcacgtgcccttgtttaaactacccacttaacagcattaagacctgcggactggcttaaatgagaaaagattcatttcctagaactgcctaggagggtaaccctacaaaataaaggacatggtcactgaaaggagagtraaccagactggaattctctt

SEQ ID NO: 901414 - DNA, 659 bp, Homo sapiens
aaatgtttccagagactttctaaaaggaatctyatagaacgagttgagcaagaggaaacccactaaaggactgtcacatggctgaatgtataaagagaaccaaagtctgccttccgaaattgcaaaggcagtgtaatagccacaccgccccctgcaatgttaagccttggaaggtccttgaatttagacaaaaagcaattcactgtaaccagctggtgcatcgataagagaaatgtcagcaaattccctcaacctctaaaggcatggatgggggttgaggggctataggacaaatatataggaagtgcacaaagcttctcaagaagaaattttacagtaaatgagtaaacctttatatttccaagaacaatgaaaatcggttgtgaatcataatttaagaatgaaacatacaaataaataccttctaatgaattccatcaagttgggactgttataactgccttcctaagatccttctcctccacaagagactgtgtaattctataatgcaaattcccccaccaaaagttgaaagatatcaatgtaatgctcaggaagaatacattttgaatatccttataaatatcaatacttccataaaaatattaaactttggtgttagatttcaaattctgcacaattctgacttatattctgat

SEQ ID NO: 901415 - DNA, 591 bp, Homo sapiens
ggttgaactaatttacattcccaccaacagtgtaaaagtgttcctttttctctgcagcctcaccagcatctgttgtttcttgactttttaataattgccattctgactggcatgagatggtatctcattgtggttttcatttgcatctctctgatgatcggtcatgttgagctttttttcatatgtttgttggccatgtaaatgtcttcttttgagaagtgtctgttcatatcctttgcccatgtttgatggggttgtttgtttcttataaatatgtttaagttccttttaaattaagaatattagacctttgtcagatgggtagttgtaaaaattttctgtcattctgtaggttgcctgttcgctctgatgatagtttcttttgctgtgcagaagtgctttagtttgattagatcccatttgtaaattctggcttttgtttcaattgcttttgccattttcatcatgaagtctttgcccatgcctatgtactgaatggtactgcctaggttttcttctagggtttttaatgkttttgggttttatatttaagtctttaattcatcttgaattaatttttgtttaatgtgt

SEQ ID NO: 901416 - DNA, 575 bp, Homo sapiens
tacattagttatggtacaggtattcgtttcaaaaatctcattaaaggccaagtgcagtaatttaccatattcagtattagctttataattctgcaaatcaatgggcctaatataaaaataggcactttgtagcagataaaatttagaaagatattcaaattggtatagtgaaaacttttaaatttctatttactaacataatgttgacttggagaatctatgaaagtcaggttttatgacagaagatgtccaagtccacctaccagggtttagttccatacattctccaaaggacagtattcttagaactaaactatagatttaggccatttatttaaacttgggcaacttcaaacaagcttgaaacacaagagtgccttgaaaataactgtaaaagtcatttacttcccttcgatttttaaatggtaccctatacataaaaggtttttcccttattcaatcaaaggtaatgtatattacttccaaagtataggagtattaatttaagctgaccaaaaamagaggacccagatactcgtttccaaagatgttttgaatccacctattttcaaaag

SEQ ID NO: 901417 - DNA, 615 bp, Homo sapiens
gggatctctgacctcaaagggcactgaccaataggcatactcctgyagagggtgtctgacaactcctgttgaagggtctcactcaattgggtaacacagggaactggaccagtttaatgaagtactttgactgtctcttggtggagggtttgtgctttactcggggggaaatccactcatctgggctacctggattcctcacaactagcaggacgaaagactatatcttctggtcagtggagactggccacccctctcactaggggctcagggccagggagatcaaagttttgtccctgagcccctggctggagttgctggagttcctgcagggaggcctcacccagtgagcagggatgggtcagggccatgcctggagaggcactctggccacagtctgccacagctgatgtgttgggcttgaaccaagccatccagcctccctggctccagcaggggaaaagtgtggcctggaactataaagatggctgccacccttcccccaccctgggagcttagtgtgttaggcagctttaggtctgagtgttggctgctgcccctccccaaggagctcagatgactcagatagcaggaagctgcagctgtggtgatgcc

SEQ ID NO: 901418 - DNA, 490 bp, Homo sapiens
caatgtcattgtcagaaatgtactaatgacaaataatgttatttcatatgtttctcctagcatgtactcattgtttactgatgttgcatacattgtaaaagaagaaaacaagaaatctctttctcttagttaagcacaggtttatttgtttgggctcctgtgttgagtggacaggcaggaggtaatacagtcagtagtgagtgacatattatgttccatcgagctgcctgtgtggcatcttttgtgatgtttcatatggtttctactaaattccacttcagaattatcccctagctggatgcactaagggtgcaaggcttttcatacaaaacccttggtgatcaccctgtgcagtctgctcrtaagtaaagaagactgttagtctgaagcattcgctgttatctggttttcaaggggagctttttagtcaaagatgtgcattgattgacatctccattgtattagattctcctgccaatgaaaagactgt

SEQ ID NO: 901419 - DNA, 594 bp, Homo sapiens
gtatatatgtaccacattttctctatccagtctcattgatgggcattttggttgattccatgtctttgctattgtaaatagtgctgcaatgaacatacatgttcatgtgtctttagagtagaatgatttatattcctttgggtatatacccagtaacgggattgctgggtcaaatggtatttctggttctagatccttgaggaatcaccacacagtcttccacaatggttgaactaatttacattcccaccagtgtaaaagtgtctctatttctccatagcctcaccagcatctattgtttcttgactttttaataatcactatcctgactggcatgaaatggtatctaattgtggttttgatttgcagttctctaatgatcagtgatgtcgagcttttcttcatgttttttggccacataaatgtctttttttgagaagtgtctagtctgatcatatcctttgacyactttttgatgcggttgtttttttcttgtaaatttgtttaagttccttgtatattctgaatattaggccattgtcagatgagtatattgcaaaaattttctcccactctcaagggtgcctgttcact

SEQ ID NO: 901420 - DNA, 598 bp, Homo sapiens
gttctatcaatacctactttattgtgagtttttaacatgaagggatgttgaattttattgaaggccttttctgcatctattgagataatcatgtggtttttgtcattggttctgtttatgtgatggattacgtttattgatctgtgtatgttgaaccagtcttgcagcccaaggatgaagctgacttgattgtgatgggtacatttttcaatgtgctgctggatttagtttgccagtattctattgaggattttcacattgatgttcatcaggaataatggcctgaaattttcttttttgtgtttgtctctgccaggttttggtatcaggatgatgctggcctcattaaatgagttagggaggagttcttccttttcagttgtttggaatagtttcagaaggaatggaaccaactcctttttgtacctctggtagaattcggctgtgaatccatctggtcctgggctttttttggttggtaggctattaattgctgcctcaatttcagaactcgttattggtstcttcaggaatttgacttcttcctggtttagtcttgggagggtgtatgtgtcctggtatccatttcttctagatt

SEQ ID NO: 901421 - DNA, 598 bp, Homo sapiens
gttctatcaatacctactttattgtgagtttttaacatgaagggatgttgaattttattgaaggccttttctgcatctattgagataatcatgtggtttttgtcattggttctgtttatgtgatggattacgtttattgatctgtgtatgttgaaccagtcttgcagcccaaggatgaagctgacttgattgtgatgggtacatttttcaatgtgctgctggatttagtttgccagtattctattgaggattttcacattgatgttcatcaggaataatggcctgaaattttcttttttgtgtttgtctctgccaggttttggtatcaggatgatgctggcctcattaaatgagttagggaggagttcttccttttcagttgtttggaatagtttcagaaggaatggaaccaactcctttttgtacctctggtagaattcggctgtgaatccatctggtcctgggctttttttggttggtaggctattaattgctgcctcaatttcagaactcgttattggtgtcttcaggratttgacttcttcctggtttagtcttgggagggtgtatgtgtcctggtatccatttcttctagatt

SEQ ID NO: 901422 - DNA, 567 bp, Homo sapiens
attttaatgatggttgtaatagaagcagagttctcagaaataatgataatatgctatgctcaagtcccgtgttatctagtgaatgcatgtgaagagctttctggcccttccacattcttttgttaataaaaatatctagggaacttaatgaaactaataagtcttatatttattgttttttgtctttaaaaaaacagaattaattagaagaaactgagggataagacttaaggaaaacatatgaagataacaaagtaggaataaagaatccatgctagcaggtgaaagcgctcaaggagttaaaaataattacaagtgacaaatcttaaaggtgtggcctttcacccagggtttgagcctaattatattttgtaatctattttaataatgactaatccatgttttcaaaaatatcacaagtttttcctaaacatgcaaacctagttctagtgtggtttctaattcatctactaattaacagaaaatattgatataataawacccaaaagctcatatcattcttagttataattgcctatcatatgaatacagttcaaatgtaatgga

SEQ ID NO: 901423 - DNA, 625 bp, Homo sapiens
ttcttagttaactagtacttcatacctctcatttattasctctaggttgtagtttttgattatatgattaaagttttctttcccgcaagatcctcagctgcatcaggcagtaatcttgtttggttttgatccttattttatcccagttttcagtacataataaatatgaattaataaacgcttactctacttgacaatgaagatgaagggcatatgctcaaactgattcaccccaggtgcaggaatatgccttgatgaatagacttattctccccatcagcacacaatatctgtggagcacccaagtgcaaagctttgtgtaatacaaatttgtgctatagaaaacatcgctcatggggaagatattcagagacactatgccacacaactagaagtaacaaagaaatgagctctgttataaatgagattgatgtcgatcttttattatttcagataatagtaactaaactgtctgcaaggtttcattcaaatacctataaataaactaatattattacatttaacacagatttgagcttgctttctgtttaggaccacagagctagcgaggcacatgtcgacaacaaaactgccaataagaatccgcatgagatttgggtaatga

SEQ ID NO: 901424 - DNA, 599 bp, Homo sapiens
tcagaagttccaagatctgcagatggcaagctaaagacctgtgagagttgatggtgtaagttccatgctgaacaccagaaggcctgrgacccaaaaagacttgtttcagtttcagtctgaaggcagaataggtcgatgtcatagtacaaggtagtcagtcaggaggactcccctcttactcatgggagggtcaggtttttgttgttgttgttctattctggtcttcaactgcttggatgagtcctactactcacattagggagggaaatctgcattcttcagtctagtctactgatttaaatgttaacctaatccaaaaccaccctcacagacatatccagaatatttgaccaaatatctgggcacctactgccccaatcaagttgaaacataaaagtagtactaagctttctcaggtaggcatttttagtgggggcggggcttggattatcctaggaacgtggtcttgggacaatagaaaccatgctaaagtttggtgaactctcttcatgcattgagttggtgaagtcatttgtgccaagagttttgtagttcttaacagtcagcattattattacataatcttctgtagaagagtt

SEQ ID NO: 901425 - DNA, 610 bp, Homo sapiens
ctgtagcccctttgttctggccaatttctcccattaggaatggctgtatttgcccaatgcctgtacacccattgtctctagctagtaaccaacttgcttttgatcttayaggctcataggcagaagggacttgccttgtctcagatgagacttcagactgtggacttttgagctaatgctgaaatgagttaagactttgggagactgttgggaaggaatgattggttttgaaatgaaaggacataagatttgggaggggccagaggtggaataatatggtttggccctttccccacccaaatctcatcttgaattcccacatgttgtgggagtgacctggtggaaggtatttgaatcatgggggcaagtctttcctgtgctgttcgcatgatagtgaataaatctcatgagatctgatggttttaaaaaggggagtttgcctgcataagctcacttctcttgtctgccaccatgtgagatgtgcctttcaccttccaccatgatcatgaggtctccccagccatgtggaactgtaagtccaataagcctctttcttttgtaaattgcccagtctcaggtatgcctttatcagcagcatgaaaacaaatta

SEQ ID NO: 901426 - DNA, 620 bp, Homo sapiens
ggatgcatttaataatttttctttcattttgaccttagagaatccgatgattatrtttcttggggttgatcttctgggggagcatcttaatgggattctctgcaggtccagaatttgaatgttggcctgtcttactaggttgaagaagttctgaacgatatcctgaagtatgttttccaacttggttccattctcatctctttcaggtaccccaatccattgtaggcacagtgtctttacatgatcccatatttcttggaggttttgttcattccttttcattatttttctctattcttatctgcctattttagaaagatattcttcaagctctgagattctgctattgatacttgtgattgcattgtaaatttctcgtgttatgtttctcagctcctttaggttggttatgttcatctcgaaactggctgtcctggctatcagcttttgtattgttttatgatgattatagcttctctgcattgggttacaacatgctcctttagctcagcaaagtttattattatccaccttctgaagcctacttctgtcaatttagccatctcagcctcagccctgttctgtgcccttcctggagagatgctgcaataatttggagg

SEQ ID NO: 901427 - DNA, 624 bp, Homo sapiens
aatattgtatgggtaatttcgtgtttgatttcacaggccctgcagtttttggttacttccttgatccagtctttgatcasctctgtagccccaacctctcaagtcttaccagcccccatctatcccttcagccctgtctgccttttttgttctagattcccccagcctggccagtccaggccatctctgtagaagacttgatggcctccactggacctgatcacttagggaagagaagaaaagccatagcaatagaagaccaagaaagggagagatatagaatcatttttttttaagaagccaaaaaataaaaaataaaaggaagggagaaaaaaggaagaacacatctagggcattcctatttttaggtattgagattttcaaaaaatagacacacacctaaatacatatttgtcaaagaaaatatgtgtcttctagtaaacttttctacgttgctatctatttttagacaaagtatatattagtagtagtagtattatttgagatggagttttttgttcttgtcacccaggctggagtgcaatggcgtgaccttggctcactgcaaactctgcctcctgggttcaagtgattctcctgcctcagcctctctagtagctggga

SEQ ID NO: 901428 - DNA, 609 bp, Homo sapiens
gttgagcagggtgtgagactcctgggaagggaagaataggaaccatccctgggattgttctagccttcccaatcctttcctctgaggttcagcagtgcaagggagaccatcaggtcaacgtgggggagggtacttggcccatgtttctagacatcgggaaatctgtgctgaggagccttggaggccagtgtccattcataagagcctaaagtccttacgaagaaacaaaaacaaaaacaaacaaaagctgggcctgtatattagttttctagggctgccatagcaaatatcacagactagggggcttaaacaacagagaaatctgttttctcagttctggaagctgtaagtccaagattaaggtgccagtagagtgttttcttctgaggtctgtcttctccccgtgtcttcacatggtcttccctccctgtttttctgtgtctgtattagtctgttctcacactgctataaagaaatactccagactgggtaatttataaaggaaagaggtttatttgactcacagttctgcatggctggggaagcttcaggcaacttayaatcatggtggaaggtgaaggagaaacaaatgcacatcttacgtggtga

SEQ ID NO: 901429 - DNA, 493 bp, Homo sapiens
accaaagtttcaggatacaaaatcaatacacaaatattagttgcacttcttccattagcaatgaacaatctgaaaacrgaaattaagaaaatcatttcatttacaataacataaaagagaataaaatactaaagaattaacttaatcatgagggcaagcaacttgtacactcaacactacaaaatgttactgaagaaaatgaaaaagacacaaacaggtggaaggatagtctatgttcatggattggaaaacttaatatttttgagatatcaataccacccaaaactatctaaactaatcaatacaattcttctaaagtttctaatgacattttggagaaaaagaaatattaatcttaaaatccatacagaatcccaagaggccctgaatagctaaaacaatattgataaatatgaagaaatttggagaattcccactttctgatttcaaaggttactacaaagccatggtaatcaaaacagtgtggaactgg

SEQ ID NO: 901430 - DNA, 622 bp, Homo sapiens
gaagtttctacataatttttcttttaaagtttaagaatcgaaaaatacactttgacttagcaaagcatttscctaaagtggcctacaggacacagctgcagagaggctgctggaggagggtcatttggtccttcaggtttggacacactgggtgaaatagttctctctactacagggctgcctggagttttcaatcacctaaggtgcattttttttttttttgagatggagtctcaccctgttgcccaggctggaatgcaatggcacaatctcggctcactacaacctccgcctcctgggctcaagtgattctcctgcctcagcctcccgagtagctgggattatgggtgcgcaccaccttacccagctaattttttgtatctttagtagagacggggtttcaccatgttggccaggctggtctcaaactcctgacctcgtgatccgcccacctcggcctccccaaagtgctaaggtgcattttaaatctcgaagacagaggcagaagctctaaggacctcctgtcttgagagttgctttctgaggcaggaacttgccttaagagaacaaaagctctctacaagaactaccctgccattgaggtgactgttctttctataga

SEQ ID NO: 901431 - DNA, 529 bp, Homo sapiens
tggcagcaggggaaatgtcagacacttataaaaccatcagatctcatgagaactcattatcctgagaacagcatagtggaaactgcccccatgattcaattacctcccattgactctctcccacaacatgtggggattacaattcaagatgagatttgggtggggacacagccaaactatatccttccataactggcccctcccaaatctcatgtcctcacattttaaaacacaatcatgccttcccaacagtcctccaaaatcttaactaatttaagcattaacccaaaagtccaagttcaaagtctcatctgagacaaggcaagatccttctgcctatggacctgtaaaatcaaaagcaagttagttacttcccacatacaatggaaatacaggcattgggtaaatacacccattccaaatgggagaaattggccaaaacaaaggggctataggccccatgmaagtccaaaatccaatagggaagtcattaaactttaaagttccaaaatgatctcctttgactcca

SEQ ID NO: 901432 - DNA, 669 bp, Homo sapiens
aagatatgctgaaagcaccacaggcatatataaaatttggactgcatctcatttgtagttactacttaaaaatggaattcagccaaaggatcatttctttttcatctataaaataaaagcactttcacaaagaatcctagagctgggagaaaaaaaagaaacaactttaaagataatctagtctagtgattttcgaattgtgctctctagagctacaaagcaaagttgctccaactttggctaaacatttgagtcactgggaagatttttaaaatatagatgctaggctgggcacagtggctcatgcctgtaatcccagcactttgggaggccaaggctagtggatcacttgaggccaggatttcgagaccagcctggccaacatagtgacacccccttctctactaaaaatacaaaaaaaaattagttaggtgtggtggtacatgcccctaatcccagctactcgggaggctgaggcacgagaatcacttgaacctgggaggcagaggttgcagtagctgagatcgtgccactctactccagcctagggtacagaggagactctgtctcaaaatataaacaaataaatgaattaaaatatagatgctagarcttcactcccagagaatccagttcagctagtatgcgtgggctgggcacatatgtttt

SEQ ID NO: 901433 - DNA, 583 bp, Homo sapiens
cccagggggtatactaagtccttagtcacatgtactgtcytttctccttgggatgctggagaaactgatgaatctggcttcatttcttccccctgctcctgtccgctactgcatccctccaatgcaacatattttcctgccttaactttcctcctctatgaagagcaccaacatatgaccaggaggccatacctaagcagatatcaccctcaccaagtcctagagactttacattttcatgtcctcccccatgttgccaatctttttgctactacctatggtgagtgctcaccatttcttagctggaagcctggtaatctcacctctagttccatctctccaattattgctatgctttctcaggaccttttcaacagtttctcactaactgaagaaagcattattatactatcattcactgagtttttatcattttccataaattgtctgcaatccttatagtaatcccacaaggaacatgccatcattcaggaagtaaaccatataccttacatttggatgcagggcttattgattccaaagccttgttcttttcactattcttctcccagcctgttctcca

SEQ ID NO: 901434 - DNA, 575 bp, Homo sapiens
gtggagactgaagatgtgactgaactgctgcaatctcgcgacaaaattttaatgcataaggagctgcttcttatggatgagcaaagaaagtgstttttgagtggaatctatgggtgaagatgccatgaacattgttgaaatgacaagcatttagaagattacacaaacttagatggtaaagcagtagcagggtttgagaggatggactgtaattgtaaaagaagttctactatgggcaaaatgctatcaaacagcattgaatgatacagagaaatctttcatgaaagaaagtcaactgttggggcaaactgtattacggtcttattttttttaattacctcagtcactccaaccttcagcaaccaccaccctgatcagtcagcagccatcaacatcaacacaagaccttccaccagcaaaaagattacaagattacaactagctgaaggctctgatgattgttagcattttttttgcaataaaatatttttaaaattacattgtacattggttttttcaacataaggctattgtacacttaatagaatacagtatagtaaaaacataacttttat

SEQ ID NO: 901435 - DNA, 573 bp, Homo sapiens
acatcatccaatgtcttgagggcctgaatagaacaaaaaggtggaggaagggtgaatttgctctctcttcttgagctggtgcatccatcttctcctgtcttcagacaatggtggtcctggtttttgggcctttggattcctactgggactacatcagtggctcccctgggtctcaggccttcatgtgtagattggaactgggaatatgggatttctcagcctccacaactatatgagctaataataataaacctctttctatacatctatgtatatcttactgtttctctggagaaccccactaatacaaagtcctttgaccatttttttgttgtttgttgttgtagtggtagaggagttctttatatattttggatatttatcccttatcagatatatgacttaccaatattttcttctattctctgagttcccttctcactctgttgrtagtatgtgttagtgaacagaagctgttaattttgatgaagttcaatttatctgttttttttttattttgttgcctgtgcttttgatgttacatcccagaaatcattgccaaatccaatgtca

SEQ ID NO: 901436 - DNA, 554 bp, Homo sapiens
agcagcccacctttggtgggtcaattggccagctctgggcctcacacattcagaaagttgcaaacaggatcagtttagacatcacactctgtgaggaatggctgaaggaatagtctagataaaagaggcggaggctggaggaagtggggtaggtgggagtttagtctctgcttttacatttctgcagggcttttccagggaagaaatggccttgttccaaaggtggtgagaagagtgggtggctactgtcctggataccaggaagcaagttctgatgcagggcaccaagaagacctgtttagtatgcaacctctgaattttaaaaaagggaaaaaggccaaaaatatagacttctatttgcagaaaagaaaccctggaaaggatacacaaaaaaaacaaaaagtgggttatctattggaaaggggataaggggattgttgggaatggtgggggggaagaaagtggaacttaatactttgtaaytacatagcactttatgttgtttacttttaagccaagtgagcatattacacattcaagatattaaattaaaa

SEQ ID NO: 901437 - DNA, 610 bp, Homo sapiens
ttctttataacagcatgaaaatggactaatacattattcattataaaaatkcaaataaaaacaatcaggtagtacttcaaccccactaggataactgtgataaaaacaaacaccccaccccctgcaaataataagttttggtgagacagtgaagaaattggatccctcatatactgctagtggaaaaataaaatgttttagccaccgtgcaaacaatttggtggttcctcaaaaagttaaacatggaattactacatgaccctggaattctactcctatgtgtatactcaacagaattgaaaacacatgctcaaacaaatacgtgtacatgcatgtttataggagcactattcacaatagccaaaggtgaaaatagcccaaataatcctcaacagaagaatggataaacaaattgtggtatatatgtacaatggaatattatttagctataagaagaaatggagttctgatttttactacaacatggatgaatcttgaaagctttatgctaagtgaagaagctggatgcaaaaatctacatattgtttagttccacttatatgaaatatctataatagataagtcgttagagatggaatgaagattgatg

SEQ ID NO: 901438 - DNA, 640 bp, Homo sapiens
agagagaaagtccaggttacctacaaagggaaacccatcagactaacagcagacttctcagtgaaaaccctacaagctagaagagattgggggccaattattcaacattcttaaagaaaagaacttccaacccagaatttcatgtctggcaaaactaagcttcataagcaaaaaagaaataagatcctttccagacaagcaaatgcttagggaatttgtcaccaccaggcatgccttgcaagagctcctgaaagaagcactaaatatggaaaggaaaaactattaccagccactacaaaaacacactaaagcacacagactagtggcactatgaagcaaccacataaacaagttcacaaaataaccagctaacatcatgacaggatcaaattcatacatatcaatattaaccttaaatgtaaatgggctaaatgtccccaattaaaagacacaaaatggcaagctggataaagagctaagacccattggtatgctgtctccaaaagacccatctcacgtrcaaagacaaacacaggctcaaaataaagggatgaaggaaaatttaccatgcaaatggaaaacagaaaaaagcaggagtttcaatcctagtttctgacaaaataaattttaaaccaacaaa

SEQ ID NO: 901439 - DNA, 659 bp, Homo sapiens
agttttatgactggacatcataaaattatgataatgactgaatctatttcctgaaaccatatgtcttacagatatgtaattttgaaatacaaaaaattttaacatgtcagtatcttttaattcagggtcacatccaggcatatttcaggagaattttattaaatgctaggaagactagaatatccatgtctggaataaaattatagtcagtttaatgcagtgattcttaatctttttgcacattaaaatcacctgggaagctgttaaaaaatgccaatgtctgtttcccaccccaaattaataaaatcagagtctagaaataggatcaggcatttttaaaaaaagtttttggttaattttattttacagaaaatcactgtcctaatgtggagaagcaattaagtcattgtctaaggcagcaaatagtttaattccttggtctaaaattagaaggtccagcctgtgtagaccaacatattcttgtcagccaacttcatatgaggtgcaaagctcactgaagtgtcaagacaaatcagtagtcaaaaggaatcaaacattactgagtggcaactgaaaatctcaaccyacatttggaatggtcctagagaagtgttatttcctggaactaaatggagattggagacattcagtgtggcttt

SEQ ID NO: 901440 - DNA, 671 bp, Homo sapiens
aaaatacaaccaaatgcaagttwaatgaataataaaactaaagatatgttataatgcattctaaaaataagagatttccctatattgtactttcgaatctacattagaactgttgtacattttgtggatacctatgatttccaaatacatttcaatatgaaaaataataattctactatgaaacataaaaaagaacattaaacaaagattttttggttaatgaacataatggagatttggcctcaggggaatgatgataatgaaaatggtcatatattatgagagttaccattctattgaatgacaagatccattccttccttttggcatagaaaaacactctatagaaccaaagggacctaattctcgtctatgttttatctacaatgtgaataaattttcctaattaaacatatgtattaatagagaattttatgctttcaaactttcctcagctctttctttcctgaaaccttaataatggagacactaagtccatttctctaacaccttcgcacaggacattagagataaaaacaaccctcttcctctggcataagcttaattttccgccttggaaaaacaaatgtttatacaatttgattttatttataccattctatgcaatgaatttctacattactttgacacatttgcgactcccctttact

SEQ ID NO: 901441 - DNA, 714 bp, Homo sapiens
tgtactgaaaaatattcgtcaagcttctgaaagtaaaacaaaagagcaggagtctgcttatgactgggtctccctggagtttttccccactcagtcgcgtccacagtgagcctccagcagtttgtcaatgacagtttaggttttcctacctcacctgggcactgttttctgcaaaggtttctacttgtgagtttctactctggtaagttgggattctctggactcatctgtctctccagtttggaaggcagcaattttccctgtgacctcacttatcttccatatctaagaacagtttttgattttcagtttgttcagcatttcgcttgttgtttggacagagtggcaacctctaagatccttacgcggctgaccagaaaccattaacaatcatttgtaccgtttttcccctttgtgcagttttgttgtatttttgttgttgtttttctgctgcttctgtaattttattttttcggtaattttttgttttcggtagtttgagtataatttccctagaaacagccttcttgtatttatcctgggcagagggagagtccaaagtccgtggcaggttttctgtgagttcttggctatgggttcacccacacttcagctcyctccctcctctccagtgtcctgcctgcagactttatccacttcagttgccctcacattgatttctgtctccttatgtgaatagtacttctacactct

SEQ ID NO: 901442 - DNA, 647 bp, Homo sapiens
acatcttggttgcttccagtttttggcaattattagtaaagtggctatgaagattcatgtgcgtgtttttgtgtagacagcttttarattcaattggctaaatacctagcagtgcaattgcgggatcatatgttaagacaaaactatttttggaggccggacgcggtggctcacgcctgtaatcccagcactttgggaggctgaggcgggtggatcacgaggtcaggagatcgagaccatcctggctaacacagtgaaaccccgtctctactaaaaatacaaaaaattagccgggcgaggtggcgggtgcctgtagtcccaactactcaggaggctgaggcagaagaatggcgtgaaccccggggggcggagcctgcagtgagccgagatcgcgccactgcactccagcctgggcgacagcaagacttagtctcaaaaaaaaaaaaaaagacaaaactatttttagttttgtaagaaactgtcaaactgccttccaaagtagctttaccattttgcattccactagcaatgaatgagagttcatattgttccacatcctcaccagcatttggtattgtcagtttttttattttagctattctaatgggtgtgtagtggtatctaatggctgttttaattgcaatctt

SEQ ID NO: 901443 - DNA, 733 bp, Homo sapiens
atttatttatttatttggttaacactttcttttattattgctttgtgtttctcagaagaatagaggcctggtgaggggaggtagcagagtcttcttgttgagaaatcwatgcccagcacccagatggccaggaaggggccagcggctctgggctgctaccctgcacccagagcttcccaggtgctctttggatctcacttgggtcagcactttatttacaactctcagtcctcatacctcagcctccaaaatgcacatggtatatcattttatgtcatttgctgggcctgttgaaattcttctcacagctatgtgggcaggagggaaaagggttgatacagaaagaggtatgcaaagtgcctatatctttaaaaaataaaacacactttgggaggccgaggcaggtggatcacttgaggtcaggagttggagatcagcctgaccaacatggtgaaagcctgtctctactaaaaatacaaaaatagctgggtgtggtggtgggcacctataatcgcagttacttgggaggctgaggcaggagaattgcttgaacccgggaggtggaggttgcagtgagccaagatcacgccactgcactctagcctgggtgatagagtgagactctgtctcaaaaataaaataaaataaaataaaataaaaaataaagcacaaacatgaatttcataagaaagagttttagggacttatagattcagagcctcagtaaggaaat

SEQ ID NO: 901444 - DNA, 590 bp, Homo sapiens
ggacacaggcatgggcaaggcttcacaamtaaaacaccaaaagcaatgacaataaaagccaaaattgacaaatgggatctaattaaactaaagagtttctgaacagcaaaagaaactatcatcagagtgaacaggcaacttacagaatgggagaaaaattttgcaatctatccatctgacaaagggctaatatccagaatctacaaggaacttaaacaaatttacaagaaaaaaaacaaacgaccccatcaaaaagtgggtgaaaaagagaagcgaacaggcacttctcaaaagaagacatttatgcggccaaaaaacatatggaaaaaagctcatcatcactggtcattagagaaatgcaaatcaaaaccacaatgagataccatctcatgccagttagaatggccatcactggaaattcaggaaacaacagatgctggggaggatgtggagaaataggaatgcttttatactgctagtgggagggtgaattagttcaaccattgcggaagacagtgtggcgattcctcaaggatctaaaaccagaaataccgtttgacccagcaatcccattactgggtatataccca

SEQ ID NO: 901445 - DNA, 633 bp, Homo sapiens
aggtcttccaagaatcaagggcaaagtgtagatcagaattgttgtgtcatgtgacaatgcatgtcagagtttctctaggtcaccctgcctcatgtccatggyatcacctggcctcaaggacagagtcatggctggtcaatatcaaaagcccaaggccaaccaaatcttgggtcaaccatgccataggactgctcccgtgatattgctgacatcccaaaccaacaacaatttagaattagccacatcagttagcaaagtcatgatagccagtggtgtctccagtcagggttagaatgtcactccctgcattagtgagtcctgagcactgctggattattacttcagagcatcctgacatgaaggaaagagaagtacatttcagcttgtggccgtgtgatcctccctaaattctccaccctggaagccagaacaactgagggatttgacccacttaattgtttcaccaagtccagaaaaacttagtgatgggtgacaggtctctgaaaagagccacacagaccacaagtagcatagaaatgactgaggacataagggaggttcctttgaagccaaccgtatgaacattatggaattatccttctcccccaatacttccttagcacacagagagga

SEQ ID NO: 901446 - DNA, 780 bp, Homo sapiens
tccaatccatgcacatagggcatctttccatttatttgtgccttccttaatttgtttcatcaatgttttatattgttcagcatataacaggccttttttctctttggttaaatttatccctaagtatgacattttattttttgtagctatcataaatggtattgttttcttgatttcttttttgtacagtttattgttagtatatggaagtgctatttatttttgtatgttggttttatatcctgcaactttactatatttattagttacatcagttttttttttttttggtggcgtctttaaaggtttctatgtataaggtcatcttgtccacaaacaaggacagtttaaattcttcttaaatttaggtgtcatttatttatttcccttgcctaattgctatggctaggacttaaaggactatgctgattagaagtagtgacagtggccatccttgttttgttcctgatgttggaagaatatctttcagcttttaaccattgatgtgaaaattttcaccagtgatgttagctatgggttgtcatatatggccttttttgtcttgaggtacatttattctctacctaatatgttgaggactttctatcatgaaaggatgttgaattttgtaaagtactttttctgcatctgttaagacaatcctatgggttttgtcctttgttttgttaacaagctcagtaattttaaagtgcataatttattggcttgtagcacattcacagtggwgcacaaccaacatcactatctcattccaaaact

SEQ ID NO: 901447 - DNA, 648 bp, Homo sapiens
cagtgtgacaagggaacataacagctattaagcattcagatattctcaagacaamagagaagattctcttttatagcagtcttcacctttaaacagatctaccctcaagttagtgtattagaagatagctacaacggtatcaaatgtggacaactagttaggaggaacttaatatagatataattaatatagttataattaaacaaacatccaagtttatttaaacagaataaaacaataagaacagacaaaactataacagcattaggtaaagtatttcccaaagggctttagttaatagcctgtaagattcagtacatcaatatcaaaggaaatatataccttactcatttaatattttgcttggaagtcaaaagaaatgttttgagtatttgtttatcattaccagctgttctgtctaaaccctcaagagatagattataagaggaactgaaaacaaggactatggtgagtctcctaatattaattgatgactctcttaatattctattatacagataaattcttctaaacatcacattttagcctcttctaaggtttgtacacatctatatcatttatgaacccatatctagcaggatgtttctgtatcacagacctcaggttactgtggactagattggagaa

SEQ ID NO: 901448 - DNA, 623 bp, Homo sapiens
acgaccagagtctcattatcagaaaaggtatttaccggtaagcccaayaactattatgaatttttgaagaaaaagaacaatgacctgcagctgaaaggttttccctcctaagccactgtgtggacagcctgtacaatgacactaatctctgagaattttctggggcctgtatttgtggggaatttgtttcttcatggagaaggacagagaggcagctggcgtttgttgagcactccctctgtgccacacgcgttacatacattatagcattttgtcttcaaacaacctgggcaaatagaagttaatattcccatgttacatgtgagaaactgatgctctaaaagaagtggtaactggctaaagataacccatctaggaagtgtcagatcctgactcaggcaggtcttggtctttattgagacaggcctctgtctttccaacgaaacagctaaatcagcgtagaaagctgaggaaaggtggggaaaagatacactttgtcaggaagaagtgaaaagccttcttgtcaaacaaactggtcataaccaaaggctttataagaaccctgggttagcaaagaacttttcagtcccccacaagctcttcttcctgccatctcatgtatc

SEQ ID NO: 901449 - DNA, 577 bp, Homo sapiens
ctttatgtcctactatcatacatggaaacgtgcctattttgcatattgttatattaaataataagacatatgcttagcttcccctaggttaaattttttacctaattgttattaacgtaaataatccagaaatkaaagttttttaaaaaatttccagtgccctcactgtgcataatataattctattttttaaagtgttagtgctgtttgcattatataaaagaatattttagtgtatcaactaactacatacctgaaagcatggcttactttttcattagtatatacttttggttgtactcggctatttttctaaaagtgcttgcaaatcagttccaggccacagggctttgtcttcaacaaaataagaatgtctcagagacccacagaaataactgtaccaagtactcctataaacaggcttctgatagaatgacttacataactttgaaacactatcagtggactaagttatttctctaattctagcagagaagcatatgtgcttacaagatagagtaaaacaagtatgaataaaacaggactaaatgaactgacgatgaatgataataggttt

SEQ ID NO: 901450 - DNA, 577 bp, Homo sapiens
ctttatgtcctactatcatacatggaaacgtgcctattttgcatattgttatattaaataataagacatatgcttagcttcccctaggttaaattttttacctaattgttattaacgtaaataatccagaaattaaagttttttaaaaaatttccagtgccctcactgtgcataatataattctattttttaaagtgttagtgctgtttgcattatataaaagaatattttagtgtatcaactaactacatacctgaaagcatggcttactttttcattagtatatacttttggttgtactcggctatttttctaaaagtgcttgcaaatcagttccaggccacagggctttgtcttcaacaaaataagaatgtctcagagacccacagaaataactgtaccaagtactcctataaacaggcttctgatagaatgacttacataactttgaaacactatcagtggactaagttatttctctaattctagcagagaagcatatgtgcttacaagatagagtaaaacaagtatgartaaaacaggactaaatgaactgacgatgaatgataataggttt

SEQ ID NO: 901451 - DNA, 641 bp, Homo sapiens
ctgctcctattatctcctcatttacattaggtatatctcctaatgttatcccttccccctcccccatcccacaacaggccccggtgtgtgatgttctccttcccgtgtccaagtgttctcattgttcagttcccacctaggagtgagaacatgccatgtttggttttttgttcttgcgatagtttgctgagaatgatgatttccagcttcatccatgtccttacaaaggacatgaactcatcattttttatggttgcatagtattccatggtgtatatgtgccacattttcttaatccaatctatgattattggacatttgggttggttccaagtctttgctattgtgaataatgccacaatgaacacacgtgtgcatgtgtctttatagcaacacaacatggtactggtaccaaatcagagtacgtggtactggtaccaaatggagcagaacagagccctcagaaatagtgccacacatctgcaactatctgatctttgacaaacctgacwaaaacaagaaatggggaaaggattccctatttaataaatggtgctgggaaaactggctagccatatgtagaaagctgaaaatggatcccttccttacacgttacacaaaaattaattcaagatggatta

SEQ ID NO: 901452 - DNA, 591 bp, Homo sapiens
atgttttttggtatagaagtctgaactaagtcagaagtgataacctatcacatttgttgttttccctttgacagaaactagaaccaggtccccaaagagttcatccaatgactarcagaaattcttcagtttgcagaatgacagataagaaaagatacaacttgttgaaagaatgaaatttattccacttatgagacttctaaaaagtggctaaaattggtcggaaccaatatggtcaactggagtctgtgtgaaataagctcactgatgtaaaagcccaaatttccatcacatgttttgtactaactgtccccaaatttgcacatgtgatctgtgtgtagcaagaaaaaatagttgttcatgcccagtgattttccatacatttttcctttaagcaattccgtactaatccagaagctacctcctaaacctttctgagaatattactacctttaagtaagcacagggaaacagacttgagctggaatcccatctctttgttagaaacccggtgttatagtacctgcttctgaggcactgagaggtgagctgcgttttaaaataacagagtcactcacaacttagtgttgt

SEQ ID NO: 901453 - DNA, 574 bp, Homo sapiens
gtgcacctcacttgtctgcatcaccatggcccctaggagtgagcacgagcttccacaacctttgctgacaaacaggggttccgcccaacacagccatgatgcctcaacatccrgagagaccctgccttgtatcagcacaagactcctgggtttaatgatgcttgaccctagcttctttcaagactttggtcttcatttgtgcatctgcagggagcagggagcatggagggaacagcaagggctgggagtgggtaccaagtcaaattccagcaccacaacagggagcctcgtcttcagccagttcattcaactcagggggcttcagcgtcctcactggtccagtacaggcaacattccccctggcctgctgtggggtaacaggaaaaaacatggggtgccgccaatgacattgggagatgtatctgggggtgaggttctggagagcttcaagccctgggggatttgggtcttgaaggcacactgtggacctggagcagcactagccctgcatggcaccaggaccctgcccctcaccatgaaccagaaccctctccctgggagatgagttctcacc

SEQ ID NO: 901454 - DNA, 596 bp, Homo sapiens
ttttgtgtttctgccagcaatatgtgagcattccagttgctcctcatgctggtacttggtatggttwaataaataaataaaaaattagccattcaagtaggtctgtagtggcattgcattgtgttttaatttgtaatttcttaagaactaatgattttgaaccttttttatgtgcttatttactgtctatacatcttctattgtaaagtgtctattcaaatcttttgcccatttctttgaattggggactttgttttctaattattgctttttaaaagcgttttttatttgtttattttttgttttttgtttttttgttttgagatgtcatcttgctctgttgcccaggctggagtgcagtggcgtgatctcagctcaccacaacctctgcctcctgggttcaagcgattctcctgcttcagcctcccgagtagctgggactacagatgtgcaccacccatgcccagctaaattttgtatttttagtagagacggggtttcactatgttggccaggctggtctcaaactgctgaccttgtgatccacccccctcagcctcccaaagtgctaggattacaggcatgagccaccacac

SEQ ID NO: 901455 - DNA, 504 bp, Homo sapiens
acaaaaagaattctcacctgctaagaaggtctggcaggtggtcccagtaatacctttcttatctaggaagtagctcaattattttcacctctgacaaagtgataaacttcagaatactcaccaaagcaagaggatagagggaatggaactgctagctccagcaccccaatgtggagtaagttgtctgaacacagcctcgctctctagcataaattcccctctttctccaaagagccacaatggccgaggtgttggcatgcaaatacttgcaaagtgaaaatagatacacttccacagctcctcatccctggcctccagtggacagcctgccaaccatgcatgcttgttggtttggcaccgagacaaatgttccctggagcatagactgaaaccaccaaactgatatcacaygggatgccagccaaattctgaccttgctctctgtaggtgagtggctgtggaattaacctgtgatggtttcctgctcctgcctggttggtagcc

SEQ ID NO: 901456 - DNA, 565 bp, Homo sapiens
gacttaaaacaacaatcaattgttcttactgatcttacttagttcagctgatctaagctgggtttggctggagtgacttgactgttctccacatttctctcatcttcctcttgggatcrtcaggccagtcccggcatgactttctaatataatggcaaaggcacaacagcacaagcaaaagctcccaagatctcttgtggtctaggtttggaactggtacattatcatctctgcctcagttttttattgtggtaagagatacataaaatttacaatttcaactctttttaagtgcacagtttgatgccattgcatacatctaccttgttgtgcagctatcatcactgtctccagaattttttcatcaactgaaactctgcactcctcctccctcccttctcccagcctctggtagccactattccactttctgtttctatgaatttggctgctccaggtacctcatataagtggaatcatacaatatttgtccttttatatctgacttccttcatttagcataatgttttcaaggctcatccatgttgtagcatatgtcagaatg

SEQ ID NO: 901457 - DNA, 599 bp, Homo sapiens
ctcttgaatgcttatatcaattatttcatttccttatcttattacatttactrgactcccccaagtcaacatttaataacattgtacacaagtcagaccaatcttattcttgattttaatagatcactgtttcactctttaggataatatttactgtgaatttttgtttttttgattttattgtttttaagcaattttattttattcaaattctatagctttctatattttattagaatggtattgatttttttatttgccttttcagcatctatcaggattttctcttttaattagttaacttaatggcttatttcagtagttatgtatatttgcagaaaggaggctcaggaagaacattcaaaatttgaagagatggcctctggagatatgtggagcaaggagaggagaggctgcttctgctcagcaagtgttatttgagctatctatgttcctctttctttaggagctgtgagttaggtaaagatgtgtgaagagtccttcctgccattgaagcaggcagcataccagcatttgccatcctttaggcagagaagactaggaaagaggaaggcatcaaccgggtgaaaagataggct

SEQ ID NO: 901458 - DNA, 620 bp, Homo sapiens
tgtggcagatatttgaatatataaccttctctattctttaatgaaaagtcaggctatgaagcaaaagtctatgaawatgcatcttttctaagagaaagcatacaccagactggatggtttacacggaaggttgaaggaatgttttagtcactgttttccaatctgctttttcagaagcaggtattgctaatgtagaaaaaaatgttggtagtctttctcttttgtttggtttaaaaaggatgaggctttgttttcttcctgttattcattttgcaactgcacaactactgctccggcaccgcagcagcttttgccagagtcagaggtgaggtcatgcttgactgaagaaatctaagatcaatttgttgtctcatatttcaacattaaatgcagcttgaaatataattgttagtccatgcactctgtgctttaaggaagtgttccagcatctcagaacagggagtgtggttatcagtgataaaccacaacgtgtaccctaaaccacggctaaccagaattttcaggctgagagagacagaaagaggggcagaagggagactggagagggaaaagacaaaaaaagacagagctttggggagtcaaaagaagtgaatggcttg

SEQ ID NO: 901459 - DNA, 575 bp, Homo sapiens
ctactgaaaccagcacttggataagccatcctacagaggctataaccggtgaacttttcttttgccctaaaaacacccagcactggagatctaaccctcagcatagtctgttcctaagggagaggggagtgtagcctgccaaagccccccttgtgcccaaggaaatgcaagtacagcaccagctgctgaaggcggcaccaccataacccagaaacggatatgaagaggctgtcatctctcaccctctggcctccttagtgtgtgcactcttgcaggctcaacagtggctcttatcagagcacagggagtgtggggtgaaagaaaatgcttcttaggcttatacagtggttccaaccccattgaaggtgaagaatgtatgctggggaagggtgcttttcatgcttctccattccctttgccctgcccttattggctggctcttactcttaactgccacctaatggactgcagtttcaattcaataaaaagacttaacgattttaaataaataygcatccaacattggagaatccagatttactaaaaaaattacttctaaacttaaaaaaagactc

SEQ ID NO: 901460 - DNA, 670 bp, Homo sapiens
atattttgcttccacttaaagaaatcttccaactgaatttaaagaagaccacactgtgattaagaggatgttggagtgtaataaagatgagaagacagcaagagaygaaccatatttgggggtactaaaacaacctataagtatggtcacagagcctctcacagggtggatctttgggtctccatggagaatgtaagaggtggtaaagaatgagggcgggttctcactcataggtggaattgaacaatgagaacacttggacacagggtggggatcgtcacaccccgggggcctgtcgtggggtgggggcgggggacggatagcattaggagaaacgcctaatgtaaatgactagttaatgcgtgcagcaaaccaacatggcacatgtatacctatgtaacaatcctacacgttgttcacatggaccctagaacttaaagtataataataaaaaaaagaaaattcaattagaaagaattaaattcaaatatataattaaaaaaagaatgagggcaggaagaaaatttttctgggttgaggaagagaaaaacatacatctttgaaactgtggacatccagcttaggccagccctgagttatcatgtagaggagagatgggacttactttctgtggttccagctgaaaaaaaaaatacctagcacttaggga

SEQ ID NO: 901461 - DNA, 648 bp, Homo sapiens
acagattataccatttttaagtgtagaatttagtggtagtaagtatagagagaaycttaaaagcagcaagagaaaagtgacttctcatgtgcaagggagcctctagaagattatcagtggatatttcagcagaaaccctgcaggccagaaggtggtgggatgatacattgaaagtactgaaagagtaaagcctgccaactgagaatactatatttgacaaaactgtccttcaaaagtgaaggagaaattaagacattcccagataaataaaagctgaaggagtttattaccactagacctgaccaataagaaataataaaggggccgggcacagtggctcatgtctgtaatcccagcactttcgggagccgaggcaggtggatcacctgaggtcaggtgttcaagaccagcttgaccaacatggcgaaaccccatctctaataaaaatacaaaaattagctgggtgtggtggcacgcacctgtaatcctagctactcaggaggctgaggcaggagaatcacttgtacccgggaggtagaggttgcagtgagctgagatcacaccactgcactccagtctgggcaacggagcgagacttcatctcaaaaaaaaaaaaaagaaacaataaagggagtccttcaagttgat

SEQ ID NO: 901462 - DNA, 569 bp, Homo sapiens
gggcagattagtgggagaaacaggcagagtctacaagggatccctccgttatttcttacaactgcatgtcaatctataatgatctcaagaaataaaaattcaattttaaaaacctgcagttccaagtctgccttgcagctggaggtagtcaatgagatggaaagcagcagctcttacggaaatcacagaagtctaggatgtacactttgctctttttctcccttccttatgtttcttgccaagaatgtgaatgtgaggatgggaatacagcagttatcttgaaccatgaagcaacactgagggaagaagccacgtgaaaagggtggtgaaatatgaaagaaggaaggaatcttggtcactgctgcctcatctggtttatgcctttagaatcacagtccgttggagtgacatcccctggagttgtgcggtgcataacctgggcaactraacatacatgtgcaaccactaacaccgtgaaactgactgatattaatctcctggactgttaacctttagatttctgttgcataagacaggaataaacttgttttgtaaaggctgtgggtttt

SEQ ID NO: 901463 - DNA, 679 bp, Homo sapiens
tgcaagccccaagccttggcagcttccatgtggtgttgagcctgtgggtgctcagaagagttgaggtttaggaacctccacttagatttcaaaggatgtatataaacacctagatgtccaggcagaagtttgctgcaggggcagagcactcatacagaacctccactagggcagtgtggaaggaaaatgtgggaatgtggggtgggcaccctcacacagtgtccccactgggacagtgtccccactggggcagtgtctagtggagctgtgagaagagggccaccattctcaagaccctagaatggcagatggactgacagcttgcaccttgagcctggaaaagccacagacactcaaagccagcctctgaaactagccaggagggaggctatcccctgcaaagccacagaggcagagctgcccaaaaccatgaggactcacttctgcatcagtgtgacttagatgtgagacataaagtcaaaggaaatcattttggaacattaagatttgactgcccttctggatttcagactttcatggggcctgtagcccctttgtttgggccaatttatcccatttggaatggctgtatttactcaatkcctgtacccccattgtatctaggaagtaactaattgcttttgattttacaggctcataggaaaaagggacttgcctt

SEQ ID NO: 901464 - DNA, 627 bp, Homo sapiens
aaatatttatgaagaacaaatagtgataaaatcttataaaagatcacacagtgttcctgaaaatttgagagttaggtcaaggtgtgataagtaatataaaasccaattcatactagccttgacaaaaactggttttatttatttatataatgaaaagaccaaggatggttctggatccagttgagactaaattgaatgactctaatgatgtcatcgaggtcatagtctttcttgttttacattgctgctctacagagtctattcctgggtcatgataagtgcctttcccatctgcaaccaacactgataactcctggtactcctgaagtggtccaaaagagttgtggaagccacagtccttcattcttccactatagcataaaagggaatggaatagttaatttctttttccactgtctataacactatctgcttatgccccattggctcttcttgggtaacatgcacgtttattacattaacatgtccagtttatgaaaagagcatgactagtgtaactaaagattaaaaaggaaaaggaaaacatgtctaccatgctattaatagttaaccaacatcagatatataatcttgatgattagatttatgtaatcctctaaacgaatg

SEQ ID NO: 901465 - DNA, 596 bp, Homo sapiens
gaccttattgtctatatgctatcaggcttttggtaaaagccattccacaagtctctagaaagttccaaactttctcacgttttcctgctttcttttgagcmctccaaattgttccactctctgcctgttacgcagttccaaagttacttccacatttttgcttacctttttagcaatgccctgctctactggtaccagtttactgtattagtccattttcatgctgctgataaagatatatctaagactgggaagaaaaaaagttttaattggacttacagttccacatgtttggggaggcctccaaatcatggcagaaggcaaaaggcacttcttacatggcggcagcaggagaaaatgaggaagatgcaaaagcggaaacccctgatgaaaccatcagatctcatgagacttattcactaccacaagaacaatatggggaaaaccacccccgtgattcaaattatctactactgcatccctcctacaatgcgtgggaattataggagtataattcatgatgagatttggctgggtcacagggccaaaccatgtcagccctgtggttgctttcatgggctggcattgagtgcctg

SEQ ID NO: 901466 - DNA, 596 bp, Homo sapiens
gaccttattgtctatatgctatcaggcttttggtaaaagccattccacaagtctctagaaagttccaaactttctcacgttttcctgctttcttttgagcactccaaattgttccactctctrcctgttacgcagttccaaagttacttccacatttttgcttacctttttagcaatgccctgctctactggtaccagtttactgtattagtccattttcatgctgctgataaagatatatctaagactgggaagaaaaaaagttttaattggacttacagttccacatgtttggggaggcctccaaatcatggcagaaggcaaaaggcacttcttacatggcggcagcaggagaaaatgaggaagatgcaaaagcggaaacccctgatgaaaccatcagatctcatgagacttattcactaccacaagaacaatatggggaaaaccacccccgtgattcaaattatctactactgcatccctcctacaatgcgtgggaattataggagtataattcatgatgagatttggctgggtcacagggccaaaccatgtcagccctgtggttgctttcatgggctggcattgagtgcctg

SEQ ID NO: 901467 - DNA, 594 bp, Homo sapiens
tcagtgaaaaccttataggccagaagtgaacggtgtgacatatttcaatgctgaagaaaaaaatttttgacctagaacagtatattcagtgaaaatatccttcaaaccttaaggagaaatactttcccagaaaaacaaaagttaaaggatttcataaataccagaattgtcccacaagaaatgcaaaagagagtacttcaatcagcaaaaaaaaaaaaaaaaaaaaaaaaattgatttttaatgagcaataataaataatctcaaggaacaaaactcactgatagtattaggtccacagaaaaacacaaaatattttaatgttgtaactgggatatgtaaactactctcaagtaaaaagactaaagggtgaaccattcaaaaataataactacaacaacttttcagggcttaggcggtaaattaagatttaattagaaccaacaagaagttaaacaacggggagatgaagttaaraaggggtataatttttattagttttcttttggctggttggttaattcaaacagggttaagtttttgtcagcttaaaataatgggttacaaagcagtatttacaagctacattgtaactt

SEQ ID NO: 901468 - DNA, 594 bp, Homo sapiens
tcagtgaaaaccttataggccagaagtgaacggtgtgacatatttcaatgctgaagaaaaaaatttttgacctagaacagtatattcagtgaaaatatccttcaaaccttaaggagaaatactttcccagaaaaacaaaagttaaaggatttcataaataccagaattgtcccacaagaaatgcaaaagagagtacttcaatcagcaaaaaaaaaaaaaaaaaaaaaaaaattgatttttaatgagcaataataaataatctcaaggaacaaaactcactgatagtattaggtccacagaaaaacacaaaatattttaatgttgtaactgggatatgtaaactactctcaagtaaaaagactaaagggtgaaccattcaaaaataataactacaacaacttttcagggcttaggcggtaaattaagatttaattagaaccaacaagaagttaaacaacggggagatgaagttaaaaagkggtataatttttattagttttcttttggctggttggttaattcaaacagggttaagtttttgtcagcttaaaataatgggttacaaagcagtatttacaagctacattgtaactt

SEQ ID NO: 901469 - DNA, 594 bp, Homo sapiens
tcagtgaaaaccttataggccagaagtgaacggtgtgacatatttcaatgctgaagaaaaaaatttttgacctagaacagtatattcagtgaaaatatccttcaaaccttaaggagaaatactttcccagaaaaacaaaagttaaaggatttcataaataccagaattgtcccacaagaaatgcaaaagagagtacttcaatcagcaaaaaaaaaaaaaaaaaaaaaaaaattgatttttaatgagcaataataaataatctcaaggaacaaaactcactgatagtattaggtccacagaaaaacacaaaatattttaatgttgtaactgggatatgtaaactactctcaagtaaaaagactaaagggtgaaccattcaaaaataataactacaacaacttttcagggcttaggcggtaaattaagatttaattagaaccaacaagaagttaaacaacggggagatgaagttaaaaaggggtataatttttattagttttcttttggctggttggttaattcaaacagkgttaagtttttgtcagcttaaaataatgggttacaaagcagtatttacaagctacattgtaactt

SEQ ID NO: 901470 - DNA, 660 bp, Homo sapiens
ccttacagaggaaagctttttttactgtagtctccagccatttgcaagagcatcatctgagtgattgttaaagttacagaaattgaagcaaaagaaaaatctgcatttctaacgagttctttaggaagtattatttatatctaggtttgagaactattggtctaagggctttctttcagttttattttatctggagagactcccactcactctgacacctttcagaagccacctttgcctgtagtggttactgcaaggcatttcctgagccggcctcttagaacaaaatgtggaagggggcaatgagctgagtggtggtggaattacagagagaatcatttgttgtaattcaccaccccgtacatctgtggtgggaggttatgaagagtgatggatggtgaaggatggcactctgtgatcttctctctgctgaggactcagggaatgtagccatggcaggaaagcaggggttgccagcaagaagctgcccaagtgtgtgaccttgaccaaggcagggaacggggcctgccaaagactaaggcagctgctactgggaggattccytaaatgctttatggcagactgcatttctcaaaatggttcaacgatatttttagacccacatgctcttccagaactgtatctctccttttaaaaggt

SEQ ID NO: 901471 - DNA, 349 bp, Homo sapiens
ttcagaaaataatagctaagtgtaatcagaaattatgaacatgttttctgggttgctttgtaaagaatttactttcacatattttataaccaaaggaaataaattygaaatggaacttcaggcatcagcatgacttgaagggctcagcactgtgatgccatgggtttgtctaaagagccacctgaaaacagtaccttcacgattctggggcaagttatagcagtgcaggtcaggtcaattcatttgtgaccaaaggatctattgcacactaaattatatgttctccacaaagtccaagaacaatatagaacctgataatgtatcatatttagttattatattaacaaaa

SEQ ID NO: 901472 - DNA, 349 bp, Homo sapiens
ttcagaaaataatagctaagtgtaatcagaaattatgaacatgttttctgggttgctttgtaaagaatttactttcacatattttataaccaaaggaaataaatttraaatggaacttcaggcatcagcatgacttgaagggctcagcactgtgatgccatgggtttgtctaaagagccacctgaaaacagtaccttcacgattctggggcaagttatagcagtgcaggtcaggtcaattcatttgtgaccaaaggatctattgcacactaaattatatgttctccacaaagtccaagaacaatatagaacctgataatgtatcatatttagttattatattaacaaaa

SEQ ID NO: 901473 - DNA, 646 bp, Homo sapiens
gggtctgtgttcttactgtgtctcagaagcatttgacgcagtggrcctctttctccttgaagcgttctgttcccttggcttccatgccactgtgcactctggcagttctgcttggtgttctctactgcctgtgctgcctccctcggctccttgatgttggacttccttgacatccttttcctttctaccccctccctaggtggtctcatctcctccgtggctctaaatcccactcatacattgacagctctcaaatatctgtatacctggatctctcctctgaccccagatacctatatctaactgcctttctacctgaaggctcttggttatgttaaacttaacacacccaaaactgaacttctggttactcccctccagccccttcatcctcagcttccccatttcagtaaatggcacaactacccacccagttgttcaaaccacaagcctgggagacccccgtctccaatacaaatgcaggtccagataattctacttccaaactgcatccttaatcactccattttcaccatctctgctcccactagcctagtccaagctaccagcagctctcgagcaactgtgagagcctcctaatcagctgccactccacttccactctgtccctttctacttctttcct

SEQ ID NO: 901474 - DNA, 651 bp, Homo sapiens
attaccaagcaaagccatcaagcattaaaggaaacaaagaagaaccaaaaaaatagaaagtacaaaatgatatggcaggggtaagatcaattattagttawaacattaaatagaaattggaaatacttcactaaaattagattttttgaacaattcaacctgatcattactagagggacacataatataaaatatacaggaagtttaaatgggaaggatggacaaagtttatttaatcacttgcaagcagaaagggaagagatgatatcagataaagcaaaacaaaaagtgttaaaaggaatgaaaagggtcatttttataatgatcaagactaaatgtataactattacagactcttttgtgataaatctcattgttccaaaatatactgagtacaacctaaacgtcccaaaagaagaatggttaaatgtattgtggtatatctgtgtggtagtcttatttgtaatggttaagaatggtattgttgaagtttctttgtttatcaaaaaagccattagtgatatattgttgatcaaaaaaccatactgcagatagtgtgaatattatgcttctactttgattaaagtagaaccaaaaatgttaacaagggttatctctcagtgatgtaactggagtcaatttaaatatttt

SEQ ID NO: 901475 - DNA, 629 bp, Homo sapiens
tgcactgaaaacagctgggtatcatgtcctctagctctaagttgcctttcattaataacctatcrcatctgactaggactgcgggaaatgaaagtataattctggctaaaggaattggtagaaataagtcataagccctagaaaaatgttgtaactgtaagttttatctgtagcgaaactatattaataaagttactaaaagtaaaaagtcatttacagcttgcagttgaggaaactgtttttgtaggaaagctctttcctcagaatgttgaactggaagatggctcggtgggtgataggacttcaggtgctggacaaatgccaggagactcactccgttaaggtgtaagtgtggagctcatgaacatttgtatcccatcaagtagaaaattgctattccaccttgccatataaagttggccaaatgtcttcctactgtttttcatttgtttaaacttctctaatatgcagctaattttctaattattataatatgatacatttagcaataatattttgtgaaactggcctaagtaattcctcttgcaactggagactggacaaaagttatgggggaaaaaaaacaggaatattaaaatgattgtattagagaaatgttttccatacag

SEQ ID NO: 901476 - DNA, 649 bp, Homo sapiens
tggccaacatggcaaaaacatatctactaaaaatacaaatattagctggctatgatgatgggtgcctgtaatcccagcaactcargagtctgaggcacgggaatcacttgaacctaggaggcagatgttgcattgagcagagattacagcaacacactccagcctgggccacagagtgaaactctgtaatcttaaacaaagaaaaggaatataaaaaactataaccaaggttaaaattttgattaattcaactacattaaagttaaaaattttgcccatccaatgttaaaattgagtgatatgtgatgcatctaatttggagaatgtatcttcaatatattttaccagaaaatataccaataacatatatacatgcatatactatgctataataatgggaatttttcaaacaggtggtgtagaaaagttatcatttggattttataaaaatataaaaccataaagtttgttcataaaaaattataaatttcactaacaacgaggcatcatttcttaccatatagttggctgaaacactgtgatgttgaggcttagatcagtttgaactttctctcatatctacttggattataaattgttaccgtgctttcagaatacagtttgctgtcactctacaatgtctgttcta

SEQ ID NO: 901477 - DNA, 636 bp, Homo sapiens
gctgaagtgagggggatgcaacattaagttggatgagggaggatttgttaatatgaatgcactcgtctgtgatacagaatttaacaacctggcaagacccccaggagagggttytaacatgttgttaggatggctctgaaaagcatgaagaaactgatggctcaaatcatgtaaggcagaaataccagaattgctatggcagagggtggatcaaaagtctcagaaaaatgagcatgtaagaatactatgtactatttaatgtggaaagtccaccatgtggttatatttagtgagaggacacagaagatgctctgtttctcaaagcaatatgagatacatcaaaaaaaaaataaaaagggcaccagcatctcccagaacctattggtggctgtccctaataaagaactagtttcactaacagtaatagtatcataagatcccccgaataataaaagtagggtggtagtgcttaacaatcagaaggaaaagaggtgaaactatggtaatgaggtaaggtcagagtggtaaatgaatgctgtgtcccaaataggtagaatacatgagtctgggaaacaagaggtaaaagaagaaatggcccatttcatcatcattcccagaaaactacttgttggaatt

SEQ ID NO: 901478 - DNA, 618 bp, Homo sapiens
caaaacaacaattttgttctaataaattcttatttaggcttgtggtttgttctagrataaaattgtatcatcatcttcctgtgaaaaaatggaaatgtctggtcaaaacaaccaactttgcctttagcaaattcttgtggtctcacgaaaacataaacagtgcagtttagacagttttgtgtataaatactgactagttagaagcaaaataaatggcacatacattttaatgggtgattctctgacaattgtgattgtttgaaaagcatagctgaatttgggaaaatcatgaaaattgtggaacttgaggagaggtttgtgaaccattccacacttgtctaatgattattgaaacccttcctcccttccctacacacaaggcctcatggatgtaacattgaatagatagccatgcctttcaggacattgtctcagtgggacatgcacatttatgtctggaattacagtgttctgtgctctgagagttctgagcagagcactgagaaagcacagagaagagaactggacttacataatagttgacatctgagctcaatctttaagctgattcggaagtctcctgctagagaggacaggcttttttaagcaggaagaaaa

SEQ ID NO: 901479 - DNA, 609 bp, Homo sapiens
actatcaaagactttgatctgaagtcaatgaggggagcattggagggttttaagtggtgctgggaaatctagtcaggtctgcatttttgaaatattgctcactgtggctgcaatttggaggaggaaatgctgaggaattagttaggcggctgacgcagaattttactaagatacactgaggcctgagctagatcagtggtgtggagaagaagaaatgctattcctaccctgccaagctcttctgctctataattcttcaactaaggtgtttatgattccatttcaggatctcttgctctatctctttgtttgactctcaatggtgttcaaaggcttgtgaaggctctatgctagaacttcaggcatcgataatgagtagaacagcagtttcaggggaggaatttctttttttttttttttttaggttacctaacaacataccattgccctggttatttattcatgggtctgagccaaggtggcttttagggactgacctagtggtgttctstctctactgcactttgagctacttgcccctaagcatgctcagcccaacatgttcagcatctccagctagacttccttcctgcacacagataggcacca

SEQ ID NO: 901480 - DNA, 662 bp, Homo sapiens
ctccttagaaaaagggattttcatttttatcacattgtccatctgcaaattttccaaacttttatgctctgcttcccttataaaactgaatggctttaacagcacccaaattacatcctgagtgctttgctgtttagaaatttcttctgccaaataccctaaattatccctctcaagttcaaagttccacaaatctctagggcaggggcataatgccgccagtctctttgctaaaacataacaagagtcacctttgctccagttcccaacaagttcctcatttctctctgattccacctcagcctggactttattgtccatattgctatcagtattttgggcaaagccattcaacaagtctctaggaaattccaaactttcccatatttttctttcttcctctgagccctccaaactgttccaacctctgcctgttacccagttccaaagttgcttccacattttagggtatcttttcagcaatgccccactctactggaaccaatttactgtattagttcattttcacactgctgatacagacatacccaagactgggcaatttacaaaagaaaaaggtttaattggacttacagttccaggtggctggggaaggtcacayaatcatggtggagggcacttcttatatggtggcagcaaga

SEQ ID NO: 901481 - DNA, 616 bp, Homo sapiens
tcaggtgccaggtggttttttgtttgcttttgcagttcctgcctctttctagttacatgctgagctctgtgccttaccttcctcatctgtaaaatggaaataataataatcccttccttgtagagttgtgaagattaaattacatgctgcatacaaaatgcttagcatagtacctaggacaaggtaattaagcaataaatattagctgttactattgctagtagtggcaggggcaagggtcaaaaataatcatttcattcaattaaaaaacaaaggcctaaaccctaagtatgtgatggctgtggtagacacctgaaaaactgaatgcttttattccatgtagtgaagatcttatttttcttgcagattattctggagtttgactctaagagttatctttagatgcaaaaagtcatttcattttaaaacagcagtgcctgaataccacttatgttgcctgaatttgttcacattactattcacgaagcttgacatcctgcaatgacttytgcacaaaactcaaagtcagtaaaactttaggctacttaccatcaagacagggaacaaacccttctctctgcaaggtttttataattaaacatcatgacatctaatg

SEQ ID NO: 901482 - DNA, 633 bp, Homo sapiens
gcccaggaggtgtaggctgcagcgaggtgaggctgcaccactacactccagcctggggaacctgagcagaccctgtctcaattataataatcatcatcatcatctacaagtggattagattattttcaaagggaccaacagagatacctttgcaaatcctgcatgatatgcacaattatatatatgaaattggtactctgtagagttgcttatctcctcactttatcacctaagtgatcccattactctacctttttttttttttttgtaaatcactgttatttcaactcaacgtaccccaccctaacttggagacaatattcctcaaagtgctcctctaggtgaatctaactgatacacaaacacttcattacctcaacatggataataaatccaggggtccaaacagtgattgtctttacatacaagggaagacagttccatagtctcatctacagcattcaccttggctgtctggacaatcacaattcaaacaagcggttagaggagtggggagagtgggaagaatttggaattttagatagttacaaagctaayccctcataaaatatgcccagccacacagacaatgggttaaacaatcactttcacatctggaaagcacctttgatg

SEQ ID NO: 901483 - DNA, 566 bp, Homo sapiens
aaaggataaaataggtgtgctcatataattaaagtgtcacttttttgagaaaaactaaagtraggaaactttccatcacttgactaagtgagttaacctctggcttagtcaagtgatggaagttgtgttctcttttgcatgagagcgaatgacaagttttcattggccacagtggtggagctttccttcccgtgcttgtaacagccagaaacacctcctgcaggacccgtgccttcaccttctggttaacttggttactttccattagttgaggtttgggtggcaaaagtgacttgagaatgaaggggagaggtgctggtacaatccagtctgagtgcatgaggtttccctcctacctccagagaattgtagctgcatcatttttgcagttttcctattaactagagctgagttagtaaagtgtgtccccaggaggagccttcaatgctgaggtgagacatcttttaaagggttattttcaaagcagcagcctctgctgagtaacatttttctttgcagttacatcttcaattgtctttatcacggtgcagtgcatttgtttacac

SEQ ID NO: 901484 - DNA, 466 bp, Homo sapiens
ttttttttttttgagacagagtctcactctgttgcccaggctggagtgcagtgacgcaatctctgctcactgcaagctccgcctcctgggttcatgccattctcctgcctctgcctcccgagtagctgggactacaggcgcccaccactacactaggcaaattttttgcattttttaatttttttggatgcagagtctcgctctatcccccaggctggagtgcgctggcgcaatcttggctcactgcaacctctgcctcccaggttcaagtgattctcctgcctcaacctcctgagtagctgggattacaggcgcctgcaaccacgcccagctaattttttgtatttttagtagagayggggtttcaccgtgttagccaggctggtctccaactcctgactttgtgatccacccgccttggtctcccaaagtgctgggattacaggcgtgagttaccgtgcccggc

SEQ ID NO: 901485 - DNA, 599 bp, Homo sapiens
gggtccttggaatgagcctccctcagcctggagcaggaaatttagagaaacacgtttggtcttgcagaaggactgctctgtttgctctccctgcagggaccatgcggtgggcagactttggtcaggatgaacagcttgctcagggcactggcagcctccaacattccttgctggaaggccttggggattcacccaacctccctaatggggacagagtcttcccatccagcgcccaggcagtcctcttttccctgcctaccttaggctgggattaagatggttttttaaactaaatttcatttatctatctatctatctatctatctatctatctatctatctatctatctatctatctgaagacaaggtctcattctgtcagccaggctggagtacagtggtataattatagctcactgcaacctcaaactccttagctcaagcaatcctcctgcctcagcctccccagtagctagcactacaggcatgcaccaacatacccggatctttttttttytttttaaagatgggggtcttggccaggtgcagtgactcacacctgtaatcccagcactttgggaggccgaggcgggtgtatc

SEQ ID NO: 901486 - DNA, 589 bp, Homo sapiens
tagcagtctgagtccagtggaggagggggatggataaggcatcatttgcttaaggagcagggatgacctagagctgtagtgttaaagaggtgcttattataaccctagattataatgtggcagtgtgtaccctgatataaacattttatgttcagaagattttatatgggcttgttaatgtgcctgtcacagaaaggtgctagggatacaaatatcaggaggattacctgggtctccaagactagtctataaggagagacagacatgtaactaataatggccatcaattgttcagcacttattttgtgatcagcactcaaggctaggtactttatgtacatttcccctttcttccttgccacaacagtgcaatcttgcaacatgacatgctgactctgataggactctctccatctcacaaatgaggaaattgaggcttgtgggggttgaaatttcttgcctggagtcacacagctagtaaayagccagcctgcaatttttaactcacgcccatggttctatccactacactgttctgcctcctctaaaactccatccatgtggctgagtccctgtattagtcttttct

SEQ ID NO: 901487 - DNA, 595 bp, Homo sapiens
atcttaggtaaaactctttttttatcagaataagttatcgtaaaatgattgcatatgaatctctgtgtgctttcatggattttctcaaaaaaaaactatcaaactaaagcaactgtcagtacagtcttgtggttcttaggagagatcaaagagggttattataatgcataaatcatgtatgtttatagtatgtcatagacattcaaatggatgtaactacaatacatttagttccctaatctgctatatagtagacaaatggtttacatttgttgtagtttttacttttgattcgaaacactctaacttgggttttgctaagctgaacattgttttaaatctcaccagacaacttgattcatttcatagtaatgctctttgtataccatattttggcctacagcaaatctcactgaatacatgagcactgaagacgttgagacatactcagtcaattgatagaatggcctcagcttcatggtaattttagattcctacacatacatctcrtggcagaccatatatttatttattgaaaagatatatacccttttttaaaaagtaaaatatatcaataaagttaaagcagatgagg

SEQ ID NO: 901488 - DNA, 589 bp, Homo sapiens
gctaatatttgcttatgagtgtcaaagttcttaaaactgcatactgcatcaagaagtgaagcaatgtatctttctggacatttctatttaaaaaaaatcagtgggccaggtgcagtggctcatgcctgtagtcccagcactttgggaggccaaggtggtggatcacctgaggtcaggagtttgagaccagcctggccaacatggtgaaaccctgtctctactaaacacagaaaaatcagccgggtgtgatggtgcgcacctgtagtcccagctactcgggaggctgaggcaggagaatcacttgaacctagtaggcggaggttgcagcaagccaagatcttgctactgcactccagcctgagcgacagagcaagactctgtatcagaaaaaaaaaatcagcttttgaccaagcaatataacttcttagtatctgtcctgaatgtacacttctaaaaatataaaaatacatattcagcctgcaatgtcagcactttgtgaggctaaggctagtggatcacctgaggtcaggagttcaagaccagyctggtcaacatggtgaaaccatgtctctactaaaaatacaaaagt

SEQ ID NO: 901489 - DNA, 690 bp, Homo sapiens
tcaaagtaaccaaaaaggaatgaagcctctctccatggaaatattttaaaagatacacaattttttatcctatagacagtttcaatgctgcctggcctatgggtgactggatgagatgactccaaaggggctttcacttcatttatgaggctattccatgatcaaacactgcggaaacactgcctggttatatcttcctcctacatatctgaggaggatgaagaaagtgagagagctggctgagagagagcctctttgagtgacaatctctatttcacatgctatagaggcacaggcactgtttagtgttgaaattcttttcacagcatgtggcaggtaacccctggcagcgatcttctgtcccagagctttctacactgttgccctctcttcaccagagacagctacaaggctggggcaaggtgtggacttcacttttccagatgatggcaagcagccaggaactgtcaaggggaaggaaagaactccaagatcacccagcaaaacaggaaactgaagggggatgagaaaccacattgcatctcagaatctcgccacttaagctgtatctytccagatgcactatatttcacctaaattcaaacatttccaaatgatattaaaaaaattaaacctcatctttttcgtttaaaaaaaaaatatgtgtttcttggtaaatcacacaactct

SEQ ID NO: 901490 - DNA, 617 bp, Homo sapiens
caccaccatgcccagctaattttcatatttttagtagagatggggtttcaccatgttggctaggctggtctcaaactcctgtcctcaggtgatctgcctgcctcagcctcccaaagtgctgggattacaggtatgagccaccacgactggccccaaccttaccactacactacttaaattgttgtccagaagcaagatgttcactacagtgggactcagttgtctcacccaacaaaggagtttagtattccaccctagtgtatccccagggctgttttgagatcacattagtttataacgaaaacagctctctccccacattttttgatgtgtccaatgtatcaggcagtgttctcagcatccatatctttgttaactcactgaatcctgacaacaaccccataatgtaggactatcattatccccactttacaggaggagactgaggcatagaaaagctaagtaacttgcccgagatcacagagctaagtggtaaaactaagaytggaactcaggcagaggctgtgctctatggcatgatgctgtatgatacaatcaccatattaaaaaatccccaagaaaagaaggtcacccatgaccctcaatggcaataaatc

SEQ ID NO: 901491 - DNA, 617 bp, Homo sapiens
caccaccatgcccagctaattttcatatttttagtagagatggggtttcaccatgttggctaggctggtctcaaactcctgtcctcaggtgatctgcctgcctcagcctcccaaagtgctgggattacaggtatgagccaccacgactggccccaaccttaccactacactacttaaattgttgtccagaagcaagatgttcactacagtgggactcagttgtctcacccaacaaaggagtttagtattccaccctagtgtatccccagggctgttttgagatcacattagtttataacgaaaacagctctctccccacattttttgatgtgtccaatgtatcaggcagtgttctcagcatccatatctttgttaactcactgaatcctgacaacaaccccataatgtaggactatcattatccccactttacaggaggagactgaggcatagaaaagctaagtaacttgcccgagatcacagagctaagtggtaaaactaagactggaactcaggcagaggctgtgctctatggcatgatgctgtatgatacaatcaccatattaaaaaatccccaagaaaaraaggtcacccatgaccctcaatggcaataaatc

SEQ ID NO: 901492 - DNA, 644 bp, Homo sapiens
ctggctctagatctctaatctacatctcttgcaagtaagtaattactaatattttatattttaaacatakgtaacatcttataaggaaggacaggagtctggattttttctcagtgtctcactttcttacctatacaagggaatcagattacctatcaaagcagatattactgttgcaaattcaacattcatctatttatctcccttttctgcctttttaacacagccctaatttcatgcattctccccagagtgtctgtgtcctttaggagaggctggccttctccttagccctgggatataaatttcaattgtcctaatcccaccatggaggccttacctcccttgttagtgatagacataagcactcaaagcaatttcagttaataagacatgatggagaaatctatcagggaaaaagagtttccttaatcgtataaaggggcaaaagataaaggtgttcccctttttggtctctgaacattatctgtaatctggaactgaggaaatcattttaggaccataaaggaagccagactggagaacaacacacttaaagatggcagagccaaaagaaggaagaaacctgtgtccttgacaatattgtccagatgcagaagtaaccaaccctgggaatgatttta

SEQ ID NO: 901493 - DNA, 659 bp, Homo sapiens
aaaagaaaagagtgagctggtatttacatccagatatagactgtttagacagtttacttttaatcttctactgtcctttgcatgagtacagcttgttttcaaatttagtttcttaataaaacaaattccagaaattcaatacatggtttgtgctgataatttaatctagttatagatgctgaagagctgttgttcttaaccttctttcctagcctggatcatcagttcattaatccagcagacattacatgtatttaaaagtaagtatatactatcttattaataaaatgatataagtgatctctacatcttttttattttcctggttgtgactttacttaaatattctgtatatggaaaggattatatatgttatcatcatatgtcaaaatattacgtttgaaggtaacaagatttagctcttgatttttaatgacaaaattggtgacagtgatagcacagatactgacttcctttgcgaatgggatagtaattgggaggtgggatgctaagggaagacttttgctcatcttttattgcatgaattttaaaattcaattatgtattcatttattacttacatatttggaaaaaawttaaaacaacaaagaggaaatgtgttagtctgagagaagtagtgggcattttagtccaagtta

SEQ ID NO: 901494 - DNA, 537 bp, Homo sapiens
cacaggactctccgtttcctgcctatgacatggggtcagaaggagcatgggtaagacttggtactttagcctcatccttcccagcagactcaggcctggtctccagcatcccttcctcccccttacctgtgagagaaggactctatcctggaggccaggatcttcacagcaaaaccatgttctgaataacaatgacttcctatcctgggatattatctcccaaatcgacctcatccagcccaccttttctgggtgacttggctgcaccaacatccttctttgagttctctggggagtccttgtggctctgggggtgacaaggatggagctgaatcagatgggcctagctggtgagggagggctgtctgcctcacttcacctgggggggcatgtgccttatagaacagtgtctgcataccttcctgagcctccaacccacagtcccacctcatcctcagcacccctgcagtccacygcctcttccctcccacatcctgagccctcccttcccatctgctgctcctcagcccaccatgg

SEQ ID NO: 901495 - DNA, 588 bp, Homo sapiens
gctgaaaaaggaaatatcttcatataaaaactagagagaagttttttgaggaacttctttgtgatgtgtgctttcatctcccagagctgtaccattcttttggttgagcagtttggaaaccgttttttgtagaatctgcaaagggatatttctgagcgatttgaggccaatggagaaaaaggaaatatcttcaaatgaaaactagacagaagctttatgagaaacttctttgtgatgggtttattcatttaacagagttgaaactttcttttgattgagcagtttggagactgtctttttgtagaatctgcaaataaatatttgggatccctttgtggccaaaggtgaaaaagggaatatcttcacataaaaactagacagaagctatctgagaaacgactttgtgatgtatgcattcatctcacagagttgaacctttctttttcttgagcagtttggaaaaagtcttttgtagaatctgcaaagggatatttgasagccctttgaggcatattttgaaaaaggaattatcttcacataaaagctagacagaaattttctgagaaacttttttttgatgtgtgcatt

SEQ ID NO: 901496 - DNA, 631 bp, Homo sapiens
tgaggcatattttgaaaaaggaattatcttcacataaaagctagacagaaattttctgagaaacttttttttgatgtgtgcattcatctcacagagcggaaattttcttttgattgagcagtttggaaacagtctttttgtagaatctgcaaacggatatttgggatccttttgaggcctaaggtgaaaaagggaatatcttcatataaaaactagacagaagctttctgagaaatgtctctgtgatgcgtgcattcatctcacagagttgaacctgtctttttttttgagaagtttggaaaaagtctttttgtagaatcttcaaagggatatttctgagcagtttgaggcttgtggtggaaaaggaaatatctacacataaacactagacagaaactttctgagaaacttctttgtgatgcgtgcagtcatcttacagagttgaactttcttttgattgagcagtttttaaagtcttttggtagaatctgcaaaggaaatatttctgagyggtttgaggactatggtgaaaaaggaaacatcttcacataaaaaacagacagaagctttctgagaaacttctcagtgatgtgtgcatccatatcacaaaattgaacctttcttttgattg

SEQ ID NO: 901497 - DNA, 562 bp, Homo sapiens
acattctttatggacaacatgcaaagggatattttggaacccttggaggcttactgtgaaaaaggaaatatcttcacataaaatgtagacagaacctttctgagaatcttgtttgtgatgtgtgcatttatctcacagagttgaactttttatgattgagcagtttttgaaacagtatttttctaggatctgcgaagtgatatttgagggcactttgaggcctatggtgaaaaaggaaataccttcacacaaaaactagacagaagctttctgagaaactgcattgtgatgcatgcattcatctcacaatactgaccttttcttttgattgagcactttggaaacattctttttgcagaatctgcaaagggatatttctgagctgtttgaggcctatgatgaaaaagtaaatatcttcatataaaaaacagagagatgcgtctgagaaacttctttatgatgtgttcattcatcttacagaattgaacatttcttttgattgagcagtttggagrcagtcgttttgtggaatctgcaaagtggtatttgggagccctttgag

SEQ ID NO: 901498 - DNA, 565 bp, Homo sapiens
aaactagacagaaacttgatgagaaactcttttttgatgtgtgaattcatctcgccgagttgaaactttcctttgatggagtgatttggaaacatwctttttgaggaagatgcaaggtgatattaaagggagctttgaggcctatggtgaaaaaggaaatatcttcacataaaaactagagagaaactttctgagaaacttctttgtgctgtgtgcatacatctcacagagttgaaactttcttttgatggaacagtttggacacagtctttttgtagaatctgcaaagggatattttggagtggtttgaggactatgatgaaacaggaaatatcttcacataaaaactagactgaaattttctgagaaacttccttgtgatgtgtgcattcatctcacagagttgaatctttttttattgagcagtatggagacattctttttgtaggatatgtaaagggatatttggaagctctttgaggcctatggtgaaaaaggaaatatcttcatataaaaactagacagaaactttctcagaaacttctttgggatgcgtacattaatc

SEQ ID NO: 901499 - DNA, 626 bp, Homo sapiens
ttcaccacaggcctcaaagggctcacaaatatccatttgcagattcaacagaaggactgtttcyaaactgttcaatcaaaagaaagtttcaactctgtgagatgaatgcacacattgcaaagaagtttctcagaatgcttctttctagtttttaagtgaagatatttcctttttcaccataggctccaaagcattccaaatatcactttgcagattgtgcaataagactgtttccaaagcactgaatcaaaagaaagtttgaactctgtgagatgaatgcacatatcacaaagaagtttctcagaatgcttctgtctagtttttatgttaacatattccctttttcaccataggccttaaacagctcactagtatccatttggagattctacaaaaagactgtttccaaattgctccactagaagaaagtttcaactctgtgagatgaatgcatgcatcacaaagaagtttctcagaatgcttctgtctactttttatgtgaagatatttcctttttcacgataggcttcaaaacgctcaaaatatccatttgcatatacttccaaaagagtgtttccaaactgctcaatcaaaagggaggttcaactctgtgagatgaaagcaca

SEQ ID NO: 901500 - DNA, 618 bp, Homo sapiens
cttttccaccataggcctcaaagcgctccaaatatcctcttgcagattctacaaaaagactgtttcaaaacttctcagtcaaaagaaaggtgaaactctgttagttgaatggacacatcacaaagcagtttctcctaatgcttctgtctagttttcatttcaagatatgtccttttcaaaataggcctcaaagcactccaaatatccatttgcagatactacaaaaatactgtttccaaactggtctatcaaaagttcaactctgtgagatgaatgctgacatcacaaagaagattctgagaatgcttctgtctagtttttatgtgaagatatttcattttccaccataggacaccaagcactacaaatatccacttgcagattctacaaaaagagtgtttcaaaactgctcaatcaatagaaaggttcatctctgtgagttgaatgcacacatcacagagaagtttctcataatgcttcagtctagtgtttacgtgaagatatttttttcctccatagtccactaagsgcccacaatacccacttgcagattctacaaaaacagtgttccaaaactgcttaatccaaagaaagattcaacattatgagattaatgca

SEQ ID NO: 901501 - DNA, 594 bp, Homo sapiens
tgggagccctttgtggtaaaatgtgaaaagggaaatatcttcagataactacacagaaggtttatgaggaacctctgtgtgaygtgtgcatttatctcacagagttgtaattttctttcgattgaacagtttggtaacattctttttgtaaaatctgctaagggatatttgggatccctttgaggcttatggtgaaataggaagcatattcacataaaaactagacagaaactttctcagaaactttttgtgatgtgtgcattcatctcatagaggtgaaactttcttttgattgagcagttttgatctttttgtaaaatctgcaaagggatattagggatccctttgaggcctatcatgaaaaaggaaatatactcacataaaactagacagaaactttctcagaaacttctttgtgttgtgtgcattcatctcaaagagttgaatctttctttgattcagcagtttggaaacaacactctttttgtagaatcggcaaagggatatttcagattcctttaaggcccacagtgaaaaagggaatatcttcacataaaaattagacagaagatttttgagaaacttctttgtgat

SEQ ID NO: 901502 - DNA, 594 bp, Homo sapiens
tgggagccctttgtggtaaaatgtgaaaagggaaatatcttcagataactacacagaaggtttatgaggaacctctgtgtgacgtgtgcatttatctcacagagttgtaattttctttygattgaacagtttggtaacattctttttgtaaaatctgctaagggatatttgggatccctttgaggcttatggtgaaataggaagcatattcacataaaaactagacagaaactttctcagaaactttttgtgatgtgtgcattcatctcatagaggtgaaactttcttttgattgagcagttttgatctttttgtaaaatctgcaaagggatattagggatccctttgaggcctatcatgaaaaaggaaatatactcacataaaactagacagaaactttctcagaaacttctttgtgttgtgtgcattcatctcaaagagttgaatctttctttgattcagcagtttggaaacaacactctttttgtagaatcggcaaagggatatttcagattcctttaaggcccacagtgaaaaagggaatatcttcacataaaaattagacagaagatttttgagaaacttctttgtgat

SEQ ID NO: 901503 - DNA, 531 bp, Homo sapiens
ggcctacgttgaaaaagtaaccttttcacatgaaaactagagagaagatttctgagaaacttctttgtgatgtgagcattcatctcacagagttgaaactttcctttggttgagcaatttgtaaacagtcttttgtagaatctgtaaagggatatttgggacccctttgaggtctaatgtgaaaaaggaaatatcttcaaatagaaactagacagaagttttctgagaaacttatttgtgatgtgtgcattcacctcaaagagtttaacctttcttttgattgagcagtttggaatcagtctttttctagaatctgcaaagggatatttttgagggatttgaggactacagtgaataaggaaatatcttctaagaaaaactacacagaagctttcagggaaaattgtttgtgatgtgtgcattcaactcaaggaattaaaatttttatttgattgagcagttaggaaacagtcttttggtagarcatgcaaattgatatttgggagtcctttgagggcctatggtgaaaaa

SEQ ID NO: 901504 - DNA, 628 bp, Homo sapiens
cctgtccatggccaggcaagaggtcctggagtgcactcatcaaaattgcaggtgttgagtggaaaatcaaagccyaccacagtagacagaaacaaaactcacctgccttgaccctgctactagatgacaagaacatgaaatatcccttaagaatttgtgttacttacatggtccaaaagccttaagtggaaaattaaatgtagcagcaaccaggtttgggaccactcccagcagacagcagaagcaaaaagaaatttgctctggaaaaattcaacttaaatccagacttcaaagaattagcaaaaataaatgttctaaagaaaataaaaatctcagagttaaaaattaaaaaatatatcagaaacaaagcactataaataagaaccaggaaaactaacaggctacagaaacagaacacgaaacgagatcaaacattagaattatcaggtacagaatagaaaatcttatatttatggaaataaaagaagtagagtgaaagcagagaggaaaacagccaactagaacttttagaagaaaaaatataatatgaattttgaaaacgttttatttaaaataattagagatcacaggaagttgcaaagctgggataaagaggttctgtgcaccc

SEQ ID NO: 901505 - DNA, 596 bp, Homo sapiens
aataaatcatgaggtgtatgacagcatagatatcctaattaaaatatcttccaattttactctgaattccttaaattccaatgcctaggatttggtaactacaaaataaatgtgaggctgcattagaaaagacaataaaaatgatgtgaattttaattagtttgaatgatgataactataatcaatttgctcacaatgttactttgagataaagtttttaaattaagttacactattgcaaagcttcgaaatacttgtttaataagaccaatactccacaatgccagattttttaaataagccataaaattaaccagaaaaaaatgaatagcatattataaaaatggtctacttccctcaccccaaacctatattcactgttaagggtaggagcaaaatccacctcaagatatgttatagggatcatcaagaagtcagcaaaatcatcagtgctgtcatcatttttctgctgcctaattgggcttcttctcttcattattctctaaaatcagtgtatagttttgaagaaatcccaygtctcttattttatatttctactactaaaacaaactgaatatgcagtaattggtccttaa

SEQ ID NO: 901506 - DNA, 636 bp, Homo sapiens
gggaagaaagacaccaggagaggctgctaaataggaagagaatgaaaacaatcaatgacttgctgatcacttgtcaagcacttcctatatgccaggcatattaattcacttcatcttctcagtgctattgttgaaagtacttatcattattgccattttcagataggaagatttagaatcagagaagttaagctactttcccaggatcacacagctagtaactgacagagtcaaattctaaacttggagaatctgactccaaaccctaagaccccagactgcacttaccaaagtgtatcatgccaaatacattacctcctctgagtatctgataggtgtgtagtggaaaaaaattgaaaatatggtcacaggcaaatttggaaaatgataggttaaatgggtttctttactgaaagacgcctcagagttttttaagttgataatgagcatgtgaatcttcaagagatgagggtatatgtgtgtcccttatttgaccatcaatggttttcttggggaagcatcttgctgacccagatccccactgagaagcactaacctcatatgygctcctgagtttgtcaggcgccagttaagggaaggtgctggcaaggcaaagtggcagaggcaaccaaaagc

SEQ ID NO: 901507 - DNA, 622 bp, Homo sapiens
aattcttactttctaataccagttcaaaggcctccaaactccagcctcacaaacgctaccatctctgcactctagtatctccaccagcttctgtgggcttgatttagaagtgacacatgattccacagaaggaagacaggacttggcacataacaaacctgtactgcaaccccagttcttccaatgacaagctttctgagtctcattttcctcacctgtacaacagagataataaaacctgctttggggattttcaaaaaattaattagaaatgccatctataaagcacccagcagagtgccaggaacacacactctgttctctatgaaaagtagccagtatcagtatttgtcacctgtctattgtttatccacagctacagtccttagctatcggtttactgcctggctctatttaaaaggacatatgggatcctgccatatttaaaggttttagagtgcatggaccacgttttccatgttctctttactcctccactgcctctcatcctgagctcagcaccagcaccaagcaggtgctccataaattargctctcaggacaaccccagccagttccatgtctttaattggctttactgagatagtagtgtttaaaactgt

SEQ ID NO: 901508 - DNA, 580 bp, Homo sapiens
agtgtaagtgatataccttcagaatataatttaaaacagaacaaagtaaactaaactaaactaaactaaaataaaatgaaataaaaacaaacaaaaaacaaaaacaggatcactaattttaggtgaaagaagaggggtggtaggaggcagtgtttgaacattcatttcctcgtcttcataggagccattcatctactgcctgcaactgagatatttagctaaaaagaaaaaaatgacttaacaacttaaattttgtggtgatcatttaaaatttaatttagatgaatgttttaggtcatggtatttttttgatgaagaaacaattactaaaaatttaacaacaattcatttcattttaatgcagcattgttcacttttaaattttaaattaaaataaaatagcatgtcataattttgaaaatgaaaatagcaagtacaattctattttaataatattagtttgatctcaatctagttatctatacctctatgtttctttatgaatggagatgtctggaaytaaggtaacaaatttaacaattatttctagttgatagaatttttttaactttatttttta

SEQ ID NO: 901509 - DNA, 639 bp, Homo sapiens
aagctggtaggcctaggaggaaaaaatgatttcgtgggctcagcccacagctttgctgctctgtgtagcctcaggacttggtgccctacatcccagcatggctaaaaagggtcaatgtacagttcaggccactgcttcagagggtgcaaggcccaagtcttggtggttttcacatggtgttgggcctgcgtgtacacagaagtcaagaattgaggtttgggaacctctgcctggagttcagaggatgtagggaaacacgtggatgtccaggcagaagtgtgctgcagggtcaaagccctcatggagaacctttgctagggcagtgcagaagggaaatctggggtgggagtccccacagtgggtctctactagggcactgcctagtggatctgtgagaagaggaccaccatcctccagaccccagaatggtatatccactggcagcttgcaacatgtgcctggaaaagccacagacacacaatgccagcctgggaaagcagccagaagggggctataccctgcaaagccacatggtcccaaagatcatgggaayccacctcttacatcagcctgacccggatgtgagacacagagtcaaaggagatcattttggagctttaagttttgactgccctgctg

SEQ ID NO: 901510 - DNA, 658 bp, Homo sapiens
ctatgggcaccatggcaaaacctcatatctactaaaaacacaaaaattagccaattggtggtgtgtgcttgtagtcccagctacttgggaggctgacgcatgagaatcgcttgaacctagggggtggaggttgcaataacccaagatctcaccactgcactccagtctgggtgacagagcaagaccttgtttcaaaaaaaatttttttgtattttaattaggaatcaaataagataattaaatgtaaacttacacttaatttactttttaagcattttaagaattggtattctaattttgtgtcggtacattttaagaatcaataaaattatttttaaaatcaaagcaattttaaagcttttacttcattagactccctggcaagaaagccctgggaagatagaaagtttggaggatgtcagagggaagtttgggaaaagtagaggaatatatggagggcagaaggagtgaacattagggaaaccctcccctagctcagtcttcagatacgctggtggacttccccaytcagcctgagtcaccttcgctactgacctcatcttgtcttctgactggatgctcctttcaggaagctggtgtctggaaaacttctcaattttagtatcaattattattcagaggctgaaaggcaagcctc

SEQ ID NO: 901511 - DNA, 640 bp, Homo sapiens
ggaaccctggtgagatacttcaggttaaaaaatgtgagatcctataaacagggaaggaacttccatttccttttttttttttttttttttttgagatggagtcttgcygtcacccaggctggagtgcagttgcgcgatctgagctcactgcaacctccacctcctgagttcaagcacttctcctgcctcagcctctggagtagctgggactacaggctcatgctgccacgcccggcttatttttggtttttgttttgttttgttttcttttgagacggagtctcgctctgtcgcccaggctggagtgcagtggcgcgatctcggctcgctgcaagctccgactcccgggttcatgccattctcctgcctcagcctcccaagcagctgggactacaggcgtccgccaccacgcccagctaattttttatatttttagtagagacggggtttcaccctgttagccaggatggtctcgatctcctgacctcctgatctgcccgcctcagcctcccaaagtgctgggattacacgcgtgagccaccgcgcccagcctatttttgtatttttagtagagacggtgtttcactattttggccaggctggtctcctgacgtcaggtgatccgcccgccttggcctcc

SEQ ID NO: 901512 - DNA, 730 bp, Homo sapiens
ggggtggtgtcgggggtgagtagtttccccaaggccaagaggtgcagaaagggagagtgttttacagatgtcatgtggtgtgtcasggtccctgaatgcttctagaaagctacactagaaagcaggggtccctggttgttaatataaaacatattactttaaatttatactgtatatttatttttcagccaacacctaatcttatctttgctttagtccagtggcttccaaacttttgcactgagacccacggagaaccttttacatctcaacccattacacacatctatacactcttaactgagatacaagttcaataaaacaatatgtattgttattacatatgatatcctctgatatttactttgccttcccttgcattcccctgccttcccttgtattttttttgtttttgttgtttgtttttttgagacagggtctcattctgttgcccaggctggagtgcagtggtgcaatctcggctcactgcaaactctgcctcccgggttcaagcgattctggtgcctcagcctcccaagtagctgggattacaggtgtgtaccaccactcctggctgatttttaaaaatatttttagtagagatggggtttcaccatgttggccaggctattttcaaactcctgacctcagatgatcaggcccgccttggcctcccaaagtgctgggattaaaggtgtgagctatcacacctggcctctgctcctatagt

SEQ ID NO: 901513 - DNA, 721 bp, Homo sapiens
catcaaattgaactcttcctccctataacttcctcccattggttctatgtctgccctctggagggctagagaataagtggatttaatctcttaataatatratagtaattgctaccatgtgttgagtatttgtaaggttctgtaccaagtgtcttatgcactgtattagtcatggttcttcagttgcaagcaatagaaaccaacctggccaactgttttagttatcttttgctacataataaattacccctaaaattagtggcttaaaaaaactaacatatactacctcagtttctgtgggtcaggaattcagaagcaacttaatgggtgcttctgcatcagtctttctcaaaaggttgcatccaaaatgtcagccagggctgcagtcatctgaaggctagactgggtttgggggattcacttctaagctgctttacatggctgatgacaagaggcctcagttcctcactagctgttggccaaagccttcagccttgttgccacaaggacctcaatatagagcaactctaacacagagagagagagagaagccacagtgccttttatgacctaatctctgaagttactgaatatctatatctatatctatatctatatctatatctatatctatctatatatatatatacacacacatatatctcacagtaaacacaaggcttctgggtcagagacaaactgtttatttagttacagaata

SEQ ID NO: 901514 - DNA, 675 bp, Homo sapiens
actgacttcaaaatataattacyttttgattcctgcacttccttcccgcaaaccccacattctattggctttttttcatttctgcaatgatgagttggaaactagtaactattagcatattaatatcgccaactagacatttctatttctaccattgcagcctacaattgcattggattgttagagttgatcacacggttacttatacagggtttgtaattgtaacatttagagatgcttttggctgcaaataacagaaaacccaataccagggcttaaataaataggaacagaagcatcaacaacgtggagtttggaagtaagccgttctgtctgctgtttcagtggattgatgactttctagctgatatctctgtaataaccttggccaacttttgttacttgttgcctcaggacaccaagatagctaccctagttgccatgtgaaaactaggaagatagaagaagaagaagtgctttgccagttatatctctctttctttttgatttaaaaagctaatctttccagatttctgttcttttctcataggccgggtctgagatgtgtggccaacccacactgaaagagaggaaacaagggagaagggattctacgtggttttggggtagcaacgaaacagtacatgatacattagcataaggtggagagctact

SEQ ID NO: 901515 - DNA, 637 bp, Homo sapiens
attctcagaaacttctttgtgatstttgccttcaaaacacagaggtgaacttacgttttcatagagcagttttgaaacattcttttcgtagaatctgcaagtggatattttgatggcattgaggccttcgttggaaatgggaatatcttcacataaaaactacacagaagcattctcagaaacttctttgtgatgtctgcattcaactcacagagttgagcctatcttttgatagagtagttttgaaacaatgtttttgaatattctacaagtggacatttggagagctttgaggcatacggtggaaaggaaatatcttcacataataattagacagaagcattctcagaaatttttatgatgtctgcattcaactcacagagctgaacatgccttttcatggagcagttttgaaacaatcttttcgtagaatctgcaagtggatatttttactgctttgaggccttcgttggaaacgagaatatcttcacataaaaactagacagaagcattatcagaaacttctttgtgatgtgtacattgaactcacagatttgaaagtttattttaatggagcagttttgaaacacactttttgtagaatctgcaagtagactttaggagagctgtgaggact

SEQ ID NO: 901516 - DNA, 637 bp, Homo sapiens
attctcagaaacttctttgtgatctttgccttcaaaacacagaggtgaacttacgttttcatagagcagttttgaaacattcttttcgtagaatctgcaagtggatattttgatggcattgaggccttcgttggaaatgggaatatcttcacataaaaactacacagaagcattctcagaaacttctttgtgatgtctgcattcaactcacagagttgagcctatcttttgatagagtagttttgaaacaatgtttttgaatattctacaagtggacatttggagagctttgaggcatacggtggaaaggaaatatcttcacataataattagacagaagcattctcagaaatttttatgatgtctgcattcaactcacagagctgaacatgccttttcatggagcagttttgaaacaatcttttcgtagaatctgcaagtggatatttttactgctttgaggccttcgttggaaacgagaatatcttcacataaaaactagacagaagcattatcagaaacttctttgtgatgtgtacattgaactcacagatttgaaastttattttaatggagcagttttgaaacacactttttgtagaatctgcaagtagactttaggagagctgtgaggact

SEQ ID NO: 901517 - DNA, 568 bp, Homo sapiens
caaatatccacttgcagattctacaaaaagagtgtttcaaaactgctcaatcataagatatgtataacccggcgagatgaatgcatacatcacaaagaagtttcacagaatgcttctctgtagtttytatttgaagatatttcctttttccaccataggccacaaagggctccaaatattcacttgcagattatacaaaaagagagattcaaatctgcccaatcaaaagatagattcaactctgtgagttgaatgcacacatcacgaagaagtttcccagaatgcttctgtgtagtttttatgtgaagatatttccttttccacaattcgtctcaaagctctatgaatatccacttgtagagtctgcaaaaagagagattcgaaactgctcaatcaaaaaatagcttctactctgcgatttgaatgcctacctcacaaacaagttcctcagaatgcttctgtgtattttttatttgaagatatttgcttttccacagtaggcttcaaagcactccaaatatccacttgcagattctccaaaagagagatacgtaactgctcaatcaaa

SEQ ID NO: 901518 - DNA, 566 bp, Homo sapiens
caatgaaaagaaagtttcaactctctgagatgaatgcacacatcacagagaagtttctcagaatgcttctgtgtagtttttatgtgaagatatttgcttttccacattagacctgaaagcactccaattatccacttgcagatactgcaaaaagagatattcaaaactgctcaattaaaagagaggttcaactctgtgagttgaatgcacacatcacaaagaagtttctcagaatggttttttgtagttttcatgtgaacatatttgattttccacagtagacctcacagcgctccaaatatccacttgcagattgtacaaaaagagagattcaaaactgctcaatcaaaagacaggttcaactctgtgagttgaatgcacacatcacgaagtagtatcagagaatgcttctgtgtagtttttatttgaagatattttcttttttaccatagggcacaaagggctccaaatatccrctttcacattccacaaaaagagagattctaacctggtccatcaaaagataggttcatctctttgaattgaatgtacacatcacaaagaag

SEQ ID NO: 901519 - DNA, 505 bp, Homo sapiens
atgaagcagttttgagtctctctttttgcataatctgcgagtggatgtttggagaactttgaggcctattatgtaaaaggaaatattttcacataaatactatacagaagcatttctgagaaacttctttgtgacgtgtgcattcatctcacagagttgaacctttcttttgattgagcagttttgaaacactctttttgtagaatctgtaagtggatatttggagccctttgaggcctattgtggataaagaaatatcttcacataaaaactacacagaagcattctgagaaacttccttgggatgtgtccattcatctcaccgagttgaaactttcttttgattgagcagttttgaaacactcttttgtagaatctgtgagtggatrtttggagacatttgaggcctgttgtggaaaggaaagatcttcacataaaacctacacagaagcattctgagaaacttctttgtgaggtgtgcattaaactcacagagttgaactta

SEQ ID NO: 901520 - DNA, 641 bp, Homo sapiens
aactacacagaagcattctgagaaactgctttatgatgtgtgcattcatctcacagagttgaacctttcttttgattgagcagctttgaaacactctttttgtagaatctgcaagtggatatttcgtgtgctttgagtcctaccatggaaaaggaaatatcttcacataaaaaatactcagaggaattctgagaaacttctttgtgatgtgtgcattcaactcacagaattgaacctatctttagattgagcagtttagaatctctctttttgcagtatctgcaagtggatatttggagccctttgcagcctgtggtggaaaagaaaatatcttcacacaaaaactactcggaagcattcttagaaacttctttttgatgtgtgcattcaaatcacagagttgaacctatattttcattaagcagtttaaaatctctcctttgcagaatctgcaagtggatatttgaagccccttgtggcctatggtggataaggaaatatcttcaaataaaaactacacagaaacattctgagaaacttctttgtgmtgtatacatttatctcacagggttgaaactatcttatgacagagcagttttgacacactctttttgtagaatctgcaagtggatatttgcagc

SEQ ID NO: 901521 - DNA, 640 bp, Homo sapiens
atatacccgtttctgtcggaggcctcaaagcagtcaaaaatatccacttacagatactacaaaaagagtgtttcaaaactgctctacgaaaaggtatactcctttgtgtatactctgtaatgtttgcatacaactccatgagttatatgcaaacattacagagaagtttctgagaatgcttctttctactttttatgtgaagatatttccttttccaccaaaggcctcaaagctcttcaaatgtccactttgcagactctacaaaaagagtgtttgaaaactgctctataaaaagaaaggttcaactccatgagttgagtgcacacatcacaaagaagtttctgagaatggttctatctagtttttatgtgaagatatttccttttccaccataggcctcaaagcactccaaatgtccacttgtagattctataaaaagagtgtttcaaaacttctctatcaaaagaaatgataaattctgtgagatgaatacacacattcctaagaagtttctgagaatgcttctatctactttttatgtgtagatattctyatttccaatgaaggcctcaaagccgtccaaatatccactggcagattctacaaaaagagtgtttcaaaactgctgtattaagaagta

SEQ ID NO: 901522 - DNA, 648 bp, Homo sapiens
aactgctctaaaaaaagttatgttcaaatctgtgagttgaatgtaaacacagcgaaatttctgagaatgcttctgtctactttttatgtgaatatatttccgtttccgccaaaatgttcacttcttgattctacaaaaagagtgtttcaaaacttgtctatcaaaagaaaggttaaactctgcgattttaatgcacacatcacaaagaagtttctgagaaagcttctgtctagtttttatgtgaagatattcccgtttccaacgaaggcctcaaagcagtccatatatccacttgtagattctatgaaaagcgtgtttcaaaacagctgtatgaaaaggcatattcaactccatgagttgaatgcaaacatcacaaaaatgtttctgagaatgcttatgtctggtttttatatgaagatatttccttttccaccatacgccacaaatctttccaaatgttcacttgcatattctacagaaagagtgtttcaaaacttctctatcaaaagagaggtcaattctgtgattttaatrcacacatcacaaagaagtttctgagaaagcttctgtctagtttttatgtgaagatattccgtttccaatgaaggcctcaaagcagtccaaatatccacttgcagattctatgaa

SEQ ID NO: 901523 - DNA, 699 bp, Homo sapiens
tggggtggagagttctgtagatgtctattaggtccacttggtgcagagctgagttcaattcctgcatatccttgttaactttctttctcattgatctgtctaatattaacagtggggtgttaaagtctcccattattattgtgtgggagtctaagtctccttgtaggtctctaaggacttgctttatgaatctgggtgctcctgtattgggtgcatatgtatttaggataattagctcttcttgttgaattgatccctttaccattatgtcatggccttctttgtctcttttgatctttgttggtttcatgtctgttttatcagcgactaggattgcaacccctgcctttttttgttttccatttgcttggtagatcttcctccatccctttattttgagcctgtatgtatctctgcacatgagataggtttcctgaatacagcacactgattcgtcttgactctttatccaatttgccagtctgtgtcttttaattggagcattgaatgcatttacatttaaggttaatattggtatgtgtgaatttgatcctgtcattatgatgttagctgkttattttgctcattagttgatgcagtttcttcctagcattgatggtctttacaatttggcgtttttcagtgtctggtaccagtttttcctttccacatttagtgtttccttcagaagctctttta

SEQ ID NO: 901524 - DNA, 613 bp, Homo sapiens
ttacattataataaactgattaacaaaaaaaaatcatwtttttcccacagcagaagtatatttattgtgctgaaatcaggtagcagggaatgaatagctcttgggaaccagtacagaatgttcacaaagatttacaaatctcagtcattacacactgagcaacaaaacaaaggtgttgaatcctcttagatcaaactactttatatgttgcaaattttctgtaattctcatgactgcatgcctttggggaaaaagtatttaattttaatgcacaataaatatgttatagcttacaaaatattctgaaatagtttgtacaaacagcatacatcctacacatgcagctttgacatgttgttgagatacttaagaaatattcatgcttttttttggtcacattttgtctttctctagtaatccctttgcaacatcccttaaaaaattaacctatgtagtaaaacatgatacaaattctttcctactttatttccagttgttcacttatattacatgaaatacttcatttgtaaatagcaaattgaatgttatagttctgactactctcacttttattcattttgtgttttaacaacaccttgtaacatcaagcatt

SEQ ID NO: 901525 - DNA, 669 bp, Homo sapiens
attaccaatctggtccatgcctattagggactgggcctcgcaacaggaggtgagctgcatttgagcaagaattactggctgagctccacctcctgtcagatcagcagtgacattagattcccataggagtgtgaaccctactgtgagatgcacatacaagggatccaggttgtgttccccttatgagaatgtaactaatgcctgatgatctgagatggaaccagtttcatactgaaaccttctgctaacacccctcaatctctgcaaaaattgtcttccacaaaaccagtccctggtgccaaaaagtttggggaccactgctctacagtacttagattctattttcatggttatttcattatcctaaggagctgttgaaactagaggcatcatctttgcatttcagacagtaagaggaagggtcaaaagagagagtattagttatctgcaaattacacttcttggacaccccacacaagacccttactgtcctctcaccaagcaaaacttatcacatgatctacctatgaaagaaattaggagaggagaggagaggtagaggttataatcttttagctaaattgtagtatgcctagatttttataaaaatcagatttattttactaaagaaaaagggaaaataagtakcagtctgtcctatactatgtg

SEQ ID NO: 901526 - DNA, 689 bp, Homo sapiens
agtaataacagctacattagttgagtgtctagtgtacaatatatgttttacagggcactttggatgaactagtctaaatcatacttcaggatagcattgtaaccacacttaacagctgccaaccaaaactaaagtgcagaaaacttgagtgaactgcccaaggtaagacaaccaataaaaaggaaaaatagtatctgaagtccaatcttacaccaaatcctccgttcatggcattaaaccaccatgtctcagtgaactataattgtcacaggatccaaagtgacacagggtgtcactgtgccggctggaaacctctgtcgtcagtggcacctctgcttgggttttgcttgtacccactgggttcattccacccacttggtccagcaggctgcacttggctcgcactactggaccagatcccatgcctgccaagggcaaaccaggtgtggagtggcgagcggtgtgtaagcatgggttccagccactgtgcacaatcaggcatgctggctgcagcagggtgggcagctccagacactggcacaggcactggctttgtgtgaggctgtgactggaccagatataccatcagcagyttccactggcaccagggaatgtggtggtgaccagaagcttggagatgctaggaaccacaaagccccaaagagggtgttacagccctggttcaggga

SEQ ID NO: 901527 - DNA, 680 bp, Homo sapiens
atccagtttcagctttctacatatggctagccagttttcccagcaccatttataaatagggactcctttcaccatttcttgttttkgtcaggcttgtcaaagatcagatggttgtagatgtgtggtgttgtttctgaggcctctgtactgttccattggtctatatctctgttttggtagcaatgtcatgctgttttggttactgtagccttgtagtgtagtttgaagtcaggtagcatgatatctccagctttgttctttttgtttaggattgtcttggcaatgaaggttcttttttggttccatatgaactttaaagtaattttttccaattctgtgaagaaagtcattggtagcttgatgggtgtggcattgaatctataaattaccttgggctgtatggccattttcatgatattgattcttcctacccatgagcatggaatgttctcccatttgtgtcctcttttatttcattgagcagtggttgtagttctccttgaagagatccttctcatgccatgtaagttggattcctaggtattttattctctttgtagcagttgtgaatgggagttcactcatgatttggctctctgtttgtctgttattggtgtataagaatgcttgtgatttttttacattgattttgtatccttaggctttgctgaagttgctta

SEQ ID NO: 901528 - DNA, 622 bp, Homo sapiens
gacatgtgagaatggccgtgtgatacataataatgttttgtgattctaaatgtcttgaaatggagtcatttatgacaagtcactcagcccacagtgaaactgctgacccttcaaagtgataagcacatgtatggtggactgaggtgataagatgacacctcccatggccaggcacctcagagacaccacaggaaagtgaagctaaaggggctgagatgatgactacggacacactcctgtggagatccataaaaacagcaagaaactgacaatagttgagatgcctgcagaagctttgccaggagaactctgaggcctcctcgccattggtagtggctgctagaagctctgccaggagatgagcagggacccccatccccttgctggtcagtgtttccagggaaatccaggccttccttgtgcctcagtcagcctgcgggcctcctgagctactcaccatggtttgttccccctctcttttatgtctgcctgtgtgcattgagtatatttgcatgattgttggtgtgtgaratccttgcaataaactatgaatttgaaagcatttaattggccattgagtcgtcgtgaaccctcccctcctcctccaataggagctggcaca

SEQ ID NO: 901529 - DNA, 619 bp, Homo sapiens
taacaaaatgtatcccacagatatgaacaaattttatgtatcaataaaaacatgtaaatataacaatgtcatttcactgcttaaattcttgcaatgatatacactcagaataaaattaaatgcaagattcctatacaaatagctctagggtacttacttctatgatagtatcttgaaaggcttttccctttaacaactctgttttatccatactgcctcctttttgtttcattaatacattacattctttcctgactcaagctttttgcacattttcttaacattgcctgtaacgttcatcactcatcatccaggtctttacatggtgggctccctcgcttaactcactttgcgttcctaattcagttattcaaagagatgtttccttacaactccacttaaaataggacactccatcctgttactctgcattgctttatctgcttatctattttattctttggtaatagtacttgaagataggaaattatcttcatgaattgcttatttacttatctatacaatgatagcttcttacaagcagaaacctctgtctgatttctcactgtmtccccagtgctaagagcagtacctgccaaaaaagttatttttttagaag

SEQ ID NO: 901530 - DNA, 638 bp, Homo sapiens
aaaatttttttaacaggtggcacaagaccttggcattacttaaatcattaattttatgttctctaacrtactgtgctcattataatcatgtaattctaaaacttattccctgtatatatgtacacgtgtgactttttctgtgctctttcaaatcatttgggatgtttttgccctgttgtctagagggccttacatggatttacatttcttctataaagaattcataacagtcccagttgacagtgactattcacttggtctactgcaccaagcactgtaaagaacacataatgggcccactctgaatgtttgttgaaagagtaaaagaaatcagcaaccacagcagtgtgctataatttagatttggtaatgtttttcttcctaactctaagttctgcaagaacaatggttttattatctacagcagaaagaccttttacatgaaaagctaatctttaggatgcaaaagataggatcattctaatttttttttttttttttgagatggagtcttgctctgtcacccaggctggagtgcagtggcgtaatcttggctcacctctgcctcccaggttcaagtaattctactgcctcagcctcccgagtagctgggattacagccatgcgccatcactccc

SEQ ID NO: 901531 - DNA, 637 bp, Homo sapiens
ttgaacagatgggaacagagtaaagggctttcccgtgacagctttgggtactgtgttggtggcttaccacagcaaaacatatctgcatagcttttcttttttttttttcttagctctgtttgtgcttctttatggaccacctttgtaggggatagtacaagtaattatccacattaacaaatagatttacaatgatttagatgtttacagtttacaaaatttttttactctttcatttaaacctcaaaacagtgttgtaagttagggaggacatggggtttatttttccaattttgcagttgagaaaagtgagactgggatcttgactcagccatatttggttttaaaatctggcttcataactcactagcaatgtgagcctggatgggttactcagtgtcctcacttgaaaattggtttgaatgatgaaattgaatatgagagttaaagctgttagtacagagtcaactaattaataattacttgagaagctgtagttattttatttttaatttaaatactaaatttcctcactctaccaagttgaacactaaatctcaatcattcaaaaattttagaaattctgtatattggacagtgtattcatamatattcatgtaatttacctgtaaaccct

SEQ ID NO: 901532 - DNA, 604 bp, Homo sapiens
gagacttgatggtttgctgcacacatcaacccatcatctacattaggtatgtctcctaatatccctgccctcgccacccatcccccaacaggccctggtgtgtgacgttcycctccctgactccatgtgttctcattgttcaactcctacttttgagtgagaacatgcagcatttggttttctgttcttgtgttagttggctgagaatgatggttcccagcttcatccatctccctgcaaaagacatgaactcatcctttttatggctgcatagtattccatggtgtatatgtgccacattttctttatccagtctatcactgatgggttttagggttagttccaagtctttgctattgtgaatagtgctgcaataaacatacatgtgtatgtgtctttatagtagaatgatttataatcctttaggtgtatatccagtaatgggatcgctgggtcaaatggtatttctgcttctagatccatgaggaatcgccacactgtcttccacaatggttgaactaatttacactcccaccaagagtgtaaaagtgttcctatttcttcacatcctctccagcatcttttgtttcttttttaatgattg

SEQ ID NO: 901533 - DNA, 619 bp, Homo sapiens
ctccacaagtatattcttcccacaaagaaatgtttatcacagttttgcagttacacactttggcagcttattaagaattctgtttgtttttcctttttttcctattatcctatttcttttataaacactttttttagtcatacacctttagactccaatttgtgaattgtttctcacaaatagatacagaaccattgccacgaaaacttaatttattagtttgaaagtctccaaaatataaaacaaatcaacaacataaagtaaatatgctataggaaagattgcctaacaaatgctttaggtaaaccaggttattctgagtttaggcaggcagtgcatcttccattaaaacacacacacacacacacacacacacacacgcacatttgtaatatatatgtaactatattgaaatatatgtacttaatgtctcatagtttttttcgctttgttatcagatggcaataaattcaagttggattaaaaagttttccatgtcaacccctgaggacagctgattatagatccgaccttttgagattctgtgtatttcccacttaatcagcrctggaatgagcttctgctaagtgggatatataggattcctacgggaaaagtg

SEQ ID NO: 901534 - DNA, 573 bp, Homo sapiens
catatcactcgtttgcctaccatgttttgaataattcagtgcccatagtctttccagttcaatgcattataaaacacactcaagctgagtttcaatcatattagactgaaagctgatttttttatgaaggattatttaaaacaaaatgcgtcttgggcccaacagcctttgaagccaaacaatcctgagagttcagtaaggaaatgtcaacactgtggagaatttttcgattcagaaaattaaaggaatcctgtttgatgtatattaaccatatcaatattaacgaccttctgctggatttcagcactgatttgagagctgaggtattattggtcttgtattttaactagctgtgaaagcactgagagagttgttcttgggttgaacttgacctgcgtctgggaatgctttctgctccatccattttgaaaagctttattcaagtggatttctctgcctttcttatcacttgcaccccttcggaaaataaaagatgctcaaatatagatgttaacactacagatgctttgtttggkaatagcgtctttcagcttcctgtctttaaaaaattat

SEQ ID NO: 901535 - DNA, 617 bp, Homo sapiens
gtatacgtgggagccaaacactgggtcctcatggacataaagrtagtaacaatagacactggggactagtagagggagagagaggcaagggggcagaatttgaaaatctacctattgggtactgtgctcactatatggctggtaggatcaatcatagcccaaacttagcatgatgcaatgtactcatgtagcaaacctgcatgtgtaccctttgaatctaaaataaaagttgaaattatttaaaaaaaaatactagtaaaggtgaattccacatagctgcagagtcaaaaatgcacacacctttctggaaaagaatttggcaatatacatcaaaagtccttaaaaatgttcttactgaataactctgcttctaggaatgtacactgaggaaaccatcagagaaactcattcaaatgtattcacaaggaaattcactgaaggcctatttataaatttacttaaagaattgaaagtaaaattagtgaaaatgtaaagtatccagaatatgggtgtggtgggctgaataatccccctcatcccccaaaggcatccagatctgaatcctcagaacccagaaatatgttactttccatagcaaaggggtcttcgcagatacg

SEQ ID NO: 901536 - DNA, 665 bp, Homo sapiens
attgtgctatatcccctcaactgaatttgagaccgcaaatacaattataatttaaaatattacgcattcctgggaaaaggtctatgacacagagttaagggggaaaagcagaaataccatgtctctgtatgaaaaaggaacacacagttaacatgctcgatgtattagaatggaaaaataatttgtaattcttccatcttatttatttatttctggcatggttatgctattgaatattcaagaaataaatctttataggtagaaaaggtcagagaagggtcttaaattcatttggttctttttttttctaccctcttaataacttgtactatactgtgtattctctgttggggaaatatattttagtactgtacatgaagtattatagacctatagggttttaaaaatatatttggtgtttttgaaagagagagcatattgaattcatgaatttatttgtacttccagtttaattgcaatgcagtttgagtatttttttaaaatcccaagccaaggcaaactggccataatttacaaaatgtataacaaccattttcatttttcacttctaaagtcaatacttgtataaaaagaagcctgggaaacatcacacaggcagaaggaatcatcaaaacacrgcaaagtgtgttgtattatcctggggt

SEQ ID NO: 901537 - DNA, 609 bp, Homo sapiens
ctggccccaggaagcctctggaagaattcaggattgaatgattgaatgraagcactggcacaaactcaccacagctggccaggaaagccctgaccaacgggcgtccccaggtccctctgtggtgtgtgcttcagcctgctgccagctgaggagtgtcccccgactgatttctccggatagagctgaatccagaaagcaggctgttcaagagaggcatgtggcttggctgagtcaggcccacttcctttccccagtctggtatttatggctccctgcagcagcctagttggcaggtctggactgcttctccacctacattcctaagccacactgcttggccaagatgcatacctgcagcctggcctccagtgttggacagtgtttgtgggagtcttgctgctccttgggagatcagcacctggtggctgggagcgaattttggatacctgcaaagcctccaagttgcagccattattttagcccaggccacagggcaggaggactttatcatatagaatgcatcagaatgaatacaccggtgttccagatcccagttctgtcctttagggaaggctgtggcctcaaacaggtcatacgcctctctaaccc

SEQ ID NO: 901538 - DNA, 657 bp, Homo sapiens
attgacaaatgggatctaattaaactaaagagcttctgcacagcaaaagaaactatcatcagagtgaataggcaacctacagaatgggaggaaattttcgcaatctatccatctacaaagggctaatatccagaatctataagaaacttaaaccaatttacaagaaaagaaaaacaaccccatcaaaaagtgggtgaaggaaatgaatagacagttctcaaaagaagacatttatgcagacaacaaacttatgaaaaaaagctcatcatcactggtcattagagaaatgcaaatcaagaccacaatgagataccatctcacgccagttagaacgatgatgattaaaaagtcagaaaacaacagatgctggagaagatgtggagaaataggaatgctcttacactgttggtgggagtgtaaagtagttcaactattgcggaagactgtggtgattcctcaacgatctagaactagaaataccatttgacccagccatcccattactgggtatatacccaaaggaccataaatcattctactataaagacacatgcacacgtatgtttattgcagcaccattcacaatagcaaacacctggaacmaacccaaatgcccatcaacgatagactggataaagaaaatgtggcacatataca

SEQ ID NO: 901539 - DNA, 604 bp, Homo sapiens
cttgtggtggcacatatacactgtggaatactacgcagccataaaaaagaatgagttcatgtcctttgcagggacgtggatgaagctggaaaccatcattctcagcaaactaagacaagaacagaaaaccaaacactgcatgttctcactcttaagtgggagttgaacagtgagaccatatggacacaaggagggtaacatcacacactgggacctgttgtggggtgaggggctaggggagggatagcattaagagaaatacctaatgtaaatgatgggttgatgggtacagcaaaccaccatggcacgtgtatacatatgtaacaaacctgcacgttctgcacatgtatcccagaacttaaagtataattttaaaaaaaagaagaagaaagtagttggaaaatgtctcttggctgttaggtgtcatgttaccttacttatttaacttctctctagaagtgaccacatctaaatttaaaatgatgacaattgagaayagggactaatatgactgtgccaatgacagcagtgagttaaaagcagaaaaaagaacatggattctggcataagagaaaatccagtagcaattctccacaggcagcaa

SEQ ID NO: 901540 - DNA, 521 bp, Homo sapiens
acaattaacactcccagaggctgcttatcaccagtctgccttagccaccaagcatgcttagagcacaattcctgaagaaggarttccagtgctgtcttttctacatgtcaggcagggatcatggggaccttatgcacaatttattgcacagctgcaagacacagtatggcatcagctccctcatgcctctgctaaagaaatacttaccataactctagcctataaaaatgcaaatgcagattgcaagcatgcaatggctcctgtgagagccacaaagagcttggggaattaccttaaatcctatcaggatataggaactgaatttcattgttctacgatattagctcaaggaatggctagtttagtacttgacaaatcttaaaggagccaagggtcaaaccctaaagtgggaaaatgttataaatgtggaaaaactggacactttaaaaaggaatcaattattcagagaagtaaagcgagcttttgttaaatggaatctcaaaattactccagagaaagtg

SEQ ID NO: 901541 - DNA, 626 bp, Homo sapiens
tgaataacagtggtttaaatcagatggatactgatttctcactaatgtgaacrtccaggtagctggtccgctatcatcaggggtcaacttctattttattgctttgccatcctcaacacatacttctaactcatggtccaaagtggctgctatagctccagccatgaggtctgtattctaaccagcagaaaggacagaagggcagaagaagactaatttcttctctttaactacacttactgagaactatgtatgtgtgtgcctccacagacatatatgcacacacctgccactcctatctgcaaccccattggccagaacttggtcatgtggccacaccaagatacaagggagatggggaaatataggttttattcaaggcaactatgttcacagataactctgtgacaaaggggcagagctgatgtaaggagagagctagcacaactgtcgtgtgctgtatctcaccatattttgcttattatcttctcaagaatattgcattctctttgaaggtggggattctattctgtattcatccactgaattagagaatgtgaaaaggccaaggaggtgatccggtttagtgattttcaaacttctttttatcagtatatttcattttt

SEQ ID NO: 901542 - DNA, 653 bp, Homo sapiens
tttagcccttagggaagaaaatctaattgtagttagtgatgaagggagcgttaacaatgaggtgcatcagaccccctatcccatcatggccaagcattcygttttcaaggtgactctgcattcccttggccaggaggtggtccattcagccagttgggcgggggtgggggggcacttagaattttattcatatttctagataggattggccacatttgtgggaaaggcataaacaccatccagactcttcatttctttcttttttaaaaacaattattattatactttaagttctagggtacatgtgccaacgtgcaggtttgttacatatgtatacatgtgccatgttggtgtgctgcacccattaactcatcatttacattaggtatatctcctaatgctatccctccccccatccccgaccccatgacaggccccagtgtgtgatgttccccaccctgtgtccaagtgttcccattgttcaatacccacctatgagtgagaacatgtggtgtctggttttctgtccttgcaacagtttgctcagaatgatggtttccagcttaatctatgtccctataaaggacatgaactcatccttttttatggctgcatagtattccatggtgtatatgtgccacattttcttaatc

SEQ ID NO: 901543 - DNA, 628 bp, Homo sapiens
tgtgacatggcataaactgcagaaattaaaattgaatccgtcactgtccattgtaatagctggcaggcaactttccacaatgcagtgttgatgtaattctggcatggagtcattctggatctattttaagtaacaactacttttttccttctcaaggtagttcttaatctttaaccattacattttctctatcacaaaaatctggaataatatttttctaaatcaattaactgatgtaaaatttaagtgaataaaaatatcattggtataatatactcacctttgtaaatataggtgccactgccagcctgctaacagaaagacaaatccaactccactcattttcagatttcagaggttggtggtagtattttcaaatatccatttgataagagaagcagaggcagatctttgcttttttggcatatgtctaccatagccttacagtggatttaaagtacagaaagtaatagttcttttaaccctctacaacttgtgagatcagaaagaaagtaaaaagatacaaaaacaaaacaaaaaagcatagaggtctttaatttaaagaaagtytttctgtaaccaaattttatgagtcagcatttttatatcaataatttacggcaataat

SEQ ID NO: 901544 - DNA, 669 bp, Homo sapiens
aaccatctacagttagggctggaagagttttagctggcatttgggcatgactttataaaatgaccttccacacacaactctaaaatcaggtctggggtctgaggccagccctagrtcagctcccactgaggtactttgcactggctgcctttttcttttgggagggacgactgtagcctttgaggtgggtcctcataggctttcagtagtgtgaagctttggtcaaatctgggtgcctagcactatatttaagcacatacatatctgctcaacgtcactcagctagtaagtagtagagtcagtgctggaaaccagatctgtctgacttcaaagctcaagctttaaaccattaccccaccatttctcagcctccagcctctcaaataccaccttcatgatttttgccatatcgtgtactgcctacactattattttgtaaaattttttaatttttaatttttatagggacatagtaggtatatatacttatgggggacataagatgttttgatacaggcatgcaatgtgaaataagcgcatcatggagaatgggatatccatcccctcaggcacttatcctatgtgttacaaacaatacaattatactctttaagttattttaaaatgtacaattaagttattattgactatagtcaccccgtggtgcta

SEQ ID NO: 901545 - DNA, 576 bp, Homo sapiens
atcctacaattttgatgttttactttcattttcattcagcttgctcttaagctttgttaggacaggtctagaataccctttagtttagggttaattttgcactcctactaargtatcattcttctgaggattctactaagtaatctgtgtattaggagatttttctactctggctggtgaagacatgtactattaccagccttctgtgagctccaggaatgattctagttactccttttttggtgattatttccttggctcttggtattttcttcttacttctgtgcagatcagtacttagccaaagacttaaggggactcttctgccaatctctgggacattttctctgtgcagcttcttcctctctggtagtctgttccacaaattatagttgccttgacctccctgaacaccagtctctgtctcctcaactcaaggagactgctgggttctgtttgggtctcttctccttgtgctgcatactggaaacagccttatgcaatggcagggttaactttgtgtgtttccagatatttgggggttacaattcttcactgcttattgccccaatgtct

SEQ ID NO: 901546 - DNA, 638 bp, Homo sapiens
ataaatgcttaagggtatagatatcctattttccatgatgtgatgattataatgcactacatggctgtatcagggcatctcacgtactcccattagtatatacacctactatgtacccacaacagttttttaaaaaaagaatctgaagtttggaaaaaaaagcctctgatcttttaaaaatatatattgatcaatgaataaggaattacaaagcactaaattataccttataccctcttttaaaaataatatgattacatatatgaaatcaatgtaaatgtttatgtataaatagaaagtatacatattctagaatttcatattctagaatagtataaataatgatacaggctagtgtcaaacgtctctgaaaagatagttggaaacaaaactgaaatgaatgtagtagctagggatcagctgtgctttacttcatgttctttgtttggaaagaaattagttctttctggaaccttggtctatattgagtcatgctggggcttttcttggctcaaggcttcactttttattattatctgttagcaaccacatctggaaagattgccttttttttcacccctaacatggtagcttttcatagtttcctcatgcrttacagatctattatagaagaatga

SEQ ID NO: 901547 - DNA, 627 bp, Homo sapiens
tttcgaaggattcatgccactgtaatgagagaggcagtgtaggcaaatggtctgagccttggatggagattgaagtcctgactttagctgggaaatcttggttaagagtctttctgtaccttaktttccctaagtgagaataagagagttggacaagacgaatgtatctccaggttccaatttttctgagaatggttgatagagaagctgctctctccttaaaatgcatggactcaatggcttgaagatattccccatggggaaccattgccacggaggccttgcatgcaagaagtttgggtggggacagtgaggaactgaaacacaagcaccttccaccaattattgctgtgaagaacctgagcctgaagaagctccatctaattttttccccagagttccagattttagggtgcaatcatccagcctatacatgtggctcatagttcaaaaaattaaaagcaaaaccagaactctccagtaggaatggagaaaacctatctgtaggctgaactggctcctttgtcttaggaggcactggtcaggggaaaaaagctgtcttccagacccctcctttctgggtggctactgtggaatcaacggggtcactggctgtaaatcagtaag

SEQ ID NO: 901548 - DNA, 572 bp, Homo sapiens
gtctcccttggtgtttaatcacacggggatgcctgcctgattattcacccacatttcagaggtgtctgaccatgtggggatgcctgccttggtccttcacccttagtggaaagtaccgcttttctggggggcaagaaccccctgaccccttctctctgtgtctctaccccttttctgcttttctagggggcaagaatcccccaaccccttctctccgtgtctccacctcttctccacttttctgaggggcaagaaccccctgaacccttctctccatgtctctaccccttctccactttcctagggggcaagcacccctgacgccttctctctatgtctctactctctcttttctctgggcttgcctccttcactatgggcagccttccaccctccattcctccttcttctcccttagcctgtgttctcaagaacttaaaacctcttcaactyacacctgacctaaacctaaatgccttatcttcttctacaatgctgcttgaccccaatacaaactcgacagtggttccaaatagccagaaaacagcacttttgatttttccatcctacaa

SEQ ID NO: 901549 - DNA, 624 bp, Homo sapiens
gaaaccttcaaagctatccgaatatccacctgcagattctacaaaaagagtgtttccaaaatgccatatcaaaacaaaggttcaactctgttagttgagaacacacatctcaaataagtttctgagaatgcttctgtctagtttttacttgaagatatttcctttctcaccataggcctgaaagcgcttgaaacgtcagcttgcagatactacagaaagagtgtttcaaacctgctctatgaaagggaatgttcagtcctgtgacttgaatgcaaacatcacaaagaagttcctgagaatgcttctctctaggttttatatgtaatcccgtttccaacgaaatcctcaaagctatccaaatatccacttgcagattctacaaaaagagtgtttcaaaactgctgtgtaaaaagaaaggttcaactctgttacttgagtacacacatcacaaagcagtttctgagaatgcttctgtctggtttttatgagaagatatttcctttttcatcataggcctcaaagcgctgcaaatgtccacttccaaatattacaaaaagagtgtttcaaacctgctctatraaaggaagttttcaactctgtgacttgaatgcaaacatcacagag

SEQ ID NO: 901550 - DNA, 626 bp, Homo sapiens
cctgggcttagattatggtgcatcagggtagccttccaccctttagcacagagcttggtgttccaaaggccacaargggttttagaccctggaccccagacatgttccaagactcttttaccttatgtcagacttgcaagccctgcctcagcttctcccaacactcagctttttcccaacagtaattgccaccttgcttgcaaaatgccaattctccacacgtgtggaaattacttaggagaaaaacctcatggaatgacttcttgttatggatttacctcatgcataagggtaaagttattaagtggtactgcacagagtagctagctctccagctctagagagtgggcagagcctcactgcaaacgtcagtccacatctgctccaatagtgacctcagagaggcaggttttctgtcatcttgtgatgtgtaggttcatcagatcaacttgttcttggttgttgctcactcttgggcctggccttggccctggccctgcttatgttctcttgggtctttcctcagacccctggctgacagcctagccagcaccccttgacgtcccctcctgtaggaaattaagtttccattaaaggtagagtgagcacctgtcacaacttgccct

SEQ ID NO: 901551 - DNA, 558 bp, Homo sapiens
tattctacgtcgctgcgatacacagagacccttagggattgctgtggtgtatggagcttcttgcctacacgaagtagtgtaggtgctttttgttttttcattttgagccagctgttcataaatttttctctgtcytttctcactggcatgctgtatgtgggttgccttttttactactgtcgttgtagtcagtcttcctgcttccatcaactcctagccaaacaaagcaagacattcccagtgtgccaaagctcaggcaaattaccttgtactagcattttaggccgatgcttctcgtactttagtgtactacaattaatctggggatcttcttaaaattcagagggtgctttggtagctctggaatgggaactaaaaatttgtgtttctatcagcaaccaggtgatgcctttgctgctggtctttgcaacacaccttgaatagaaagatattagctatcatgactttttagaattgtgtctagattaaaagaaaatttgttttgagggagtgattggctactctcctataaataagatctaaaaatttagaatatga

SEQ ID NO: 901552 - DNA, 585 bp, Homo sapiens
gcattttattttctgtttagtggttgctrtagttttcttgagtcttctccctactgctaatttaagctatttggcatattcagcctcatggttgcaaaactggggttttaatattaaaacttccattgttcatttagatttttccttctgaaaatttgtagaattattcaaggcaatcttttatatacactttctaccttcctttgcctcccaaatcaacaacctgaaggtaggctgaattaatacacactagttgtggtaataatgtagttaagttgacactgtgagctgtggtctaggcagagaatgttacgtgcagagcttctattgtcttctttctcccaaacacagtggtaggttattcacattcattccttgctacacgcatctagttaaaataacttagactttttcaggaaagacaaactgaggccaaaagctattgctcatctcattgctaaaactctggcaacattttctgaattccacagatccacagtttgagaagatgattgtttaacttgtggcatcatgagggcccaacagtttagaaaacagtgggacagcctgttgccctgcagccag

SEQ ID NO: 901553 - DNA, 595 bp, Homo sapiens
tgggaggccaaggtgggagaatcacttgaggccaggagtttcagaccagcctggataacaaagcgagaccttgtctctacagaaaataaaataataattagccagacatagtagtgcatgcctgtagtaccatctcctaaggaggttgaggcaggaggatcatttgagcccacacatttgaagtcgcagtgagctttgatcccaccactgcactccagcctgagtgacagagcaagaccctatctctgacaaaatgtggtggtcacattttgacgtttgaggggtcaccacccctcgacaggccctggtatgtgatgttcccctccctgtgtccatatcttctcattgttcaaatcccacttatgagtgagaacacacagtatttggttttcggttcctgtgttagtttgctgagaatgatggtttccagcttcatccatgtccctgcaaagaacatgaactcatctttttttatggctgcatagtattccctagtgtatatgtgccacattttcttwatccagtctatcattgatggacatttggctgggttccaagtctttgctattgtgaatagtgctacaataaacataca

SEQ ID NO: 901554 - DNA, 626 bp, Homo sapiens
ttaaatatccctctactaacagtcactcaagatcatgatttaatcayttcatgtccaataaagtattgatttcattttcattggttatcttttatatgatcatttagccattttaggcattatatcttcaagaagaaggagatttgtaaatactacaaaggggttttcgttttgtgttgttgagatattactattaaagtttctttttttttttttggatacagctgtgtaaaataaccaagatctatttctcattctagcatgtggtctcagcattctgtacaaatgattttactggcttcgtaaactcccaagttaaagaatctctttaggaagaatcttaattgacctcttgaattgttggcctggtacccagagtaaaagaattgtgttttaataaggattacttttgtcgtggtttattatgctttagcaccacacgctaattgatgtagttgcaggaaataaggtaagacatgccatggtttggttaaaagcttcattacatgtatttatgaagagtcttatggatgaaataatttacaacatctattacatatattgaaatgtatgctactgcttccatttcttataatctgcggaacccaggtctgaaaccacttggt

SEQ ID NO: 901555 - DNA, 651 bp, Homo sapiens
aggcaggcaaatcacctgaggtcagaggttcaagaccagcctgaccaatatggtgaaaccccatctctgctaaaaatacaaaaattagccaggcgtgrtggcgggtgcctgtaatcccagctactcgagaggctgaggcagagaatcacttgaacctgggaggcggaggttgcagtgagccgagattgtgccactgcactccagcctgggcaacagagtgagactctgtctcaataaataataataataataataataataataataataataataatagtagtagtagtagtagtagtagtagtagtaatagtaggccgggcgcagtggctcacgcctataatcccagcacttttggaggccgaggcaggcggatcacgaggtcagatcaagaccgtcctggctaacacagtgaaacccgtctctactaaaaatataaaaaattagctgggcgtggttgcagacgcctgtagtcccagctactcgggaggctgaggcaggagaatggcctgaacctaggaggcggaccttgcagtgagccgagattgtgccactgcactccagcctgggcgacagagcgagactccatctcaaaaaaaaaaaaaaaatagtaacagtaataaaataaaaattatttgtgaaggatgtgag

SEQ ID NO: 901556 - DNA, 652 bp, Homo sapiens
acaatatctgccttttaaaatattgtaaaattatatttttttataaattataaataaattatatttaaaatgtagcaattttttcaagttacattgaggcatcatccttctgtcgattctggttctagatccctgattagtaatagccatgcagctttctgtgactaccttgcctcttgtcttcctcctggctctggattagcatcccacctgcaagttcttccaggactgaaaacagtgagtaccattctatttctcttagctaggtaaaggaggagaactgtcacaaaatttccatttgattggtttttcttctatgctggttatccttgtatactaaagcgctctgttactccataagccatttgatcatgtgtcaattcaacaaatatttattgagcatctagtatatcaaagcactgcatttggtggggttataggtctagcaaaataagaaagaaacatggccctcttcctcagggagttggaggtggggtatcagacattgatgaaacaaaaaacacaattgcaattattgcaaattgaggtaggtcatatgtaggaaatgccaagaggataacgtgctaaaattagttatgttccaattgttcctgctgttaygttgttattgctggcttcctgtatttccccc

SEQ ID NO: 901557 - DNA, 637 bp, Homo sapiens
ggtcaatgactgcaaattcagccccaccaacaatttctcaaagtgcaggctgtagaccacctgcataagaattgttggcagtttatttttttaaaaaaagctagttcctggccccatycaatacaaaaatgagaactgatggatatgttcattcaagatgggaaccaccacccttcaaagagaactccgtgccaagccccatggatactggccaggcttatctttatggagaagcattcttgacacaatttgccaaggaaattgagtagtgagcaaaaccacagggctcatttttcaagtcaaaaattgaccagagaaggttgtaaaaattctcataaacatcaaaaagttctcatctttcttgactctttttttttttttttaacaagagtaatactctttagctgtttacttgaaattttctgaaggataatattaagccttcctctgttcactccatttcacagcttgtattaaattctaaaagctctcttcatctttaggtaaaagaagttaaattgtttgaacctaaatgccatggcttattagggtaataattcaaatttcaagtctgaagtgactactcttggaattgaagaggtgaggctgagatcaattattccaccctcagtactat

SEQ ID NO: 901558 - DNA, 627 bp, Homo sapiens
tcagtcagcttgtggtgaatgctgccaggyctgggactctctcttcagggcagtggactcccttttgacccagggcaagtgcagaaatgccctccaggagctaaggcctgtaatcagggatccaggagcctacttcatgctctatcccactgttaccaagcagatacccagctgcaaaaccaaattctctttactcttccatattatttcctcaagcagaaggagtctctccccacagagccaccacagctgggaatatgctgggtcacacctgaagctagcacatctctgagtctcacccaaagtttatggtgagtactgcctgaagactgctgctgattattcagggcccaagttctctttagttagcaagtgatgaatcctgccatgattggttccctcccttcaaggtagcaacttcccttctggcccagggtatgtctagaaatgttgtctgggagctagggcctggaatagggcctcaacactctgcctggtgcccttttctactgtggcagagttgatatccaagtttcaagacaaagccctctttactctcctctctcctttcctgaagcagaagaaagaagtctctcctgcagctgtgagctgtgctgcctggggtca

SEQ ID NO: 901559 - DNA, 593 bp, Homo sapiens
acattacaggaactgataactagaataaccagtttagagaagaacataaatggcctgtggagctgaaaaacacagcatgagaacttcgtgaagcatacacaagtatcaatagccgaattgatcaagcagaagaaaggatatcagagattaaagatcaatttaatgaaaaaaaaacatgaagacaagattagagaaaaaagaatgaaaaggaacaaacaaagcctccaagaaatatgggactatgtgaaaagaccaaacctacgtttgactggtatatggaaagtgacagtcagaatagaaccaaattagaaaacactcatcaggatattatccaggagaacttccccaaattagcaaggcaggccaacattcaaattcagtaaatacagagaagactacaaagatactcatcgagcaaagcaaccccaagacacataatcaaccacttcaccaaggttgaaatgaaggaaaaaatgttataggcatccagagagaaaggctgggttacccacaaaaggaarcccatcagactagcagcagatctctgagccagaaaccctaaaagccagaagagagtgggggccaatattaaa

SEQ ID NO: 901560 - DNA, 679 bp, Homo sapiens
aatgaatggaatcatacctcacgtctcactactaatattgaatgtaaattgcctaaatgcaaacggtcaccaaaagcaagcagtagtagctattcttatgtcagacaaaacaaactttaaagcaatagcagttaaaagagacaaagagggacatataaataatgtccctctttatataaaaaaatttatttatttaatctccctctttatatataaaaggccttgtccaacaggaaaatatcacaatcctaaacatatatgcacctaacactggtgctcccaaatttataaaataattactaatagacctaagaaatgagacagacagcaacacaataatagtcggggacatcaatactccactgacagcgctagacaactcatcaagacagaaagtcgaaaagacaatgaatttaaactataccttcaaacaaatggacttaatagatatatagagaacatctcattcaacaactgcagaatacacattctattcaacagtgcatggaactttctccaagatagaccatatgataggccatcaagcaagcaaatcacataagagtacataaatatttttaaagcagatccaagaaatatatgtgtgtggtaaaaatacattawccagtaagagaatgataaataaatgaggaactcatgttaccacttggtggaggaa

SEQ ID NO: 901561 - DNA, 558 bp, Homo sapiens
acatgatcctcgtgtcactttaaagactttgaagcatcaccacaggaaaaaatagtattctttgttctctgagcaactcayagagacacagagaactccaaagaatggctggtcccatttggttttgcgctgaggcagaaaataaacctaagtgttcactccaggatttatcttttcttttctttgagtattacatggacctttatcattcttacagatccataaagatctctgatgtaatgagcagcacaggcatttctaggaggagtacagaaagtaaatgacagaatatcatagatattcaagcttaggaaatggaagaacagaaaaaaagttttgaaaggcaataaagatctttgcccttaacagtccatcttgtgtcactttacacgtaatctgtagcttaataattccaagtatgctgagtgcttcttacagctcaggcacatccatatgaaataacatacaaaaattaatgtatctatagacctataaaatgaacaaagggtttctgatgtcacactttttttaagaatttatcaatctggtattttattt

SEQ ID NO: 901562 - DNA, 550 bp, Homo sapiens
ctcgtgtcactttaaagactttgaagcatcaccacaggaaaaaatagtattctttgttctctgagcaactcayagagacacagagaactccaaagaatggctggtcccatttggttttgcgctgaggcagaaaataaacctaagtgttcactccaggatttatcttttcttttctttgagtattacatggacctttatcattcttacagatccataaagatctctgatgtaatgagcagcacaggcatttctaggaggagtacagaaagtaaatgacagaatatcatagatattcaagcttaggaaatggaagaacagaaaaaaagttttgaaaggcaataaagatctttgcccttaacagtccatcttgtgtcactttacacgtaatctgtagcttaataattccaagtatgctgagtgcttcttacagctcaggcacatccatatgaaataacatacaaaaattaatgtatctatagacctataaaatgaacaaagggtttctgatgtcacactttttttaagaatttatcaatctggtattttattt

SEQ ID NO: 901563 - DNA, 516 bp, Homo sapiens
cgtgagagcagaagtcactgccttattctaaatcctagtagggaaacaattgttttgtcactattaagtgaaaaataatattgaatatcagttttttagatgaatttttatcattttagaaagattacttcctgtttgctaagagttttctggtttgttttatttatcacaaatagatgatgctattatctttttctttctttcttttttttttgagctgagtctcgatctgtcgcccaggctggagtgcagtggcgcgatctcggctcactgcaagttccgcctcccgggttcacgccattctcctgcctcagcctcctgagcagctgggactacagacgcccgccaccacgcccagttaatttttttgtatttttagtagaaacggggtttcatcgtgttggccaggatggtctcgatctcctgaccttgtgatccgctggcctcagcctcccaaagtgctgggattacagacrtgagccaacgtgcccggccgatgctattttctttacatta

SEQ ID NO: 901564 - DNA, 661 bp, Homo sapiens
tgtctacaaaatacttacattactatgaatcttttatatgtaaagacacatagatraaaaattaaaagatggtaaaacatatttcacacaaagaaatgttaagaagaaagcaggagtagttgtattgatatcaaacaaaatggacattaagtaataaaatatataaaaagggacaaaaaatgtaattacataatgaaaaaggggtcacttcaccaaaaggacataacacttgtaaaaatatatgcactgaatattaaagcacctaaatacataaagcagttattaaataatctgaaggaaggggaagtctgtaatacaataatagtaggggacctcaataccccactttcaacaatgaaaggatcatctagacagaaaatcaatgggaaaacattgaacttgaattaactttagaccaaatggacctaacacacatatataaaacatgtgatccccaaacaccaaaagacacattcttcttaaacacatatggaaagttaatcaggatagataataagttaggacataaaacaagtcttaaaactttaagaatatagaaatcatattaagtattattctgtatcacaattatatgaatctagaaatcattaagaagaaaaatcttggtaaatacataaatctgtggaaattaaacaaaata

SEQ ID NO: 901565 - DNA, 636 bp, Homo sapiens
attttgtgaagaaagtcattggtagcttgatggggatggcattgactctatagattaccttaggcattatggccattttcacaatattgattcttcctatccatgagcatggaatgttcttccatttgtttgtgtcctcttttatttcactgagcagtgctttgtagttcttccaccagataccctaaatcatctttctcaaattgaaacttccagagatatatagggcaggggcaaaatgcctccagtctcttcactagagcataacaaatgtcacctttgttccagttcccaacaaattcctcatctacatctgtgaccacatcaacctgaaatgtattgtccatatgactattagcattttggtcaaaactattcaacaagtccctaggaagttccacactttcccatgtcttcctgtcttctgagccctccaagtccctaggaagttccaaattttcccacattttcctgtcttcttctgagccctctaaactgctccaatctctgccttttaccaaattccaaagtcacttctacattttcaagtatctttatagcagcacctactctctgcattaccartttactgtattagttcattctcacactgctataaaaaatacccaagactgg

SEQ ID NO: 901566 - DNA, 513 bp, Homo sapiens
caaaagtgttttggggagaaagatatggttctcaaggcctggagaggcaaaccatgtctagaaaaggtccctgatgatagaactccctgagtattcttgcagaaatgaatatccaccaggcttcttcttcttctttttttttttttttttgagatggagtctgtctctgttgcccaggctggcgtgcaatggtgcgatcttggctcaatgcaagctccgcctcccaggttcacgctattctcctgcctcagcctcccaagtagttgggactacaggtgcctgccaccatgcccggctaattttttttgtatttttcgtagagacggggtttcaccgtgttagccaggttggtctcgatctcctgacctcgtgatccacccgccttggcctcccaaagtgctgggattacaggcgtgagccacygcgcccggccccttgtttttcaatcacaagatatgagtcattgcaggaaacaaataaaatggaaccaacacagagaaaggtagagatgga

SEQ ID NO: 901567 - DNA, 639 bp, Homo sapiens
ttctcttttgtggccccaaagaatgattcactctctggagtgaaaaataaccgttgctttctttgcctggaactttaaactgacttgtgctgtatcatccaaacctgttcaattctctcttttctattactcagtgaggtccaaaggagccaaagacaaatctctcctgtttttcttcgaaatgtaaagatgttgcatctgtaaccacaggctgcttttaatcctaaaagtcagcgtgataatgaaatccagtgattaatttctgtcttctaatcaataagtagacatatcaatttatagtatgttagaaagcctcaactccactgaaacaaaaagcaagaggctctgcaaatgttggagtgtgctaaaagaaaagcatggactgatgtttggggaaaggttggtcaatgtgatgaggccatctgtgtttgctaatagtgcttatcaaagttaggttcctacacagagacagagaccaggagacaatcctgtatccttcttgatccttatagtccaaagggatagctcctaagtctttgagaaagacattctgtgttataggagatttaaagggacagagaaaaggtttataactacaggttttctgtktttttttgtgtttttttttttttctagacg

SEQ ID NO: 901568 - DNA, 595 bp, Homo sapiens
tgaacacatgaatgataagaaaacaaaacagccttattgctgatataaagaaggtttgagtggtctggatagagctacaacattctcttaagccaaaacccaatccagaggaaggccctaactctcttcaattctatgaaggctggtagaggtgagaaagctacagaagaaaagtttgaagctagcagaggttggttcaggaggtttaaaaaagcagttgtctccataatgtaaaaatggaaggtgaagcaggaattgctgatgtagaagctgtagcaagttatcaagaagatctagttaatattatcgatgaacatggctacacaaaacaacaggttttcagtgtccataaaaacagccttatattcaaagaagatgccatataggactttcatagctcatagaagtcaacgcctggcttcaaagctcagaagggcagactgactcttttgatagggggtaatgcmgctggtgacttcaagttgagcccattgctcactgaccattctgaaaatccaaaggcccttaacaaatatgctaaacctactctacctgtgctctataaatgaaacaaaacttgaatggcagcacagct

SEQ ID NO: 901569 - DNA, 558 bp, Homo sapiens
taaaaatcaacatggatattctagctttactgatggtaagattcaactagcatctgacaaagtctayaagagttccccaaaggtgaaatgaccacatccacaactttccttacacagaggtatagaaatagtttgtcaggtagatgcctgattacagtgcaatggaaaatgacaggctttaaaaacttggctctaaggctgtaaagacttttcaggaaatcatctataatatggtaaaaataaactgggcttaactgaaattttattccaagttctgatattccattttttacacaaaatcaactcatttaaaaaccagatggaagaatttgggaaaaaaaggaaaaaatgcagaaatatctaaggaaataggaatcatcaaccatatcagaaaactgaagctttaggttaagctttggcacccttgtatcatttttactctccagtcatttgtttccaatccttgctgaatctttaagccttctcaagtccctcaaagctctcatcaatacttgaacatgggccagtataccactagcagtcacatcaaacaggaaa

SEQ ID NO: 901570 - DNA, 618 bp, Homo sapiens
cccaagatcctgaactagagtaaataatgawcttattagtctttcttaaatatatgtatagctcacatttatttcaatgtttaatattagaagtgttttggtttttatttagaagtttggtgatgtttttgtggccagaaatatgtcataggaacttaactcttacttatatcaattcgcctgtggtaaaacagtctcattatgtgttctctcactgaagtttcagtttctgcgaatctactgatgacattaggggaggactttctgtactctggatatataaagggaaaactctaaaaacaagtgtcatgctttctctggctctgcagccatttagcaaccacttgttctcttttatgccaggttgggaatcaaaggctttcccctcactcttgtcaatctctctatgaattatgaaatgataaaggaaggcttctctattcattcttcttctcctctagggaattctcttatgagaaaagatttctaccataacttaggaataatttcctacttcttgtttttattttttatttttggtttagttttatactttttagaggcatttcatttgattatattctagagttaatgtttaggcttagctataggtgataa

SEQ ID NO: 901571 - DNA, 554 bp, Homo sapiens
aagaaaataaggattatagtacaaatcaatgaaacaataaaagaaaactgagagaaaaattgctaaagtaaaaagttggttccttgaaagatcagtacaattatcaactgtcagctaggttgaccaagacagaaatgaaggaaaacaaaccaccaaaatcaggaatgaaacaggagccatcactactgatgctacagaagttaaaaaatttaagtgtatactataccttatagtgaacaacaactttatttctaatacattaaagaaattagataaacaaatttctaggaacacacatattactaaaactgactcaggaagaaagataatctgaatatatctgtaacaagtaaaatcatttagttattaaaatctttccataaataaaatctcaggcccagagtatataactggtaaattatataaagacaaaattaatcctttgcaaatctttcagaaaatagggaatactcaactcattctgtaagtctatattatcctacacccaaaaccagacagacatcmaaagaaaaaaacacaaaacaaaaactacc

SEQ ID NO: 901572 - DNA, 630 bp, Homo sapiens
gacatcagaaaatatctatgttcctccatagacagattggaaaaaagaagccagtcatggactttgcttcctgtgtctttctcttggagcttttctctgcataatgtcccgtcccactcttgtagaaatggcactgataatttctcacctcatcagctaggctcctgatggcaaggcctccctgacgaggacaagccttcactactgaacatctaggtcccagataatgtgttcaactgtggcagcatttgtcatcataattttcaaaatacattagccttgattgtttggaaatctatttcccgttaacatctctttctctaagatcatggtcttgggcagacaaagagagaggcagagaatgatgatgaaattatggaaagaagtcagagtagagatgagaaggaagaagggagagaggaagcaacaggctctacatggtgacattatttaggtcttagaatgaagccaacactagaaataattcctaaacctggaaaacaaaaattttattataaagacagtacattgcctttttgcttaaggtagagagttttctgtcacagctgaaaaaatcctgagaaaacactagaaaattcgactctcaakttagtttctatttctagaaat

SEQ ID NO: 901573 - DNA, 583 bp, Homo sapiens
gggtttgatcaataatttgtacccataggaccagtgattcrcccagtcatctgtgagtaaatgcttgggccagtttccatgtctgtattgaattaaaaactcatacggttctgtgatttttgtcaaatacagatttggtctttgtccctatttcctggtatacaactcctaaaatccttggaatgtcctaagggcttgcttttttttttttttttttttttttttttgaaacagagtcttgctctgtaacccaggctgcagtgcagtggtgcaatctccactcactgcaacctttgcctcctgggttcaagcaatttttttgcctcagcctcccaagtagactacaggcatgtgccaccatggccgggataatttttgtctttgttttcttttttagtagagatggggtttcaccatattggccagtctggtctcgaactcctgacctcaagtgatctgcctgccttgggctcccaaagtgttgggattacaggcatgagccactgcacccagactttggctttttatatgttagggattgaccgatagcttcaggatgtgggctggtcatcagaaagaccaa

SEQ ID NO: 901574 - DNA, 616 bp, Homo sapiens
ggtaggaatgagattgggggtttgatcaataatttgtacccataggaccagtgattcacccagtcatctgtgagtaaatgcttggrccagtttccatgtctgtattgaattaaaaactcatacggttctgtgatttttgtcaaatacagatttggtctttgtccctatttcctggtatacaactcctaaaatccttggaatgtcctaagggcttgcttttttttttttttttttttttttttttgaaacagagtcttgctctgtaacccaggctgcagtgcagtggtgcaatctccactcactgcaacctttgcctcctgggttcaagcaatttttttgcctcagcctcccaagtagactacaggcatgtgccaccatggccgggataatttttgtctttgttttcttttttagtagagatggggtttcaccatattggccagtctggtctcgaactcctgacctcaagtgatctgcctgccttgggctcccaaagtgttgggattacaggcatgagccactgcacccagactttggctttttatatgttagggattgaccgatagcttcaggatgtgggctggtcatcagaaagaccaaggcaggattagagggc

SEQ ID NO: 901575 - DNA, 680 bp, Homo sapiens
aatctcgagttgaatttcccctgaagttcttttccagacatatgctaagttatagcagggtttattctaagtagcttttatttcctctttcttcatctgtagcagaaattaaaagaagtgtctttaatagaaagcaagatgccatcttattagtcatggtgccctaaatctattagctttgagtaggcaaagtggcagtgattctgatatgcctgacattgtccagtcacatttctaacagcatttaaggaggtggtcaaagtcatgtatctcttttgaccttggtaaaaattaatagtgtaatgcctagtctgcctgtatctaaaacccatctacaaaaaagtgataaagcagcccatgttctcaaggaagaggatacaggttctgtccagcagccattaggtggtgctgcctaaccaacattcccttccctgttaggtcacctacatgagtcctgttgcctttattgtggatacaatggagaatattatgtgattcacttacaaaaggtggaagtggctgaaatttctctatcacctctgtgaaacctatcagattctctttttttctggagagtagtcaatagctgctctaaggaggcagcagacacgaaaatggctgctcagactgaaaarcaagcattgatatttgagtagcactttccactttacaaagaattt

SEQ ID NO: 901576 - DNA, 635 bp, Homo sapiens
acagccatatgaaaagatgatcaacattactaatcatcagagaaaagtaaatcaaaaccacaatgaaatacttcatcacacctgtcagggtggtcattatccaaaaaacagaaaataacaagtgttggcaaggatgtggagaaaaggaaacccttgtataccattggtgggaatagaaaatgcatcagccactatggaaggaagtataaaatttcctcagcaaactaaagatagaactaccatttgatccagcaatcccatatctgagtatttatcccgagaaattaaaattaggatctggaagagatatttgtactcctatgttcactgaagcaattttcacaatagctaaaggtagaaacaatataaatgtccattgacagatgaatgagtaaaggaaatatgggatatacattcaatggaatattatttagccttaaaaatgaaggaaattctgtcatatgctacaacgtggatgaacctcgaggacatcatgctaastgaaataacagtcacagaaggacaaatactgtataattccacttacgtaagatatcttaagtagtcaaactcaaagaagcagaaagtaggatgatggctgccagagtttgaaaggggagggaaatggggagttg

SEQ ID NO: 901577 - DNA, 635 bp, Homo sapiens
acagccatatgaaaagatgatcaacattactaatcatcagagaaaagtaaatcaaaaccacaatgaaatacttcatcacacctgtcagggtggtcattatccaaaaaacagaaaataacaagtgttggcaaggatgtggagaaaaggaaacccttgtataccattggtgggaatagaaaatgcatcagccactatggaaggaagtataaaatttcctcagcaaactaaagatagaactaccatttgatccagcaatcccatatctgagtatttatcccgagaaattaaaattaggatctggaagagatatttgtactcctatgttcactgaagcaattttcacaatagctaaaggtagaaacaatataaatgtccattgacagatgaatgagtaaaggaaatatgggatatacattcaatggaatattatttagccttaaaaatgaaggaaattctgtcatatgctacaacgtggatgaacctcgaggacatcatgctaagtgaaataacagtcacagaaggacaaatactgtataattccacttaygtaagatatcttaagtagtcaaactcaaagaagcagaaagtaggatgatggctgccagagtttgaaaggggagggaaatggggagttg

SEQ ID NO: 901578 - DNA, 551 bp, Homo sapiens
tttttcacttgcaagctgtgtggtctgggccaatattttacctctttatacctcatcatttcctccgtcaaacaggaatgactcagccttcatgtagctgcatctgagacagccagctggaatataaactccaggagggcagggacttttgcctgtttagtcctctgctttgtctccagcaccagcaccagcacctagaacagctccaagtcgttctggtgttagttaagcttccttggagaagaagaacctctcacttcaggcttctgttccccagtctgaccagaagatggcagcaaaggaaagcgtgtcccctggacaaggctgttgccgtgctgaaggcctctgcagatttcctgattgcttgtccctgcattaggaagcagagctgtcactgctccttgagcttcagaactgtgggcctgtgcggagcctagttatgaatcctttttatagaggcctggtgctgcttgggtgagaaggggcagcatgtgcaggaggtgccttttgggsctccatctagtagagctgtgtattaatccgttttcaca

SEQ ID NO: 901579 - DNA, 689 bp, Homo sapiens
acaatactgtacagaggaatagaagacagcatcctgcaaggcaacaccattgaaaaggcaagcttcacatagawgaaagtatagaaataaaataagtataattaattgattgacagtaggtaacatttatataggattatcgtggaaggcactgttctaagcatcttatatatattacctcatttcattctcccagtaacccttatgagataattcctattattgtatccattttctagataaggaaactgagacatagaaagcttaaagattttgtccaaggttgcataggtgttagagctgggattcaaatccacttaatctagctcttgattagttcatgctcacaactgagatataaaaggataagtggggccaggtgaggacagaacagagatgagacaaggagtccttaactttggcaggcaataagcacacaactaacttaataaagctatgagccagagtgttcagacctttacaagtcaagaggaagttaaatgaatcactaatcaatctcagtactctatcattctgagccaattaggaattttcttttcgaagtcctgctctccttgcatttccagagtaacaatgcaccacattctgaaacacagcattttatatttgatgatgtcaacttcacaattataagattcttcttttatgtgattatgctaagcactgaa

SEQ ID NO: 901580 - DNA, 530 bp, Homo sapiens
taactcataatattacattttaggtgctctacactcatgggaaaatttaaggataataaaaatgttatattacagaggaatacgcaatttaaacccgtcaccctcctaacttcataaaatttggtgatgttgtacctttgagcagtaaatctttagatactgagttctttttgtttctaatttgtagacatccatcggaaactttcaactttatcttcactagtatagaatagtatatttacatagtgccacctcatcaagtattagcttagtaacacttctgtttaaatggttctaaagtcatattagtcctatttggatcttgtaatatttaatgtgattacatttaagattattgaacactgtcatttaataatcagatgagatgaggtaggtactattcatacataaccttctgaaacagcgaacagtcaaaggttagagagtttaaatccctaactggagatcatctcctcagtgctggacttgagattcaaattcrggaccttacttctgagtctgctcaaaag

SEQ ID NO: 901581 - DNA, 616 bp, Homo sapiens
agaaaagaaaaaaaaaaacattttctggggaagaattcaagcctgctgcagaaayttgcataagtaccgaggagctgaatgttaatagccaagacaatggggaaaatgtcttgagggcatgtcagagacattcatggcagccctacccatcataggcctggaggcctacgagggaaaaatggttttgtgggtgaggcccgggacccaaggtacagatcgggccattgcttcagagagtgcaggacacaagccttggtggctttcacatgatgttgatcctgtgggttcacagaagtcaagaactgaggtgtgggaacctccacctatatttcagaggatgtatggaaatgcctagatgtccaggcagaaatttgctacaggggcggagccctcatagagaacctctgctaggcagtgcagaagggaaatgtgggattggacccccagtgcagagtccccactggggcactgcctagtggagctatgagaagagggccaccattctccagatcccagaatggtagatacactgacaacttgcaccatcagcctgcaaaagccacaggcactcaatgccagcctgtgaaagcagctgtggggactgtaccctgcagag

SEQ ID NO: 901582 - DNA, 606 bp, Homo sapiens
cttgtggggcattgtcctcataaaatttgtgcaaagcattaatcatttcattattcttccaccccagcttctccataaatttgatgtttgctcttgcctcaattttaggggagttcatgttgctaataggggcacctttcaaactggtatcttatccttcttcatgcttcaaactagatcctgcccagacatgttataacaagttaatacaagttattttggtacaaaaaaaatgaaatctatgcatagttttttcataacacacattttctatgaactttttgaagactctcttgtacatggcatatccacctttagttactgaataaataaataaaagatgctcttgcttaaattgttcatgtgtgctagaactttatcccgagcccttcattctcatgttttgcactttcctgtggtgattttacataaacccatgagtttgttaatatctgttaaattgatgacagccaaacytatggctccagcagagattctactcctgagtgtctgacctctatatccaagcacattttatgcttgactacttaaactacttgagtgatcctagagatcttaatttccacatattccaaactaatcata

SEQ ID NO: 901583 - DNA, 392 bp, Homo sapiens
ctgttttattcactgtggtwtgcccagtacctaaaacagtgcctaaaagtttttgaaattttcagtgacttttttttgcaatagagtaagctctatcttgatctgcttctaaagacagcaccagagaacatttctctgaaacataaataaacgtagagacacagctcaaaactcttgatcagactcagtaaagctagaaagctaattggaaaaaggtagcagggtgttttcaagctgtcttgaaaagagatgagtggtgaatctcttcatttttaaattgggagcaatgtttgtagtagcatgagagtttatattaggctatcaaaataaaaaaatgacttaaaccctattaactcagaaaaatgttgtctctgtaatttctttgtctaata

SEQ ID NO: 901584 - DNA, 677 bp, Homo sapiens
aacattccaaatgattctaatgaatgtagacagatctttccttgtcctaatccctaagctgtcctttaaacaagagccagacatacatgaaayaagccattgactttcgattgaaaataaccttagacattctaatcttttattaagcactgtccccaggggttgtaaactcaaatgccttcaaggagtgacagttaacaaaacttatgatgcgcaccataaatcaaacttgatgtgtgatcatacttcacatttgcttggttagttacattgattttcaaactctctgggtagtatgttcctctcagagcaccaactagtgaccccgccctctctagttccctcttttcttcttcacctccttcttcaaccctgctttttttttcagactcatgacttttggctttatcttcttttcttgacccccacattgctcctttgactcatggcatatatggcgtcttctgttttgaagctttggctctatctttcagacagtttgcaagtgccctctggctacatcctgtcattgctgctaggtgttatactctgaagtataaagtcaaaacaaattatatctaccttaactctgggcacttctggtgggtctgccctgtgcctcaggttcctgtccactaatactcgtgagcgtgagataagatcatcattctagttaa

SEQ ID NO: 901585 - DNA, 678 bp, Homo sapiens
aagaagcaacagatataaaagccctgcattgggaaccagctgggagtgtttaaggaatgactaggaggccaatgttgactcaaagagagggaacmaacaaggcagtcatataaaaggagattaaagagttagttgggcccagatatacaatagaaccttgaaaaacatagtaaagacttaagagttttttctaatggcaaagacaagccattggaaatttttaaagaagcattttttacctctggctcttaaagtagagaaagatatatggtgagaaggagagagtgcagcagaggcagtgagcaagagtgaatgtagtaagagaagttaggaagccagtgcagtaatccaggagagagagggtgatgactcagtctagggtggtgtaattgagatgtgaaagtggcagctacaggtctctcatagctgtgaaactgataggactggaaactgtttggatgttatatgatgggtgaggtaaagagagaaatcaggataagcttattttctgaacaaataaatggatgatggtatcattaactgaactggtcaagcatgaacccaaagtaggttaacaaacaagggaaattaatacctcggctttgggtttagtaagcttgagatttttattagacagattaatctaagttataacagatgtataaatgtgaaattcag

SEQ ID NO: 901586 - DNA, 457 bp, Homo sapiens
gcctgatccttcctctggaagcttcatctcagaagagcacctggctgtatgaggtgttagtcggcccctactgggaggtatctcccagttaggctactcgggggtgagggactcacttgagaaagcagtctgtccattctcagatctcaaactccgtgctgggagaacctctactctcttcaaagctgtcagatagggacatttaatctgcagaggtttctgctgccttttgttcagctatgccctgccaccagaggtggaatctacagaagcaggcaggcctccttgagctgcagtgggctccacccagttcaagattcctggctgttttgtttacctactcaagcctcagcaatggyaggcgcccctcccccagcctcgctgccgccttgcagttcgatctcggactgctgtgctagcagtgagccaggctctgtgggcatggaaccctccaagc

SEQ ID NO: 901587 - DNA, 577 bp, Homo sapiens
agcttgtattgccagccacccaggcaggaatgtggttgccaagcacactggctcctgcaatgatttaccacttccaaatgttacatttgacaacaaatctaagaartgcagctttctcagctagaagcttcctgagttggatcttctgtcactgctgcttggctttggtgtctccatgaaggaccagttagttttatgcatctctgcttgccaaagctcaatcccatgacttagactctgcacttcaggttgccttcatctttcgtgttccactaacagacccaatcaaaccaaaggtctgattgaattaactggttgagttaactggcagcccagttcaagaaggaggggaaggggagagcaaactaaaaaaatgcatttgttgaatacaaaagagactaaatgaaaaccacttctctgagtatatggaatgctacacaaacaggatgtctgaaaattagtatctgctatatgcaaggagaatgactgtcacatatgcccagttgaaaccaaatcataactttcaaattgagaggtaaggtaaaaatgtatatttgtgaattgtacaggatattag

SEQ ID NO: 901588 - DNA, 614 bp, Homo sapiens
tgagaaagcaagaccccatctcaacagatacatatatgtatttgtatgtgtgtggttattgaaaaaaacacttatgtatcctttggagacatattgaggcacaaagcactttgaaccctgtacactttgtctctctcctttgcaattcccattacaggctgacccagggaaagctgaggggtggagagatctcataatgcggaacactcattggctgtattgcaactcttcctcatccccttcctataaagagctgaccattgtggaagcatgccaatgacctccagatctctgtggccaggatagtcatggatttagcagtgctgagctattttgatggtgtagttagcagtaggccaaaaccagacgacgtgagctcctgtggtttacagcaagagcctctgggaatctgttggaagaaagctgagtgttgggaagaaagctcaggcagggtttgcataatgttctctggaatgtgtctagacttgctggctcctttcttctagccctcctgggctcctagatcgattgtattcccattatctcaagtagcagaagatgttccatataaatgctaaaycatcacagctgtagatcatgtgcctatcattttg

SEQ ID NO: 901589 - DNA, 617 bp, Homo sapiens
aagcatcaccatttataaggtgattgcagccatgtggtgttctgcaatatgaagttgagaaagggataatagctgcaattaggtggacgctctcatactgattttaacaaaaacatctcagagatagctatawattttctgtttaataactgtaactattccagtgaaatcgtatgttcattggggaacaattgaatgcacagacaatgctcgttagatgaatttaacactcaccttaattgggcaatctagtatttcattaattccaaaatggtactaatttcccaatatgcataattgggatacacaaatattgctctttttatgattgctatgtaacatttgtgaagcttagcctcttggaaattctgtgaaaatatgggattaaaataatactaataattccttaaattgcaacgaaaataaaatacatatgtaaagtgttttataaaattaagcatttctaaatacttttccccaattttatgtcatagcatccctttgtgacataaatagggcagttatattgtcactactttataatgagataacaaaattagagtcttaggttaaaaaaaaaatgcaggaaaagcaaatgttcaaggttctttccagta

SEQ ID NO: 901590 - DNA, 585 bp, Homo sapiens
ccgtctcctgatgagacacactgttctaccttggcactccccagttgtcctggatcarccccatcttgccacttcttttctgcctacagctgattttagcatgtcttgttgccttacttcccttgcctaattctcacactagtatctccattttgctccggccttgactcctggtcttcccttcaattacaaggggattttgttcatgtcttcactcacccctaagcaatgacgattgatctatgaaaaataaagtgaagaggaggagggacgtgtgtaaagaggaaagcctttggtgtgacacattgtgtttttgagaagtattttctataaaattccttctttttccttgttgttctcacttcaggccatgaaatgtgatgcccaaggagcaaagtgtcttaaagttcctaactccactaacccacaagatccggtatcttgagagacctcagattatatgtcctctcttcttcctgctcttgattctatttttttcttttactgttagtaaactggtctctcaagattaaccatgagagcactctcctccatagaacatatttctgcattgacctgtggtct

SEQ ID NO: 901591 - DNA, 682 bp, Homo sapiens
cagacaataggtaaaaaaaaaaattgtgtgtggctgtwttccaacatttatttacaaaaatgggcagtgggttagatttgtgggaccaccgaactagtcagtggtaaagagttactcagatttctgacttgaagcccaggcttttcatgatatactatttcagcacagttgttaggcagagaacaaccaccttgtacctcctcaattttacctcacaaaatgatcatctagtccccacttctatagcctgcttcttggttatcaagaaatacgtgattatggctgggcacggtggctcacgcctgtaatcccagcatcttgggaggccgaggcgggcggatcacagggtcaggagatcgagaccatcctggctgacacggtgaaaccccatctctaccgaaaaaaaaaaacaaaaaacgaaaaaactagcctggcatggtggcgggcacctatagtcccagctactcgggaggctgaggcaggagaatggtgtgaacccgggagacagagcttgcagtgagctgagatcacgccactgcactccagcctgggcgacagagcaagattctgtctcaacaacaacaacaacaacaacaaagaaatacatgattacatatctggctgcaatccagattcactttgcctctcagtcttgttacctttatccaaaaagatatgaatg

SEQ ID NO: 901592 - DNA, 642 bp, Homo sapiens
aaataacaatttgcattggakcctcttagagatacttatttcctgcaaaccaaacgtctacatgctctgtaaagggaaggatttagagtttgaagtcaggggttctgggatttttgatccaaggtctacaaaagtgagccttggatttcttaaatataaaacagtgatagcaataataactgtgtcacaagatttttatgagaattaagtcaaatatatatgggaagtcttttgaaactaattttttaaaaaccaattttgcccaaaaagtagttgctttggattttatttttaacatctttataaactccacaatacctagcatcagggtttctttttaaaattggtattgaatcattatttgtgaataaatctataagattcaacctacaaaaaaaaaagctcatttcttgtattaattcagatgtacctagatttgagaactgtttcatgacagtaaaacatgagaaagttaaattgcctgatatttttgcaacttgcccctttttagtataaagagaatgaccttttaataaattatttcctttcccaagtaaatcactcaatcacaagaaaatgtttagtgtcctcaggtgaaattaacaaaattacctaaaagcttattttttattatcacatggt

SEQ ID NO: 901593 - DNA, 588 bp, Homo sapiens
ttgccatctttgggaattctctggctttgtttgctccatacctccccagccagcctggaatgggagtgtcccctgcactctgtgctctagcacaatagcacataccacattattttgtctgtttcctccactakaatctggggagtggatctttcagttctctatccccaatgccaaatgcagtaggtgctgagtacatgtggaaagaaatgaatgagtggaaggcactagataaaggttagctgagttgaattgaatagagcaggcacaccctctagctatcactgggtgggatttagtgcaggtgatgtaatgtgacttgacagcgtagttaaatattgacagacaggaggaagcacactggccctgttcagaaagaggaaagtaagggctgactgaggctgtcagatcagagagctgaggctggaagtggctacagtggtcctgatgacccagctgaggtcactggttggctcttgcttcagtagaggtaagatttggatcctggctgggaagataatggattgtgatgtgagtaaacgcaggctgtgcctgtggcttggagatggcttgtatcccagacgctct

SEQ ID NO: 901594 - DNA, 644 bp, Homo sapiens
aaaatgtctaaatgtgcagaaatgtaccttttaaaggttagtcaatgtgaatttagagctgtagggaatttaggttgctaggggactctgtggttctccttcagaattgttaaaaaattctctgccagcctgtgagctccctgagggcaggcactgtgctcatctctgtagtatctcctactcctaacacagttcttggcatgtagtatatgctcacttttcttatctaactgacaagtgaaggggtaatcagctgctagtgtttctgttgctaatatgtgacggtttcagcaccttgcgaggcaagtgtgcgactttgggagaaacagaggttaaccaaacaatcttgcaaattaatgtaaaattcctgcttcactaatcagatttttatctctgttatagggggacagccctcttagttttgtgagcagagcatagtttgtgaaagagcccatggttttcaggcccaggtggtgtttcttttgaattcttaggcatctagtttggactagcttcatggtttttgccatatactgctctgtattggagcagtctgtctggaagaaggaacagtgctctgtgtgtgtgtgtrtgtgagctagtttttagtatcccctctgctactgcccatgtgaccttggcaa

SEQ ID NO: 901595 - DNA, 573 bp, Homo sapiens
tccatgccattctctgtcaggtattgaatatagggccatatattttggtgatagcagcacctcacgtctaggtaccaatttctgtatgttgacttgctatagtaacaaaatctcagggacctgcaacaacaaaacatttattaatatttctcattcacatggcatatagactgtggttggatgtggttttgctccaagtatcttctcattctagaacccaggttaaagaagtacctatatggacattcccacttgtgtggcataaggaaagtccaagagccatggaagaagctcctgatgtttcatgaagcttctgcttagatgtggcatacataatgggtgctcacattccactgatcaaaacttatgttaagtaggcaaggccaatgtcaattaaatgagaaggtatactttccctgaaggaggaatgcaagtcacatgacaatagtttgtcattcttttagagggaagagggtagtaaataattgcaaaaaaaaaaaaaagctgtctaccataaacatgtatacgcmtttctttttgcttgtattttcacttcatacaatctttctgttg

SEQ ID NO: 901596 - DNA, 591 bp, Homo sapiens
atgagccaagctgagggccacttagagcagctgtggaaagcctggtcatatgacaggtatacaggcagcaagaaatgtccattgaaactgagtcctctgaaacctttgtgaggtcttctgtagtcccgttatttttactttgctcaaaactcatcagggtttctagatgcatcaagatatgtgtgttatctgtacataaaaaatgtatcacttctgtctgcaaaatttcagtattatatctcagagaggatggcaaaataggcttgcctgctaactgcgttcaaagatccacatacacatgctcaaatttttggtgagatgagtctgattcagttgtattactcagcattctgttaagtggccttcaatactgtcatacagtctaaagcaattgatagttttagtgcctctattacatcagaaaatacacaagaatgacaatatgagcaatctactctttttcaagaaagataagcaattcactagagatgtggaatgctgtttcctaaagcaatatcaatcctggatgtggttatgatgaaaagctagtagtcatagcacagyatgaacaaagtccagaaaggaatactc

SEQ ID NO: 901597 - DNA, 615 bp, Homo sapiens
tagaaatctggaagttgagatcccagagagatgtaattggagagacttgacttaccaccacagcctctcttttctcaaagcatttgctgattcttggtgtgtatctgtgtcaaytcatggagccataaacttaagaagccctacataaccctgtatttatttccaaagctgctataacaaattactacaaacttggtgcttgaaacaacagaaactcattctccagcagtcctgaaaaacagaagtctgacagttaggtgttggcagggccgtgctctctactgctgctcctgggagaacctgttctgtaactgctctgtggcagtcgatgcccccggcttgtggttaaaccactctgctctgcttctttcttttcacctcgccatctcctctgtgtcttctcttctgggtgtctgtcttctttgcctccttcttatgaggacacttgggatgacatctagggtccatctgagataatccaggattatctcattacctcaaatccttaaccacattagcagacacccttttcccaaatttttaagatcacattcacaagttccagggatttgatgtggatatcttttggagaagtatcattcaggctactgaaaa

SEQ ID NO: 901598 - DNA, 532 bp, Homo sapiens
gggctacaggccccatgcaagtctgaaatccacaggggcagtcaaatcttaaagctccaaaatgatctccttygactccatgtctcatgtccaggtcatgctgatgcaagaggtgggctctcatggccttgggcagctccacccctgtgactttgcagggtacagccagcctcctggctgccctcacagtgtggcattgagtgtctgcagcttttccaggtacagagaacaggaaggctcatgggattcactaggtcccaagtagtgcaaaagctgttggtggacctatcattctgggatctggagaacagtggccctcttctcacagctctactaggcagtgcctggtggggactctgtgtgggaactccaaccccatatttcccttctgcactgccttagcagaagttctccatgagggtttcacccctgcagaaaacttctgcctggacatccaggtattctcatatatcctctgaaatctaagtagaggttcccaaacctttattcttgacttctatgcaccaaaagg

SEQ ID NO: 901599 - DNA, 683 bp, Homo sapiens; identical to SEQ ID NO: 899826

SEQ ID NO: 901600 - DNA, 571 bp, Homo sapiens; identical to SEQ ID NO: 899827

SEQ ID NO: 901601 - DNA, 578 bp, Homo sapiens
aattcccacttacaagtgagaaggtgtggggccgggcgcggtggctcacgcctgtaatcctagcactttgggaggctgaggagggcggatcacgaggtcaggagwtcaagaccatcctggccaacacagtgaaaccccatctccacttaaaaaaaaaaaaaaaaaaaaagttcaaaaaattagccaggcatggtggcgggtgcctgcagtcccagctactagggaggctgaggcaggaggatggcgtgaacccaggaggtggagcttgcagtgagccgagattgtgccgctgcactccagcctgggggacagagcgagactccgtctcaaataaataaataaataaataaataaataaataagtgaaaacgtgtggtatttggttttctattcctgtgttaattctcttaggataatggccttctggtgcatccatggtgctgcaaaatacatgatttcattttttatggctgggtagtatccggtggtgtatatgtatcacattttctttatccaatccaccagccatcagcacccagattgattctatgtctttgctgttgttaatagtgctgcag

SEQ ID NO: 901602 - DNA, 647 bp, Homo sapiens
ccactctctaatgaggatgtgaacaygcttatagattttaattcacaagtccttacaacacctttctgttgaaagcaagtgataaacgttttagttattaaaaattcagatgattagagagcatatcaaaggctatcatgcatatttatgccaacaaaactacaaacaggttttataactctctgtatggacatgtaacatgtcattgaaaggttctaggccttggccatgggcaatatgaatcaacgtgattccataaaaatttactgaacacttaccatatgcaaggtcctctgcaaagtgttagcatataattgtttaatgcaatatatcaaatgcctaatgcacaatagttgtcaatatacattcactgtgagacaagagtctggctgggccaatgggtaattttgtgcaaattagaaaaatgcacttcctacaagggacctacagtcttttgggctggggattgggaagagaacagtgcctttttaccaaacagaaaagccaaccaccctttcagtggacatagctctatttcagggagtgtgacttaagatgcagctgttattcattccctctgccagccccctctgcacaaccagaagcaatgaccctgagtgagatttcagcagaatgagcaggaccac

SEQ ID NO: 901603 - DNA, 602 bp, Homo sapiens
ttggtcttaattcacaaacgtagtgcaagaacagggggagaaaggaagagtcattccaaaaactaggtctcatatacattataagtagtccataaactcaactttataaccaccacaaaatgggtgaggttgttctttcccgcctacagaattaaagctgcattttacctctgtgcaacaatttttccccatttgatattgtgctgcatgttcattgttaacttgatttcacctgtataattattcctgttttttactgggggaagaggagctacatgaatttgcaccctatcatgcctcagtcctcaccattcaggaatatgttttgagttatgcactcactgaagtgtccccatatttttgcagctcttctctacggaggaactggagctctagtgtttttttttttttgtggcagtccgtgttaagtttatacagaccaatcatagttgactctaagactgacctaaattcttaagggygtagaatctatcccagaattggcctgaatctctttcaatgctttgactgttatgggctacttgttttctcacaacatacttaagtacgtttcttatggctgctgtaacaaatgatcacaa

SEQ ID NO: 901604 - DNA, 579 bp, Homo sapiens
tctcacctccttccacatttaaggatcctcgtgattacactgggcccacacagataatccagaatgacctcatttccagatcagttgaacagcatccatcagcaacgttaattcccctttgccataggaggtaatatattcacaggttctggggattaggaagtggggaatcccatttgtggggggcccttattctgattaccacaagaccctactggatctagtcccccattatctctctgaccacatcttctgtttttccccttagtcattctgctgtcaccataatgacctcctcaatgtttcttgaataggcaggaacatgtttgcctcaggaccactaaaattgttctttccctacgtttttgtatagctctcctttcacttcttaagatcttttctcatgtgtcacctaagtcgtaactgaccattgaaaccacctttgcaaaattatgayggagacagtgaaagagatctaacttaacctactccatcttgcttctaacctccaacctgtcctttttcattcctgggcgtaggctgaactaactttgggagaaacttagtttatagtttaaa

SEQ ID NO: 901605 - DNA, 611 bp, Homo sapiens
atgcggagcttaaaacctaaatgacaggttgataggtgcagcaaaccaccatgccacacgtatacctatgtaacaaacctacacattctgcacttgtatcctggaacttaaaggaagattaaaaaaaaagaaggtaaaataaaactaccatttgactcagcaatcccattactgggtatatacctgaaagaaaacacatcactctaacaaaaagacacatgcgcttgtttgctcatcgctgcattatccacaatagcaaagatatggaatcaacttaggtgcccatcaatggtggattggaataagaaaatgtggtatatacatacattggactactacacggccatgaaaaggaacaaaatcttgtcttttgcagcaacattgatgcagctcgaggccattatcctaagtaaattaacagaggaacataaaaccaaataccatatgttctcacttataagtgggagctaaacattggttactcatggacttaaagatgaggacaatagccactaggratgaatagaagggagaggtatggaggggagcaatagttaggttttttaggattaaaactagaaatacgaattagtttttgggagttttaatcc

SEQ ID NO: 901606 - DNA, 568 bp, Homo sapiens
ctggttttaccagtcacttccccggggagtgtctgcgggaatcatstccatagtgtttctctttgtggaggagagtggaaattcccttccttccttctgtggggaaaaaagaggcatggagagtaaaggcttgtccctatcaggaaaatttgcctcattcctgtcatctgagcctggagagactcgggccacccaacaaactcacagaaaacagaattacagtggctcagtgtggctgtttgcggaagtggagggagcaaggccaggagtaagagaggagatcaggccttccggaagttagatctgtggttttggggcccctaagatgaagggaagagaaaggaccataaatatgctcttctgtcccacctcttctagttggtcccaggcaggatgtcaggagaaatgggctctctccttgcagctctgccagcagtaagctgtatggccttcatcaggtctcccagcacttttgttcttcattgttaagcaggactgagaacttaagccttaaccacatacagggatgtttgggaccattaatgaaggatcaaaagtgacaacactt

SEQ ID NO: 901607 - DNA, 669 bp, Homo sapiens
gccattgcagtctgaaatgtgcactgcatcgtttaggattttgccacctctcctgggaaagcagcttgcctgacctcggtgagaaaaagttttagtcttaatgactgttacattatttaaataccaagtgtttgaggttaggcatattgcctcacttttttcctttgaatctgaccctgattttaggttgtaattaaagtttattgaacttttagtcaacatccgcacacgtaaatgctgataccaatacataagctgacaaccacttcactagctacaagcgcagtgctttagatgtgctgttaggttatcaagcagtggttagcatcaggttttgcacagcacaactctagagggtgctatttatgttgtgatttgctgcacctttcccacattgcatatggcaccctcttcaattgagcagttgtgatctgcagagcagtaagcagtggctcagattaatattctttatttctcctgcatgtgtgatcatgatagagaaaatgaccatgcatcatgcgcaatatccacacagttaaaccatcaacaacaggaggatccaggaggcaatgagtgtaaagggtcagatgcccaatatctgtgtagtcctgacaggtgggcagagcacagaaatgtagcatcatcrtgcagacagacatgtagacaggc

SEQ ID NO: 901608 - DNA, 616 bp, Homo sapiens
aaacagagacatttctgacagcrgaatcctatagtgggtgaagggaatttccttatataattatatttgtaagatatcaaatggaaaatgagtccttttgcgtttcatttgttatcctgaaagccaacagcattgacttcaaaattctataggctttgaaaacttccaaaccctaaatgatcagcattcctacctgacatataaacaataataacactgaagaatcagatatattgtatactcagtgaaaaatgaaaaataaaagctgtaagtaaaatcaacgatactatgccacattgaaagtaaaatcttacaggtgaacttaatgagaaacagcgacaaaaaaccctcaaatcaacattgcatttttatacttaaagctctgcatgtttttctaaataagactaattcatcaatggtgaattttttgaggcataaaatgagtacaatggccatgcctagcctagcatttttaaattattcaaagtattgccaataattaaagacaataatcataaactaaagtcatagtttcaaagtttaaggaaattaggttttaaaagtaataaactatttactgatagggagaataattaattcaattacttctgtctta

SEQ ID NO: 901609 - DNA, 601 bp, Homo sapiens
ccttgtcttgttccagttctcagacagaaagctttcaacttttccccatcagtactgtgttggctgtgggtttgtcatagatggcttttactacattgaggtatgtccctcgcatgccggttttgctgaaagttttaatcataaagcgatgcgggattttgtcaaatgctttctctgcatctattgagatgatcatgtgatttttgttttaaattctatttatgtggtgtatcacatttattgacttgtgtatattaaatcatccctgcatccctggtatgaaatccacttgatcatggtagattatctttttgatatgttgctggattcagttaacttgtattttgttaaggattttagaatctatgttcatgaaggatatcggtctgtagttttcttttttggttatgtcctttcctggttttggcattagggtgatgctggcttcatagaatgaatgagggagggttctttctttctctattttgtggaatagtgtcacaaggaatggyaccaattcttctttgaatgtctggtagaattctgctgtgaatctgtctggtcctggatttttttttgttggtaacttttaaattaccat

SEQ ID NO: 901610 - DNA, 586 bp, Homo sapiens
aatactgtttattttggcctgagacatgttacccaacagttacttaataatagaacatacatggcaatgaccaaacacaaatgttcattggaatkccacaggttgctgaggctgtctttcacagttccaatcttctaacaccttttaagtttgttatctccaatagtatctgatcctcgaagatatccagggaagcttgttggggattaattttgtagaattagaagtgccactcttttgttaatttactgttggacaaacatgtcagaataaatgccagcttttaccattaggttaaagagggaattttctatttacaaagcaaggcttttcagttgctaaccacttgtacttaccaaatatggtatttgtttagcacatgttttcttgtgaacatccatgtctttgtgactcagtctaggctgttgcaatttgctccttaccaggctttaggagaaaatgtagtaggtaaagaggataactgttcagtcatttaatgtgctttcatgtagagcagtggttctaaacagttccacaatcagatttttaaatattaatttttgtattctctaggcacttcaagttt

SEQ ID NO: 901611 - DNA, 675 bp, Homo sapiens
tgagtagctgggactacaggcatgcaccaccacacctggttaattcttgtattttcagtagagatggagtttaaccatgttggccaggctggtctcgaacttctaacctcagcctctcaaaatgctgggattgtaggcatgaaccactacacccagcctgagcctgatttttaaatccatagatgtgtaaccttacagttcatgaaactacttttgtcaaggtcattaacttctattttaccatcatctgtcatcagttttctctaccagtcagtaatatttggcaaaactgatcactccttccttcttgaaattctttcttgtcttggctcccataatatcaaatcatgtggagtttcttcctctcaatcacctttgtggattcctttttcttttttgaaccttttaatgttaaggtactttagagtttagtcttaggacttctctgcatctctatttataatgtttttctggataatttcatctaattcctcatggctttaaataccatctctgtatcaataactctggtcctgatctggctagttagacttgaatatccagctacctattttatatgctacttgggcatataatagataactgaaacttaccatggctgaagccaaatttattctaycccaatcagtagtcactacctcattaatgcaaaca

SEQ ID NO: 901612 - DNA, 640 bp, Homo sapiens
ctgttgcttagtcacaacttatttattcccacttgaagtcttctatttcctatttctcctggtaatgctctattctcagatctttgaayagtgggcactttcttgtcacttaagtctcaactcagatgttacctttttggagaatccttccctgacctcccctttcaagttgtcctccagtaactctctgttactttcacttgttttatttttcttctctcagcctattatgatcatttatttgtttatttgctcattctcccctccatcattttggtggatatcagcaactgaaaaagacattattataatcactgacttaatgacacactgttatcattggtcctgaagcatatctacttttatcttgcagttgttagagtaggcttcatgagaacaaagatttctcttacttgctgctgttcaccactgttttctcaacacttagcacagtgcaacagtgcctgtttagtactcggtaaaattttgtggaataatgaaagaactaatgaatgcatgcctttcatagtacaggttggtctatgaggaaaatgagacttaaagaggtcaaatgatttacccaaggctattagttaagaaagagatgaccttagaaaaatccagatttcctggcagtcta

SEQ ID NO: 901613 - DNA, 622 bp, Homo sapiens
tatctgcaagcatggtaccaggaagttttattactgggtgggatcattccacttaatataggtcttgggaaaatttagatgtaaatatagttgctgggagagagatatagaaacttctctgaatcartttttatggataatgttctagtagaatgagaatgctgtattatatgactttctatttggattggtaaagaggaccaaatcaaggaagaacatttaagtttacatatattcattactgagaacacacagggaaattcctatatctgtgtgcataaattttctttagaccaatgcatactaaatttaatctaaatgattaaaaatatgaaatttatcagtagtattcactataattaaagtaagaacttgaactaatacctaaccacaccaaatattttataatacaaattattttgaagatagtagtagattattttccactctgctgtctgtaccccttcttccaaaggtcagcatgttgaaatatacataaatgaaatccacttttgaataaattggtaatagttgtattttattgagcagttactatgtgcaagcctccatttaattccttaagtgtattttcttattaaaacctcacatccatgttaaggaa

SEQ ID NO: 901614 - DNA, 666 bp, Homo sapiens
tggctttatccccactggccttctttatgtttcttatgctcagccaactcatctctgcctcaaagttttgctgctagttatttgctctatctggtgtacctgcccaaggccttcccatagctagatgatttttgtcatttaaatctcaactcaaatgcacctcctcctaggagccttctctgactattaatctaaaatcaatctgcatttcctctctattgcatcattctgctatattgccttcataacactcacagtcactggttgcaaagctagacatggcaaccctcataccacttaccttctaactgaaataatcttatgtatttatatatttacttattttcttaccccccaacctagaatgtaacttcattgtttcctctatgtccagaatagtcattggcatatagcaggccttcagtgaatatttgttgaatgaataaataaaggaactcattaaattcattgcagtaataatgcagagtattgtggaaaattggaattggtaaataatggtcagtttaaagccactgtgtaaaccagtgaagttacttctcttttggctcattttcctcattagtacagcttaccctccgtgtaaatttattgtgaaatttaaatcagtgcatttaagacacatgscatacaggtggcataaatgta

SEQ ID NO: 901615 - DNA, 605 bp, Homo sapiens
tcttgatttcctgcacagaacatagcagaagaccttgcatacaggaaatgaccattgcatgctaagctgcagaaggccttccacattcatccatcctcttcctctcacctccatctcctcttcccctaggataatgaggcctgattggagtcaaacacaaagtggacttttagaaatatcagttgggcagccatgacttgctttaaatagaaaaatagaagtagagattagaaataatgctaaatgagagtattttctctcactttcattaccttcttctcttttttctgctcatgctgtgactgaaaaacagagccaggagagtgctgtgctaggtgcctactaagaaggccaagagggagacaaaaatgaagccgatgaaaagcctgggctagtgggaaagagaggttctagggtccatgcatgctctaggccaatcaatgccaaggcgagtgatcagcagccagtgtgggtaaagccttggctagtgactaagggtagytgcatacacacagacaggcattcacaaaacaacaataacaactgcaaaccaaccctgggcccccgcaggagtggctgtagttagtatcaatcctcgcttgatg

SEQ ID NO: 901616 - DNA, 652 bp, Homo sapiens
attcattcatcatttaatatatatccattgagtttctatgcggtgtgggtctagctactggcttgtgaaagctacattgtaagtgtctctattaaaatgctgttctttggtgtctagattcttcttgakagtttgatatttgtgttaacttgttctcaacttttatgtgcttcctcattgtgtctggtctttttttggaaaaggcagaattttctaaaccatggtctattgaatgccattaacttgtgagatgttaatgggtaaaattaaaaaaaatcctgtagtaaaataaacttggcactgtagcataccctctaatcctcaaggaaatatatgacaatattagaatattcaaatttctgagaagttatgcagcaagcaaccaatttaacattgtctaatctcgcatttatcaaatattttttgacctcagaactgagttttggagaacatctatgatatatccagttggattcccagtttcaaaaatgctactttagatccctatagctaacaagtgccagtgggttcacactcagcataacacaaagtctgacacttatgataagaaggcgtccttagaaagaaaggacataggtaggtagataggtagatagacagatggatgctatgcactaagttgagggtgcca

SEQ ID NO: 901617 - DNA, 652 bp, Homo sapiens
attcattcatcatttaatatatatccattgagtttctatgcggtgtgggtctagctactggcttgtgaaagctacattgtaagtgtctctattaaaatgctgttctttggtgtctagattcttcttgagagtttgatatttgtgttaacttgttctcaacttttatgtgcttcctcattgtgtctggtctttttttggaaaaggcagaattttctaaaccatggtctattgaatgccattaacttgtgagatgttaatgggtaaaattaaaaaaaatcctgtagtaaaataaacttggcactgtagcataccctctaatcctcaaggaaatatatgacaatattagaatattcaaatttctgagaagttatgcagcaagcaaccaatttaacattgtctaatctcgcatttatcaaatattttttgacctcagaactgagttttggagaacatctatgatatatccagttggattcccagtttcaaaaatgctactttagatccctatagctaacaagtgccagtgggttcacactcagcataacacaaagtctgacacttatgataagaaggygtccttagaaagaaaggacataggtaggtagataggtagatagacagatggatgctatgcactaagttgagggtgcca

SEQ ID NO: 901618 - DNA, 592 bp, Homo sapiens
tatatatcagccataatatgtgactcatttaggtgctgttgaaattgatggcctattgtgctgtttttcattatttggaggactcggcagctcagtgaagctccattcttttcagtgatttcaaatatttcttggcatgtctctgcaaaactcatttttacggttctatcaggccctggtgactttttgacccttctcactacctctgattgtaaaattaatgagcaattacttttgatcattggattcttaacaggcactgaaagggaaaggtgtctattttttcatgtttgggatcttgattttctctcaatgaaaattgttgattatcttcaaccataccaaccatagatgcttatactttgtttcattcagaaaacaatttttcatgatgtcatgatttggaggagtagcatttcttaaaaagggtattgtatggctaaggtttccaaagtttctattccttctcttaatyactccattcaaggctgttttttttcctacctgaatctaggccaggaggtattgtggtcagttttacagagcactagatgagtgttgcccaatgtagctgtgtgcggtgatgaaaatg

SEQ ID NO: 901619 - DNA, 652 bp, Homo sapiens
aaatccatttggggtttgaagtctgttttgaaacctttgactaagaataacaaaaacagaaataagttattcaagagctaaaggagtcatattatattgataattgtcatggaagtaatttagtatgtgggagatagattttcaataatgttaaaactggatgttaaggttatgagattcattcacaactctaatcagtacaacaaatacaaatttctttatggcatcaaatttcaatcatcagagtagaaaaatataatttcagcaacactttgcagataatagtatactaaaaaccttactgataagtgttcaaaaatattctttaaaaaattaaaacaagcaatagagtgattaaaattcacttatgtgacatctcaccaatgtacataaagatcaacagatttagaaagtgatgaaaaataacactcttaccttaatgctaaaatgtgcaaaaaacttataatgaagctactttgtccttgattgtttaatataagaccataacagcttcaaattatatkaagcaagagaggaattagaatgagagaggctgaaattcaagttttttaaacatatttcagactcatgtgcacaagagttttagtgatgccacttaaaatctggttgtgagtatcttataatcccttcc

SEQ ID NO: 901620 - DNA, 608 bp, Homo sapiens
aatagcaatcattaaaaaggaaacaaaagatgctggagaggatgtgaagaaataggaacacttttacactcttggtgggagtgtaaattagttcaaccattgtggaagacagtgtggcgattcctcatggatctagaagcagaaataccatttgacccagcgatcccattactggatatacacctaaaggattataaatcattctactataaagacacatacacatgtatgtttattgcagcactattcacaatagcaaagacttggaactaaccctaaaacccatcagtgatagactggataaagaaaatgtggcacatatacaccatggaatactatgcagccataaaaaggatgagttcatgtcttttgcagggagatggatgaagctgggaaccatcattctcagccaactaacacaagaacagaaaaccaaatgctgcatgttctcactcaaaagtaggagttgaacaatgagaacacatggagtcagggaggrgaacgtcacacaccagggcctgttgggggatgggtggcgagggcagggatattaggagacatacctaatgtagatgatgggttgatgtgtgcagcaaaccatcaagtct

SEQ ID NO: 901621 - DNA, 602 bp, Homo sapiens
attcatttccatacttaactacaaccttgaagtcttcctgtaaggtaggtatagtggtagcaaactctcttaacattattttgactgaaaaagatcttatttctcctttgcttatgaagcttaatttggctgaatatgaaaaagcttaatttggctggatatgaaattcttgtaaattatttatttatttatttaaggatgctgaatacaggcctgtaatctcttctggcttgcagagtttctgctgaaaggtccactgttagccctatggggttccctttgcaggtgacctgctgcttctgtctagctgcctttaatatttttactttcatgtcaaccttggagaatttgctaactgtgtgtcttaggggtggttatcttgtatagtatctcacaggggttccttgcatttcctgaatttgaatgttggtctctctagcaaggtcggggtgattttcattaatgatattctcaaatatgttttccaagttgcttgctttctctctctctctttcatggatgccagtkagttgtagatttgggctctttatgtaatctcatatttctcagagattttattattcttttctattttttttttt

SEQ ID NO: 901622 - DNA, 652 bp, Homo sapiens
taacataatgtcatgcatatagttgatamaaaaaaatagaaatctgtgtgctaaagaacagcatagggcaaaggacataactcacgtagaaactgcatgaaatagagaaaataacatagaacttatgtgtaggagagcactaatcaaaagtctttccttggaaaatttacttgacttttatgaggctcatttttctcatttttataatgaaatggtttaagttgataattgtaaaagtcatttctaaaaatgaaattatgtgatctgatctcacttaatgccacatcttaacaaactgacataactggtcacatacgaagctcaattttttgctattttttttttcctattatgcaccagccaaaagtagatttttgtgaattcttgttatcatataaaaagattattgagtattgtttcttgttagagcaaatctcttctttttgggccttaccatggaaactgtctattagttttttatctccttgataatctgtgaagcatttctttgtgcatatatatctttctaccttttccagagtttagagtctctgttggaactttagtcaataaatttccccattatttccaaaatacaagaacagagattctagagagtgtctttccagtggttgaaaatagaaattattga

SEQ ID NO: 901623 - DNA, 626 bp, Homo sapiens
ctgatgaacatcaatgtgaaaattcccaataaaatactggcaaactgaatccagcagcgtttcagacaacttatccaccacaagcaagtygccgtcatccctgggatgcaaggctggttcaacatacgcaaatcaataaatgtaatccatcacataaacagaaccaaagacaaaaaacaacatgattatctcaatagatgcagaaaagaccttcaatgaaattcaacatcccttcttgttaaaaactctcaataaactaggtattgatggaacatatttcaaaataataagagctatttatgacaaacccacagccaatatcatattgaaagggcaaaagctagaagctttccctttgaaaactagtacagggaaggactccctctctcaccatttctattcaacatactattggaagttatggccaggacaattaggcaagagaaagaaagaaaaggtattcaaataggaaaagaggaagtaaaatataaaacaacatgattttatatttggaaaactccagtctctcatcccaaaaactctttaatcaaataagtgacttcagcaaagagtcaggttacaaaatcaatgtgtaaaatcacaaacattcctttacaccaacaaca

SEQ ID NO: 901624 - DNA, 589 bp, Homo sapiens
ttaaattcttcaaatatttctattggcattcacttagatctctaaaataaatactatgttttaamaaacttagctatcacaaagtgaaatttgctgtaagcttcattacttttcattttattgactccaggtgagaacaacaacaaaaaaagaactagaggtgaaagtatacctatcaatttgttttgctgctataaaaattaccataaacatatgggcttaagcaaaataaatattatcttagagtttttcaggtaagaagccccaaatgggtctcacaggactaaaatcaacaggtcactttttttttctgcctattgtaatacgctaagacatctccgtgagtggaaaatagacacaaggttgagtttcaaaatgctgccacctctaactgcctgctacaagcatcagtgaagtcctagatgtatggtgaagatgctaaagcaaatattttattaatctgttctcagactgctataaggacatacgtgagaatgggtaactcataaaggaaagaggtttaatggactcacagttctacatggctgggaaggattcacaatcatggcagaagatgaaggaggaggaa

SEQ ID NO: 901625 - DNA, 589 bp, Homo sapiens
ttaaattcttcaaatatttctattggcattcacttagatctctaaaataaatactatgttttaacaaacttagctatcacaaagtgaaatttgstgtaagcttcattacttttcattttattgactccaggtgagaacaacaacaaaaaaagaactagaggtgaaagtatacctatcaatttgttttgctgctataaaaattaccataaacatatgggcttaagcaaaataaatattatcttagagtttttcaggtaagaagccccaaatgggtctcacaggactaaaatcaacaggtcactttttttttctgcctattgtaatacgctaagacatctccgtgagtggaaaatagacacaaggttgagtttcaaaatgctgccacctctaactgcctgctacaagcatcagtgaagtcctagatgtatggtgaagatgctaaagcaaatattttattaatctgttctcagactgctataaggacatacgtgagaatgggtaactcataaaggaaagaggtttaatggactcacagttctacatggctgggaaggattcacaatcatggcagaagatgaaggaggaggaa

SEQ ID NO: 901626 - DNA, 589 bp, Homo sapiens
ttaaattcttcaaatatttctattggcattcacttagatctctaaaataaatactatgttttaacaaacttagctatcacaaagtgaaatttgctgtaagcttcattacttttcrttttattgactccaggtgagaacaacaacaaaaaaagaactagaggtgaaagtatacctatcaatttgttttgctgctataaaaattaccataaacatatgggcttaagcaaaataaatattatcttagagtttttcaggtaagaagccccaaatgggtctcacaggactaaaatcaacaggtcactttttttttctgcctattgtaatacgctaagacatctccgtgagtggaaaatagacacaaggttgagtttcaaaatgctgccacctctaactgcctgctacaagcatcagtgaagtcctagatgtatggtgaagatgctaaagcaaatattttattaatctgttctcagactgctataaggacatacgtgagaatgggtaactcataaaggaaagaggtttaatggactcacagttctacatggctgggaaggattcacaatcatggcagaagatgaaggaggaggaa

SEQ ID NO: 901627 - DNA, 636 bp, Homo sapiens
atgtgtgaccctccaccctgattttaatccaattgaaagaaacatacttttaatccaactgaaaaaacacactgagtatcatacattctacctctacttcttttcctgaagcattttcgatgattaaaagtttgcagtaggcatttgaatttgcaaggttttctcaatcatttactgttttggagtcaagaacatgatcgtccccttgccaagccctgagtttttggatgtcctgtgcttcttttttcttaggcttgcacactggtcaattcttccctaagctcccctctgtctttaataccttaccaaacacagccgacagcaatcaacaccaccactactgctgcgtgtattgactgctagagctacaaatccactcaattcctcttcagttattgcaggggaggattttagcaaatgtttggccactgcttaataaagagagccctctccagtatccttagcacctgccgccttattatcatggaaatgccacacactcagtgtttttgttacagrtatactcttcttcatgtgacagttcctgcattttcagggcagattagataatgctgccttagcaaacaacgcccaaatctcagtgagtttaagcaacagtttatgtcttgattatgc

SEQ ID NO: 901628 - DNA, 660 bp, Homo sapiens
aaagaaatgccttaagagagtatatgaatatgtgaaaatgcatttacatcttcaataaaagaatcgtcatatgcataactacttaatgtcatcaagaaagggaaaaaagttctagtagtataytttgcatgaataattgaattaagctttttattcagcatctcttcctcttgtcttttagaattactggttcaggtgcagagacttctccagaaatgggttcatcaacttttgggcagcttgctcactccctcatctaccacatctctgtgctcaaacacaaataagggaaggagagaagctacatcatctatgttaggattgagaggttgctgtgggagatgggaggcagtgagtgagctcagcaatgctgcaacagtttatcaagtgttggcctcctctttctgcattttctctactcacctttttctctcaccaattgtctgtttaggcacgggaggaagttaaaccctagagaagtagctcatccattgggtgaatttacagaggatgaaaaggaagcactatgacttttaaaattattctttcaatgtgaggaatcacttctgtctgtttatgcttctgaaactactaaaaggttttactctgggaaaactctctagtgaatttccactgacaactttctctttagtaaagacc

SEQ ID NO: 901629 - DNA, 624 bp, Homo sapiens
aggtggccctctgggacagagcttccagaggaaggagcaggcagcaatctttgctgttctgcagcctccacttgtgatactctggcaaacagggtctggagtggacctccagcaaactccagcagacctgcagaagaggggcctcactgttagaaggaaaactaacaaacaagaagcagtagcattgacatcaacaaaaagggcgaccactcaaaaaccccatccaaagttcaccaacatcgaagaccaaaggtagacaaatccataaagatgaggaaaaaacagtgcaaaaagggctgaaaaaccagaatgcctcttctcctccaaagtatcacaactcctcgccagcaaggaaacaaaactggatggagaatgagtttgatgaatttacagaagtaggctttcagaaggtgggtaataaaaaactcctccaagctaaaggagcatgttctaacccaatgcaaggaagctaagaatattgataaaaagttacagcaattgcyaactagaataaccagtttagagaagaacagaaatgatctaatggagctgaaaaacacagcatgagaacttcctgaagcatacacaagtatcaatagccgaactgacaagcagaagaaagga

SEQ ID NO: 901630 - DNA, 565 bp, Homo sapiens
tatatgaccaaaaaggtatgcgctaaggctagtaaaatgagggaaacttagaaagacctgttttctcagattcctgtaggcatccctcccttctcttaagagagaggatacttctttccttcaggggtagggagggctcacataaggatctcatgaatagctccatgggagacagaaaggtcagagaggtctttctgtacctgtcttttttcaaagttcttccacataaaatattcaatatgccaagatgctgtatttgggggtagtgtgtttttaaccccaacaacatcattctgtgagatagtttgtacttttcgtgagtaaatggcttatacgcgcacacacacacgcacacgcacacgcacacatacacatttccaaatttaggatctgatttttcttattgtaatataaatccctatatatgtatgtttaaaatatcwgcaatatatgcacatataaaatacatgtaatatatgcacatatgtaacatcaggacaatcagaacaacatttttaatattggtaatctattattcattaaacaaaaatttggcacatattga

SEQ ID NO: 901631 - DNA, 442 bp, Homo sapiens
caaggcaaagaagaaaaggtgtttccctctcaggtttgatgactatgaggacagactgaaagaaggcctacctcakccttctgcatattcccagagctggactcagtaaatgctgtgaaggaatctgttgactactaggatgagatgatgaagccagagtctcacatatccagtgaacaagaaaatgggcaatattaagaaatatataaggagacatttgcatgaatcagctacagtttcttgtcctcattatgtgcaagatttaaggtccatgaatgaacattttcatgaggcagtcatacttcatacttaaatctagcccattacaccccaaggtcccttttgtcacataggcacataaacacccataaatctgccttatccttccagttacaaattgtctcttccctcagttgtatctatccacacaaacaggagcagt

SEQ ID NO: 901632 - DNA, 619 bp, Homo sapiens
gtggacaaaataagacagaaaaactacttctgcaaaaggaatgttagtatacttagtcactggtactattaaaaattacttttcattatgttatacctgtatcagtagactataataactacgtatgtaaaatttcactgtactttctttcaaaatattgaaagtatgtacttcacctgatgtggtaaatatagtgtacacaaaagtaaaattgacaattttagatataatagtgaaacatttcaaatctttaaatgggcaagggccatgttacctctacaccctaaacaggacccaacataaaataacctttcaggaaatacttgtgggataattcacactcttcatgtcttgttacaacaaaacaaaaatttttcacatctgtgtcatcttaaatgaaaaacaattacttttttatttttttaagaggcagggtcccactgttgaccaggctggaatgcagtggctattcacaggagcaatcccactactaatcagcacagttttgacctgctccttttctgacctgggccagttcacccctccttaggcaacctgctggtctcccrttcctgtggggtcaccatattgatactaaactcaatgtgaacacccaatc

SEQ ID NO: 901633 - DNA, 499 bp, Homo sapiens
tttttttaacaagaatgaaaagagacaaaacacaccaaaacagctgggatacagcaaaaccagygctcagaacaagtttatagcattaaacacctacatcaaaaagctaaaaatattttaaattaacaatgtagggttgcatcataagaaaatagaaaaggaagaacaaataaaaccaaaagctaggggaaaaaaagaattaacagagaatgcagcagaattaaatttaaaaaaaccatccaaataatctgtttctttgaaacagtatatctggttctttgaaagaaaaaacaatattgactgactgcgagctagactaaactaggaaaaaaagagaaaagaaatgataaaggtgacattacaattgatatcacaaaaatacaatagatcatcagagaatcctgtgaacatctctacatgcacaaactggaaaacctagaagaaatggatattttgctggaaacatacaacctccaagactgaaccaggaagaaagaaa

SEQ ID NO: 901634 - DNA, 553 bp, Homo sapiens
atatccaaaatagccagtacaatagtaaggataaacaatatggtaacgaatccttagagatatgcaaatgtaaaccttaatgataaaccaactaacactcattttaatgactattatgaaacrcacacacaggcatacacacaacagaaaataacaaatattggtaataatgtggtgaaacccttttggactgctgaaaagaatgtaaaacagtgaagaccctatgaaaaccgtatggccaatcctcaaataatgtaacatagaattactatatattaaagcacttttattcctcagtatatatccaaaaggatttaaagcaatgttcaaataaatatttgcacatttatgtttaggacagcattatttacattagccaaaaaacggaagcaaggcaagtgttcattcatagatgaatgaatacacaaaatgtggtataaacataaaagagaatacttgttaatcctaaaaagacaggaaattctgacacataccacaacatagatgaaccttaaatacagtgtgtaagacttagtaaaataagccagtaaca

SEQ ID NO: 901635 - DNA, 604 bp, Homo sapiens
attatttccattgtgaatgatgaatgatgcaatgattgtgtctaaggaaagcattattgtctgattcacattgcaagtaaaacaaatgctaatttactatgcatcactgctattgttgtcagtgggccagttcaagttcttgatttaaccgcacaaaacaatttgagagcaaattcaaagtaagagtaggcagagaagcttattgtaaacagaaagcatactctgagagtatgctggctgccaaggggagagacagcagctatcgccttaagaggaattccttgtatgggatttgtacatacatacctacatatttatttatttatttatgcttatttgtatttgttcttttaacttttattttaggttcaggggtacatttgcaggtttgttgtataggtgaacacatgtcatggggatttggtgtacagattattttatcaccgagatactaagactagtacctgatagatcttttttttctgatcctctccctcctcccaccctccaccctcgagtaggctccagtgtctgctgttagcctcttggtttctatgtgttgtcattatttagctyctacatataagggagaacaagtggtatt

SEQ ID NO: 901636 - DNA, 637 bp, Homo sapiens
accaagagcaaacaaaccaagagctagcaggagacaagaaataactaagattagggcataacagaaggagatagagactagaaaatccctttataaaataaatgaatccaggagttatttttttaaaattaataaaatagactgctagctagactcataaagaagaaaagagagaataatgaaatagacacaataaaaatgaaaaagagaatatcaacactgaccccatagacatacaaacaaccatcagagaatactataaacacctctaaacaaataaactagaaaatctaccaaaaaatggataaatttctggacacatacaccctcccaagactaaaccaggaagaaatcaaatccctgaatagattaataacattttctgaaatcaaggcagtgataaatagactaccaccagaaaaagcccaggaccaggtggatttacaaccaaaatgtaccagaggtacaaagaggatctggtactgttataggaaatataaagaaattatttaggtataccgttagattaaagagagtccccagsagaaaattttccttctaacaaaaagcagatcagaaattgatccctttctaaccacacacagttcaaagactaacaaagagcattctggaagat

SEQ ID NO: 901637 - DNA, 638 bp, Homo sapiens
atagttttataatggggagtttcccaaaaggagctctccctctttgcctgctgccatccatgtaaactgtgacttgctcctccttgcctccttgccttctgccatgattgtgaggcctcrccagtcatgtggaactgtaaggctgttaaacatttttcttttgtaaatttcccagtgtcaggtacatctttatcgcagcaagaaaatagactaatacaacattgatgtgaaaatcctcaataaaatacttgcaaaccgaatccagcagcacatcaaaaagcttatccaccatgatcaagttagcttcatcccggggatgcaaggctacttcaacatacacaaatcaataaatgtgatttatcacataaacagaactaaagacaaaaaccacatgattatctcaatagatgcagaaaaagcctttgataaaattcaacatcaccacatgttaaaaactctcagtaaactaagtattgatggaacatatttcaaaataataagagccatttataacaaacccacagccaatatcatgctgaataggcaaaagctggaagcattcccccttgaaaactggcacaagacaagaatgccctctctcaccactcctattcaacatagtatttcaagttctggcc

SEQ ID NO: 901638 - DNA, 638 bp, Homo sapiens
atagttttataatggggagtttcccaaaaggagctctccctctttgcctgctgccatccatgtaaactgtgacttgctcctccttgcctccttgccttctgccatgattgtgaggcctcgccagtcatgtggaactgtaaggctgttaaacatttttcttttgtaaatttcccagtgtcaggtacatctttatcgcagcaagaaaatagactaatacaacattgatgtgaaaatcctcaataaaatacttgcaaaccgaatccagcagcacatcaaaaagcttatccaccatgatcaagttagcttcatcccggggatgcaaggctacttcaacatacacaaatcaataaatgtgatttatcacataaacagaactaaagacaaaaaccacatgattatctcaatagatgcagaaaaagcctttgataaaattcaacatcaccacatgttaaaaactctcagtaaactaagtattgatggaacatatttcaaaataataagagccatttataacaaacccacagccaatatcatgctgaatrggcaaaagctggaagcattcccccttgaaaactggcacaagacaagaatgccctctctcaccactcctattcaacatagtatttcaagttctggcc

SEQ ID NO: 901639 - DNA, 624 bp, Homo sapiens
caaattcaaaaattgagaaatgggatctaattaaactaaagatttttggacagcaaaataaactctcatcacaatgaacacacaacctatggaatgggagaaaaatttgcaatctatccatctgacaaaggtcttatatccaaaatctacaaggaagttaaacaaatgtacaagtaagaatcaaacaaccccattaaaaagtgggcaaagaacatgaacagacacttctcaaaagaagacacttatctgaccaacaaatatatgaaaaaaagctcaacatcactgatcattagagaatgcaaatcaaaacaacaatgagatgccatcttatgtcagtcagaatggtgattattaaaaagtcaaggaacaacatatgctggtgaggctatgaaaaaatagggatgcttttacaccattgatgggactgtaaattagttcaaccattgtggaagacagtgtggcaattcatcacagcctagaaccagaaataccatttaacccagcagtcscattactggatatattcctaaaagaatataaattattccattataaagatacatgcacacatctgttaattgaagcactgttcacaatagcaaagacatggaatcaacccaaatg

SEQ ID NO: 901640 - DNA, 582 bp, Homo sapiens
tgggtgtaaagcaccagataggtatatttggaacctgtgtagattctctttctttcccctagttttagggctctgatcaacatgataagtttggctagatgtgctgaggtccctggggaaagagctttagcctctgtgacttggtgaaggcacagtatagtgtaccctgtatgtctagttccatttctgacaaagctattcccatctgaaaaccatatttcatacagattatctattggctgatattttaagtcttcatggctggcataaacttggttaagtgtctcacaacacaaatgtgttgacttattgtctcctggtagtaaggagtaaggaggctgggtgaagggtggaatactactcaactgttacctgtgagttttttaacaacaagacttggcacttcagcaatctgttgtcagtgagccatcatgacccttttatgtctaataaggtgcctatttggtaggaactcaggagccaaactgactgtcccatggtgagtttgaggacttcctcaagyagagggctgctgcagccactactttgaagcaatgtggccaaccttatgctactacgtct

SEQ ID NO: 901641 - DNA, 614 bp, Homo sapiens
taagcttattgtccttcctgccacattcaaagagcccttggctccattccttcaatagtgatgttcaatccaggagccaactggagtgtaggaaggaccccttcagctcaaagccatgaggggttgcaattctgtcctgggcacccttcagtcctcaggaaagtctcatttccagtggctgagcttgtgatagaggggacaagccatgcagtttatcccactgaggaagttggccctccagtgggctggcttccggcattgatggcagttacctggaaggatattctgaaggcaacatggaggaggctggcggacttgcaaggcagccatcagttggagctgccacttttacttttgcctctccctttcctgagaaagttccttttcctcctggtcccagttgtaaaagacagagaaagctattttgaggatgtcaggcatatgggtgttgggtacttgtcttgggagtttcctctgaatatctggagcttcctgagttagaaaattgttcttttgtactagttgyccttctggtggctctggatctaggtttgtatgtttcattagggctctttgtagcctctctgggaaagcagtgaggttttcaagagggt

SEQ ID NO: 901642 - DNA, 614 bp, Homo sapiens
taagcttattgtccttcctgccacattcaaagagcccttggctccattccttcaatagtgatgttcaatccaggagccaactggagtgtaggaaggaccccttcagctcaaagccatgaggggttgcaattctgtcctgggcacccttcagtcctcaggaaagtctcatttccagtggctgagcttgtgatagaggggacaagccatgcagtttatcccactgaggaagttggccctccagtgggctggcttccggcattgatggcagttacctggaaggatattctgaaggcaacatggaggaggctggcggacttgcaaggcagccatcagttggagctgccacttttacttttgcctctccctttcctgagaaagttccttttcctcctggtcccagttgtaaaagacagagaaagctattttgaggatgtcaggcatatgggtgttgggtacttgtcttgggagtttcctctgaatatctggagcttcctgagttagaaaattgttcttttgtactagttgcccttctggtggctctggatctaggtttgtatgtttyattagggctctttgtagcctctctgggaaagcagtgaggttttcaagagggt

SEQ ID NO: 901643 - DNA, 506 bp, Homo sapiens
gttagtctgatgagcttccctttgtggataacatgacctttctctctggctgcccttaacattttttccctcatttcaaccctgttgtatctgacrattatgtgtcttggggttgctctgctcgaggagtatctttgtggtgttctctgtatttcctaaatttgaatgttggcctgtcttgctaggttgggaagttctcctggataatatcctaaagagttttccagcttggttccattctccctgtcactttcaggtacaccaatcaagtgtagatttggtcttttcacatagtcctggatttcctgcaggcctttttcattccttttcattcttttttctcgctttatttcattaagttgatctttaatctctcatatcctttattccccttgatcgatttggctactaatactcatgtatgcttcacgaagttctcacgctgtgtttttcagctccatcgggtcatttacattcttctctaaactggttattctagttaccaa

SEQ ID NO: 901644 - DNA, 672 bp, Homo sapiens
cagtggatgttagtttgctgggctccatggggttaggacccactgaaccagaccacttggctccctggcttcagcctcctttgcagsggggtgaatagttctgtctcgctggcattccaggcaccactggggtatggaaaaaaaaatcttgcagctagttcagtgtctgcatgaatggtcacccagaaacccagggcccttgtggggtaggcactggagggtatctcctggtctacgggttttgaagaccatgggaaaagtgcagtgtcagggctggagtgcatggttcctcagattcagtccctcatggcttcccttgggtaggggagaaaattccccgaccccttgcacttcccaggtgaggtgacaccccaccctactttggctcaccctccatgggctgcactcactgtccaaccattcccagtgagatgaacctggtacctcagttggaaatgcagaaatcacctgccttctttgttgatcttgctgggagctgcagactagagctgttcctatttgaccatctttccagccatacccttttttcatgttttgggggatactaatggttgcctgagaaaggtaggcttcatgtgtattaagaaagacctttcagtgttaatatacattgtttatgggggaattaaagcactcccagccccatggagt

SEQ ID NO: 901645 - DNA, 664 bp, Homo sapiens
tctctcagacaacactgcaatcaaattaggactcaggattaagaaacttactcaaaaccacacaattacatagaaactgaataacctgctcctgagtgactactgggtaaataatgaaatgaaggcagaaataaagatggtcttggaaaccaatgagaacaaagacacaatgtaccagaatctctgggacaaattgaaagcagtgtggagagggaaatttatagcactaaatgcccacaagagaaagcaggaaagatctaaaattgacaccctaacatcacaattaaaagaactagagaagcaagagcaaacaaattcaaaagctagcagaagacaagaaataactatgatcaaagcagaactgaaggagatagagacacgaaaaactcttcaaataaatcaatgaatccaggatctggtttttttgaaaagatcagcaaaatagataaactactagccagactaataaagcagaaaagagaagaatcaaatagacacacaaaaaaaattatacaggggatatcaccacggatctcaaagaaatayaagttaccatcagagaatactataaacagctctacgcaaataataaagtagaaaatctagaagaaatggataaattgctggacacatacaccctcccaagtctaaactaggaagaagc

SEQ ID NO: 901646 - DNA, 624 bp, Homo sapiens
atatccttaagtgttagtttataaaatagggttaaatacactcacacgcacacacacacacacacaacatgccatatacatacatctatatggcatgttaattgtgggggaaaaaagaagatactatgaataaggctgtataagttgcaaaaggtctataaaattacatatataattcataaacacaatgtgattcatatataattcaactttagtttatgtaactacagtgaacagcaattcaaatataagtctttcaagactaggaagtgcattttaccttctgcagctggcctgatcattgtttcctctgaatattttaacatcaaatccctttgtgaatgtcatataggaacttaaaagtactgccaggggaggggacgtcgattaaaattcagtgatttgtgccgtctgctatttctctttcccagttgctctacacttaatatttatatgctgaaccaaattattaatacatgtcttgtagtacctaatttcatataacaagtattsctacatatacttgtcagtataaagaacaagcttacatgtttggtgaaacatacacacatacgtgcacacacataagtgaacttgaaacgtgtgctcatgaagaaaacatta

SEQ ID NO: 901647 - DNA, 599 bp, Homo sapiens
agaccacatatccagtagcagtggaatctgaagcagctcatcctgcaataccctagtcatacaccaagtcagatcagttcctcaactccagaacacagtttcctattatgcactggcttttaattccattgcagtggataactcttagaacaatttttttttattttcagtttttttaaaccataatatgaaactgagttgattcaactcacttactatagatgtgctattttttaaaagtcattaaacggacagaaccttcttgatatcccaggaactctttgtttccttttattccaaagaagacctggtccaggaaacacaaaacatgggaaaacgttgaattcaaatatgccaaatactactactgacggaaaaaggttattcatcatatgaggataatgcacatccagtttttttcttttttaggtaatagagtatccacctacattgatgtgaaaatgtgcctcactcattcagatttgtgtatttgayggcctcagttccccagaacatagtaatgggccagagagtaaggcagtggtgatataaaggaattttattaaagtttctaagcttaactacttcaagagttattt

SEQ ID NO: 901648 - DNA, 568 bp, Homo sapiens
gctggtgagaactcatctcccagggagagggttctggttcatggtgaggggcagggtcctggtgccatgcagggctagtgctgctccaggtccacagtgtgccttcaagacccaaatcccccagggcttgaagctctccagaacctcacccccagatacatctcccaatgtcattggcggcaccccatgttttttcctgttaccccacagcaggccagggggaatgttgcctgtactggaccagtgaggacgctgaagccccctgagttgaatgaactggctgaagacgaggctccctgttgtggtgctggaatttgacttggtacccactcccagcccttgctgttccctccatgctccctgctccctgcagatgcacaaatgaagaccaaagtcttgaaagaagctagggtcaagcatcattaaacccaggagtcttgtgctgatacaaggcagggtctctcyggatgttgaggcatcatggctgtgttgggcggaacccctgtttgtcagcaaaggttgtggaagctcgtgctcactcctaggggccatggtgatgcagacaagt

SEQ ID NO: 901649 - DNA, 647 bp, Homo sapiens
caattttctgtttatcatttggatgagttttagctgtactacatatgtgcgtatatcttcctaaacaatatattctaaaatttggcttgtctgtgggttttataaaaatggtascatgtcatatatatgttcctacaacttgcttttctcattcatatttgtatttctaagatgtattcatccagaatataaagctagaatttttccattttccactgctgtataatactctgctaggcaatatatcactttgttctgtgtagtctgtgtagacttttgggttatttcctctttgcagagtttactgccagtgatttgctattacaaataaagctactgtgaatttccttccatgtgtctttggttcatgttgagttaagtttttctagcagtagaattgctggatcagagggtaaatatgttctttattaggtaactcaaatgtatttttcaaaatggttgaactggtcaacactccctccaagaagtggtgcattaggcttctttttgctccacatccttgctaacatttggtaatgtcaggcttttaaattttgtccatctaaaatgtaccttactgtgatctgaaaaagcatgttttgatttctaatgaggttcgacatcttttcctatctgtctttaccact

SEQ ID NO: 901650 - DNA, 607 bp, Homo sapiens
atgtcaatgatgaatggaaggatttcaaactctagctgaacaatgcagtttgaatccctcagctagccaaggggtttttggcaagcatcgatgagcttaatattttaaagaaaccagcaatcattttaattcattagttgaagcctgttgttctagacagtgtttttgatttgtattttgggcactggctttgtttttgattcacaagcgtattccatatgggtatattttcttttatacagtgtaaatcatggggataaaagtgggagtttcatctgataaaatgaccaaaatgctgagagattcttttaattatcttttgcattaattatgattcatattaagtgttaagaccaaaaattttcttgtgagctagtacagagcatgaatcagagaacacagaatttagttaacccagctatagacaattaatctaaaaatcaattcagtgttctgctttgtgagaggaaacgacataaacctgtcttagagcatctcgggtacactatttttatrgcttgtctgctgaaggtgggtttctaggatggaagcaaaaaaatcgattcacatggctagctttgcagtcattattcagctaacaaaagcc

SEQ ID NO: 901651 - DNA, 644 bp, Homo sapiens
agagccaggacttgggctttctgtgtctcattctctttgcacaatggaaaatttagaataatcccccrtaggcaccacaagatctctaataatcagagaaggactaaattttgttcagcatagctcaggcctaggaaaggaaaatggatactgattgttgccagatttgcaatagtgtaatccaaccaaattatttatagttcttattaataataaattgaaattaactcattctgatattactcaattgagtatttatgatatttttcttacctccaattgttggtaaaagtaatccttaatatataaggagcatttacaattcaataggaaaaaaaggtgcgtactcacatttttttaaaaatggacaaataatgagaataaagaaatacaaataggcattaaacaaaaacacaatggcaaaaagatttaacttcattaaagaaaaaccctatgaagtcatccttgtattaaattgacaaagattaaacaaactagtaatatatagcaagaactgtggtacaaaagaattggcattctcatcccttgctaagggtgcagttttttttaaggacaatttgtcaacgtgcatcactagccactgtatgctttgatccagcaataccacatcttgaaaactgatc

SEQ ID NO: 901652 - DNA, 604 bp, Homo sapiens
gtgggtagcaatttttaacattatcatgtgtttttcagtgataggagtgtatagcaaggaaattaagccagaaatagtgacttccactctagaagtttgctagtgtaaaagtgggagataaatgaagaactcaaagaagtaaacatagtcataaaaacatattatttaaatttgttggagaagcaaaatttgggcttgattcaggtttagagcagggttcttctaccatggaactactgacatttgagctggataattcttcgttaggaggaccttccccatgcagatgttgaacagcatccctggtccccaactaacagaggacagtagcacctccccataccagctgtgacaaccaaaagtatctgtagacattgccaaatattgtctaagaggtaaagtcacctccaattgagaactactggcttacagaaagaaagatttccttaaagaaataagtgagttcaagaaattgaccttggaaaaaaggtcaatgatggggcaggattgcaaaaaagyagatgggatcaaaggcacctatgtgggaacttattttggaggggaaaaaggggcaattatagaagggaaagaatggaagcagagg

SEQ ID NO: 901653 - DNA, 636 bp, Homo sapiens
tgaaatgtatagttttacctatttttagttaaattaaagtttaaatacattttcatgatttttttctttatgttcccatgtaaaaagatcttgggccacctattcaaggttctcctaaacaggttagaattttcttcaaacaagaaaaagttaacctcactgcccttctttggttaatggaagaattaattttttacatatttctgattccttttatcatcaagatggtacagtgtggggaaaatagcatttaaattacttctataaactcatttctttacatttaagttaaattactttgtcttttaactacttcttatgcggcattttaaggcaaattcaggtaagacatagctatatagtagaggaaagggcagacctctaaaactaggcaggtaggaaggagctggtatgttatttctgttttaaccatgtctataaatgaccactaaatcaggatttctcaccctgataatttccaatttttactttctacagtttatgctacaaaaacaaaatctattgaatatgcttttttaagctacacattmtcctctccttattctgattctttgttttacctttctatcaatgtcacaccttaagactcaccacgttaatgataaagtcttttgg

SEQ ID NO: 901654 - DNA, 628 bp, Homo sapiens
actcagctccagttccttcttgctctcctgtctcacgtaagtaagaggagaaaaagaaaagtggaggatcacttgtaaaggtcaccgcccaggggcacaggctaccctcaaagactgagacctaataatraaactacagaacgctttccctaatcccacactttaccaccacatctatgtaatacaggagattatgttgaaagaactgcaagtcttagaccctatttaaggcatctctaagaaaaccctagagcaatagcgggggagggagaaaaaagggaactagaggaaattttagcctctgaaatctacaactagagcaaacagtaaaacataacctacagatagcatcataattaatgacgagaaactagatgctttctctctaagatcagggatgaagcaagaatatctcctttcacctctcttaacgtcatactgaaagtcttaactaatgcaataaaacaagaaaaggaaattaaaatatacagattggaaggaaaaaatgaaaccatcattattaacagatatcataagtgtctatttagcatattccaaataatcaacagcaagaaaaaccccttggaactaataagcaattatagtgagattgcggaaagtaagatta

SEQ ID NO: 901655 - DNA, 709 bp, Homo sapiens
taacacaaagatcagaaatttgcatagctgtttgtgttagccctttaaaacaaaactctcctaggggaacatatgtgaattctattcagagtttaaaaacagattcatgggagagccccaaaccaatcaaaaacatggcaaggtttaaaaaacaaaaaagacaaaaaacaaaccagaaaaaaaaaattatgaaaagaccctgcctgccaagagtgacttgtttgcaattgaaaacctggagatatgagtacataatagaaacgtggcaatgatcatctgggcaaaaacacaatttgtatgacaatgaatcaggaaatgtcctggaacaccagaagatgaaaaacctgggattttataaggcacattcaagttgctgcgcatgcgtcacaccatgaattttcctgtggtctgacatcctgttaaaagcattggtctctttctaaacattggtagtagaagtgtaccacaacaggcaaccttacatttaaagaaagaatgtaatagatacctgtggaaactgtcaaaagtgtcttctagagctatttttgaggtctcttttattccttcattcctgatctgaaattcattaaggctaagagtgccccttaaattacgttctgctgtatcctggaggaacacctgaagaagttaataataaaccctagagattaggcaagtgraaagaattatgaaataaaacaaagcaaag

SEQ ID NO: 901656 - DNA, 621 bp, Homo sapiens
gaagaacattaacgtggcagatgacattttcctgagaataaagctctacttgcaacataaatacaacacgattgctatrttttaggttctttagaatttggcacattttactgctgtatgccttgtgatttctcagttctgttattatttgtctctgtttgaacccatgcaaaaccttcatccacacagcttagactgtcattcagccctctctttctgcaaataaatctaatatatgtctatagtcagcccacttttcttctatgcagatttcattaatgaaagtagtaattcttgtcagtgtgattgcaagcacaaactcaaagataacattacatggcagtccttggttggcaattgaatggtcagtattcagttgaaaggtcatcaaccagaaatatggttagccattttttagaagaaaacaaattagaaaaaagtatggataacaactttggacaccgaagaatatttctataatatttcctgctcagtctgtagtggaaggcagtagagaatagaacttacaaacatagccttggagtgagaaagatctggaaactatttatgatagttctacttactagatgcatctcttggaacaagattcttcgcttctct

SEQ ID NO: 901657 - DNA, 602 bp, Homo sapiens
aattattgcttatatttctcctattgctgctyttactgctgtagctgcctcctgaactgctgctgctgctaccatggcttctagatgcttctttgacaatttatttattttccagtggaacccatctgtgaggaagcccttcatagcagtaatatcctggggctgggcactactacaataatgatgctttcgttaatcaccccatgtaattttagtttttgctgataaatactacaataaatcgattgaaactgatgaaaatagctcaaaatttagagacatacagtatttcattttaccatcagcgtatttctatgtttatgcaatagggattgaaaaagttcaatccccatgctcaaaaacacatacttccagctctctgagatgatatgccagacagggcttttgattagaagccttatttttttgcctagttctagcttctgtatgagtggagactttattaacaaaggtaggtttggagcactcaacagaagcgtagagaatatatggaaaaaaaaaagaagaagaaaaaagataaaagggaaccaaacaaaacaggtttacaactgttttactaataagagggaaaagtctgctca

SEQ ID NO: 901658 - DNA, 632 bp, Homo sapiens
tgttcaagatgctcattaattcattcactcattttatgtaatgactcatttatcaatcctttgttgagtctcaaccactgtcctaggtaatgctgatacaatcttatgttttgaagctcgccacaaaatttgatcaccactagatccaagatttaacacattatttcatttaatagctattttgagtcttcagggtacaatttacagttttgggggggaagatgtagggaaatatgactcgtcagactcaattaagtgcatttactcagggctacccatctattaagtggcatggttctctaaccccatagttcattctctttttctgtgcaccactagtaggttttgcataaggtaattttgtccaagtggttactgtgtgggtcctgttcacaatcttgatcatgattgtattccaacttctatgtcagagtttgcaagcatgtggcttataaactcaagatggctggtacaatgttgttcaatatttaatggaggggtattaccaagatctagttttctaggttttcttgagaaattagaaaatctggcaacactaagtttgtaataataccagggacaactagccaaactsccctattttgttgaatcatgtgctgtctaagtcctca

SEQ ID NO: 901659 - DNA, 636 bp, Homo sapiens
aagcttaagggggaaatgatgatttttcttagagagaattctggcttccattagatgcttgaacgtgtcctttagagtaagattttctttacaaatccaggcttcaaatatggctatgtaataagatgggtkttttccatagtacatgagctcttaaatctgtattattgttattattattattattaatattatcagacctgtctttgtggcttaaaattaagaaacatcattaaacatttaattttacaatgaagaaaacaaattgctacgtaaaccatcttgctactagctttaagctctagtccaggtcattctgcattttgtcaatatagtaaattgagtaacagcctctgagggccctgcaaagagccaaggcccaatttaactccctagtgccagggtctccaaatgtttttggttgtctatacatactagaaaaaaattaactctgcaccaattaaaaatatgtatatatgtatgtagaatacacacattgcttatattatcacacatacagaaacatcaggcattttaaaagataagattagatacatatatatcccagtattattccctgaagttcccatgaaccaaccttggcacccctgtggatgcccaccccaacttggagac

SEQ ID NO: 901660 - DNA, 673 bp, Homo sapiens
ctatcatgagagcagcatggaagtaactgcccctgtgattcaattacctcccaccgggtccctcccatgacatgtagggattatgggaaatataattcaagatgagatttgggtggggacatggccaaaccatatcattccaccccggcccctcccaaatatcatgtcctcacattccaaaacacaatcatgcttttccaacagtcccccaaattcttagctcattccagcattagcccaaaagtccaaatccaaagtctcatctgagacaaggcatgtcacttctgcctatgagcctgtaaaaccaaaagcaagttagttacttcctagatacaatgggggtacagacatttggtaaatgcagcctctccaaatgggagaaattggcaaaaacagtacaatgggggtagagacattgggtaaatacagcctttccaaatggaagaaattggtcaaagcaaaggggttacaggccccatacagatccaaaatccagtggggcagtcaaatcttaaagctccaaaatgattgcctttgactccatgtctcacattcaggtcatgctgatgtaagaggtgggttcccatggtcttgggcagctctgaccctgtggctttgcagggtacagcccccracctggctgcattgagtttctatggcttttccaggtgca

SEQ ID NO: 901661 - DNA, 656 bp, Homo sapiens
ccactcactagatttcatgccctgaaggatttgttatttaggaaatgatttcatgggcccatgtcctcttattagatatgaaaagatatattcagtaggaatttattgagtatctactatatcctaagaaacacccaatatcattctcaagatatagtagatacttaaattactgctgaaggcatcttttcatatctaacagcttccaaataaatctaccttggtcaaatgctcaagaaattgtttacttttgaaacagagggagattttttgacacacacacatgcgctgagtgagggtcgcacaaactacttagatgaacttttcacttgagtagacaaataggtggtcagatgattagtagcatccatcactggttttaatgtttatggagcacaaaatattgagaaaagttttcattcccatatactctaatgtagttatttctgtgtactttccagacttcctactagtaacaaaggaagagggagttaagagaagtgaacttggccttttgtccaacctgaatcactgatcacatctttcctcactagaataccttcactggtttcagttcaatacaccaatacgtaatgtacaatgaagacagagtagtccaagaataactgactcraagtgtgtttacaagtattttg

SEQ ID NO: 901662 - DNA, 612 bp, Homo sapiens
tttcattaatatttcctggactataataaatactctgacctagatamacattttttcatagtgtctgggaggtcttttcaattatgcacaagtatgtctatgttcattgttctgaattcttgctcaagaatacctataatttctaagttggattactcttctctgtcttttatatcatttattcttttccttctcctctgctttctggaagattttcttaattttttcatatcacaacttaattttcacatcatttcatttcttttctttactaaattgataaagattttgattatgtcattctatattactatttaacagtccttgtatattgtactctaatctgttttatttttatttttcatgaatcttattgtgctctgtttcattttaacctcactctaagtaatgggtctttgcagtttgactacctggttttcatttctatttttttaaacaaaggatcctgatttatcttgggaatttactctagtctttgtgacctggcaagtctcagagaaatacaggagtcttgagctaaagccaatcagctagatgatctccagccgcagtgactgtttccaggaagcacacatgacccagtcagccaat

SEQ ID NO: 901663 - DNA, 539 bp, Homo sapiens
gagtaggcatgacttactggggtaggtattattatattattcctgttttacagagaacacatctgagtttggcagaattaattgctttcctcaagtcactaacctcataagcatgagagttgggaactggatctcaaggctttgtcttaaccagctaggctgcaccagaatcagagaatcagacctttgatgattctccacggccaccatgatttccaatgattttgccaataatactaaccaaactctccccaaatacagtgacacattttaagggacaaaatgaagggttggaaagacaccagcttaagcaagaaactcagccccattctgtctgaaacagacgggaacacagagatcacagagagtttattgtcaaatatttattaaaccagtattgtgggctcatttctatgctaaaccttatcagattataggagagattctggttactactgtcaaggaataaactgtttctgygtaaactaaagaaagtgatgtatttgcttaactacagggctctatgttgaatgagtaga

SEQ ID NO: 901664 - DNA, 607 bp, Homo sapiens
gacatgggtctcattggctaaaatcaaggtattaaaaggactrcattttctcttgcattctgcaggctctagggaagaatccattttcttggcttttcttgttctagatgccactcacttttcttgtctcatatcccccttcctctgtcctcaaagctagcaacattgcatctttctaaaccttccttctgcaatggcatcaccaactgactacagctagaaaaggttctccactttcaaagacttatggattagatggtccacctgattaattcaaaataacacgtgcaaagtttttggcaatgaaaggaaatgtattcacaagttcctgagattaggacttgagcatcttgaggggtggggtttgaaatttgtctaccacacaagtttatgtgttagtacatgtgtttttattattgtgtaagtcaataccaagaggaaggggaaacaaacaaataaacaagcaacataacaataaaaaactactgtcagatacatagtgtttataaagccaaactttattcatttctgataggtcaatattttcactttttttttttaaagaaagcccagggagagtgatgtcagcaagatagcagaataaaag

SEQ ID NO: 901665 - DNA, 607 bp, Homo sapiens
gacatgggtctcattggctaaaatcaaggtattaaaaggactgcattttctcttgcattctgcaggctctagggaagaatccattttcttggcttttcttgttctagatgccactcacttttcttgtctcatatcccccttcctctgtcctcaaagctagcaacattgcatctttctaaaccttccttctgcaatggcatcaccaactgactacagctagaaaaggttctccactttcaaagacttatggattagatggtccacctgattaattcaaaataacacgtgcaaagtttttggcaatgaaaggaaatgtattcacaagttcctgagattaggacttgagcatcttgaggggtggggtttgaaatttgtctaccacacaagtttatgtgttagtacatgtgtttttattattgtgtaagtcaataccaagaggaaggggaaacaaacaaataaacaagcaacataacaataaaaaactactgtcagatacawagtgtttataaagccaaactttattcatttctgataggtcaatattttcactttttttttttaaagaaagcccagggagagtgatgtcagcaagatagcagaataaaag

SEQ ID NO: 901666 - DNA, 623 bp, Homo sapiens
ggtcctcaagctgctacttaaatcagatttcaaaaagcrtatgtattgtattagaattcataggataaatgacatttatatatggcacaatcatgtacgatggctggctgtctctcacacacacatgcacatcagaattcataaattatattattttaggatgaccttgaaaccacttttcactttgtaaattatgaaactactttcgcttttttactttttaaattaaattatttttaaaactttacatgcttattgctacaggtagaggttattatttctgtctctgaaatgtgtgagttgggctacatcagtatgttaaaaccttctatcaaagtctataacatttgagctagcaatttcatgtctgaaaagtgggcctacataaattgaagacatatggaaattttttgaatattaaatgaaattattaaaacatgtggcacataggaaatgttaaatacatatttctatcattactgttatttttagcagtagaaatataatccatgaatgtaagaggtgaaatgggtctctagtaggaattgaaatgttgaagtttttttccaacttttcagtttatttctatcaaaggacagcttgggatatatgtagtcatgtcc

SEQ ID NO: 901667 - DNA, 636 bp, Homo sapiens
atgaaatccaactacttgtaagtcaggaggcaacaaaaaggaagaaaacttgctatggaagcatcaaaaggctctggaattagaagtaccagtagctctgaaggtagaagagatagaggaaasggactgaaaagagcaagatggattaaaagtatgccatttaattgaaaccttcaaatcattttcctgacctcattatgtcaagggtcctattccttttttgacatgatgggagacgaattactccctggttaatttaaactagagacttttcagacttggggagacctggcatcaccaagagtgacattgatgcatgagactgaaaaatatgaggattgtcttctaaataatggcatctcccattccacttcttttactcacattccagaacatcaacatacagaattatatccaagataggaaatttgaaaaatacactcttgagaaatgaattggcttaagaaaaatgactagaaaaagggtaatttgtgtgtcctccaattccttcaataaaatgactgatacactctacaaaacaacagcagcaacaacaaaacaaacacaatgtaaacattcacagactgtgggtgttactttctgggagacattttgcctgggataagtgttccaaga

SEQ ID NO: 901668 - DNA, 590 bp, Homo sapiens
tggaaaagtgaaagtgaggaatcactcagtgaagaagagaagggaagagaactaggcatctggcccttccttcctagatgccttcttaggcatgggctaagatacctggtagggtcacgttacctcatgcttagagcagaggctgccacacaggtatttccagcatattctgctctgaaagagatcctctagaaatttgttttaaaaatttggaggtgatttttttctgtgtcaaagctttttctttcagcgattgtgattatactacatttaaaaatgaataactatgccaggcagggtggctcacacttgtaatcccagaactttgggaggctgagggagaatcatttgagtccaggagttcaaaaccagcctgggcaacaaagtaaaatcctgtctctacaaagaaaagaaaagaaaaattagtcagtgatggtggtgtgcacttgtagtcccagctayttgggaggctgagatgggagggttgcttcagccagggaggttgaggctgcagagtcttttttgtaccagtgcactccagcctaggcgacagagtgagaccctgtcactaaaacaaaaacaaaaaagga

SEQ ID NO: 901669 - DNA, 557 bp, Homo sapiens
atatggtgattactaaactctaaatgatggttacagtgatattagtagtgygttagggagctcttgccatatgcagaacatttaatcattgttgctaaaacagtccatgtttagctctgaaatctgattatttttatgacatcagtattatcacagatccctaggtttaggaatttgctttctaaatgaaactgtatgaccacacatctgaaagctacaagcaaaagatgcaaggttaacccctggtgggcattctccacagtctgaaatgtgaaccttgccaggttaagtagggctccggggaagaaagagtggggcacgccaggagcagggctgtgtgctctgcataacagaggtaatatatctctgtgtggagatagtcatagccttcctggtcaagcccagggatctgggccaaacacgaagctaccacgggttagaatgatttgaaccattcagattctagcctgcttcctaagctttgagggagattatgatcttatcatcaacacctgatccaactaaagtcaatcattctcatgttgcctatacaattc

SEQ ID NO: 901670 - DNA, 612 bp, Homo sapiens
ttttttgaattcaagacttcaagtttaaatagtaccaaattcctgcattctatgaagaataggaaaaatttgtatttacatttctcattcctmcattttcctttactttcttatattggttatttatattagcatgtttgttctgtcaaaattggtaatatttacattattttatataaaaacataatggctgacatttattgaaatctgcagattccaatcattactctaaggctgcttgcctgccttcctttctccctcccttctttttttaaatttctttgttctttccttccttctttttcttgttttttttctttttgtattttttttttttgagacggagtctcactttgtagcccaggctggagtgcagtggtgccatctcagctcactgcaacctccgcctcctaggtaccagcaattctcctgcctcagcctcccgggtagctgggactacaggcacacgccaccatgcccagctaatttcgtattttttaagtagaaacagggtttcaccatgttggccaggctggtctcgaactcctgacctcaggttatccacctgtctcggcctcccaaagtgctgggattacaggcgtgagccaccgc

SEQ ID NO: 901671 - DNA, 588 bp, Homo sapiens
ttgtatttttagtagagacatggtttcactaagttggccaggcaggtcttgaactccygacctcaggtgatccgcccacctcggcctcccaaaggctgggattacgggcatgagccaccgcgcctggccaacgattcctattctttctaaatcaccctggataagcattttgttatagcagcagaactagactaagacacttccaatagggacataattcatgacagtcatcacggtagccaagtcagaccagaatcaccacatggcttctttggttctaaaccccattcatccaccaacatgtaagggtgcagctcagccagagcatcaggtttggcagtgtctgtcaaaatgaaaggcatgtttcctttgacctaacaatttcacctctaagaatgtatcctacagacatgtgtgggaagtggtggcggttgaagatattccatgtagcgcttcaaaaatggaaacaacataaatatccatcaaaaggaggccaattaaataatgtaagcatgtgcaatggaatactatatatccattaacaaaggtggagcagaaaaaatacacgtgcgtgtgcacacacacaca

SEQ ID NO: 901672 - DNA, 515 bp, Homo sapiens
ctgaaacaattagtttgtctattttaaaactgaattccaatgcttccatggcaaccaaagttattaaaagatgtaaattaaagtgttgcacaggaaagatggcttggcatagaaggcgcttgttttggggaaagaacacaaagaacttgaaaccaaggggcatccccctacctggacgtgtgctgcgatcagctggtgcactgaaacggctccagccatccgacagctcctcccgtgcccttggcttctaccactgcctcacatcagggacacctctgtccctcacatgcacgagagagaggagggggtttacactttctgaagccctttgtgcaaagaaaaaatcctaaggagggtagagaggcagaactgacttctgtgctgggcctactatctgcctactaacagttacggttgacaagtatcaagtcttcctgtgccctgggaattgtgctaagggatttgcacrcatcttctcaccaaatgctcctaccagatgagctataatctcagtt

SEQ ID NO: 901673 - DNA, 623 bp, Homo sapiens
ttgaaagattgcaaccactggkcttggcagacaccagcactttgccttttttcctggatatgctcccacacttgagggggaagtgatgggctcttcctttcttcccaagttgagcagaggatgtggaggacagagaaagcctcagccaggtgtctcaacccccatgcctcttcccaggggactctccacaaggccttggatggttttcacattaacctcttccgctgcttgctggagcagctgataattttgctgtgcaccaaatgatgcatatgagagatcagaaaaatctgtaaccagagaggaaaaacggctgctaatgtagtggtaatagggtagtttaggcgagacttccagggaagagatttacaatttaaataagaaaaataataaactctaaattaacaaaaagagaggagaagaagaatgctatggctgtgtgattggggatggggatggtggggaccttgcaggaccctcagaacaaggctggaaggggcctcactgagtcagagggatgccaaaggtggaggttgaataatgagggccttcaggattagccccagctccagcaaggacaggggcacatgggattggagcagctccctgaaggctcacggaga

SEQ ID NO: 901674 - DNA, 621 bp, Homo sapiens
ggctttttgtattgccagagttcttgtgctggtttcttctcatctgrgagacttgatgcttcttttgttgaatttgatatcatttggaaggaggtttttttttttttaatttttcattctttctttctcttaagtgtgtgactgtggtgtgtgttgtataggatcaatttgcttcatttctgggtactttcagaggaccaaggctctgtacaagttccttggttgcagataggctcctgtggtggcttgatgtggtgatgtatttttgtttggtggtgtaattcaggcttcagtgcagtagacagtgcttaagagtaacagctggctgcagggtcttctcctctgtgtacttgtcctcgacaggttcagaagtgacaaagtgccaaaagtgccctgtccccatgtgtactagtcttcagcaggggcagagtcctggagaaacctaagaagcagcctctttcagctcacgttccttgggccccaacagggtgaccactactgggtctgcagcagtgcactaggaaggggacagagggcaagagatgaccacctctctaaatctgttcccaggctttggtgtgcccctttcagcagctgatgtcatgatcgtgtttcctttga

SEQ ID NO: 901675 - DNA, 576 bp, Homo sapiens
attcaagatctgagtgcctctgaaagccttctcctgcatgctcctcttgctataaggctggcctcggttaatcacagaggcccactatgccagaggctctctgtkggaagatgcattgtgggtaaacgccaacttcttgctcaagggtggtgatgccacatggctggcacaggggtaggcttaaggggagcgggggcccagtccatagtgtgcaccactggaatttgtggccctgctattgcaccatggaagccctgctacacctggggcatgggcttctgaagcactgtatggtgtggatgcagatgacgccattgctcaccagaatcagaaatagacactgggtaaatgggattttctcctttctctgcttaaaaaacataagtcctcctaattgccaaggggagagtcagatgtctgcagaggaagtatcaccatcctatttgagtgaaaaggtggaagcatgcagagttgaatccacttattcacttccgggcatgtcttatgtaccaggtaccagattgtttacagaataaataagatataaccattgtccaaaaggcctttacagtctag

SEQ ID NO: 901676 - DNA, 590 bp, Homo sapiens
cagctgatgcaatggacccggccctcttttcctctcactgtgtgtaccccctgggtaatctcatcttcaccaggcccttgattctacctgtatgctgatgaatccaagctgccacctgcccagacatcactcccaatctcccactgtatttgtgacaactgattatacatacccaaatcgcttcagaaccattaccaccaaaactagattcacccttttctccttaaaatcatttcttccccctctaattactctacctgctgtggtcacttcaaaaatactgggggactccccacccaaaatttttgcagatgatgccacacttgcaaatagtttcctttgcaaattattgtcatttgcaaacagacaataaactgcaggatacaacacaatgaatttcaactaagccaagcgagtattattactcacataatgaggttttatgaggagggcagagaaactcccagtcaggtccaacaatggcttgaaagaacacggaaaggagactgctttgatttttaatgagattaaaaggtggggtttgggtgcaggttgtctcatactggyggggtcttgaaagatttgaactt

SEQ ID NO: 901677 - DNA, 617 bp, Homo sapiens
agtagtcctcaagaagaaacaagtttagaaccagagtagggagaaaggctacatggtayggcccctcaatactggatccatcttcaacatgtgcttggccagaacctacatctacctaccccttggtagcaaaatttcccaatgcacagacttttttaaggagctgaattaaacttaggtgaatatcctaaactgtcagtttactgctgagaacatgctgcttatcaagccaggctcccagcaagagtccatatccttggattttcaatgacaacaagatattccctataacccaggagctacaggtgagtgcttgagagcttttacagacaataaaaacgatgtgaagctggcttctttggaagggcgaaagaaactgcaagaaggagagtgcagggaggcaggatggctgatagagaagagtggaatgttgagaacattgcttttgtatgacagctcttccagaggtaaggaagtagtgtgtagcaaaaaataaaaaaaattaaaaaaattaaaaaattaaaaaaagcaaaaagttaagtaagaaatgagctatctctgtaggcacatatgtaagtttagcaaagaaaagagccacaggagacatacaaattaaa

SEQ ID NO: 901678 - DNA, 626 bp, Homo sapiens
cagagcacttaccactcattccatagaccaagcccatggcagacaagaccaatcaattacagcattctttttgaaaagctcgaatgtggtttccaaatctttctcaacacaacactcctcctggcagcaaccattcatgatttagcattggccactgagctcaactgagctaaaatctatttgcattcctcagccatatcacactgctttcatttatggcgatgatgctgtttatagatctgtacatgggtctgggctgagagtgcctctgttaacaaggatgactgatgcacgcatacttcttgtatttgggagaaggctggctggggttaggacagtactctgtggtcatggacttagtagaattatcttgttcacctggaggtgaaacccgtaactttggcctttacactctatgttttaactttcaattactatctggtgagaaatgggcatggaaaagggaattagtacctctggtctgaaggcaggcattacaaaaaacatcccccttcagtgatcagaaggatcccaaacactttgcaaacyctgtatcaaaggatgagaatttaaaatgttcctatgttctacaaaagtatcaaatgtcattacagattccttaagat

SEQ ID NO: 901679 - DNA, 590 bp, Homo sapiens
ttctagacatcctacttggaatcataggcttcatcttcctttcccatcgacccgccccactccacagcatgtgtcaccagttaatttattctatgttttgtatgtattttgttcactgtctcattccaccasgagggaagtgctgtgaggacagggattttattatgtttgacaactactggattccacaaagcctagaacagtgcctggcacatggttggcatggagtggatacttgctgaataaaattgaacctgacgttgccatccagagacacgcttatcagtcttcctggttctgacagccctggctgctctgggcttagctggaaacagatcgaggcaccgccgtggtgggaaagactcgtgaaggccacgcacaactctgaggtcctctctcccgccagaaatgcgtcagctgtagctggtggcctcttgctgctccagttccctattgtattttggctgccatggcacagccgccctggccctcatagatgcaggccccttcccgccaccacttctccccaaaaccgccagtgtcccttctgtgctcctgcaccaccccccaccacatgccagattacaagg

SEQ ID NO: 901680 - DNA, 640 bp, Homo sapiens
agaggtttaatggagtcacagttccacatggctggagaggcctcacaatcatggtggaaggtgaaaggcacatctcacatggcgggagacaagagagaatgagaatcaagcgaaagggatttccctttataaaaccatcagatctcataagatttattcactaccatgagagcaatatgggggaaaccacccccatgattcaattatctcccactgggtccctcccacaacacatgggaattatgggagctacaattcaagatgagatttgggtgggaacacagccaaaccatatcactattattcagagtaattatgatcaaatgcaacagtgagattgaaaatattatttaatattgcattttgagtacaaataaattttggcttttaatcgtgaacagtcataatgttgaatgttttacttaactgtatttattattaattttttgaaatggtaaaaagtaacaactaacaaactaagaaaaaagagaaaggaaatgaacagtgttataggcaagtagatgctgtggcttacaagcatatggttttctctcagaaacgccccagycctgtctcctatctcatctctaggagcccacatctacacatcaacctttcctacctgaagtcaagacctaaa

SEQ ID NO: 901681 - DNA, 513 bp, Homo sapiens
tgggtgtgcaattcttccctctcaggccatttgctgaattttaccctgtgcagggaaagagggtgagaagttcagcagataacttggatakaagaagagaagatgtcagaactttctgggttcttacagggttggaagaaaatatagaaggttgagacttttaaagccaccagcccttttgggtcatgaccttggagacaaaggaggtgcgaaaaagggagccagctattccaccctggtttttttctccaaagcatttgccaattcaagaacagtgaaagattagagaataagaagccaagaagaaagtgactaacaaattgattagaactggtgggagcgctggtgtgcttggaaaacaaatactgaatttcaacatccatgaagaagcatggacctcatgttcttacagaagcgtatggaagtattggtgaatcagagagatcaaacctagcaaagactgccacctccctggcatcagctcagtcgctgattggacttgtgagatctacc

SEQ ID NO: 901682 - DNA, 639 bp, Homo sapiens
acatttaagaggaaatttacagccctctttaaataccttataataatatttcggactaataaacacgactacttgagcccagaaacaataccaaaaaagctgacattaaaaatctcaactttayaagaacacactgccaacttcctcttaagaggaaacagtagcaattttctcccttcagaacttaatcaaacatttccattaaaaggtaggtaaatctcgccatcatcacgttaccaaaaaaataataataatccaatttccataacacatacataaaccgctaaatcctaaccaaataaaacaactggaaccactagaaaacaaatcataaatttcctaaagaaaaaacacaaacttttaatccattaatctattgatgaacagattccaggaaagcacacacaaacagatccaaaatacatttaataaaacacaaggtactacccaaagcaacaataactatttgtgtctacttacagcctgtatagcttcgcagtcccaagaaacagcaactcaagaaacagctgaaggtgatttctgtttaaacgccttttgagaaaacaaaaacaaagcttatgttacatagaaaatacccaacaatgagactgtgatttggtagtgtcatgcctcatcctg

SEQ ID NO: 901683 - DNA, 566 bp, Homo sapiens
gcaacgatccaaatggcttttactttttttttttttttttttaagtaaggagctgtgattgtgattgacttctcaagtacaatcaactgaatctagccaacaaccacatgcatgcacttttgaagcaaactttccccatcaaggctggtgctgaaaccatgtcactaaccttcattgtagcctgtgagaaaccttgaagttgaagacccagcaaagccattccccaataaacgaccccagaagcaaccgtgagataataaatgtgtgttgttttaagccaccacatcatgtgtcagaagaggtttagatattgcaaaatgtgtgtacacttggatgtaactttggggttcctacgaaagttttgctggactcttatttttactgtctgctatgagaggtatttgttaaggcaagtattaaaaaaccttcactatcttcattagattcttaggtataagagagaaggaaaaatataaattgcttcccaagatgaagtgggagtgagtargtaggttgaaaggacttcagcagaactattttgcccggaggcacataattaagcaaga

SEQ ID NO: 901684 - DNA, 684 bp, Homo sapiens
tctccttatcttgaatttttgttaccttaggaatattcatgggtcctggcaagtggtgaagactttttttctgccttcactagctgactagtttgaatggttatttctgtgactcacacccaggctactatgatgtatcagaaataaggagtaattgccggtacttactaggaaagtacaatagtatcctgttcaagtggcgttgcacaaataaatatcagtgtttctcttaatacttttcattgaataaccagtaagctaagtatacataattacttctaccgctgtggacgagataatttaaacatctttgagttttaatctcttcagttgaacctgaaaaacagacttaattataatttcatctaatggttaagaagaaaaaaattaaaagtgtgttgtaatataccctattacatagtatagagcattgtacaaactcagttaatgacctgatcattttccttcccacataagccccatataagcatcatttggctgcagagattccttgtaactatacaaaagatggaagagttaagggctgaatcagaaaataatttcaacttgagaatttatttcctaaatatcatcaaatygaaataagtaatttttctgttgtaggtattatctgtagtatattcacacacctgatataaaataacttccctagggtacatgtct

SEQ ID NO: 901685 - DNA, 633 bp, Homo sapiens
atctgttacgcaaacattgaaaccaactttcaacatcagtttcctataaaatttccctctcattattcttccttttgtatcttggcattactgtgaatttcacctgtatcaattttcttccaaattcctgagatcacctgcctaccttccttcccttccttccttccttctttccttcttccttcctccctccttccctccttctctcctttccttccttcttccctgcttcatttttttcttattctttccttcctctttcccttcctttcttatttctttccttcttccctaattctaaggatatttgtcatttctaagaaaaccttctttttcacacatctaatttttgttttaagtatgtcagcatatatttctgatattattcatttatttatgttaaatatttatactaacattcttctagtttggagaggggttctagtttttctgttaattttggtgctctgtcttgaggatgttgagttgtacttgtctattggtttttgttacaagcgatggtgttgaattgccaaatagaagaatacmtttccaaaacttaaatgttatttactactgaagttcaggttaatgaactttctgattctgagaacttgtcttagcagatgaggg

SEQ ID NO: 901686 - DNA, 605 bp, Homo sapiens
ttaaagagatcattcaccttaatcaagtgggattcatcctcaggatacaaggatggtttaacaatcaataaacatgatacattacatcaacaaaatcaaggactaaaactaaaactagatcrttttaatagatgctatagaagcacttgataaagttctacattgcttcattatgaaaaccctcaaagaattgggtatagagggaacatatctcaaccaaataagggctattttttacaaacccacagctagtatcatactgaatggggaaaaattgaaagcctttccactaagaactggaacaaaacaagaatgcccacttttaccacttttattcaacatagtaccagaagccctagtcagagcaattacgcaaaagaaagaaagggcatccaaattgtaaaagaagtcaaattatccttgtttgaagttgttatgatctcatatttagaaaaatctagagactccactaaaaaactcttagaggtggtacataaatttactaaagttgcaggatacaaaatcaatataccatatattaattatgcttagcaatactaggacttattgccaacatcttttctataaactgtatctgaatttta

SEQ ID NO: 901687 - DNA, 650 bp, Homo sapiens
aatacaacaattaagattgatttgtcattgtacaaaaatacgttgaagaatacagacgcattctaaagtaacagaagttttagaaattagatatgttagaattgcaatggattaattagttcatacaggaggtgaaattgggaaattgggaaaatccacaaccaacttagacattttatattaacttaaaacatataaatggatcttcatgcacagtttttttttcctttggtagattaagtataggtccactgttggaagctcaatgttatttttcttccattaagcattgatgcatcaccttcaatgcccaagttcaatttcttcactgtgaaagaagaaatttaaagaggaaaaacggtcaaagggcagaatcctagatttttattgctgtttcccttaatttgtttatgtttgtctgcctctacctaattggttgtggtttttatatgtcatttacattcattgagactttccaaagttttccactcaattttcatagaaaaattttctcactcatagttgatagstttttgtaatatttaattaaattgtgaaatcatcataataaatttaagcagcataaacatgtttgggagaaatgcaactgagtcttggtacatgtgcagcacgtgagcgtaggggtgggc

SEQ ID NO: 901688 - DNA, 636 bp, Homo sapiens
cttgactcttcttccacccacagatgcactgaataaacattaacatgctgataaattccctctgagagaaagtcagaaatgagttcagagattctatgcactgggcaactgagaaaatacccacatygaacagatagaaacagctgaggcacacatgggctcaaatccctccctggatactgtgccatatgatgaggaaggcatttccaacatccaacttctccctgagatttacagtcaattgatttttgaggaaggttccaagtacccacaatgaagaaaggatggtctcttcaatagatgccattgggaaaactgaatattcacatggcaaagaataaatttggaaacttatctaagcctatacacaagaatcaactcaaaatgaattacatacttaaacataaggcttgaaatcataaaactattagaagaaaagataggggaaaagaattattatgttggtttggccaatgatttcttagatatgacccaaaaccacatgtatcaaagaaaaatagacaaatgggattacatcaaactaaaaagcttctgcacagcaaaggaaacaatgagcagagtgaagagaaacccacagattggaagaaagtatttgcaaatcatagatctgaaaag

SEQ ID NO: 901689 - DNA, 540 bp, Homo sapiens
gatcagagaataagatcccaaggcacttcactggggctgacattcagggagcctcctggaagaatcrtttcaaaagcaattgcagtcaaaacagattttgagagcactcttagacccagaaatgtatagttgtctgcatgtaagtgctaaggctaataaaaatcagaagacatttggaagacatatccttgaattgaaaaaaataataattgaatatagcaaatgcaagttcccacttgttcagcaatctgtttaacttcttatcagagtcattgttaatacttccttttgttgtacatgccagtgcctggatatctaacgtacaatttcttgtgctgtcatttccactttccttttcaccaatatgaccagtaaatacagtaagaaatagacactattgatacagagcctggatagtcattaataacagtaatgttagtatcgtattgagcactcactatgtgtctaagcttttgacaggtatttggaagataggtaagcactggataagtattagttgtttgttgctacatggtgtct

SEQ ID NO: 901690 - DNA, 540 bp, Homo sapiens
gatcagagaataagatcccaaggcacttcactggggctgacattcagggagcctcctggaagaatcatttcaaaagcaaytgcagtcaaaacagattttgagagcactcttagacccagaaatgtatagttgtctgcatgtaagtgctaaggctaataaaaatcagaagacatttggaagacatatccttgaattgaaaaaaataataattgaatatagcaaatgcaagttcccacttgttcagcaatctgtttaacttcttatcagagtcattgttaatacttccttttgttgtacatgccagtgcctggatatctaacgtacaatttcttgtgctgtcatttccactttccttttcaccaatatgaccagtaaatacagtaagaaatagacactattgatacagagcctggatagtcattaataacagtaatgttagtatcgtattgagcactcactatgtgtctaagcttttgacaggtatttggaagataggtaagcactggataagtattagttgtttgttgctacatggtgtct

SEQ ID NO: 901691 - DNA, 633 bp, Homo sapiens
taccgttactgctgtacagaagtcagaagcaggtgagtgtttcaggtatttaattccttgccattttcccttgatgtgggtggggaagaggagaaaatgtctttggccattcactttgaatttccccaatgcttccacagggtcaggttgtgggagtctggctatattggtagaagaagggacaaatcactctgccaagtatcctgatttgtatcccagtaacacaaggtgtcattggttcatttgtgctccagagaagcacattataaaggtaggcaactgaggaatcgctctacctcataaagaatagagttacgttagttaggcagaacttaattcatctggattgttaaattgccattatgactaggagcttcttttagccatttgccatttttttttactctgaaaagaaatctctgtgagtggttttgaaaactttcagtggtttaaaagtgtatccaatgaaaagtaaggctcctcatcagattcccattctacacctggaggcaaacactgataacttactagtgtccttgggaggtattttgagcatttactaacstgtgtgtgtgtgtgtgtgtgtgtgtgtgtgtgtgtgtgtgtgtgtgtgtgtgcgcgcgtgtgtactta

SEQ ID NO: 901692 - DNA, 702 bp, Homo sapiens
acaaacataaaaaaactagtgtttctattaaaataaaaattaattcattcaccacatgtgatagtcagggaacctgaggtaagtggaatgtcaaatggagaatgggtgttggctagaacataaaatctgcaaagatgaagtcctcttggggatatatctgcttgctacagataggtaaagattagtagataactaagcagtttaagctaggaacaaaaatttgatttgacaaaaggaaatataagtagctcatattttatggaatttggggtgttttaggcagtgaagacgtcaacattttcataatttattgaactcaggttaagagtattgtattatttcaagcctgatattatacaacctaagaaaaaattgccaaaccaataatggtgactatgaaaagaaaaagaaaattttaaagcaaaatgcttaaaaaaaaccaagatggccctttctgaaaatataagaactagtataaatacctaaggatagcatcatatagccaagtaaaattgaatttctatctagaacaatgtttcagaaatattttacagtctaagtaatctaatgatattaaaataatatcactrtatgtagatgatatacacatacgcagacatacacacccacaaatagagtacctaccatcaaaggctaaaatctcatctatttcttatcttaggctcattatatacaacttac

SEQ ID NO: 901693 - DNA, 679 bp, Homo sapiens
tacaggcagaaaaattctatttaggcataaacatcctattttatatgcctaggaagatgttataaacttacacataaacctaaagtttgagcatctgaaagtgtttaaaaaaatggtgaaaagttcacctactagctaactggtaggaaaaatgtgctacgattttctgctcatattctaagatagctttagattggtcttaaattgaatttcaaattataaaatgatgaccgtaagtcactcatgaatttctttaattccccacctagatagactcacatatatacctggcctgatgctagacaggagagactttccaatctacactagtctcttttcatccttttatataactacagataatatcattacttcttcctttggctcatctgaaaatcatatgaggtattattgtttggaaatttaaaccataatggaacatattattcagtttttctttcttttgagtcatactctatttgattttgaccattgaactaatattttccaatgattttccattatttcttttgttagctgccagcctatcaataacttcaagtatatcaacttactgcaggtacattatgatcttccttattcagagcttttcttcttaaaataatacccttcattctaataatagcatygtattttgcaaatgtctcaaatgtgggaa

SEQ ID NO: 901694 - DNA, 639 bp, Homo sapiens
agaggttgcagtgagccaggatggctcaactgcactccakcctgggagtcatagtgagacactgtctcaaaaaaaaaaaaaaaaaaaaaaaaaatgttgggccaaagaccttaacagacagctgaccaaagaaactatgcaggtaaaaaattagcatataaaaagcagctttacatcatttgtgtgtagggaaatgtaaacgtaagccacatgaattatcaccacacacctattccaatggcccaaatccagaacaccgacataaaatgctaaagatgcacaaaatgctaatgatatggaggaagaagaactctcactcattgctggtgggaatgcaaaatgttacaacacatcttctactttggaagacagtttggcagtttcatagagacctaaacgtactattaccatgcaatccagaaagtgcactccttgatattgacccaaaggagttgaaaatatgtccacaccaaaacctgcacacagatgtttataaaagctcagttcatcattaccaaaacttagaaaaaaaacaagatgtgcttccgtaggttcatggataaataaattgtggtacatccagacaatggaatattattcagagccaaaaagaagtgagttatcaagccatgaaaagat

SEQ ID NO: 901695 - DNA, 565 bp, Homo sapiens; identical to SEQ ID NO: 897077

SEQ ID NO: 901696 - DNA, 641 bp, Homo sapiens
gtgttatacagtcattaaacactgtgcaaattatggagaaccacagaaaaatcattaaatggaaaatcagaaaactctggttacaattacccaagattaggtatgcttatgaaatgcccaaacagaacaagcagcaatgaacacaactgatgagtcggcaggattataagcttcctttccttgggctctttgatgtttgcataagaacccatatatcacagggcacgcccttagggcttatggttcaatcccacttctaagaaaatgttctgattcagtgtcagcaaggcccttccccagctgactgccggactctgtgggacaggacaccccaacttctcaacaagccttctatggggacaccggactctaagctcttgccctgctctatcactgctccatcttggccagctctttgttcctcagtaaaatcaggctttgcctatctcgaccacggccaggcggtcaggggccctcactccatgtctgactcacagctctatttccaatgcagaccttccttctggctggaaatccacctgcccagcagccagcgagagacctggaggaactggggaccatgacraggcacacccatatgccaaggttctttggtgtacatcagctcatgtaagaggaca

SEQ ID NO: 901697 - DNA, 694 bp, Homo sapiens
gccacccaagaaccaggcccgactgctcagaggagaagggatgccccatccctgaaatgtcagaacccctccccagacattgctgcactctcccgttgggcctcagttctgkcgggctgggaagctggtggctggcttgccttctggaggaggtggcatcctacctcctgtcccttctctcagctacagccgcggccaaggaggaactcctgagtccggggagcccccacctcaaaaaggccccagctgctggcctgggggccagggcacccgcatgacctaccagcacaggtcatagagtcctagaatgttcaacgcccagagttccaggaaagaggctggccctgggaggggagggccctgtccaggcctcccaggacagcagatgggagcagtggcctcgcaactccacagttagagacactgccctgccttgttctatccaaagtctccctccctcctttctcctggagtcaagcatagctgacttttttttttttttttttttaatttgagatggagtcctgctgtcgcccaggctggagtgcaatggcacaatctcggctcactgcaacctccaccttctgggttcaagtgattctcctgcctcagcctcccaagtagcaggggttacaggtgcccgccatcacgcccggctaatgaagcatagctgacttctaatcctaccccttgc

SEQ ID NO: 901698 - DNA, 623 bp, Homo sapiens
cgtcacccctttctttgactcggaaagggaactccctgaccccttgcgcttcccaggtgaggcaatgcctcgccctgctttggctcgcgcacggtgcacgcacccactggcctgcgcccactgtctggcactccctagtgagagaaacccggtacctcagatggaaatgcagaaatcacccgtcttctgcgtcgctcacgctgggagctgtagaccggagctgttcctattcggccatcttggctcctccaattttactgaattcacaccgctagctgtccagctcccaaatccacagtggttaccatattggatagaacagggcacacttctcaacctacagtgtcttcccttagataaatatatatttgttacacattttgagatgcaaacctcatagtggcaagttaagttgcctgaaatattatcagtgtggtatactagacctggctattagttataaataataatcaaattacatgtatttgtaaaatattttaaaactagtgatctaaggtggtagagattgcacaagaatcttgagagagaaacaaaaaaagaaagtgctgatctagggtttawaatcagcttttttttttctgattggtgaagcttctgtattc

SEQ ID NO: 901699 - DNA, 509 bp, Homo sapiens
ctgagattatagctcatctggtaggagcatttggtgagaagatgygtgcaaatcccttagcacaattcccagggcacaggaagacttgatacttgtcaaccgtaactgttagtaggcagatagtaggcccagcacagaagtcagttctgcctctctaccctccttaggattttttctttgcacaaagggcttcagaaagtgtaaaccccctcctctctctcgtgcatgtgagggacagaggtgtccctgatgtgaggcagtggtagaagccaagggcacgggaggagctgtcggatggctggagccgtttcagtgcaccagctgatcgcagcacacgtccaggtagggggatgcccttggtttcaagttctttgtgttctttccccaaaacaagcgccttctatgccaagccatctttcctgtgcaacactttaatttacatcttttaataactttggttgccatggaagcattggaattcagttttaaaatagacaaactaattgttt

SEQ ID NO: 901700 - DNA, 628 bp, Homo sapiens
ttcatttaatcaatactgagtgtccaaaatgtaaggcattttgtatatattgatayaaatacaaataagagatttaaaaacatattttttcttttttcccatttgaaaagacaaaataatgagaagaaagtagcataaacaggttttatcaagtatctagtttgtaaagtttctcatttactgtaacatagtgggaaagagcatagacttagaaatagtagtaataatttaaaaactacttttgctacttaatatgtgatagttattcatcatgagcataactctattatgatgtaaacagaagattatgatccaagtgtacaaaaatctgaagagtattagaaatatcctaagtagaagacatggcaaatggactttgacatataaaagaccataaatatatattggtttctatgttttaattaaagattttggaatgaggctaattgaactctgatctgtgtatcagacattcatgattcatcagttgcatggggatggcaaatgttcctactttgggaagtttcaatgatttttgattatgataactcctataaagcatttagtacaatgcatgagtcattatgtgtccttatcaatgtttagctaatatttctatttgtatgtc

SEQ ID NO: 901701 - DNA, 459 bp, Homo sapiens
gtgaaatgggagcaaagccaccaccttgcagaggattaaatggcataacaccctcattgtattgagcacttcctatccttcaggtgtggtgctaggcacattatattcatcagttcatttaatattcctcmcagtaatcctgtgctgtccagtagactttctgcagtgatgaaaatattctatagccgccctgtccaacgtggttttcattagccaagcctatatagctgtgtgcttgaaatgtggctcatgtaactgagggacagaatttctagttttctttaatttataatgaattaaaatttaaatagccatatttgggtgttggctactgtattagatggtacagtttaaggatgttctattcttttgttttttgagatagagtttcactcttcttgctcaggctgaagtacaatggcatgatctcggctcactgcggcctccgcttcccagatt

SEQ ID NO: 901702 - DNA, 656 bp, Homo sapiens
taaaaacccaattagtgttagttcagtaatctagatacacagtaaccatagatcaaatcatatcccataagatagtgcaatatgtaactccacctttctactacagcactaacggaacaatctgctactattaactcatcactttgtgttgataatacagtttctaattcctaggaaagaaacaaaatattacttggtaataacaccatacagtctctcaataaacgttttatccaacttcttttattactcccctgaaagtctgaatgatacaaattgttaccatcatgaagaggcagacacaccttggcgttgatttctggcatttttgaaggactcttcacattgcacaccagatgcaaaacatgccgtttttcctgctaaaagtaatacgaaggtacttaaggacctgaacctaacctggtgagtgcttaaaaacattcagaagttaatgtgtaagtgatgtacctttggaagcaagtccctgagacattggtgatccaacaacagcttcccagaataaattaacctctggtcctctggaygctgatcatggaaagaaagagtaacacaggtcagcatttcacccctacaagttcctaaacacagaataaactgttttatacaagtaatttgaatatgtgtgtttcccccca

SEQ ID NO: 901703 - DNA, 613 bp, Homo sapiens
gatccaggacctcctgcacataccaaaatccctggatgctcaagtcctccatataaaatggaacagtatttgcatataatgtatgcatagtcctctcctatagtttaaatcaaccctaggttacttaacaatgtaaatgctatgtgaatagctgttatactgtagtgtgtagggaataatgacaagaaaagtctgtacatgttcagtaaagatacaatttttctctgaatatttttgatccataagttgttgagttcacaaatgcagaacccatagatacagagggctgactgtattatgggggggtatctagttctatgagattttatatgtagagatttgtgtaataacaccacaatcaggacacagaattgttctatcactacctgtgttatccctggcagtcacacatatgttcttcatcaatgtaattctgccatgtcaagaatcttttattccattcatgtttcattttctcaaagtgtaaaaaataatctgaaatgttgagaatgacataatatgatagaattgagtggtwtcttcatgatttcaaagagtaactgtgttctcctttgtcctggaaaggatggggcacagacatggcttcaaaaca

SEQ ID NO: 901704 - DNA, 614 bp, Homo sapiens
cttttttataataaaacacttgatataggtctactctcttaataattgtcaagtgtacaatacaatattattaactgtaagtgctatgttttacagcagatctctggaatatgcttatattgyacaactgaaactttataccatttaaccaactccccatttcccctccctcactctagaccctgataattaccattctattctctgattctatgagtttcaccttcttaggtaactcatgtaagtagaatcatgctgtattcatccttctgtgactgatttatttcactaagcataacatactctaggcttatccaggttgtcacaaatggcagaatttccttcttttaggctgagtaatattacattgtatgtatttaccatattttaactccattcttctgtctatggtcaatttaggttgtttccatatcttggctgttgtaaataatgctgcgattaatcttaatcttaggttaaacatcacttgaccattaaattcttcccccacctttgccatacacttctaaaacatcctgtggttcttgcccactgattatacttgcagttactggtctgtatgtagcaacacagatagggaaagaacttcagag

SEQ ID NO: 901705 - DNA, 606 bp, Homo sapiens
cttcacaaacaaaaacgtaagcatgcatatcacagaataaatgacccatatamatgtggaaagattaaaactacaataacatagtatttacagccatccaagaaataaatattaataactctggcaatattagaagatgacactagtataaattggtactattttagagaataatctgaaatatctaatgagagtaaaaaatacatacgttaagactctgcaacacctttaggcaaatcctcttgaaaaaatattacctctatgctcaaggaaatatacaaagttgtcccctatgaaatttctacaaatagcagttaatgacaagacaggaatttgtagtcgaagaagacaaatttataatttgatatatttaagctgagtcatttgaaacatgatgaaaaatgtggttgatggttggagtagattgtttgaaataaagggaaccaaggaattgtaaaatcaggatgttagaagcatccttagtgaaactacaggcaaaagatgaaatggagataaaggctacaacctaattattagaattcttgagaaatacagagagtttctctctggaaagaaaaacattaaagaggatcatgaaagggggag

SEQ ID NO: 901706 - DNA, 568 bp, Homo sapiens
gtttggagaggcaaatcaaggagtyaattatccatggaggattaataaacccaggtctctaaatctggattaagaacaaagcctggtattccttcataatctttgccttggcctctgtggcctccaaagaaggcaagcttgagattttctgaaacatacaaggttgctgtgattgatcttttgaggacctttgatatttccatggataggacaatgccaggaaaatgtcataagaggtgcaggagaaggaaggttgcgcaatgacaaagtaacagactctaaagagaaagctctaataatttaataagatgctcttcaagcattatttatttaatcttcactgcatccctgcaagttgtcttttaaaattttaagtcttaaaaatagggaaacaaacacaaaaatataaaagtacaagtgttacaggaatattgttcaaaatcacacaactaacagttggcagggtcagaattcacatctaggatcatgcttttcttcattcaatttcactttatttacttataagaatatttaaaattatatctacctcttagggatactatgagaa

SEQ ID NO: 901707 - DNA, 593 bp, Homo sapiens
gattctgagataggagaaaaaccgccctatggtgggaggcgagacatgtttgcagtaatgctgccttgttattctttactccgctgagatgtttgggtggagagaaacataaatctggcccacatgcacrtctaggcatagtatcttcccttgaacttaagtatgacatagattattttgctcacatgttttttgctgaccttctccttattatcaccctgctctctacattcctttttgctgaaataatgaaaataataatcaataaaaactgagggaactcagaggtcggtgccggtgcaggtccttggtgtgctggagcaccggtcccctggacccactgttgcttctctatactttgtctctgtgtcttatttcttttctcagtctctcatcccacccaactagaaatacccgcaggtgtggaggggcagggccaccccttcacaacataatgaggtatcacacacaattacaaagaagctatttggaagcttccaatgagacacatacaccgaggacatgtgtttttacgagtacaaataaaaacatttctccccgggaaaacaccacataaatttagaaatccttcc

SEQ ID NO: 901708 - DNA, 585 bp, Homo sapiens
caaatgagattctttaggccgggtgtggtggctcatscctgtaatcccagcactttgggaggccaaggcaggtggatcgcttgatgccaggagttcaagaccagcctggccaacatggcgaaaccccgtctctactaaaaatacaaaaattatctgggcgtggtgacaggtgcctgtaatcccagatactcaggaggctgaggcacgagaatcacttgtgcctgggaggtggaggttgcagggagccaagattgcaccactgcacttccactgaagttgccagcctgagcaacatagagagatcctgtctctaaaaaaaaaattttaaggggttttgtacatgtgattatgattactaatcagtagactacaaaggaagccaaaattagaagtggaatgaaggaatgtgttgcaagacaccaacagcttttgttatgctaaaaatagaactcgttattggcagtgttttttcttgatttctgctttcagtacttatgccactaagcataaaataatcattttagtatgctcatggattctatggatcagaaatttctacatggtataatgagaatagtttgcctt

SEQ ID NO: 901709 - DNA, 585 bp, Homo sapiens
caaatgagattctttaggccgggtgtggtggctcatccctgtaatcccagcactttgggaggccaaggcagstggatcgcttgatgccaggagttcaagaccagcctggccaacatggcgaaaccccgtctctactaaaaatacaaaaattatctgggcgtggtgacaggtgcctgtaatcccagatactcaggaggctgaggcacgagaatcacttgtgcctgggaggtggaggttgcagggagccaagattgcaccactgcacttccactgaagttgccagcctgagcaacatagagagatcctgtctctaaaaaaaaaattttaaggggttttgtacatgtgattatgattactaatcagtagactacaaaggaagccaaaattagaagtggaatgaaggaatgtgttgcaagacaccaacagcttttgttatgctaaaaatagaactcgttattggcagtgttttttcttgatttctgctttcagtacttatgccactaagcataaaataatcattttagtatgctcatggattctatggatcagaaatttctacatggtataatgagaatagtttgcctt

SEQ ID NO: 901710 - DNA, 621 bp, Homo sapiens
ctttgaaaactcatttatagaacattcttrtcagtttacgttttcacatgcttataaactgcaattttctcttagcaatatccaagtgagacagagctaaaagtagggccagcattaactctttgctgaatctaaaattaaatagcttttactccttcgctttggagggcagaagtcccttcttttgttaattaaaatttttattgagataactgtagagtcacatggaattctaataaataatacagaaagatcccctgtatactttatccagtttcagtcaatagtaactttttgtaaaactgtaatgtagtatcagaggcaggataatgacattaatgtaatctaccagtcttactcatttccatcattttacgtatactcatttatgtttgtgtatgtatatttactttgacacaatgttattagatatatatgtctgtttatgcaccagcacagttcaggtactgaaggtttccaactcctcaagtatctcttgcattgttttttacagccattcttattcctctcccactgaccataccttccatttgtaacccctggttgccactaatctgtcctcaatcttttaaaattgttattgcaaatattttataaatg

SEQ ID NO: 901711 - DNA, 588 bp, Homo sapiens
cttttttctctttattgccgtggctagattccttggtattttctatacattttagggtctgtggtatttttagattatttagtattttctatgcatatacacaagtcatctgtaaatagayatagttttatttgtttccaatctgatttttttatttattgcagtggctagattccttggtatgtccaatgcattttaggttcctttgtatttttacagtccttgttattttctatgcatatgagcaaatcatctgtaaatagaaacagttctatttttgttgtttctaatctgtatatttttctttattggagtggctagaacttccagctacatatagaataagagtggtgagagcagacgtccttgctttgcaccctatcttagggacaaagcatctaatctttcaccattggatatgatgtcatctgtagatattttgcaaatggcttttactaaactcaggtaattctcatctattcctaacttgctgagagtgttttattatgcatagctactggattttctcaaatgcttttctgcatcaaatgatatatgtttttcttccttagcttgttgatatgatga

SEQ ID NO: 901712 - DNA, 644 bp, Homo sapiens
accctgtagctgtttaaacttgaaaatttccaaaaagaaatgttttctctcttctccccatttaaataaaaatatctrttcatcttaagtttctcatcatcagagacctatttctggtttataaacttaataaatatatatatatatattgactacagtgtctttaaaaattctatattgtaaatgcagaaaagcataaagacagaaaaattaaatcaccaaaagttatctgctattaagttttgatttatttttatctttttatttctaatacaatcaaggttatatgttttataactcttgagtttttttccttagcatcatattataattattttcaaaattaccaaaagccatttcaaagatcattttaatggttacaaaaaatctctattacatgagtttaccataactctctaaaatgtccccctacaactgaacccttgtattattactgaatttataccatgcaccaggcactgttagtgaaagtactgatttttaagatttactttgtaatattttaacacaaaacattgaatgtgttcaatataccacctcttctcctttatgcttttatttgcacacaatcatgtacttataaataactacttattgttttctttttaaagattttagtcttt

SEQ ID NO: 901713 - DNA, 648 bp, Homo sapiens
taagttattttgcccatataattatgcaccttacaggtgggttacagagagctgaagaaatctgcctaagggtacaaacaaaaaaatcaacaaaggccagactgaaagtcagatccaaagtatatcagtcaaatccaaagtatattgacgctttttccactacatcacactgcttggaacattcttatgttattttgttaatacacccaacttttatcagcttattattaataacttcttttacagacaagaaagcagaggcacagagagaagaaatgattcctctaagattataccactacaaagaagtagaacagatttaaatacagatgtttgactccaaaaactgatgcccttaaaactactgaagttattcactattggtacaatttatttagagcatcatccttagcaaatttgagactatatgacttgaccaattcatgtaacctctgactgttcatttcctccccttccctactttttaaatcaggctattggtaagattatgagaaagaaagtatgaaaatttgcttataaatagagaagcagtgtatgtagctatatgttggagttgctctactttaaacaaacacacgcagagtggttcaaraggtaagtgttgtgtcattatttaaggcttaattt

SEQ ID NO: 901714 - DNA, 617 bp, Homo sapiens
aactctatatagtctcatcaattttttcatcttttttttgtattctcccatttactttactataaacatttcagttagtctttgttatctaatatcaatatctagatcatctctgattcttcaactattttctgtttttttttattattttaaatcacatgacattttttggtatatttaagttttgattgcagggcagacatcgttaaaaaaattacataggcttctaatgatgtttttattatcctgagagggtgtgtcttaccttaaaaaggccaatagaatgataggtgctcatcttaatctagtcagatactgtactgggctggggcttggcttcaggtttcttaagacaccagtatatctctggctgtcttccagctttatagctaagaatgtgctgtgctctccatggctattcctcctccccttgccagtggactccacattctaacctttggtgttcaatactgtcaaaacttttgcyctgcttaataaagattttccactagttttaaagtcttccacatacgttatcacaaaatattacaaatgacctagaggcaaatcaggttgtaggtaggagaattcctaagtttctatcaaaataattattg

SEQ ID NO: 901715 - DNA, 607 bp, Homo sapiens
ttcagggcaggttggcagactggaatttcataaaatytgatgttgcagcctgagtctgaagacagtctgaaggcagatttgtttttttttttttttccgggcacctcagtcctttctcttaaggccttcaactgattggatgaggactattcttattacggagagtatgatctgctttactcaaagtctactggtttcaatgttaatctcatgtaaaaatatcttaagcaacaacaatacagcaacatcaagactggtgtttgaccaaacaactaggcaccatgcctagtcaagatgacacataagattaaccatcataaagttagttacaagacagactcagtagctgctatcatgaaacttacaatctagtgggcataattgcacctgcctagacagttttatttatttatttttttgtgagagttaattgaactattctacataaaattagtagcatcgtaattggtacagagaaaacctacagcaaatgtcagtttccacccttttatcttactgcccaatttttgtagttaaattagggtgaggaacaaggttaatactgctgctaagaggggtttctaaaaattcataaaatgataatagt

SEQ ID NO: 901716 - DNA, 652 bp, Homo sapiens
ccagttctctacagcaactttgcaggccccttgtgtgrctgggtgttatggtgggcttgaaaaaaactcagtagacttaaaacataaatgtaaactaagttaattttattacccatatattcatcaatttttaaataatgaatcaaaatggccagcagaaaacatgagcccttttgactattcataacccttgatattataattcttttacatatttaacattattttatctgttgctcgccatgattattattttaatgcagagattattcatggctctttcaatggtaacattatctgaatatttcattgggttttactgatcctgaattgtgtaggtctttctgagcttacattaagtaatgtgtttctaagacaatgaaatgtcttacaatataatgttagtgtcggggtacacacacacatgcacacacatagagacttttccatatctagcttagagaagaaataaaattttatttctttttttttagaacatactatttaagcatgcctgtagaagtctgagaaagtttattgtccgtgaatacttattaaatattccttatgtgtacatgtattatttgtgtgtgtattaaagtacttcattctttagtgttatgtttttgtatttttctcagttagcactgtc

SEQ ID NO: 901717 - DNA, 533 bp, Homo sapiens
atgggtaaactgttgtaaactagtgaaactatccaacaataagaagaaagccatactctcatgccatttcatatggggaaatttatatcacaaatctttacagccttacatagataaggtatgtgtgtaaacatcttagacacttaatgtctttcacctctcctttcaaggaataatagcaacttcaattttttactgttttttcaaatcagaagaggtgagtttaatggattaaattcgtaagtatttttcagttcttaaacaccttatcaaaagaaatttttacatgcttattttgaagcatgcttacgatactggaagttttgttaagaatacttggatgaagtcagttcaaaggcttttttttccctgaagttgttattttttggacaatataaraaaaatctagtttgtcaccagctgtccaaaaattcgacaagtagctccctctcctggaggaaaaaagtgagttcctcttcaagctgttaaaacacttgtactcttaaaaatatattttttaatacatgaagcaa

SEQ ID NO: 901718 - DNA, 642 bp, Homo sapiens
catcattttgtcaacagtgatttggttaagtctgagattttagagcagttcaatagaattttgaaatctaaaatgtggtgttatttaactgcttagggcacattttaatacatcgatataattcagcactttatcactagttacaacaaccaatctgaaaaaaatatatatatataaatgccacagccacaaattctttagatgtttaagagaaaaaccacaaaaccccattttattaaaaaaaaaaacaactatgtcaaaagtggtttcaagaaacaagtgagatatatttagtaacagaaagtggtaaccaggagttagcaaccagtttataattaaaataccatgaggatgcaaagattagctgtgtttttatccagaagaacaagaaccaataaccctttgtcaagagccagtacacagtattgaaaaagaaattgtccaaagggacaagattggaatgaaattatcatcaaatgattgggctgacttaaaaatattaatagttggaaggtgttgatgattcaggattactacatggtagaaggtaggtgaatgaaaatgttttctatttgaactacccagcaatacttcagtattaccttttacctgmagtttaaggatatataagtgggatttgac

SEQ ID NO: 901719 - DNA, 498 bp, Homo sapiens
gaggaagcatctgttccatgcctctcgcctagcttcttctggtggtttgctgacagtctttggtgtttcctgacttggtttcccagtctctgccttcatcttcacatgggcattctccctgcatgtctgtcttggtgtccaaatttccccttctatttattttttgagatggagtctcgttctgtctcctaggctggagtgcaatggcatgatctcagctcactgcaaactccgtctcccgggttcaagagattcttctgcctcagcctcccaagtagctgggattacaggtgcatgccaccacgctcagctaatttttgtatttttagtagagatggtgtttcaccatgttggtcaggctggtctcgaactcctgaccttgtggtccgccccctctcggcctcccaaagtgctgggattacaggcrtgagccactgcacccggcctcaaatttccccttcttataatgacacaagttatactggattaggggctacc

SEQ ID NO: 901720 - DNA, 658 bp, Homo sapiens
caaaaataattagaccagggtgtccaagggagayaatacggtcatgagttctgtttctgattgggccagtaaagcccctttctcatccctcttttccacttatcactagagatagaaactaaaaacaatggcttcaggctgctaaaagcctaaaacaaaacaaaacagaacaacaacaacaaaataaggcaggttagacctcattgaccactgaatgaatgccaggatctttgctaaattgtggcttccactgcaaaatttaagtaaacttactgaagatgttatccaaagtcagatataaatcagaatgtaaagaagaattcaggtttggaaggtagctttcaagtttaaaaaaatgtaaaaatacagattttttttaatattgaaaaaatagtcaatattgtgaggcaaatgaaaaaataacattttaaataacgaaaatattatattttaattccctacatttcacaaaaagagcaacaagacctttaaattggaagtcatcttgggccaccattttcagtttctcatccactgcaaaaatcctccttaccatcttaacagaaagcctattttacttcacttacattgctgtgaatgtcattgttttcagccacagtcggccttagtgccaaatgctactttgcgtcccattttt

SEQ ID NO: 901721 - DNA, 501 bp, Homo sapiens
tcaaaagtccacagtccaaagtctcatctgagacaaggcaaatctcttctgtctatgagcctgtaaaaytgaaagcaagttagttacttcctagatacaatggggatacaggcattgagtagatacagccattccaaatgggagtaattggccaaaacaaaggggctacaggccccaagcaagtccaaaatacagctgggcagtcaaatcttaaagctccaaaatgatctcctttgactccatgtctcacatctcggtcacactgatgcaagaggtgggttaccatgatcttgggcaactctgcccctgtggcttttcagggtacagcctccctcccagctgctttcatgggctggtgttgagtgtctgcagcttaccaaggcacacagtgcaagctattggtggatctacagttctggtgtctggccttcttcttatagatctacagaggccttcttctcatacctccactaggtggggcccaagtagggactctttgtg

SEQ ID NO: 901722 - DNA, 661 bp, Homo sapiens
aatacaatctagtattcagtagtacaatagggtgactttagttaacaagaatttattgtatgctttaaataactaattgagtgggattggaatatttctaaacacaaagaaatgataaatgcttgaagtgatggataccccaagttccctgatttgatcattatgcattttatgtctgtatcaaaatattgcatcctcataaatatatacaattattatatatctaaaataatttaaaataaaaattagtaaatattaaaagtgccaattctgaatctcaaagctctgaaagtaaaaatgttaaagatggaaatatgtaaacttgttccctgtggaatattggtctaaagctctattttgttaacccaattctttactattttacaaaattttattgaatttctaaagtatgtcatatctagagagcctcacaattttattggtattaaatatggtataaagaatctactttgcattagataattccacagaaatatacattagtagaattttattaaatcaaactgagctaatttttaaaataaaaaacaatgtacaccaaaataacaaaatcttgtattaaataatctttattttttaaagtcaagacaaagtcaatgycagatgttctatttcaatctaaacaaatgtgatgctattt

SEQ ID NO: 901723 - DNA, 364 bp, Homo sapiens
catcttgtttcttcaatacctgactggagtagccagcaaatcctcacactggcatttaattacttcagaatatgtcactattttaaatttccaaacttaccattcaattatctgtcatacagactctgactcattcaggctagtccatttaccatgcaaagtgtatctgaatataattatttaaaaaaatttcctagtcaaaataatccacgttctaaatcacttctctattacattcactattctttccaagacggcatttttattcctttcccaccttttcatataccactgacttttttcagtgctaaagggaagtctcaccttctccataaccttscgcttttattccagattatattga

SEQ ID NO: 901724 - DNA, 637 bp, Homo sapiens
tgtaatagaaataaagaacagaaaataggaacatattgttgatggaaagagacatagaaagactttttaaaatgaagatagatattacagcatgtgtgaatgttgactggactgggcagccactaaaatggaaaaaaaaataatgctgaaaaataaaggtgttatacaggaacaaatgacctggctatagtagagtagatgagaacaaatgcacaagttgagtagcctttttttactgccatctattgctacgtaacaaatcactccaaatttactggcttagaaaagagtgtattgtatctcataattttgtgaatcagaaatttgagcaaggctgggatggatagtttttttgccctaggagattttaacttaggtcatttcaaaaatgtttttaccttgtgattggtacctaagtagacatgactggaaggctaggtttagccagaccattgactgaacagcattcacgtagtctatctaatgtatcaatctcatagcagtcaacaattttgcatgcgactcaggggcatcaaggaaagagcatcaagagtccagacataatctgcaatgtattttatgacatacctcaaaatgtacagaacatcrcttctgccacaatataatgttcaattcc

SEQ ID NO: 901725 - DNA, 549 bp, Homo sapiens
aagtggcaaatctgaaatttgaacccaaagcttttgtttccaaaacctatgcttttaacctttccactaagccacttccaaaataaaccataaatacacagataaatgaagttggtgagtattttctgaatattagattagtgcaaaagtaattgtgtgtgtgtgtgtttgccatcattgttaacggcaataaccggaattacctttgcaccaacctaatacaaaagattaattcatttcactcactcattcatttaaaaatgtgtactgagtgtctactatgggcaagtactgggctaggtgatggaaataaaattgaagaaaagctcaaggagggtcggacgcagtggctcacacctgtaatcccagcactttgggaggccgaggtgggcgaatcgcaaggtcagatcaagaccatcctggctaacacggtgaaaccccgtctctactaaaaacrtgaaaaattagctgggcgtggtggcgggtgccggtagtcccagctactcaggaggctgaggcaggagaatggcgtgaacccgggaggcggag

SEQ ID NO: 901726 - DNA, 584 bp, Homo sapiens
gagagatctgctgttagtctgatgggcttccctttgtgggtaacctgatctttctctctggctgcccttaacattttttccttcatttcaaccttggtaagtctgacaattgtgtgtctgggtgttgctctcctcaaggagtatctttgtggcgttctctgtatttccttaatttgaatgttggcctaccttgctaggttgtggaagttctcctggataatattctgaagagtattttccaacttgtttccattctccctatcactttcaggtacacaaatcaaatgtagatttggtcttttcacaagtcccatatttcttggaggctttgttcatttcttttcactcttttttctcttatcttgtcttctcactatatttcattaatttgatcttcaatcactgataccctttcttccacttgatcgaatcagctattgaatcttgtgcatgtgtcatgcagttctcgtgctgtggttttcagcgccatcaggtcatwtaaggtcttctctacatatttattctagttagccatttatctaaccttttttcaaggtttttagcttcctcatgatgagttcaaa

SEQ ID NO: 901727 - DNA, 621 bp, Homo sapiens
tatgtgtcatctctgatttatttgagcagtggtttgtagttgttcttgaagaggtccttcactgcccttgttagctgtattcctaggtattttawtctctttgtagtaattgtgaatgggagttcattcatgatttggctctctgcttgcctgttgttgctgtataggaatgttagcgatttttgcacattgattttgtatcctgagactttgctgaagttgcttaagaatcttttgggctgagaggatgggcttttctagatatagattcatgtcatctgcaaacaaagatagtttgactttctctcttcctacttaaataccctttatttctttctcttgcctgattgtgctggccagaacttccaacactaggataaataggagtggtgtgagaggataaatttgtcttgtgctgattttcaaggggaatgcttccagcttttaaattctataccataacttaaataatttctaaatcaccactataagactataggactgtgtatttgtctatatatttacctttaccagagaggtatacatttttctatgtttttatgttgtcgtatagcatcttttcatttaaacatgaaggactctcttaaacatttttaggga

SEQ ID NO: 901728 - DNA, 579 bp, Homo sapiens
ccacaggtggtaaacctactttgcattacttaagaaaagctttgaaggtgcaatgagggtttttaagctaatgacaatttatgcytaaaacattacaataatccaacgaaatcaaatagcattttaaaaagtaacaattttatgtagaaattgctgatagcatcaacacatgctgggaactttacagataatgggttatatcagttttggctgaggagtcatttggcctttcatttgtaaataagacagtattcttttccctttaaggagtatctagaccatgtattaatgaaagagtatttatatcctttgtccatggtggcagaattagccaaagcaatcttggattttgttcttacaagatagaacttggaggagcattaataggttgtttaaatgacagcattctatagttgaagatgactagatgtagaatctgaatatttggataaagtccttgctgtactgttaactatcaattaattagctttccatatcagttctttactaaggtttatatgatctggcccaagggtacctccctaaccccattttatggtctttcctcacttgcttcat

SEQ ID NO: 901729 - DNA, 651 bp, Homo sapiens
cgtcaagtgtcctgaaacctattccaaagagtcaggactttattgtttgagaaacgtgacaccactggaggatttttaaatcagtgtcatttttagtrtctgattcagtgtactgccttcagccaggagagttggcagtatttctattttatagatgggacaactgaggccccaaataatacatttaagagataggtggggttgatttaatattctcaatcaccatgttgtcagggcctcctaactcttaccctctcaccctccatccttccttccttctgattgttattcttgtcaaaagtaaaacataaaactatttacctgccatccttatttttatccaaggaacacgtatgcactcacacagcttccagaaaccagttcccctcggtggaagccagttgctttaggggtggtgcggcttgtatgtggatggacaccatgtgtgcactgagcccaaattctctgttcttcttgactaggaagctggatttgtaccagggaccttttatctaaataggagactctgggctcaggagaacagagccgacttgacaaagtagaaaagagctcagtattggtctgcccacgctttgggcatgcgtgagcactcgcagcaaaacacagctggcacatctaattttagcctcg

SEQ ID NO: 901730 - DNA, 618 bp, Homo sapiens
aagttggtttctgttcatatcagtctgtgtgttcatttattcatttgtgaaatgggtgaaataaccctgacctcaacaatatattatagtgscctctgctatggaaggtatgaagttactgaactgttaagagaagggtggtccatacataagtagcaatgttatcatttctgaagcccaactgcatatttttatttactttattacagactcagctctgaggtgggtagcctgtctttaacacagaaaagagtttaggaactcctcaaatgtgtaaaggccatttctatttgctgaagcatagctcttcaccacttaatcattgaaaattatgttgtagaatatttagtgatgggggaatgtttataatacatcaaatggttaaaacagttaactatgttcctaatattataaaagcataaagaatccaaatatagacatataaaaaggcttaaagaaaatatatcaaattctcaaggaaaataaaaagtaaatggaacccggaattttgtttcatgaatgataaatacaaaagtgagactcgactacatgccttattagtcaagggaaccctaatagtgccctttcctgttgtgtggaaagtaaggtataatagga

SEQ ID NO: 901731 - DNA, 616 bp, Homo sapiens
accatgatgttgttcagtgcaaggtgaaagcctgagaagaacagatgagagacgctgtttagagtgacagacatgtagtaagtggctgcctttgattgtaggatttcaagaaaaartaaaagaaaaacatgttatttatgggttcgaataatattacaataatccaaaggtagttttattctagcagtgtggaaaataaaagcctttgtaaattaattgcttgtctatgatatgagaaagcacagagcaagcgctgttgaacataaatcaacttgatttataaacaatttgttattcatctaagatatttaatagtatatattaaattcattttgttatataaaaattaatgagtgaatgattggtaaatgcataaatgggtaaattacataaatcaagaaaattacccctcacacttttgcttttgagttaaatttatgaaaaatgcactagattcctcaccactaaaactttctatatattggaaacccaagttgttttttgttttaactagcattttgtaagcccattaagtagtataaatttctgttatttttaaatacttgtcagcagtatgttttgcaattggaatgaatacttagacaaataaatgttg

SEQ ID NO: 901732 - DNA, 619 bp, Homo sapiens
actagcctcttcaccaggaaggctggctacatattatgtctactacagatatgcagcgtgaacaaggatagggacagaggccacactgtccttataggagaaacatggttcccatcttccaagtgcctctgacatagtcaccacatactaacaactccaggctggtgccaaagagcagccctgctcaggcctttgagttaggaacttactctccatgaccacagtgacctggagccaactggacctgtaccaggaagacgcaagtaggtgaacacaggtccttggccattcaagtttttcagaagaggccctgactgtttctgaagactgggactatgtacaccagagacccagtcagcaagagagatgctgtagttcctaactcttgggcttgcatgcttggacatagtgtttcttttcagaatagtaaaaatcactggggcttcagagcttgcagccagaaccagcctgttaaacccaagtcgtacyatgtcccttctctgctgaaaaactcctaatgctcctaacttcacgcagattaaaagccctcaccagcctgcaatgctctctgacttgccatgccactggacacctttatcctgcctgtatcctcttccat

SEQ ID NO: 901733 - DNA, 655 bp, Homo sapiens
tcatcattttattagttgtctataaggaacacttacatgttaatcatattaacactttgaatggcatataagaagcaatattttccatgamttcaaataaattcttatacattagcataaggccacacctcagagggaagttgtctcgtaaaaagtgagacattggttggcaagtaaatagaatttgcagggtggctaatgttggactgtttttcagcaggggaagagaaagaatagagatgcccttaaaataaaccatatgggtctcaaactattcatgccacgaatcaggtcagtgatatttcaacctcctccctcaagcttatctcagtgcaacttaaggaagaaatggaaagtacatttccaccagaatgcatgtcttatggaggggcaggggagaaggcaatttcataacagtttcaaactaaagtagtaccccaaagccagtgatgtattctggcccagacttgacaggttattttacctgaccaagccttattgttcctctggaacaataagcatattttcacacattctatttttatttctcaccaaatgtgtcaagacttggtttctattaattaaatttgtatataattgtagatatgcatgcagttgtaagaaacaatacagggagatccaatataccctttgc

SEQ ID NO: 901734 - DNA, 634 bp, Homo sapiens
caaactcacaaagatggccaacagtggcagatgggacctgacrcttgaacttggggagctttcctccaacaggatgaatccatggaagataccaggcacattctcaaaagaacagaagtttagctggtggaaatgagagtagggtggatgtaagttaaaattgttgataagtaaataccctgattgggtattcctgtcacgtgctgctgtaaaaaacctcttaaaacactgggtgaagtggataaatggattccatttaacagagcatttactggggtctattagctgactattaccttaatgattatattataggcggcaatggggctgtcatcataaaaggtgaaaatgatcaaggagaaagaagtatgagctcagaagaggatgcagcaatgtgatgagacagagttgtgcctgttggcctccttcagtgagaaggctgcatctgaaattatcactgaagcaggaaaaacagtgtccttattctttttgtttattcaaaaatgcaatagcgcactgatgcatatggaacctggggctatgagaattgtaaaaattgacctgggatagttgtgttggggttatcaaacagaatgctggtattgggaggatcctgggacacatggaggtgtta

SEQ ID NO: 901735 - DNA, 639 bp, Homo sapiens
cacaagaatcgcttgaaaccaggaggcagaggttacactgagctgagaccacaccactgtgctccagcctgggccatagagtgagattgtgtctcaaaaaagaaaaaaaatagcaacaactcttctatagattttattaatttcatttaattaattaattcacttttaattcctagagcattctaagaaaatcctaattttaataataattttgtattggacatatgtaacttaccatgtaccaggcaaccttctaagtgccttatattaattaaccatcatgtggaaactattgttatcttcattgtataaccaagcaaacaggcacagaatggtaaataactgtatgaagtttacatgcctagaaagcagtgaaagggagacagattgaaatctaagtaatttgggtcctgagtcgatgaatctagcccctatactattctgccttaaaaaagcaaattacttcaatatcaacttcaagtcttagtgttatacaaatcataggacttttacaactggtagcaatattgatattttcgtctgaaaagactccaaagaaaacagatatcaatttattactttcatggacaataaagcaagtatttaamaataaatgcctctagtccttcaaaaagacct

SEQ ID NO: 901736 - DNA, 722 bp, Homo sapiens
ggccatcagtccaaccctctgttgattgttctcacctgtattatgtgtgggagcacacactcacatgcacacacatagctgctgctcctcctgcccacaccacgactctctgtaatttgtcttccaggtctccaagaaagagactttgtgttcctctttgccttcctttacatcctgttataaatgccctttaatttttttcttcccactgagctttctattccttcatttttcctattcatttttcctattctcaagagaaactcaatgtagagaaaccataacaatgtgatttgaagagacttccgtagcccacctctgcccctctccaacacctcccaacccagcctccaaagttcatgctaaaaagaaagaaatgggaacggaaggaaagtaaacttaattgaataattcagctcatactgggcatggtgctgagtatcgtaagcacattttgttccattctcatgacaactctgagaacacgattttagttagcccttctttcctgaagaagctaggtgatttacttaaagaccactcaactcatcagtggcagagctaggatttaaactcaaatctttttgacccgaagcccatgcaacatcaatccyttgggctagtctaataagaaactatatgtagaaaactttggttaaattatgcttgtgttctctggcagggagatctgttcgagcgttcccttgggaacatagtttagg

SEQ ID NO: 901737 - DNA, 640 bp, Homo sapiens
aaaaactgttaaaactgataaatgaattcaacaacattgcaagatacaaaatcaatatattaatacaaacttggtaacatttatatatgccagcagtgaacaatctgaaaaagaaatcaagaaaggaatcctgtttacaatagctacaaaaaatataaaatacctaagaatcaatctaaccaaggaggaatcaatctaacaaaggaagtgaaaaatctctacaaggaaaaccataaaactctgatgaaggaaatagaagaggacacacatgcacgatagaaagatatttaatgctcatggattggaagaaataacattatttaaatgaccatactacccaaaccaatttacagattcagtgtaatccctgtcaaaacatcaatgatattcttcacagaaacaaaaaaaaatcctaaaatgtatatagaaccccaaagaccctgaatagctaaagcaattgatatggtttcgctctgtgtccccatccaaatctcatctcatattgtaatccccataatccccacgtgtgggagggtgggacctcrtaggaggtgactggatcatgggggccatttcccccatgctgttctcatgatagtgagcgagttctcataggatctgatggttttgtgtttgacag

SEQ ID NO: 901738 - DNA, 668 bp, Homo sapiens
tatggacacagggaggggaacatcacacaccrgggcctgttgaggggtggggagcaaggagagggagagcattaggacaaattcctaatgcatgtggggcttcaaacctagatgacgggttgataggtgcagcaaaccaccatggtacatgtatagcctatgcaacaaacctttacgttctgcacatgtatcccagaacttaaagtaacattacataaaataaataaataaataaataaataaataaataaataaataaaaataaaaccatgtgagagagaaaaaaacaaaagagagacagccagtcagatttttaatgctcatctatgtacttatatccagcagtgggcgtacagaaatactgattatgcaaatatgctacaaaatcaggtaggataaaccagacaagtaatctttggggcccaagactagtttttctgaggttgcatagttgttgtacaggaaggacagactgtgaagagcagagaagcaaaatcagcaaagccagaagtaacaatatgtattacattgtgtggggttttttccctaaactctgctaagtaaggctactgcttcctggctaaggagaaatcatagtgctgcaaattaccaggacaaatcaatcatagcaggagactaaaacaactttacccttttgtaagcccctc

SEQ ID NO: 901739 - DNA, 641 bp, Homo sapiens
caggacaatgttatgtgacatacatagttgtaacttgaatcccagattgtgaccataggtgtatagtccattttcacactgctataaagaatgacctgagactgggttatttataaagaaaagaggtttaattgattcacagttctgcatggctggggaggcctcaggaaacttacaatcatggaggaaggcaaaggggaatcaaagcacatcttgtatggcagcaggagagagaaagagagggagaaagtgctgtgcttttaaaccatcagatctcatgagaactcactcactatcaggagaacagcataggggaaaccgcccccatgatccaatcacctcccaccaggttcctccacaacactggggattacaatttgagatgaaatttgggtgcagacacagagtcacatcatattagtagggatcagaaaaaaaatgtttgaagaaataatgaccaaaatttttccaattttggtaaaaactataaacccacagatataatcttaatgattcccaagttcaataaacaaagcaaaccatgcaaatgcatgatacaatcaactttctgaaaaccaccaataaaaatamaaacctttaaagctgccagcaatacaaacgcattacatagaaaataaaga

SEQ ID NO: 901740 - DNA, 674 bp, Homo sapiens
cttttattttaaggtctggggtatayatgcaggatgtgcaggtttgtcgcataggtaaacagctattcttcctgatgctctccctcatgaaatcttcgcccatacctatgtcctgaatgttattgcctagattttattctaaggtttttatagctttgggttttacctttaagtttctaatccatcttgagttaatttttgtataaggcataaggaaggggtccagtttcaaatttctacatatggctagctagttctcccagcaccatttattaaatagggactcgtttccccattgcgtgtttttgtcaggtttgtcgaagatcagatggttgtaggtgtgcggtcttatttctgagttctcgattctgttccatttgtctatgtgtctgtttttgtaccagtatcatactttttggttactgtagccttgtagtatagtttgaagttgtaataccaattctttacaaatgcacatgtaactttcactaagattgacaagttgatcattctaaacacattgagatcttgtagagaatcttcccaggtgacaatattaaattagaaatcagctactgaaaaatgttttgaacttaccagtattttgaaactaaacaaaaaactcctaaataaatcataggtcaaggaagaaatcacaagacaaactagagaat

SEQ ID NO: 901741 - DNA, 593 bp, Homo sapiens
tgaactgaatttatagagttttgattgtggtgacatatggaaagcaatttcacacagtgcctgagacatggtaaattttcaaaaagtgaatgtttataaaagttattatccttatgtttgacctataattgaagtcagatgttagaagacatggcatgatatacaatcttacaaccaaaaaaaaattttgaatatctaaaatcatgccacaatctcggtagcttacacttcttgtttttttttcccccttaggatttcctaatcaaataagcttgcacattaaaatatacactgatgaaaatgttatatttatagaacaaagttttaaacttcaaaattggaagtaaagattacacagtatacataccgtcaactcagcattccccaaagtgtacttggtgaaaatataatcctgcaaaatgccctttgaaaaaaactagtcctgtggtcaaataaacatggagaatattgcacrctgtatgtttctttgggggattcacaaaacaaatagtatcgtaaagagtcttagaagtcttgcagttaaaaacaacaacaaaaaaagtgtttcactttatttgaccttatgtttttca

SEQ ID NO: 901742 - DNA, 592 bp, Homo sapiens
aaatataaaacttaaagcgaacagtgtatttaacaaactagtatttagattccagaaggcttcatgcttagcctgaggaaaaaaaaaatgacatttcaggtaaaagttggagactagtttttgaaataataagataatggcaaagatagttaattttctcaagcaatagatctagcttctagttttatctgctaacttaacaatataaatacaaacaacaaatttaatgaagagggttaataacactgtgaagatactgtttcttctagaaaacatggatatcaccagattataatgagatggaaatgatgaaaatcaaagaatggtgagaaaacacaaacaagaacggaacaaaacaaacaaataaacagaggtaaatattgaacagaaacagtgttaatgggaacaatttaaacattttcccattaagaaaaagtttttttgttaaaaatagatakagtttatcagaataaagaattgatctcattctgagtttaagaattgtattaaaataatgttgaattttatgaacacgacaaagcgggactccatctaaaaaaaaaatagtttatttgatttcttctataaaact

SEQ ID NO: 901743 - DNA, 456 bp, Homo sapiens
gattagttactacctcttattctcatgggaatgatatttcccactgtttctaaaaagatgtaacataagaatgctataaaatagttatgtcayagtctatacaaatataagataaaattattattttctcctccccctttgttctgttctgtatagactgatgaacctactcctaaacatcagtggtttttatttttttttgtgttttttttttttgagacggagtcttgctgtgtcacccaggctggagtgcagtggcgccatcttggctcagtacaagctccacctcccgggttcacgccattctcctgcctcagcctcccgagtagctgggactacaggtgcccgccatcacgcccggctaattttttgtatttttttagtagagacggcgtttcactgtgttagccaggatcgtctcgatctcctgaactcgtgatcagttttaaagaaact

SEQ ID NO: 901744 - DNA, 657 bp, Homo sapiens
ttctgccatgattgtgaggcctccccagccacatggaactataagtccaactaaacctctttcttttgtaaattgcctagtcttgggtatgtctttatcaacattgtgaaaacggactaatacaagaggcatatttagtttatttaccactgaaaagtgagtttttggagtaaaatatatcaaggtattgtacccaattagatttttacagatgttgttttgttctttaaactcctacttttctagtagttgtgcacattcttcattgttgaaatcaaacagcctttaaatttaatacattctcttttaattaactcaaacacatgcttgtagacaggaaagatacatttaacatgaatatggactccttacacacacatatacacatgacttattttttaaatttgagagttcaagtttctttttttttcattgcaaacattatgcattttcaagttccaaacttaaaacctcatggtaaaggtttttttgttttgttttagagtccaattttattaacccatggttgaaatttggaggtcttaagactcaaatctcacatgactgagctaaatccatcttaactggtgacctctgacaggrattcaacttccatcattagacagaatgctctacccaacctatgtgcctgagaga

SEQ ID NO: 901745 - DNA, 563 bp, Homo sapiens
gtttggatccattgctggagagctagtgtgatcttttggggatgtctcagaaccctgttttgtcatattaccagaattacttttctgcttccttcttatttggataggccatttattcaaattattcttgactttatttttaatttgactgtgttttttatatttctttttttcccctcttaaggatgtgactttaatgtttatagtttgttatagcctaatttgatgcttttagaagtgaaaattttatataggttccttgagagagtcatggtgtgctggcttttttagatgctggctgtagtagtatgtacttggtgtgtggaaaagttcactgtctcctatggggttgaaatgcaaggatctcttgaacgtcatctcattctccccccatggtgtgcacttcatttatttatttattttttcctcagtatttgatttactgagttgataattcaagcttcaggggagtaagagaggtacccctgggtaggaactgtttgtagctaaacaaggtgrgtagatgcaatgcctaatgtttggtagaggtccccaccttgatg

SEQ ID NO: 901746 - DNA, 633 bp, Homo sapiens
tggagggctcagaagaagacaaaaaaatgtgggaaagtttgaatctttgtagaaacttggagggctcagaagacaggaagatatgaaaacatttggaacttccttgagacttgttgaatggctttgaccaaaatgctgatagtgatatggacaatgaacagctgaggtggcctcagatggggatgaggaacttgttgggaactggaataaaggtgactcttgctatgcttttgcaaagacactggtggcattttgaccctgccctagagatctgtggaacttccaccttgagagagataatttagggtatcgggcagaggaaatttctaagcagcaaagaaatcaagaggtaacctgatgctcttaaaagcattcagttttatgtattcacaaagagatggtttgaaattggaacttatgtttaaaagggaagcagagaacaaaagtttgaaaaaattgcagcctgaagatgtggtagaaaagaaaaatcaattttctggggagaaattcaagccagctrcaggaatttgcaaaaataacgaggaacagaatgttaatcaccaagacaatgggaaaaacatcagggcatgtcagagaccttctcagcagcccctcctctcacaggcctgaggc

SEQ ID NO: 901747 - DNA, 622 bp, Homo sapiens
tccagcctgcgcgacaaagcaagaccctgtctcaaaaaaaaaaaaaaaaaaaagataatgttagatattatatatgaaaatggactgaattgaacaagattgatggcagagaaaccactgtttaatttaggaaagtgacagtaggggtagaaaggagtggattgatttgacatacagttacatccttggagctgtccgctagagtgctgaactaaagcccaggttttctttgcttcaactgcatctctctttcttaggagttcattgcaaagacctccagatctcctccatcattcacttatctctattccattcccaaacccaccatctgagaatatcaacacatgtttatatttaaattataacagaaatgatcaactctgcctgaaaaatgtgcacaaataaacatatgtataccataattccatataaagtcacaaattacaatgcatatttagctgcactggataggatggatgaaagtcaccaagagatttcatcatttcaaatatcgaaagttattttgaatctctggctcaaagttggggcttstaggaaaaagcactaactttgattcacaaaacctgcaaaacattaacttttagaaagagaaccggaaaaa

SEQ ID NO: 901748 - DNA, 612 bp, Homo sapiens
tcactggcagatttcaccacaaaatttaaaaaaagtcctttaagggttatgaaaataacaccagatggtaacaggaatctctacaaaggatgaagagtattggaaatgggtgtgtgtgtacttatgtgtatgtatacacatatacatatatatatacacatatgtgtgtgcatgttttacttctaacttaaaaatctctttaaaacacaattaactatttaaataaaaataataacataatgtagagtttataaaatctgtagaggttaaatgttttccaataatttcaaaaaagattgggaggggaaaaatcaaaatatactattccaagattattacactatatgtgagcataaaatcacttgaaggtaaactgtgataaactaaatgtatgtactataagtcctaaagtaacaattaaaataacaaaacaaaaattataacttataagccaacaaaggacacaaaaagaaattgtaaaaattattcatttaatctaaaatcaggcaggaaaagagaaaaaaaaaaagaagagatgggacaaaaccctcccacaaaattagcatataaacctwatcacatcacatatcacattaaatataaatggtctaa

SEQ ID NO: 901749 - DNA, 597 bp, Homo sapiens
ccaaaaaaacccatgaccagatggattcacagctgaattctaccagaggtacaaagaggagctggtaaccattccttctaaaactattccaaacaataggaaaagagrgattcctccccaattcattttatgaggccagcatcatcctgataccaaaacctggcagagacacaacaaaaaaaggaaatgtcaggccaatctccctgatgaacattgatgtgaaaatcctcaataaaatactggcaaaccgaatccagcagcacattaaaaagcttatccaccacaatcaagtcggcttcatccctgggatgcaaggctggttcaacatatgcaaatcaataaatgtaatccatcacataaacagaaccattgaaaaaaactacatgattatctcaatagatgcagaaaaggccttcaataaaatccaacaccctttcatgctaaaaacactcaataaaccaggtattgatggaatgtatctcaaaataataagagatatttatgagaaacccacagccaatatcatactgaatgggcaaaagttggaagcattttatttgaaaacaagcacaagacaaggatgccctctctcaccac

SEQ ID NO: 901750 - DNA, 628 bp, Homo sapiens
aatgatttacagaggagacacttgtcacacatatgcactgtttattaccagcactccccaccctaaactctagacttactaagtgagtgtagagggttttagcaccatgtacaacacagaacattttcccttctgaaggtgagcaaagcaggtggtgagaaagccaggtagggcctgggcttctggatgactggagtctcctttgagcttggcaggtccaggttccatagctgaaaattttcaccaaatacaggtatgactgctttgttgaagtgactgccccattttagttaaagaggaagatgtctgattttatggagttttagaggactctcttatactttagggaccagcatcaaatcataggctaatagccttaatataccaaaagtcatgcaaatcaataacaagaatacaccatcagacaaacaatatatacataggtaattaatatgactaaatactatatgggaaaaagtatttggcctcactgacaactgaagaaatgcagacaaaagcaagattttaaaaatgcctatcaatttggtaaagttttaaaaagcttgacaatacttggttkgataaagatcttgggaaatgagcaatcatgccttgttaacgggaatgt

SEQ ID NO: 901751 - DNA, 421 bp, Homo sapiens
tccaacaagttctttatctccatcagagacctggaccttattgtccatatcgctatcagcattttgggcaaagccactcaacaagtctctaggaagttccacactttcccacattttcctgtcttcttctgagccctccaaactgttccaaactctgcctgttacccagttccaaagtcacttctacattttctggtattttttcagcaacaccccactcctggtaccagtttactgtgttagtccattttcatgctgctgataaagacataccccagattgggaagaaaaaatgttcatttggacttacrgttccacatggctggggaggcctcagaatcatggtgggaggcaaaaggcacttcttacatggtggcagcaagagaaaatgaggaagaagcaaaagtggaaacccctgata

SEQ ID NO: 901752 - DNA, 602 bp, Homo sapiens
gggcttttctgggagatatattttttaagcaattccaaaagaaatattcagaaaatgcaaacctttctaaaataaaagacattttacacaaaatggaaaakctcctgggtataagtattataatttggtatatgaagacaagcttttgacaggaacagcaaggctcattgtgtattcataattcaagagttgcacccaaagacacacaagagagggaaagagaggacaagtactcacaggaatttatcaacaaaactataaatcgattacattttgacgggaaatcatctatgtatagcacacacatgtgtcttctcttcttggctatcttacatttccatttaggtacttaagggggaaaaaagagcagaaaatggtgattgcaaatagtctgattatcctgacaactgttgtacagcctcttaggcgtgacactcctgcaagcctcttcggcagccccatgaaatttggaacatcgcttcgttccactacctacagggaaataaattctcgtcaggagttacctgcggctgatgcagctgacaaatgttatctaatcaaatctataagcatcccagacaggtgcgcctctccgccagcct

SEQ ID NO: 901753 - DNA, 596 bp, Homo sapiens
tcactcactgtattccctctggagagaaggtacttctccattctcctgatttcactcactgcattccctctggagagaaggtacttctccattctcctgatttcactcactgtattccctctggagagaaggtacttctccttctcctgattcacattctcacgttgtcttgtggatggaggcttgggcctccactgaggagaggctgtggccaagcgttcagagtcaggtagaccttcactttcacacctgccccaagcagggctgggcccacagtgccctaaggccaactggtaatgggatcattgccctccttgtgggcagcagtaactggctcctccctaggagggcagagaaggtcctcctcctaggaggaccacgatcagggtggtgggtgggactctcctccccaggtgtcagccaagggacctccctccctgtgaggctgtggggcagtgggctcccscatcttagattgtacgtgtatttgtgtacgtgaactggcatctgtcttcccagctgcgttgtgggcatcacaaggccaggtttcatgtgtgtttttgctcacacctggcacctggccctatctgagccag

SEQ ID NO: 901754 - DNA, 596 bp, Homo sapiens
tcactcactgtattccctctggagagaaggtacttctccattctcctgatttcactcactgcattccctctggagagaaggtacttctccattctcctgatttcactcactgtattccctctggagagaaggtacttctccttctcctgattcacattctcacgttgtcttgtggatggaggcttgggcctccactgaggagaggctgtggccaagcgttcagagtcaggtagaccttcactttcacacctgccccaagcagggctgggcccacagtgccctaaggccaactggtaatgggatcattgccctccttgtgggcagcagtaactggctcctccctaggagggcagagaaggtcctcctcctaggaggaccacgatcagggtggtgggtgggactctcctccccaggtgtcagccaagggacctccctccctgtgaggctgtggggcagtgggctcccgcatcttagattgtacgtgtatttgtgtacgtgaactggcatctgtcttcccagctgcgttgtgggcatcacaaggccaggtttcatgtgtgyttttgctcacacctggcacctggccctatctgagccag

SEQ ID NO: 901755 - DNA, 618 bp, Homo sapiens
gggttcagctgggcagctcttgcatggagctctatcatgcagttaccttcagatcctggttgggacagctggctcctgatatggcggcccaaggctcccagagcacatgtcccaagattgcctggcagaagccacgtggccttttctatcccagccttgaagtcatacaacatcacttccacctcattttatacattgaggcagccacagaggcccacccagtttcaaggacagggggcatggactctacctctttgtggattgattatcaaggaacttgtggacgtattttaaagccactctgaggctctcacccttcccacccctttctgccaccaccctctccctgtgaaatgccacctgcctacctctgctgcccaaatctgtccattgctcaaagtctcatcaaactccactctcaccacgatctttcctggccagcccccatgctactgatggacaacccccaaccccgcaagcctcawgaacacaatttattaggtgtcattctcacagattccacttttgtaatgaaaatcaaatcaacaacaacaccagaaaaacaccagggagacaaaactggaggaaatactaacatggtaattatgtgtctgagat

SEQ ID NO: 901756 - DNA, 648 bp, Homo sapiens
gagggaagagagcatagccttcagaccaatattcttcattctagattgtgattgcttatttgtttgctaatctgttactgaagggtaaattccttgaaagtgggattgtaatttgttgatcaaaygtagtgcatagcataatgcctggcttgtcaataggccttcaatctatacacattagtttgattactttcaaactacagtttagccatgtactggttataagttaataatatttaaatgaatgaatgaaaaagaatatgtcaagtaactgctacatgtaactactatgtgacagacgttaataaaggatggttactgtcttagtccatttttgctgctataacaaaatacctgagactgagtaatttatagggaacagaaatttatttctcacagttctggaagctgggaagtacaagatcaaggcaccagcaggcttggtatctggtgagagcccagtctgtgcttccaagatggtgccttgaatgcgacatcttctaggggggtaacaaatgctgtctcttcacattgtggaagggcagaaagggcaaaagttcctggctatttccctctaggcctttaataaggcactaatcccatctatgagggtggaaccctcatgacctaatcacccccaaaaggccc

SEQ ID NO: 901757 - DNA, 702 bp, Homo sapiens
caacggaacaaagctggatggagaatgactttgacaagttgatagaagtaggcttcagaaggtcggtaataacaaacttctccaagctgaaggaggatgttygaacccatcgcaaagaagctaaaaaccttgaaaaaagattagactaatggctaactacaataaacagtgtagagaagaccttaaatgacctgatggagctgaaaaccatggcatgagaactacgcgacgcatgcacaagcttcagtagccgattcgatcaagcagaagaaagggtatcagtaattgaagatcaaatgaatgaaatgaagtgagaagagaagtttagagaaaaaagtaaaatgaaacgatcaaagcctccaagaaatatgggactatgtgaaaagaccaaatctatgtttgattggtgtacctgaaagtgatggggagaatggaaccaagctggaaaacactcttcatgatatccaggagaatttccccagcctagcaaggcaggccagcattcaaattcaggaaatacagagaacaccacaaagatactcctcaagaagagcaactccaagatatataatggtcagatttaccaaagttgaaatgaaggaaaaaatgttaagggcagccagagagaaaggttgggttacccacaaagggaagcccatcagactgactgacagaagatctcttggcagaaactctacaagc

SEQ ID NO: 901758 - DNA, 594 bp, Homo sapiens
actttttaatgttttttatttcctaatgtttacttaccttattttttcaattacatcttccaaaagatattccacaaccggaaaggtaaaaccaggtatatgtatcattggacagttacctattacggcagacaaaatataagcataaatttgtactcaaatgttaaaaacattaatatactgtaaataggacaatgactctattacttactattaattccagaaaatggtcctgtagcttttacaattctaccctacttttccacacctactttaataaaaaacagcagtctagtcttcactcaataccattttactgctaccaaactgtacacacatctcacagttctacaaaataacacagaatatcaaagaatagagttttaagttgaactcaaaatccattagttagaagtctattttctcttcatcattaacccagatggtgccataatagaatatccagaatatcaaagttttactgaattctagataagcattactacttgtagcaccyggaattagcggagaaaggtaatcaaaacaaaacctaaacaaatagattgttactatttcaaaattactaataaaaaa

SEQ ID NO: 901759 - DNA, 570 bp, Homo sapiens
ggctgctctggaaaaatctgaggagctggcaactgtgggccgccgcctcatgagccaggtgggcaggtcccaggtagtcacagccaatccccttcctaacatctgaccatctcagacttcagcatytgctgtcattaatttgggctgctgttttcacagaggaggcacatgggaaatgctacacacacacacacacacacacacacacacacagagctgtctccaaggccgcggacagagtgtgagatcatgaggctgcttcgcctcttcacccgtgagcctgcagcctcatcttctgcagggccccagcagtttccctcctagacaagtggcctgtgtggccacatgtgccctgctgcatccagatttcctgtgggtgacatcgggccggtgggtctctgtcctcgctccaagctcccagccctgtggttggcaggaagtcatcatggaagggacggactagctagcttacaaccaactctgggctccaatcatgatgactggatggaaaaaacaagtcatgtcagccctggccccggcctggaagaacagagaattctgaggctccag

SEQ ID NO: 901760 - DNA, 546 bp, Homo sapiens
actggacgtgcaggtcagggcatggccattgccacaagggagcagcagttcagaaagaatgtgtgtgagctgtcacacatctgcctgcagcaaacttcagagtgtaaagatggctgttatctcactgtggccttccagattgcctacaaattcctctggtggctgatcctaacctagatctctccagggaagggaactctgagaaggtggctccagtgtatggacattgacacggtacagtgagtctgcctacacattcaaactcgttgccacactgaggtgggacccatgctctctcctctttccttactttcagtttcaacaattaaagaaagaacaaatgctcccacctcactactgagaaataatgctacttctgtgactgaactatcaaggagccaagaggaaagcagttgtcattccagggagacaagacygtaaaatagaacatgggctgaggaagtgccagatgactggatttctgtcccacctttgccacctgcttctgccaatttcttcatcccagtaaatgccacgccccccatc

SEQ ID NO: 901761 - DNA, 618 bp, Homo sapiens
ctctgcagatgacagttgtcgtgaagctaaaagcagaagtagcagaagcaggctttggggaaaatgctctttttgctttttgccttccccttcttcctggttggaacttaaatgtgattgttgaacaccagcagccacatggtgaacctaagaaaggaagccacaggcttaaaaagacatactagaatgacagaagaaaaaaaatagtccaacaatgaaccaatcttacaactttatttcgtggattcagcaaatatttatgaagaattgattgtgagttttacccctcattgggtaccaggaatacaaagttaatttgtccagtccttccccttgagaaattcatagtctagtggaggagagagatatgtaaagcagtaattatgggatgttaatcttaaaagtatttcaaaatatttctcttctgccattatatatttgattcatatcatttttgttttccaggaacttgtaagtacactgagagttcattgaccacatccatgatagcatttgagactcattcttaaattaaattaaattcaataaataattactgaatrcttgtcatatgcaagacattggctaggttttatgaggcatacaaaatgatggagt

SEQ ID NO: 901762 - DNA, 618 bp, Homo sapiens
gcaggtggagcttgaccaaacacttgtaggtaagaaacacctattagcttattttcccccttgccctttaatttccatggagataagkgaataaactatggcaaaagataagttcatatttccatgatcgtatgacctccctgaagtggtgattttaggaagatagtgcatgtatctctgggcacaaagtaacttaattaactgtggaaactatctgcaaatttaacgctttccataatttgatagtgcttcactgacccagttcctaaacactaatcttgggaagaaaataatttaattcctaaaatacctaaggtgactccctgtggaaatattgatgacttgccctatgcattagaagatcacgcaggctcccagcccaaagggactacagaacaatcttgatcacatccacccagcaacctggaaacagctttgaatttcttgtcgtgttaacctctggatctgaagagagggtaaacttaaaattaccttcccatggggacctgggactctggatgaatctacagtacaatgctgtgaagaactgaagagcctcaggcttagagaccaggctaatgttgagagtcccagggcaaaatgcatggctctgaatcc

SEQ ID NO: 901763 - DNA, 618 bp, Homo sapiens
gcaggtggagcttgaccaaacacttgtaggtaagaaacacctattagcttattttcccccttgccctttaatttccatggagataagtgaataaactatggcaaargataagttcatatttccatgatcgtatgacctccctgaagtggtgattttaggaagatagtgcatgtatctctgggcacaaagtaacttaattaactgtggaaactatctgcaaatttaacgctttccataatttgatagtgcttcactgacccagttcctaaacactaatcttgggaagaaaataatttaattcctaaaatacctaaggtgactccctgtggaaatattgatgacttgccctatgcattagaagatcacgcaggctcccagcccaaagggactacagaacaatcttgatcacatccacccagcaacctggaaacagctttgaatttcttgtcgtgttaacctctggatctgaagagagggtaaacttaaaattaccttcccatggggacctgggactctggatgaatctacagtacaatgctgtgaagaactgaagagcctcaggcttagagaccaggctaatgttgagagtcccagggcaaaatgcatggctctgaatcc

SEQ ID NO: 901764 - DNA, 567 bp, Homo sapiens
caaaaaagagagaggcatatatgggattgttacctcatcatgtgtctgtctgtttctgcatttgaggctttgcctaatttggatatgactttgttttgcaattgaactgatatggtacatatcataatgagttcatggaatgctaaggggctgcattgtgaagctttggacccctagggagcctttggtgtcctgatatagaaaggatttctataggtgaatggcctcatgatacatttcttccacaagaagagactggtgaaactacaaattacttgcttcacaagatcagcatattttcagaagaacagaagatatgcaatgttgtcaaagtaaaatgaacttctgagccaaattaattactgtctgaagtgttgacatgcttgaaacttgacatgaatatacaactcgatcagacttcattttggcttttcgaagagttgtatgcaatagttttactgttcacttgagatacaataaaacttgaaacgagaatgcagtcaattaagctgcytgaaaatgagatgatgactatcgtagaaatatattggaaaagatagaagggaa

SEQ ID NO: 901765 - DNA, 647 bp, Homo sapiens
agctaaggaactccaataacatcattcacttatgacaataaaagttkcagaataaattatgcatatttgcttatggagaggtggttaacatgactaactttggatcatatatctggtgttcaaaacctagctctgtgtgaccatggacatggtagttaaactctgtaagcctcatttgtcttatctacaagatgaacatcaagtagtattttcttgatttgttttggtggcctaaattagcaaatacatataaagcccttagaatagtacctgatacttatcacgaagctgtatatatgttagctattattaattaaattattcatatggcagtaccttgcatcagttcatctatgattgataaaatatttagtaggtatcaaatatggccacaaaattctcaaatttgtgaaatgcaatgtgtttaccttttctaaatggacctgttcattaaagtcctttatcattagcagctgtactttcttatagcaaaatattttttatactttcaatttgtggaaacctaagaagtgtatcacaattttattgaggttcctgtttacttaaatgaaataaaaatacttccactattttctgaaataaaagttcctatgcacattttcaatgcctgggttttactcttttcc

SEQ ID NO: 901766 - DNA, 494 bp, Homo sapiens
tcagcatcttacctttgtctacatttatacatctcagattcatcattttattcctttgcattagaatggatctatcaatgacaaagcatttctgtcaccattgcctagatgtgtccaacattcaggcctcaaattacagaagttttaccaccccaaattgtatttctgaatgtttttagtgccctgtctaggtatttccagtcctttcttgctgtgtcagattctgggcaacatagaacatgtatgctattttgctttcctcgaatgtgataatgatgtacaaaaagcctgcagtttatgaacacctgtaaaaggctgatgcagttgcagaggaaaaatattggttgttgtcatttcctagactaagtgttcactggacawtttctctgtttccctctattaagtgatccctctgctgctgcagctggtgttaaaatctattcctttgcaaacaaatgctgctttcccatggtattgttgtttatctaatttgg

SEQ ID NO: 901767 - DNA, 577 bp, Homo sapiens
agtcatatatctgtatttcattagcatctgtttctggagatttatcttgttcctttgtttagaatatatttccctgtttcttcatttttcttgatttttgtattgatgcttattcattagatacagcagccacttctccccatctccacagactgaacttttatgaaagaacaacctcactaattagcccagtcagagattttggtgacctctttaacttgtgcttgttcaaattactgtctttgatatcagcggcccccagctctttagagtatactgggttctgttagcactacaagacaaaagccagtgacttggacaggcttcgtaataatcagagtattggatatatgatccagtcctttactccccttcccaggaaaaaaaatggaatgtgggtattttttcaccgcttattttgcattgagctgagaggtagggctgtggcatgtgctagtatgataatggatcaaaacacagtctcttctaagtggcccctgacatctagagtatgctgggtactgtcaacactctgagacagacayaacaaaaccactgccttggacatccctcagaa

SEQ ID NO: 901768 - DNA, 675 bp, Homo sapiens
ggtggttcacacctgtaatcccaacactttgggaggcttaggcaggtggatcatgaggtgaggaatttgagaccagcctggccaacatggtgaaaccctgtctctactaaaaacacaaaaattagctaggcatggtggcacatgcctgtaatcccagctacttgggaggccaaggcaggagaattgcttgaacctgggaagtggaggttgcagtgagccaagatcacgccactgcactccaggctggacaacagagcaaaactctgtctcagaaaaagcaaacaaacaacaaaaaagcggaagttgcctacagcccagtgctgacttacaaaagacttggtgcttactagcatacagagcttcttaaacaagagctgcagagaaatcctcatcaggagactggaggaggcattcttaaaatacaaaacagttttcaagttcaagaaatataataaattattgccttcagggaaaaaaactgcattgtaattgcatataattatgtcagctcagattgatcttgtttaccccatcatgttagagataggaaaactaaggggcatgggattacacaatttyttggcaacctgagattttgcctcttgctttctcacactcacagaatagtggattgcttgtaaatcatgttaggtagagctcttctggctgatgcaa

SEQ ID NO: 901769 - DNA, 619 bp, Homo sapiens
cttttaaaacttttaaaatggttattccattattacatgccaatackacatacttttcatatatccttttattttgtcctagaaacaacctactgttctaggtattgtttccattgtatagataggaaattgaacctcagggaggttaaaaaacttgattacaatcacacagctagtatataaagatatttgtttttcaacccagatgtctctgattccaaaggtcactgatattttcactatgctacattgctaccacttgttacagtctattatttacctaaattgattattttatactattcctacttctatcatttaaaacttctattatgtccctcctggtatttcttttcccaagtcactgtctttggtcatgcttcacaatatttctagaaattaaagattataaacctagaattaatctctcttccccatactagataatttgcatataaacaaaagaacaagtggatttccaaatgcaatgtaatgaaaacatattaataaataaatattaataaatcatataaatactaacactatgagacaatataaaaaaaagaagaatgttttaaaagtcatttatccaaatgtgtcaattataggaaaatgtcaa

SEQ ID NO: 901770 - DNA, 619 bp, Homo sapiens
cttttaaaacttttaaaatggttattccattattacatgccaatactacatacttttcatatatccttttattttgtcctagaaacaacctactgttctaggtattgtttccattgtatagatakgaaattgaacctcagggaggttaaaaaacttgattacaatcacacagctagtatataaagatatttgtttttcaacccagatgtctctgattccaaaggtcactgatattttcactatgctacattgctaccacttgttacagtctattatttacctaaattgattattttatactattcctacttctatcatttaaaacttctattatgtccctcctggtatttcttttcccaagtcactgtctttggtcatgcttcacaatatttctagaaattaaagattataaacctagaattaatctctcttccccatactagataatttgcatataaacaaaagaacaagtggatttccaaatgcaatgtaatgaaaacatattaataaataaatattaataaatcatataaatactaacactatgagacaatataaaaaaaagaagaatgttttaaaagtcatttatccaaatgtgtcaattataggaaaatgtcaa

SEQ ID NO: 901771 - DNA, 645 bp, Homo sapiens
cccaccttggcctcccaaagtgctgggattagrggtgtgagccaccatgcctggacttcattgtgaattttttaaaggcctttctaaacatcacataagatagagaaatgaaggagtcctaaaaagagggagatcttaatccagcttttaattgcttctgaatcttaagtccaaaggccattttgcaaaatagccacatcgtccttaagtttatatgtattttaaaatgtagttttaattcagtgacaaagctattaatgaaataaacatgcattttatccaaatgaacactcctttaaatacttttccaaagtgcatttgaggaaacggtgaggctaatgcacaggcaatgaatataatataacatgataaatgcggtatctgttaaatagcaatgtaatgccagaccaggttcaaattcaataaaacttaactctaatatacaaagctttttgtgagcacttattagttaaaatgaattcttttattaccctagtaaattgccaaattgttagaataaagccacccaaataacattcaaatttaaattgaacaattgaacagaatgagatgtcataatataaaaacagaattaatatatatttaaaatgcattatgtatttttctcatatgagtcatattatt

SEQ ID NO: 901772 - DNA, 620 bp, Homo sapiens
ttgcttttatgaaagggtctggtgaaaccctcaggaatagcagatggctaacatgtagtaattatcggttactaaatatcacttatatcacactgatctattcatacaagtataaccacattaaatgtatattttttgaaaagacaatatgtaatgtgagtgcttgaaacaatggtgggacctaagtaaaatggaggaactagtctaaggtgtaagtgattttaggagccttgtttcagcgacagtgccctcctttcccccaaccctcgccccatctcactttgccctctgctctaggttttcacagggagctggtctctgcctgccgacagacagctgggcagggcgggaatatgaggaatgcagtgtggaggtcagcacttgagcagatgttttgaattctctgcctggaagctgatgtttaggactggccatgactgccgttcttggcatcatttctatttggctgtgagtcgtccgcttgatgcrtggtccacagctgattttcatgccccaaacaatccccatcgaaggtcacacaacgtccagttctcctgcccttctctgtcactctgttcccagaaaatgaagccccagtctagataagtcactaccatgtt

SEQ ID NO: 901773 - DNA, 611 bp, Homo sapiens
aacccatgaaactctggaagaaccacagtcaaatcattagagaaacatgctacacagcttgtcttttcttatggtacccatataattgatcatccaaaccaggttttctggagagttaaagayggtgatcaataatttcaccaagaaaacaagtatacatcagggataccctggacaaactggaatatggccaccctactgatgctccatgtctccccagctacccacattcacattgcactgagaggcaatctgttatttcacactctgccaagggcggcacctttcactatgcattacctgaggatgcaaaactgaaaacctaagcaagcattccagatcttccatcatggtgataacatctttaccacttctgaaatattcttagcctcttttcatgcacatcttgaatctttctgtctcattaaactcagaaactaccttgcaggatcttcatggttttctctgtagcaactgtgcccagaaagccattaggactgagtcattttatgttattaacaactgaagcaaaacgaaaaattcctcccatttgcttctttttgcattaagaagtaaatcacccccccccccccgccaaaaaaaagtttgga

SEQ ID NO: 901774 - DNA, 684 bp, Homo sapiens
ctgggagcataataaatgtatttaccttatttggaagcccttagaaaattttacattctagcaaaaacttggctttgagtaatcaggataattgtctccactyttcacttccctgggcctttataaacagagattgaatatgcaaactgtggttgtattttaaaatcattaatatttcatttaactgtgagcacctgagtacaagaactactgaaaaatgctctatggttcttaatataaatgtttattgatattcagtgtttatgcagaattatactaaattttgattgcagtcttcactctctgtaacaccttcatagctagagaaacttaattgaaaatcaaagataaaaagaaaagtggagccacacatttaaaagacagaatataaagttgaaattaggcattagataaaaaggttgtaaatggcatgaaggtggcataaatattttgtgggaaactgtcaaaagtttgtcaccagtgtgaaaattggaagcattttaattagctcggacttacgtggttctgatagaatgtatcagttaattagcaattttatagcctttggggcaatgattaagttcaatgttcttttgaggtccacgtgttctgttaaataaatccattttgtgttgtccatggatttgaattggtcagaagaaaaagatctatttagtttgattt

SEQ ID NO: 901775 - DNA, 570 bp, Homo sapiens
cactacttagtttattgagagtttttaacataaaaagatgtgaaattttatcaaaagscttttctgtatctattgagataattatgtgatttttgtctttagctctgtttatgtgaagaatcacacttactgattcaagtattcaaggttaaggcctacttgatcatggttggtaagctttttgaagtgctgctagacttggtttgccagtatttttttgaggatttttccatcaatgttcatcaaggatattgacctgaagtttttcttttttgttgcatctctaccaggttttggtatcgggatgatgctggcctctggaatgaattgggaaggagtctctcttttttgtgtttttggaatagtttcagcagaaatactgccagctcttctttgtgtatctggtagaattcagctatgaatccgtctggtcttgggttgtgtcggtgttgttgttaggctatttattactgcttcaatttcagagattgttattggtctattcagggatttgatttctttctgatttagtactgggagagtgtatatgttcaggaatgtattcatttt

SEQ ID NO: 901776 - DNA, 599 bp, Homo sapiens
ttcagtcatacagaagaatgaagttgttttttgcatcaacatggacagaactggaggccattaccctaagtgaaattactcagaaacagaaagtcaaatatcacatggtttcacttgaaaataggaactaaacaatgggtaaacatggacatacagagtggaaaaatgaacactgaagacttgggaggcttagagagggaagatggttgaaaaattacctattgggtacaattttcactatttgaatgatgggcacactaaaagcttaagcttcaccactatgcaatatattcatctaataaaactgcacttgtaacccctaaatctataaaaaattaaaaattgtaaaaactgagaatccctccaagatggccaaataggaacagctccagtctacagctcccagcatgagcaatgcagaagacaggtgatttctgtatttccaacagaggtactggggtcgtttcactgggacttgttggacagtgggtgcagcccatggagtgtragctgaagcagggtgggcatcacctcacccgggaagagcaaggggttggggaattccctttcctagctaagggaagccatgacagacggta

SEQ ID NO: 901777 - DNA, 634 bp, Homo sapiens
agccacaaatgacagagatgatagaattagcagtcaacaatgttgaaacaattacaataagtatgctcagtatgctgaaagagagaaatcaaagatataaaamatggaatttctagaaattaaaatgacaatttctgaaataatttcactggatgggattaacactcagaggcagattaggcacagagcaaattagacactcagaagaaaagattagtgtacttgaagacatagcagtagaagctagccaaaagaaagcacacaaagaaaaaaaatgaaaaaataccccccaaaacagagtctcagtgatctatgggataataccaagtgtctaatatttgtgtaattggagttccagatgaaagatgggtcagaggggtgacagaaaaattatttgaagtaatatagctgaaaatattttcacgtttgatgaaaattataaacccacagattcaagcagctcaatgacccctaagcagagtaaacacacactcccaaaaaccactgcaaaatacgtcactattaaattgttgaaaaccaataataagaaaatattaaaagcagccagaggaaaaaggcaaattatgtatagaggaataaacacaaaatatcagcagacctttttttttttttt

SEQ ID NO: 901778 - DNA, 550 bp, Homo sapiens
ctaggcacaccccggatagcgagtttgaggttttgtatggcagagatggccaatgattcatcaaaactttaccctcctcttttcatagtggagttattgctgggaggtggcttctaagatggaggctacattttttagcatgtcctaccttcctgactccttgcatccaggtggtcatcgataaaatgtgacagaaggtgtgcatgtctctttttctaggcccagacttttaagaaatgagtgggggcatcttcattttctcttccccatctgctggctgaatgcagatgggtggaaccacacgatggaaatagcctgggttttttaataatcacatgaaggaaagctgcctacaaaccaggcacacttgcattgaagtattacgtgaatgagaaacagaattctagttttaggtaaattttatctgctacctgtagagctacaggggtcttytgtggtgagcttctctggaggaagagcatccttcctgtccactgatgttgggcttggtcatctgacgtgctttggctagtggaatgtgagcagacgt

SEQ ID NO: 901779 - DNA, 600 bp, Homo sapiens
cctggaccccagacttggaggccctagagagacagataatcaggccaagggggtcccaggaaaggcttgagcagagagcatccagctgcccctgtcctttctcattcgcttacccttgatatcttcctgaactggtatgttaggttctcagagtactaactctcaaacttcactgtacattagaattactggggaactttttaaaatccagaaattcaggctgtaccccaaacaattaaattaggcatgaattaaaacaacaaaagtaacccctccaggtgattccagtgtgcagccacatttgagaaccaatgtgttagttgatggaatgaaaaatcgagtgcagttacttactgggttgacttttgtgcggtcaccaactcttatcatctgaggatcacacaggacacaatgtcacccctatggggccacactgcctgttctggtcactagtgaggtctcagtggcatatagccattwtaacagctctttttcctttttaccgtgaaacattgacagagatagagtagtatatgcccccaccccatgtactcatcacccagctgtcattcatgtctcctccgccccacacacacactt

SEQ ID NO: 901780 - DNA, 669 bp, Homo sapiens
agcaaactctgcaatataagaatagctagttggctctggttcttccccaacatgaccttttgcaaatattcggtccagggaagagtcatctcacgcagatgaaagtcaaaaagaaaccaatagtggatgatataatgacaggaaaaaaataaaacaagtggtaggcaagcaccagaaaattatcttcataaagtagatgaaaattatgaccaaaccttttgctattaatctaaaaaatgaagcaattgattctatgaagaaagaatcagagatacaagaactcaagagaggccaggcacagtgactcacacctgtaatcccagcactttgggaaaccaaggtaagagaattgcttcagcccaggagtttgagacaagcctgggcaacatggtgagatcctatctctacaaaatgattaaaaaaaaaaaattagctgacctgtgcctgtggtcccagctactcgggaggatagcttgaactcaggaggtcaaggctgtgagctgtgatcacagcattgcactccaacctgggtgacaaagtgagacgctatcttaaaaaaaaagctcaagagagagctcatgaggcaacagaggggaggtgaaatgtgatctagcagaactcrggagaaagattgaaggaaaaaaataaaatcatgacagaaatgaaagt

SEQ ID NO: 901781 - DNA, 602 bp, Homo sapiens
ggtagttctttatagcaatgtgagaatggactaatatgctagacattgccacatatccctccggggggcgggtaacatgtccctcattgagaaccaggtcctcagaactgaactcgtggcacaaatgctatactcaatcctgatgagctgtcgtataaatatgcatagtctttacactaagtattgcacacttgccctagtccaatagcaaagaaacacaaatacactgaatatacagaaacagagtggcactgaacttcaaggacagccagctgggactctaaatagatgagaaaattccccacgactgagaaaaaacaaactcaagcaccatggctggtggtacccaacagcatcttcaggcaaagacagacatgtcatttccaggtttaaaacttggcttatctgtctacctaaaacttaatcagttaataattacattagaaagtaaatggcattataaaggcaaaaccagatttttttttttttttttaagttgggggagsagccaagcatggtgtctcatgcctgtgatcccagcactttggaaggctgaggtgggaggatagctcgagcctaggagtttgagactagcctgggca

SEQ ID NO: 901782 - DNA, 602 bp, Homo sapiens
ggtagttctttatagcaatgtgagaatggactaatatgctagacattgccacatatccctccggggggcgggtaacatgtccctcattgagaaccaggtcctcagaactgaactcgtggcacaaatgctatactcaatcctgatgagctgtcgtataaatatgcatagtctttacactaagtattgcacacttgccctagtccaatagcaaagaaacacaaatacactgaatatacagaaacagagtggcactgaacttcaaggacagccagctgggactctaaatagatgagaaaattccccacgactgagaaaaaacaaactcaagcaccatggctggtggtacccaacagcatcttcaggcaaagacagacatgtcatttccaggtttaaaacttggcttatctgtctacctaaaacttaatcagttaataattacattagaaagtaaatggcattataaaggcaaaaccagatttttttttttttttttaagttgggggagcagccaagcatggtgtctcatgcctgtgatcccagcactttggaaggctgaggtrggaggatagctcgagcctaggagtttgagactagcctgggca

SEQ ID NO: 901783 - DNA, 648 bp, Homo sapiens
tacagacggggaaactgagacacagaggggttaaataacttgccacatagctagtacatgtcaactgagatggacactaaacagcctgactccagaatccatattctttttaacacactccagaaggacacaaaagatgacttatagaaatggaaaaacaggccaattcaggatagattcaacaaaaatgtttaattcagtcatgctgtgtacaactgcggaagtgaatccatcacgtgctgatcaacgtggttcaatctcaaagaacagcattgttcaaagaaagccagtcacataagagtatatgtagtttaattctattataacaagggccccaaataagcaaaattaagcaatctattgctttctttgagacagagtctcactctgtcgcccaggctggagtgcagtggtgtgatctcagctcactgcagcctccacctcccaggttcaagtgattctcctgcctcagcctcccgagtagctgggattacaggtatgtgccaccactctggctagagaatacttttacaggtggtaaaacaacaaaraaaaccaagggtgggttttgtatctttcactgggtggaggcatatgagtgtttgttattctttaagttatacatatttatatatactcttctgtgtg

SEQ ID NO: 901784 - DNA, 602 bp, Homo sapiens
tgtgagagtctaatgctgccacggatctaacaggaggcggagcatcggcagtgatgctagctcacccaccactcatctcctgctgtgcggcccagttcctaacaggccacggaccggtaccagtccactgcccaggggttgggtacccctggtctaaatggtaggagctcacagaagcatctaggcctcccgttccatcatgcagcctgcatgttggctctgggccatggtctcacattggtcatctcatcatcttatttaatcctcacaacccccctgtgaaataggtattatcatcttgatttttcaaaagagcaaactaaggctcaactatctaagacccacagatggtaagcaaggaaggcaggattcaaaatcaacagctgaactccagagcctgtgctcccaaccagcctccaaccaagctcaccacctccactgaggctccaagtgtccgagggaggggaaaagtaccagaagaaagagactgagaagaaagccccgaagccataatkctaaatagacgcttgatctacttcagttttgcctagatacagccatctgcctgggaagtattttcagtttcatgacggaactggaat

SEQ ID NO: 901785 - DNA, 647 bp, Homo sapiens
aggaacacttttacactgtcagtgggactgtaaactagttcaaccattgtggaggtcagtgtggcgattcctcaaggatctagaactakaaataccatttgactcagccatcccaatactgggtatatacttaaaggactataaatcatgctgctataaagacacatgcacacgtatgttcactgcggcactattcacaatagcaaagacttgaaaccaacccaaatgtccaacaatgatagactggattaaaaaaatgtggcacatatacaccatggaatactatgcagccataaaaagggatgagttcatgtcctttgtagggacatggatgaagctggaaaccatcattctcagcaaactatcgcaaggacaaaaaaccaaacactgcatgttctcactcataggttggaactgaacaatgaaaacacttggacacaggaaggggaacatcacacaccggggcctgtcatggggtggagtagggataacataggagatatacctaatgtaaatgacgagttaatgggtgcagcacaccaacatgcacatgtatacatatgtaacaaacctgcacattgtgcacacgtaccctagaacttaaaagtataataaaaaaaattgcaaaaaaaacccagacatacttg

SEQ ID NO: 901786 - DNA, 668 bp, Homo sapiens
tagtgttctaacacctcttcatccccaactacatgtgtatgtgtacatgtgtgggtgtgttccaatacaatgactatttctgaataggtagctatcattatttgctcargatactgcttctatgtatttttcatttcgtatttactcctctttggctgacaacctatgtagtgtgattatgaattaatgtagctacttttctcatatggaaaactcacacaaaggcaaaagtagttattaaagaggactagtgacagcatcactggaattaaatgtgtgcctctgaagctgattgctttggattgacagtacacagctcaaggtagatattctgatgtttttgaaatgcaccctacttctttatatgctgtctagtcttgtggcttcagaattacacaagcttaataataaatatgcatatatatatgtgtgtatgtgtatatatatatgtatattcttaattacttttcaaattatttaaattaattttaccgagcctctgtattgacagctgataaatctttaaatcctgtatttaatattttaataaataatgtttaatacattatagatttctcaaattggattttttttttctaagcaactccttatatcaccacaggaccagtagtgctagtaccagcacgagttgcttctcacttaattag

SEQ ID NO: 901787 - DNA, 570 bp, Homo sapiens
acatgtaataagtaacatgaaatcaccagcaagtgtatcccaggcttaaaatgagaacacacattgatctctgaagacacaaagcacaaaggttattgcttcatctaaattttgatgaaataatttcagaatkcaggaaacaagacttgataggaatatctggagctgtaggtgaagtacaggcagtataagtgaggtaaagcaaatgtgagcaatgtataaatagaaatctttccattgaaaaacaagactgataatttcaatatttccctaaaaatatgctctatgagtttatgaatatatacttgaaaaagatcagtattctcttaggcatgcttttcttcaattacctttgcatgtctgaaacaagctgttttattggcagtttttatcttaaaaaaatttttaagaagatttagataaataacagaaatgacagttcagtcataaataagtaatacaataaaaagttatctccttacataaatgtaccaaacaaatgagattttttgaatcattagaaattattctttataacatgcctaatgaattatcattgttctctttttt

SEQ ID NO: 901788 - DNA, 570 bp, Homo sapiens
acatgtaataagtaacatgaaatcaccagcaagtgtatcccaggcttaaaatgagaacacacattgatctctgaagacacaaagcacaaaggttattgcttcatctaaattttgatgaaataatttcagaattcaggaaacaagacttgataggaatatctggagctgtaggtgaagtacaggcagtataagtgaggtaaagcaaatgtgagcaatgtataaatagaaatctttccattgaaaaacaagactgataatttcaatatttccctaaaaatatgctctatgagtttatgaatatatacttgaaaaagatcagtattctcttaggcatgcttttcttcaattacctttgcatgtctgaaacaagctgttttattggcagtttttatcttaaaaaaatttttaagaagatttagataaataacagaaatgacagttcagtcataaataagtaatacaataaaaagttatctccttacataaatgtaccaaacaaatgagattttttgaatsattagaaattattctttataacatgcctaatgaattatcattgttctctttttt

SEQ ID NO: 901789 - DNA, 633 bp, Homo sapiens
catttccttctgtaatcatgtcattatataatgaaaaagcaatccaggaaaaggatataacaattctaaatatataagacccaacactggagcatccagattcataaagcatatattacaagatctaaagagatctagtaaatctttcactacatggcagtgctggagtctctctgaatctgctgtgattctggggctgcctgattcatgaatcatttattgcttaatgaaactcctttcaatttaattcagctgaacttttaacaggtagatccactgatatcttgcaccttgtccctgggaagagctgcaggcactcaacaccagtctgtgaaggcaggtgcaggggctgtacctgctaaaatcacagaagcagagctctccaaggctgtgggagcccacttcttacattaggtgtcctggatgtgagacatggagtcaaaggagatcatttttgagctttaagatttaatgactgtcccactggattgtggatatgcatggagccaatagcccctttgttttggccaacttctcccatttggaacaggagcatttatccaatgcctgcacacccrttgtatcttggaggtaactaacttgcttttgatattacaggttcataggtggaag

SEQ ID NO: 901790 - DNA, 621 bp, Homo sapiens
aaagaaagataattaagataattaattttcttaagatatcttaagataattaattttcttaagatatcttaagataagagaaaaacagaaattaatggaacagaaaacaaatatacagtggagagaataaacaaagagatggtttattgaaaatacaaataaaattgataaacatgtattctacttctatcaccaggtaagctcctaccagacatgactcttccccagataataagtataaactttggacaaaatacaaaagcaacaacctgaagttggagagtgaacaaaaacaagcagattctggaaggaagtgacatcaggaaaaggaatgatgcagtgtgagttgcctggttttatggcttttaacctgagaataggccaaatcaggactccatggttgtattagtcttctcaggctgccataacaaaataccatagattgggtggcttatacaacagaaattaattttctcacagttctggagactggaagtccagtgtcaaagtgtaagaagggttggcatctggtgaaactttctccttaaattggagatgrctgttatctcactgtgtgctcctatgacctcttctttgtgcgtgtgtgagggaagagcaagt

SEQ ID NO: 901791 - DNA, 516 bp, Homo sapiens
aaatgtaaaacctaaaactataaaaaccctagaagaaaacctatgcaataccattcaggacataggcatgggcaaaggcttcataactaaaacaccaaaagcaagtacaacaaaagccaaaatagacaartgggatctaattaaactaaagagcttctgcacagcaaaagaaactatcatcagagtgaacagaaaacctacagaatgggagaaaatttttgcaatctctctatctgacaaagttctaatattcagagtctacaaggaacttaaatttacaagaagaaaacagccccatcaacaagtgggcaacaaaggatatgaacagacactttgcaaaagaaggcattaatgcggtcaacaaacatatgaaaaaaagctcatcactggtcattagagaaatgcaaatcaaaaccacaatgagataccatctcatgccagttagaacggcaaccattcaaaagtcaggaaacaacagatgctggtgaggatgtggagaaataggagtgcttttac

SEQ ID NO: 901792 - DNA, 545 bp, Homo sapiens
aaacatcatcagaatttcgtgaagcatagacaaatatcaatagccaaatcgatcatgtggaagaaaggtatcagagattgaagatcaacttaatgaaataaagcatgaagacaagattagagaaaaaagaattaaaatgaactaacaaagcatccaagaaatatgggactatatgaaaagaccaaacctatgtttgattggtgtacctgaaagtgatggggaaaatggaaccaagttggaaaacacttagggacgttacccaggagaacttccccaacctaggaagacaggccaacattcaaattcaggaaatatagagaacaccacaaagattctccttgagaagtgcaaccccaaaacagataattgtcagactcacccaggttgaaatgaaggaaaaaatgttaagggtarccagagagaaaggtcgggttacccacaaagggaagcccatcaacctaacagcagatctctcagcagaaaccctacaagccagaagagattgggggtcaatattcaacattcttaaggaaaagaattttcaa

SEQ ID NO: 901793 - DNA, 650 bp, Homo sapiens
tggactgtgacttcagagggcgcaagcctcaaggcttggcagcttacacatggtggtgagtttgtgagtgcacagaagtcaagaactggggtttgggaacctctgcctagatttcagaagatgtataaaaatgcctggatgcccaggcaaaagtttgctgcaggggcaggacactcatggagaacctctgctagggtagtgcagaaaggaaatgtgggattggacctccacacaaaatccctcctggggcactgcctagtccagaccccagaatgatagatccacagacagcttgcaccgtgcacctggaaaagtcgcagacactcaatgccagcccaagaaagcagccaggaaggggactgtaccccgcaaaggcacaggggcagagccgcccaagaccatgggaacccaccccttgcatcagcatgacctggatgtgagacatggagtcaaaggagatcattttagagctttaagatttgactgccgtattggatttgggacttgcatgggcctgtagcccyttcatttgggcaatttctcccatttggaatgggtgtatttacccaatgcctgtacccacattgtatctaggaagtaactaacttgcttttgattttacaggctcataggcagaagggacttgcctt

SEQ ID NO: 901794 - DNA, 650 bp, Homo sapiens
tggactgtgacttcagagggcgcaagcctcaaggcttggcagcttacacatggtggtgagtttgtgagtgcacagaagtcaagaactggggtttgggaacctctgcctagatttcagaagatgtataaaaatgcctggatgcccaggcaaaagtttgctgcaggggcaggacactcatggagaacctctgctagggtagtgcagaaaggaaatgtgggattggacctccacacaaaatccctcctggggcactgcctagtccagaccccagaatgatagatccacagacagcttgcaccgtgcacctggaaaagtcgcagacactcaatgccagcccaagaaagcagccaggaaggggactgtaccccgcaaaggcacaggggcagagccgcccaagaccatgggaacccaccccttgcatcagcatgacctggatgtgagacatggagtcaaaggagatcattttagagctttaagatttgactgccgtattggatttgggacttgcatgggcctgtagccccttcatttggrcaatttctcccatttggaatgggtgtatttacccaatgcctgtacccacattgtatctaggaagtaactaacttgcttttgattttacaggctcataggcagaagggacttgcctt

SEQ ID NO: 901795 - DNA, 650 bp, Homo sapiens
tggactgtgacttcagagggcgcaagcctcaaggcttggcagcttacacatggtggtgagtttgtgagtgcacagaagtcaagaactggggtttgggaacctctgcctagatttcagaagatgtataaaaatgcctggatgcccaggcaaaagtttgctgcaggggcaggacactcatggagaacctctgctagggtagtgcagaaaggaaatgtgggattggacctccacacaaaatccctcctggggcactgcctagtccagaccccagaatgatagatccacagacagcttgcaccgtgcacctggaaaagtcgcagacactcaatgccagcccaagaaagcagccaggaaggggactgtaccccgcaaaggcacaggggcagagccgcccaagaccatgggaacccaccccttgcatcagcatgacctggatgtgagacatggagtcaaaggagatcattttagagctttaagatttgactgccgtattggatttgggacttgcatgggcctgtagccccttcatttgggcaatttctcccatttggaatgggtgtatttacccaatgcctgtrcccacattgtatctaggaagtaactaacttgcttttgattttacaggctcataggcagaagggacttgcctt

SEQ ID NO: 901796 - DNA, 590 bp, Homo sapiens
gaggaccagatcatgtggttaccagacacatctttctgtgggaatagtgatgatccaagacacttttatatggatgcctacagcaggggaaagttacacattacactgcaaagaacattcgttacagatcataacagctatatcatttctttactgtgaaatatttttaaggccatttttcgtttttttctgactgtaggcaaaagtagatgcttattttggaatagaaaacaataacaataaaatattcacttttaggaccacttttaacgtgtgtatatatctacatttctatttttggatatttgcattctgccttttgcatcaaatatcttatgcatttgccacgtgattaaaaatggctcaaaaacgtgattttcagtggctgcatatacagttcatagtgattataccataatttattgaactattgccacagtatatcattgtatttttatttggaccccatgagtttctgtttttaagtggccttcacggggggaagataaatatgtctttagactaatagatttgcasttcatattggctatgagaagaaattgcctgtaattagcatcttcaaattatct

SEQ ID NO: 901797 - DNA, 604 bp, Homo sapiens
aatggcattagaataattatatttttattaaattaaaacaaacttcactctataccttaaattatatacaaatattaactaaacataggtaataggtataaatattaaacctaaaaataaagtctaaaatattatattgaagaaactatctgaaattttggaaaagggaaagatttatgagaaacaataccaagagcatgttccataaaagaaaactggctgtgttgaattccatcaaaatggagaactgctcttgtaagacaatgtgaagagaataaagagacaaaccacaaactggtagaaaatatttgcaaatcatatatttcttttttttttttttaatttccataggtttttggggaacaggtagtatttggttacacgagtaagttcattagtggtgatttgtgaaactttggtgcacctatcacccgagcagtatacactgaacctgatttgtagtctttcatgcctcaaccccttcccaccctttcccactgagttcccaargtctattgtgtcattcttatgcctttgcatcctcatagcttagctcccacttatgattgagaacatacaatgtttggttttccattcctgagtt

SEQ ID NO: 901798 - DNA, 610 bp, Homo sapiens
caaagtcagtcaacaggtgaatggataaacacattgtgatgaggacatttagtgagatactatatatatatgtatatatatgtatagtatatatatatatatatatatatataaaasctattctaattgttagctatagctcattgtgcttgtgatttacatttttctgataactaatgaggttgagcacctactaatgtgattattagacatttgtgtaactgtgatatttctgttccaaagttttcccaattttgaggggccaaaatttttgagatatggaagcttattagacatgtgttttgaaaatatatctgccaaggctgtatattattattttattttccaaatgatgttttttgaagatcactttttttttagttttgaagtctaattctttaattttatgctttaagcttttgctgtcttatctaacaaatgttattctttctccaacattttcttctaaatgttttatttcatagtttctagacgtgtgtttataatacatttcaactcaacttcagtacatgtaaagggtagaaggataaaggttcatttatttctgtggtatcagctgtataccatttttttttctctgattttatct

SEQ ID NO: 901799 - DNA, 610 bp, Homo sapiens
caaagtcagtcaacaggtgaatggataaacacattgtgatgaggacatttagtgagatactatatatatatgtatatatatgtatagtatatatatatatatatatatatataaaacctattctaattgttagctatagctcattgtgcttgtgatttacatttttctgataactaatgaggttgagcacctactaatgtgattattagacatttgtgtaactgtgatatttctgttccaaagttttcccaattttgaggggccaaaatttttgagatatggaagcttattagacatgtgttttgaaaatatatctgccaaggctgtatattattattttattttccaaatgatgttttttgaagatcactttttttttagttttgaagtctaattctttaattttatgctttaagcttttgctgtcttatctaacaaatgttattctttctccaacattttcttctaaatgttttatttcatagtttctagacgtgtgtttataatacatttcaactcaacttcagtacatgtaaagggtagaaggataraggttcatttatttctgtggtatcagctgtataccatttttttttctctgattttatct

SEQ ID NO: 901800 - DNA, 611 bp, Homo sapiens
cttcctttcctagccaacctgctgatttcactctttctcatctgtactttcaagccaattattaaaaatagaatttaagaatagtattaaggaaaatctggaaagaaaatatttctgagtttctgcaaatatttcattgttgtgataatactgtttatgtaattttatatcccacttttaaatctaacactatactgtagtttttatttttatatctctgcacaatattccactcaatagcttctattccttttttatttttatttttattatactttaagttttagggtacatgtgcacaacgtgcaggttagttacatatgtatacttgtgccatgttggtgtgctgcacccattaacttgtcgtttaacattagctatatctcctaatgctattcctcccccctccccccaccccacaacaggccccggtaagcaatggcagcaaaagccaaaactgacaaatgggatctaattaaactaaagagcttctgcatggcaaaagaaactaccatcagagtgaacaggcaacctacaraatgggagaaaatttttgcaatctactcatctgacaaagggctaatatccagaatctacaatgaactccaaca

SEQ ID NO: 901801 - DNA, 611 bp, Homo sapiens
cttcctttcctagccaacctgctgatttcactctttctcatctgtactttcaagccaattattaaaaatagaatttaagaatagtattaaggaaaatctggaaagaaaatatttctgagtttctgcaaatatttcattgttgtgataatactgtttatgtaattttatatcccacttttaaatctaacactatactgtagtttttatttttatatctctgcacaatattccactcaatagcttctattccttttttatttttatttttattatactttaagttttagggtacatgtgcacaacgtgcaggttagttacatatgtatacttgtgccatgttggtgtgctgcacccattaacttgtcgtttaacattagctatatctcctaatgctattcctcccccctccccccaccccacaacaggccccggtaagcaatggcagcaaaagccaaaactgacaaatgggatctaattaaactaaagagcttctgcatggcaaaagaaactaccatcagagtgaacaggcaacctacagmatgggagaaaatttttgcaatctactcatctgacaaagggctaatatccagaatctacaatgaactccaaca

SEQ ID NO: 901802 - DNA, 527 bp, Homo sapiens
ggtcttccttcttttttcaatttgccaccctataacttttaattggggcatttagctactttacatttaaggttagtattgatatgtgtagatttgattctgtcatcttgttgttatctggttattatgcagacttgtttgtgtggttgctttgtagtgtcactggtctatgtatttaagtgtggttttttagtggccagtaatggtttttcttttcaatatttagcacctccttcaggacctcttataaggcaggtctggtggtaacaaattctcttagcattcgcttgtctgaaaaaggatcttatttctccttcacttataaagtttagtttggttatatgtgaaattcttggttggaattccttttctttaagaatgctggatatgagcccccagactcttctagcttgtaggagttttgctggaaggtctactgttagcctaatggagttctctttgtaggtgacctaacccttctctctggctgctcttaatatcttttmtttcattttgacctcaaaaaa

SEQ ID NO: 901803 - DNA, 470 bp, Homo sapiens
gttaactagcatgattgtggtcatcattttacaaggtatatcaaaaccccacattgcatgccttaaagttataaccttttttttktttttgagacagggtctggctctgtggcctaggctggagtgcattggctcaatctcagttcactgcaaccttagcctcccgggctcaagtgatctcccacctaaacctccccagtagctgccactacacctggctaatttttgtgtttttgtagagacagggttttgccatgttgcacaggctggtctcgaactcctgggctcaagcaatccacccgcctcagctcccagaatgctgggattacaggcatgagctgccatgtccagcctaaatatataatccttatttgtcaattacacctcaataaagctgagggtggtgaagaacaagcacaggactgagccatgaaaaacaagagcctacaagagaccagcaagtttccaca

SEQ ID NO: 901804 - DNA, 518 bp, Homo sapiens
aaagtcaggggtcaagtcctgctagtttattagtgtattagctggtacatatcaggtactgaatatatctattgagtaatgaatggrtggatgccactgcccaagtgtaggcactcatgctaaattatcttccaagaaccaaccctcctgtcctacttcaatacaaaagcagtgaaaagaatttacagaatcaaaattctttcacatcaagactttttgctttctaaatgaagtctgagttcatcgtgattttttgggttctcctcttctccttaaacccacatctagccaatctcctctacctgctacatggctctttttgtctcactccctccttcctcagtggagcccatattggtctccatgttagtttctcaccagtgatccttcatgttgccacaggagtgatcattgtgatgttatttcccattgcctggagactgcacttaattaatttatgtgacttttaagggcctaattttctttgctgcccactcatcccacctcagttcccacta

SEQ ID NO: 901805 - DNA, 640 bp, Homo sapiens
ctgtgcaagtgccagcgtcttcttagccgctctgtgcatcccaggctgccctgttatctggccaccgtccctggccattgggactgcttctgatggctctggcctctgctgccccagggagcatcttctgtaagcagctccttttctctctcctggtgagtaacaaccaaaggattagggaattcaagcatgttactacctgcttcctctctgcagtttgggcttgaaagagactaggagtgaggatgggaggcagagaagagagattggggaaaacaaaagcagatctgaggaagattcagggaagagttgagaggcttgggattcaggatggaaagtgttcagcttacttctcaagcacccactgccagagtgttaaaagttttcaagggaatccctcttccatcctgctgtggtgattttctaagagtagagaagtgaattcattctttaggcatttggcccagaagtttctgaggtttacttctgctaccagtgattacataaactcatgttatttaacatgctgagttctactaagctgcaaaaaaagagaaaggattctgggtgaacatgcaaattatccaggacwttttgaattttacccacgaagcagtttaagcaaagaatagtttaagaa

SEQ ID NO: 901806 - DNA, 609 bp, Homo sapiens
agcattctgagaaacttctttgggatttgtgccttcatacaatggarttgaacctttcttttgattgagcagctttgaaacattctttttgtagaatctgcaagtggacatttggagcgctttgaggcctatgttggaaaaggaaatattgtcacaaaaacactagacagatgcattctgacaaacttctttgtgatgtgtgtattcatctcacagtgttgaaattttcttttcattgggcagttttgaaacactctttttgtagaatctgcaagtggacattttgagagctttgcgtcctattgtggataaaaacatatcttcacataaaagcgagacagaagcattctgagaaacttatttgtgaagtgtgcatgcatctcacagagtttaaactttctattgattgagcagtttggaaacactctttttgtagaatttgcatgtggacattcgcagctctatgaggcccatggtggaaaaggaaatatcttcacataaaaacgctacagaagtattcttacaaactcctttgtgatatgtgcattcatgtcacagagttgaactttacttttgattgagcagttgtgaaacactctttttgcacta

SEQ ID NO: 901807 - DNA, 616 bp, Homo sapiens
atctgcaagtggacatttggcgggcttagcggcctatggtagaaagagaaatatcytcacatacaatctagacagaagcaatctgagagaattctctgtgatgtgtgcattcatttcaaggagttaaaactttcttttgattgaacagttttgaaattctctttttctaaaatctgcaagtggacattctgtgtgctttgaggcatacggtgggaaaggaaatatcttcacataaaaactagacagaagaattctgggaaacttacctgtgatgtgtgtgttcatctcccagagttgaacctttcttttgtaggaccagttttgaaatactctttttatagaatcagctagtggacatttcgaacgccttggggtctatggtgaagaaggaaatatcaccacataaaaactagacagaaggattcttagaaactcctttgtgatgtttgcgttcatctcacagagttgaacctttcttttgattgaacagttttgaaacactctttttgtagaatctgcaagtggacatttggagtgctttgcagcctatggtagaaaaggaaatatcttcacataaaatgtagacagaagcaattagagaaacttctttgtgatg

SEQ ID NO: 901808 - DNA, 420 bp, Homo sapiens
ctagacagaagcaatctgagaaacctctttctgatgtgtgcattcatctcacagagttaaacctttcttttgattgaccagtttcaaaactctctttttggagaatctgcaagtaaacatttggagagctttgaggtctatggtggaaaaggaaatatcttcacataaaaactagatagaagctttctgagaaagttctttgtgatgtgtgcattcatctcccatagttgaaaatttcttttcatggaccagttttggaatactctttttgcggaatctgcaagtggacttttsgagcgccttgtggcctatggtggaaaatggaatatcttcacataaaaactagacagaagaattctgacaaatttctttgtgatgcttgagttaatctcccagagttgaaccttccttttgattgag

SEQ ID NO: 901809 - DNA, 606 bp, Homo sapiens
tgtgcattcaactcacacagttgaacctttcttatgatagagcagttttgaaacactctttttgtagaatctgcaattggatatttggagcgctttgtggcctttggtggaaactgcaatatcttcaaakaaaaactacacagaagcattctcataaactactttgtgatgcatgctttcaactcagagagttgaaacttcctattgatacagcagttgtgaaacactctttttatagattttgcaagtggttatttggagagcttctaggccttttgtagaaaaggaagtatcttcacataaaaactagacagaacattctcagaaacttttttgtgatgtgtgcattcaactcagggagttgaacctccctttggagagagcagttttgaaacactttttctgtagaatctgtaagttgatatttagagcactttgaggcctatggtagaaatggaaataccttcatataaaaactagacagcagcattctcagaaactactttgtgatgttgcattcaactcacaaagttgaacatttcttttgatagagcagttttggaacactctttttgtagaatctgtaagtggacatttgtagcgctt

SEQ ID NO: 901810 - DNA, 638 bp, Homo sapiens
  misc_feature 598, 599, 600, 601, 602, 603, 604, 605, 606, 607, 608, 609,610, 611, 612, 613, 614, 615, 616, 617, 618, 619, 620, 621,622, 623, 624, 625, 626, 627, 628, 629, 630, 631, 632, 633,634, 635, 636, 637, 638: n = A,T,C or G
atgtgaagatatttccttttccaccataggtctcaaatcgctccaaatatccacttgcagaatctgccaaaagagtgtttcaaaacggctctctcgaaaggaaggttcgactctgagagttcaatgcacacatcacaagggagtttctgggaatgcttctgtctagtttttatgtgaagatatttccttttccaccataggcctcaaggcgctcccaatgaacacttgcagattctacaaaaagactttcataactgctctatcaatagaaaggttcaactctgtgagttgaatgcacacatcacaaagaagtttctgggaatgcttctgtctattttttatgtgaagatattttctttccaccgtaggcctcaaatcactccaaatatccacttgtagattctacaaaaagactgtttcaaaactgctctgtcaaaaggaaggttcaacactgtgatttgaaggcacacatcacgaagaaatttctgagaatgcttctgtcttcttttgtctgaatatatttccttttccaccataggactcaaagggctgtaaatgaacactkgcagtttctccaaaattagtgtttcaaactccnnnnnnnnnnnnnnnnnnnnnnnnnnnnnnnnnnnnnnnnn

SEQ ID NO: 901811 - DNA, 254 bp, Homo sapiens
gtggacagaagaattctcagaaaattccttgtgatgtgtgcattcaactatcagatttgaaccttccttttgacagagcagttttgaaacagtcttcttgcagaatctgcaggtggatagttggagctctttgagggtttcgtcataaacgtgatatctttaattaaaaactagacagaagcattctcagaaacygtttggtgatgtgtgccttcagctcacagagttgaaccttccttttgtcagagcagttt

SEQ ID NO: 901812 - DNA, 533 bp, Homo sapiens
gcaaaggatatgaacagacacttctcaaaagaagacatttatgtggccaaacaaacacatgaaaaaaagttcatcaccactggccatcagagaaatgcaaatcaaaaccacaatgaaatattatctcatgccagttagaatggcgatcattaaaaagtcaggaaacaacagatgctggagaggatgtggagaaataggaacacttttacactgttgatggtgtaaattagttcaaccattgtggaagacagtgtggtgattcctcaaggatctagaaccagaaataccatttgacccagcaatcccattactgggtatatgcccaacggactataaatcattctactataaagacacctgcacacatatgtttattgcagcactgttcacaatagcaaagacttagaaccaacccaaatgcccatcaatgacagactggataaagaaaacatggcacatatayaccatgaaatactatgcatccataaaaaaggatgagttcatgtcctttgcagggacatggatgaagctgg

SEQ ID NO: 901813 - DNA, 607 bp, Homo sapiens
cgtgtacaattttaaaaaccccatacctttgttgtcacctttaacgggtattgcacgaaactaggtgttgtatgaaatggaatttctcagaattcctctatgtgtaggacacaaatctataacaatagtgctatagtaagtttgcctatgacagctgataaagaaatttgataggttttcccaaatttagcaaccacaagaaaaatttatatgatgtcactcataaaaagttataaaacagaaataaatttgtctagactactattaataaaccaaattttgactaacaattttgttatagaaaatgatattataaaactgttgtcaaatgaacaggtgagcaaactgtatgcatccaaaaatgtagtctcagtgcaagaacctaagataagaataagagttaattcctgttgaatgctttctaaagactttgcatttatttatttctttaaatgcatttatcacaactccatgaagaagtcactgtatcagcaggatgagctagattacactacagtgtcatataacctcccaaaccttagtcactatatttgtaaaggtttatttcttgctcattcttcagatcytgtagctagaaattgtgctg

SEQ ID NO: 901814 - DNA, 633 bp, Homo sapiens
ggaaagaccccaggattcaaaatgtgaagctatgcagcctgaggcatttcagagtggctgaacgaaatacagtccttacaatcatcagtgtaacttgttttgttttgttttgttggtgggtgggggagggttctagtgcaatttttgcctttgattggccgtatcagttaccagtgatgcccattcactaatactgcaagtgtattaaattttcatctgagtgagtttaggatcttaaagttattaagacaccaaattatgatgttactattccaaagtgcagagtttctaactcatattcagaggatagcaatctcccaaataagaatgtattcgtgatttatttttattctagtgtgggaagagtttgtcctggtagtctaccaaccacgtggcagtgactcccctccttaggtctcagtttgttggtctaaaatgagtggttttaactagatgatctctacactgttatttcgttctgacactcttttattctatgattcattatataattttatggataaatttccaagccacttactttttctttacaatatccttcttaaaaatgaaaragcatgtggttttacctttgcaaactctcatgtcttgtccctaatggaaaagtataac

SEQ ID NO: 901815 - DNA, 586 bp, Homo sapiens
aatatttcaacaaagagactttttctatcaagaattccagtaaccaagccaaggaaatacaacttttataaataataataataatgataaattacatatatgtagccaaccacatttattgctaaccaccaggcaattttgtaggattattacatttaatgcttagaatattcctatgacattgttattgctatttttatttctcagttgcctaaagtcacatattaaatggaaaagctgaaatgtacaactctagtttagtctaaatacaatgccaaggttttttgtccaaagcagagtacttttcgatatatgtaatccacaaattggcatgtaaaaaccttcattttacataaaatatgcatttctctaggcattttatttaggtctctggtatattttgattaaactaagtaagcagttaaagatctaatctcttgatgtctttagtgttaaagataaataaggtcaaaacactttttacatgtagtaactcagttgactatcatcatagacctgttaggaaggcacttttgtagtacattgtactggagaagaaataaygaattctaaatccaagcttctc

SEQ ID NO: 901816 - DNA, 649 bp, Homo sapiens
cttggggctttgggattttaaatattgttattatagttgtgggtaacattattcaaaggagcctcttttgcttaagtccttttaaaattcagggtacatcttagagctccctgtgcaccaacaccaagttttgtttatgtaattcaaattcttcttcacctagatgattgccaaatggaaattgaaagtcttcaaggactaaaaatacttggtgaacagtcagcaggtttgcagtgtctttggctatggaagcttggataaaatatgaacaggaatcaaattttaggtcaggacagacattaagaggacaaaacaagcaatattgagcagcaaagtgcatagcattgccaaccaatgcatgtcaaaaaaaggcttagttcaaatccagggcaagcacttgataactacctgatcttgctaacttgctgaatttcactcatcctccatcttttaatgtgtgcaatggaaataacagtagcacctgccttcaaaggtcttataaggattaaataaactaatgcctatgagaaattttgaacaatctctgacatatattaagagcataatataaagtaagtatgccaatgtaaatatttgtagttgattggataagaaycataggtgaaaagggattctctacaatgaaggt

SEQ ID NO: 901817 - DNA, 655 bp, Homo sapiens
gctgtttcttttctctcttaagctagaaaaaaaaaaatccaagctctctcatacttaaatgcaaagtgaaaaaccttttctttcttcattctcctctcactgagacaccaccagtttcctcagagcaatatatgctaattctttccattttctcataccttaatcacttttgaaaccacatctggagcattatacaagtctagggtctttatccacagagaatacaataaaagagatactcatgattctttctcaagcaattgaaatttaccttcggttcccgaccactccatagaacctgctttcaccacgatgacaatttgtctctattgcacagtgcatgacacattcagtctttccatgctctgtcagtcaacagtgttagatgctgtagactctgccctcctgtccggatttccctgacatcaacatcacctgactttaatcttccctctcatgtagctttttctttgtctcttctcaagattacatttttgagcccattctgttcacactgatggtccctgggatctgtactcatctctctcctttctcacattaaaaactttcatgaacttttacacattcccatgtcatcagttaaggtstattcttccagctgtattttttacccccgattacaatttcttttttt

SEQ ID NO: 901818 - DNA, 615 bp, Homo sapiens
gacaataattggcatctgaaataaaagcaactgaagtatgattgatcaaatggtgattattaattcataaaagccttggtcagatgtctaatacggactttattaagaggtttaaatggctttgacaaatatatctctgcattttcattcacacaagtggagaatgaactggacattccaaggagccacatactagccatgactggcatctaaaagaaggggttcctctgcatcacttcacagaattcttgtaaacattaagtgagataaaacatctttcctggaggaaggaagggatctagaagaaaggtaaagaagagctctctttcctgccctgccccatttattttatccttttctgtttatttcagcataaatatattgagctgctctattctgggcattgtactagcaatgggtatgcagaaaaaattaagatttatctcaatgaaaagattcagcttaattgagatataatatatgtaccatataatttacccacttaatgtatacaattcaatggtttttaatatattcccaggtttcacaagatttatcttagttggagactcatgaacatttkttacttcataattcctcaggtccagaaggaag

SEQ ID NO: 901819 - DNA, 597 bp, Homo sapiens
tctgttccattggtctatatatctgttttggtaccagtaccatgccgttttggttactgtagtcttgtagtatagtttgaagtcaggtagcatgatgcctccagctttgctctttttgcttaggattgtcttgactatacgggctcttttttggttccatatgaaatttaaagtagttttttctaattctgtgaagaaagtcgatggtagcttgatggggatagcattgaatcaataaattactttggacagtatgcacatttccacaatattgattcttcttatccaggagcctgaaatgcgtttccattagtttgtgtcctctctcatttccctaagcagcagtttgtagttccccttgaagaggtccttcacatctcttgtaagttatattcctaggtgttttattctctttgtagcaattgtgaattcaaccactgtggaaaacaatatggtgattcctcagagatctagamccagaaataccatttgagccagcaaccccattagtgggtatatacccccccaaattataaattattctgctataaagacgaatgcacatgtatgtttattgcagcactattcacaatagca

SEQ ID NO: 901820 - DNA, 611 bp, Homo sapiens
atttctcaaattacattgtctatggaatcatatttctatagaatacctttaggaactatattctgagaaatataatttaagaaacacactataaaaatgtgtgagataaagctggatcataccagctaggaaatactgagctgttgactggagagaaaaaagaaatttacttactggcctaaggtttgcaatatcaaaataatgggtcctttccataggatggagggaacacaagcatgaagtgtccactagagatgagaaaagaaagctattctcataaagcccttgcaatgagctgccacggaaggcaagaggtatgacaaaggaagaagactaagagtacagaatgtgcccagtgacccacagcaagaaaaagataggaaatggtgagaaattccagggcttgaaagcctatggacatcacacacagagtctcaataggaagcaaaatagtcataaattgatactatactgcagcaaacaggatctccaagaaagagccaggtgaagcttgcagtactggagaggtgcatcctaytcaaaagacccaggtggagctgaccatgcatctgggaagacacagctcagtggacaaccacctgcaggaggac

SEQ ID NO: 901821 - DNA, 634 bp, Homo sapiens
catggtgaaaccacgtctctactaaaatacaaaaaaaattagccgatcgtggtggcacgcgcckgtagtcccagctactcaggaggctgagacgggaatcgcttgaacctgggtggcggaggttgcagtgagcagagatcgtgccactgcactccagcctggtgacagagcaagactccatctcaaaaaaaaaaaaaaaaatccagattatttgagttagagactacatctattaaacagagaacttgcttcatgtattgtttcttcaaaacgtgctgtgagtactcaaatacattactctgaaacaagtgttaatatgttaactaaaaaaaccgagtgaagttgtgaaccattctttttttcccccacaagcaaaatagatttcactttacatcattatggttggatagtggacagtaagaatcaactaccaggggaaaagagcaaaggggagatttcaggtcccaagagaatattctggggcattagtttctacaaataaacattgagttatgtcaggaatgttatgcagccgtaatgctgtccatcctgtattcccagctttgtggctggaagcaccagttcaatgttctgaaatttcacagtcgtaaaaaattcccttctcaaaacgcca

SEQ ID NO: 901822 - DNA, 657 bp, Homo sapiens
ttcagacataggaaacaggtttaagaaaagtgtgtcatggtggtggtagccatgcagaatctgagcaacatggaaaggaggaattcagaaaggaccagaacaaagactcttatatgcaaataacttttaaaaattcttcatttgggatggaattgaaagtgaatatcaaaatcctactggacaccttttgtcatttgttgcatgtaattatgtttaaatttgcggagggtatttcttagattagattggtagattcagtcatttttaatcctttcgttatcttcatttaatctcagtttagataagatttcaaggtatgtgacttaggtaggtcacttatgttagttatctattgctgtgtaataaattactccaaaacacattggcgtaaaatagcacgtattgacaatctcatggtttctgtgtctcagaagtctggaagtggcataacaaggcctctgcttcatgctcttccatgatgctgcagtgaggtgttgagcagggctgtggtttcatctgaatgctcaattagggaaagagctgcttgcatgctcagttccaaggccttggttcccctagagctgctggaccacgggcctcagtttgtccctggctgttgaccaraaggcaccctcagttcattgtcatgcaggattc

SEQ ID NO: 901823 - DNA, 575 bp, Homo sapiens
gtcaaatgcttacatcctctgacttcctaggggcgaccaccccatcatcgacatctcaaggccacccacataccagcccacaagcttcaaagcataattctttgatttatatagaatctagaaatgttaagaaaacagctttggagggtaactttcagcatgaaagcaacaaacagtacataaactctggttcctggcaataagtgggcaaatgacaatctccactgcagctgaggcttcagacctagagaaaagtggttgaaggtggaagggggttacatagtgataaatcttttttatgtatataaaaaaaaccccacattctcactaaagaaaaaataagaggcaagcaaaaagagagttaaacaaaaatgctcacaataccagatacaccctctgttggcacctcagtatatatttttccagacagaattttatgttcacatgtacatgttcttaccaaaatggaatcgtaatataatattttataacccattttaccttttgaaacttacaactttgygaacaacattccatgtcaataaatattcacctataaaattttgaaatggttg

SEQ ID NO: 901824 - DNA, 664 bp, Homo sapiens
acaatataatcccaattatccctgtaccctttacagatgaacatggtgctatatgtgtgtatactgtacaattaataagtatttcaaagctaaatggaaactaaatcgtagaggattaaatcagacactggagccccctccacagctggctctactgcctttggaagagttggtgtggggccccggcaccccagtcctgcagtgagcccgtccgaaataggaataagcacctgctctgggtttgtgtgagccacactttcatacgattggatggtggggaggaagcccagctccactgggtgcacagcttctgtagtcagtcaggtcgcaccaaaacggcaactgtgaccacagaaggcagctttcgcctctcactagtgtgccagggcactccaggctgaaatgaagttcctactgctccatccaatatgttcatcaccaacatcttccctaaggtgggtcaccacgccctgcaggatgtggcgctgaggacaggactgtgccccgctgatggagcggccacagtgtgaggttggagcccttsttgggagaattatcccagatgagcctgactagtgacaggccctggggaggaagggtgtttggtcttatggtttcttctctcccttatttttcttttggaggtgacactcggccagaaaac

SEQ ID NO: 901825 - DNA, 635 bp, Homo sapiens
tacatttgacgcttatagaagtcagtctcccagggcactgaaagagtgaagagtagagagtggatgtgcaggtgcaaatgaaaaatattcctgctattcccgacatctattagttttagtatttgtctatagattttcttgtatttactagatcggcaatcatgacagcatcaaataacgatgttgtttctatgaatctttcaacatattcattttttttgtctgatttcactaactaggtcctcccatataatgtgagctgaagatagtgatagtgtgtcagtttgtcttgtcactgactttaacgggaggacttctaaaatttcagcagtaagcagggtatttactttagtatgatttttgttttagatttattttatcatgttaagtaacattgagcttcaggtatactgtacctcaatctgaggaaaagagaaatgtttgaagtttgatttttacaagaatgggttctattgacacaactcaactcttgtgatcttataagtgaatgcatctccaaatctaaatatatatatataaatgtataaaagtatttatttaataccagctrtatatacacaagctaacaccaaaagcactttgtttactataaaaattctagaaatattagtttt

SEQ ID NO: 901826 - DNA, 631 bp, Homo sapiens
ggagagggtatatgggaactcttcactttctattcagtttttctgtatacttaagattgctctaaaatcaagtmtctgtctatatatgttttaaatagggactcactgcagagtgattttaatcagaactgtgcgaaattcagactctgcaggagggtctggaaggggaaactaaaagcaagcacatcaagtaggaggatattgccatagtgagtaggcacttggggcctgagtaggatggtagcagctagaagggacagaaataatgtgagaaggctccaaagaattaggagagcctagtgacaccttagctgtgactgtgaagaagagagaagccagggtacattagtatttgcagacttctgatctagtcttggctcagattctgacacattgtgtgagctctggcaagcgacttggtatttctggaccttgattatctcaggaatgccctggaggcatcactctcatgtacaggctcaagatccaaccatcagagctgcctgtccggtacactagctattaacttcacatggctattgcacactggaagtgtggctagtctgaattgagatgtgctgtttgtgtgaaacagtgcaaaaagactgcaaagaaacagtgcaaaatggac

SEQ ID NO: 901827 - DNA, 610 bp, Homo sapiens
tgctttttcaattatagctccatgttttgtcttgactttcttagactgatagatatatgtttaagaatatttttgaaaatcttaaaagtaatcattaaaagaattaaaaccatatgtgtgcctattaaagtttggggagatataaaagcaaagacctccaacttgaaaaaagtaaaagaaatatgaaaaatacatcccaaatataaagtacacacacagaaaaaaaggtgacagaagaataacacaaattaattgttaaataaagacaaatgagtttaacattcttattacaatacagcctcctttggggaacaaaaataatattagtaaaacaaatgtctgctctttataagggtaaatcttgaaacaaaatgacagaagaatagatcagaatagtaagatgggcaaagatttttccagtaaatgcaaacagaagagcttaatgttgggtaaattgattgcatcttgcaattctaatttgtgttctgtcagttataaatgaagttggacatctttcataarttttccagttcaatttttttcttataaacttcctgctcacaattcttcctcaattttctattgtattttttgactttgtaactgattt

SEQ ID NO: 901828 - DNA, 627 bp, Homo sapiens
aacagtgcttcacaaaggcaaacaagaacttctccctgaaggatatttaaaacctacaaaataasgagaagatttatcccaatattttctaatgtcccaaatggaatatacatgatcctttaaagttatgggcatcatttattatgtcaaagttttaaaagttgtatacatattgccttgttttgatgattgatttgggaggggttgaggtagagagtggacatgtttttaaatgtgatcctgtgattgtggactcaatgacagcccttcctacactgctcaggttctctcatctactttattatgaaataccctaagatgcagagaaactcagtaagatctctgtttgcattagatgcttcttctttagcaaagagttcccacttgtctcgtctttgaaactagacaattgaagacaccatgattcagagaagtcttttatcacatactacaaattgagaatagaatgggaacagcatagcatgtcaagcctagaaggatgtttagaacactttctttaacagaggaaaaatctgtgccagagaaagttctagaagactattatttttatctgctgactcttaaccaaagtgctttctacataccactctcctctcaaacacagtt

SEQ ID NO: 901829 - DNA, 627 bp, Homo sapiens
aacagtgcttcacaaaggcaaacaagaacttctccctgaaggatatttaaaacctacaaaataaggagaagatttatcccaatattttctaatgtcccaaatggaatatacatgatcctttaaagttatgggcatcatttattatgtcaaagttttaaaagttgtatacatattgccttgttttgatgattgatttgggaggggttgaggtagagagtggacatgtttttaaatgtgatcctgtgattgtggactcaatgacagcccttcctacactgctcaggttctctcatctactttattatgaaataccctaagatgcagagaaactcagtaagatctctgtttgcattagatgcttcttctttagcaaagagttcccacttgtctcgtctttgaaactagacaattgaagacaccatgattcagagaagtcttttatcacatactacaaattgagaatagaatgggaacagcatagcatgtcaagcctagaaggatgtttagaacactttctttaacagasgaaaaatctgtgccagagaaagttctagaagactattatttttatctgctgactcttaaccaaagtgctttctacataccactctcctctcaaacacagtt

SEQ ID NO: 901830 - DNA, 602 bp, Homo sapiens
ttttatctgctgactcttaaccaaagtgctttctacataccactctcctctcaaacacagttattatttagaggttttttctatagataatgttctcttcctacacacagcaacacagagtaacagagttaaatttctcctttttcatgccatattttgttgcaagaaaatccagcggcctttttctgcagaggaggaaatcaagtctaaactcctcaagcgatttgtgttttgaggatactcttggcctttgttggccaagacagagcacaagtttagaagtggcagtgccaggaagacagtgagaaaactgtgaagcagaaaaaagtccagatataacaacttaagaaagggaactatattaatatttagtgggtgggaataaaagtgacttagacattatcttccccaatatgacattccctaagaaatcagctagtgttaccttttcaaaagttaatttatattttttaaaattaacacatttatatttatttatcacrtacaacataatgttgtgaaatatgtatatactatgaaatggctaaatccagccaattaatatatatattacctgacatacttattattttgtagtgaga

SEQ ID NO: 901831 - DNA, 602 bp, Homo sapiens
ttttatctgctgactcttaaccaaagtgctttctacataccactctcctctcaaacacagttattatttagaggttttttctatagataatgttctcttcctacacacagcaacacagagtaacagagttaaatttctcctttttcatgccatattttgttgcaagaaaatccagcggcctttttctgcagaggaggaaatcaagtctaaactcctcaagcgatttgtgttttgaggatactcttggcctttgttggccaagacagagcacaagtttagaagtggcagtgccaggaagacagtgagaaaactgtgaagcagaaaaaagtccagatataacaacttaagaaagggaactatattaatatttagtgggtgggaataaaagtgacttagacattatcttccccaatatgacattccctaagaaatcagctagtgttaccttttcaaaagttaatttatattttttaaaattaacacatttatatttatttatcacgtacaacataatgttgtgaaatatgtatayactatgaaatggctaaatccagccaattaatatatatattacctgacatacttattattttgtagtgaga

SEQ ID NO: 901832 - DNA, 593 bp, Homo sapiens
tcctcatggccacttgactaccggctaaaaagcatccctagagagagcatttctaggctgtgctcttagagtaactaaagctgtgttaggggaatgttttcacatcagggtcctaagttggctttagactcccattgctctctcctccttttcctttctttgtggcactttctacacagattagaatcctgtaaacatactcttttagacaattgctattcccactggctcttcagccaagaatagagcattcaacagacatctcctgactgcagactctgcccatgatctcgaagaaacaaaataattgccgtcatcttggagctaacagtctcgtggtgcagacagatatgtaaagagggcagagtccgtggcagtggaggtgtgtgcgggatggggagctggaaggaccatgctctccacaggctgccttctccagcctcctccaggggtggcttccttgtctaatggraaaccgccacagcagggaccacctcagaaggtgccttggggacacatagattcaccagatgtagacatcttcttttttgggattgatactggtattaactatggccttctctcagctttga

SEQ ID NO: 901833 - DNA, 576 bp, Homo sapiens
cctggacacaggaagggggtggggatatggaaaacttggaacatttaaaaagaaagatttaaaaaaaaaaaaaactcctcaaagtgactgagcagaaacatattaaaatctaaaaggcaattcaatggaaaattatctgacattatgttggcaatggatcttttaaaatgagatctattacaaataacaggcttaacaggcaaatatgacctgcctaatctgcctgaagaggagttttattcctcctattccaacagaccacgtgctctcttaatagaggctgaaggtcccccaggggcctccttcacggagagatgggctgactccacgttctgtctgcctcaatttaatttggagggtcatttcataactgaagacttctagcatccctttgaggtcaaatattaactcacaagggcaggaagatgagttagcacaagttttcagggaarcaattttgcaatttgtatcaagagcttttgtaataacccactgatactgcttctgcaaaatcccacagaggcatgggtaaagacgtagacactaaaatattcatcaagcattctcatcatagca

SEQ ID NO: 901834 - DNA, 576 bp, Homo sapiens
cctggacacaggaagggggtggggatatggaaaacttggaacatttaaaaagaaagatttaaaaaaaaaaaaaactcctcaaagtgactgagcagaaacatattaaaatctaaaaggcaattcaatggaaaattatctgacattatgttggcaatggatcttttaaaatgagatctattacaaataacaggcttaacaggcaaatatgacctgcctaatctgcctgaagaggagttttattcctcctattccaacagaccacgtgctctcttaatagaggctgaaggtcccccaggggcctccttcacggagagatgggctgactccacgttctgtctgcctcaatttaatttggagggtcatttcataactgaagacttctagcatccctttgaggtcaaatattaactcacaagggcaggaagatgagttagcacaagttttcagggaaacaattttgcaatttgtatcaagagcytttgtaataacccactgatactgcttctgcaaaatcccacagaggcatgggtaaagacgtagacactaaaatattcatcaagcattctcatcatagca

SEQ ID NO: 901835 - DNA, 479 bp, Homo sapiens
ccaggagggagactgaacctcagcatgcatgccaggaattttagggcagggatccccaatttcctcctttcctgcatcatcattttcccccttgctattggctcattcccaccacatgccaatgtgctgcaatttctcctgtctgggaaacagccttctctgatgctgcctcctcctccagacactgccaggcatggggcatatttggagctggagctggcagggtggcaggtgggttggttgccttatagagaatggtgttgtggctgtcattgggacattttgtgtttcctctttgctctttcgggatctgcaggctgctccaggtgaagctggagttcctgagctgsgggcaggggtggaaaggatcacagcagggaaggcccaggctcttcaggccatttattgcccatgaaagactcaggggagcctggagcgtgttctcacctggtctccagataggacctgccttccctgct

SEQ ID NO: 901836 - DNA, 474 bp, Homo sapiens
tgcctttcaccttctttttagtgcctcctggcaagttttatcattaaaaacaatcttttttaatgacttgcatttccatttaaagcgatttgtgtgactggtttatttgcttagtcttaaggtgatgtcactgcaacaggcaccatggatttaaggatatataaatccttacgtatccttttttctttttttgagaagcaaaaaacatgatctcattagatgttaaaatgttaaaattagatattaaatgttaaaatatggggaaaatgcagatcttagaacgagggaaattcttgttggtaattttcatcctcccaaaaaacttcagaataaaattggttctccctgaagatgtgtgacatttgtacttggcttcatgtccttatcctgcagtgttggggggcacagggtgaagtcacgcttgttgtgagctggccctgtattttcccaragagaattctttctggctaccca

SEQ ID NO: 901837 - DNA, 580 bp, Homo sapiens
gccccacgcccctgcctcgcgcgccgcccgcgccatgaagcacatcccggtcctcgaggacgggccgtggaagaccgtgtgcgtgaaggagctgaacggccttaagaagctcaagcggaaaggcaaggagccgcggcgcgcgaacggctataaaactttccgactggacttggaagcgcccgagccccgcgccgtagccaccaacgggctgcgggacaggacccatcggctgcagcggtcccggtaccggtccggtgccagtcccagtggcgccggccgttcccccaagagggggcacggacacagccggggagcgcgggggctctcgggcgcccgaggtctccgacgcgcggaaacgtgcttcgccctaggcgcagtggggccaggactccccacgccgccgccgccgccgcctcctgcgccccagagccaggcacctgggggcccagaggcacagcctttcgggagccgggtctgcgtcctcgcatcttgmtgtgcgcaccgcccgcgccccgcgccgtcagcacccccagcaccgccagcgcccccggagtccactgtgcgccctggcccccgacgc

SEQ ID NO: 901838 - DNA, 583 bp, Homo sapiens
aacttctggctctatgagtatctagttatcaggccctttgctagtggtcagcaactttttgggatatgaagactcatttttaacacccacaaaactcaccgatgtctcctctgaggatagttgctgattaagaacacagctgtttctagacccctttcccatacaatgggaaacttgctctcaatttattattcctcttctcttcagaaaatctctctccaaacacaatataagaaaataggcctttacttaccaaatagcaattccatttctgccttcagccctgcctcctgttggaaattccagggtttccttacttggactattggatatgctcaaaattttctgttcaactctgcagaaaatgccttgataaagtctcacagatgttcatgttcgttgttcataaatgtttaacagtttaatactcttaaaacaaactcagttccctttatcttaattttctggcagaatatgtggaaaagaaaaaaatctcacttgactctttggacttaaaacrtacacattcaattaaatatctattaatttggtttataatgttgagatttacagtacctatttt

SEQ ID NO: 901839 - DNA, 596 bp, Homo sapiens
ccttgccattgggtttcctgtttaatggttgggtttttccwgtaaaggtttctccctgcaggaagtcggagcttcagaggagtgcaaggtcacggtgtttgttatcccacctgcctgtctgtcaagtcgctgaggattggctttgttcctctaccaaaggccacagcccctgccagggaacctcttgtccagcctgccatctgggtctattctttcctccctgtatgtttccagacctagggctggcagcagctcccttctattggtaccctcgaggtactgtgcctgccatgtcttcttgcttcatctaaaccctgcacattcctttgtaaaaagtggttttaattaaactcacctcaaattttccagtgtaagtgtgccttctgttttgttttcaggtccttgggtaaggcagtcatttaaataaattaggcattttgggcaatatttatgataagggagagagaatagggagccacagagtcctgcatgacattcctgggcaattccttccctttcaactccattgattgccctaattggctcttccttcttctggcccccagtttcctcatgtctgactaaagcctttcatt

SEQ ID NO: 901840 - DNA, 558 bp, Homo sapiens
ttacagaataattaaccaaaaagtatatataacttacatataccccctcactctaccccattccccacacctcagtttcccctagtattaacatcttgcattagtgtggtacatttattagaatagatgagccaatattgatacattattattaagtaaagtctatagtttacattggggttcactctatgtgtgcacattctatgagttttgacaaatatatgatgatacgtattcaattacaatattatagaaaatagttccacagccccccaaaatcccatgctctacctcctcatcccgctgtgttgaacccctgacaataatagctctactgtctgcaaattttttccttttccagaatgtcatatagttagaatcacacagtatgtggcctttttagattggcttcttccacttagaaatatgcatttaagtttcctccatgtattttcaagttttgataatgtacttctttttatcattgaataccattcagtratttggaataccattgtatggatgtatcacatttgtttactcattaacctgttgcaa

SEQ ID NO: 901841 - DNA, 556 bp, Homo sapiens
cattcttttcaaaatggccaaaagtcagttggatttagatctggtggatcaggtcaaatgcatttaaacaagctatgactttgaagtgacaagtctgtctttctcatttagttcataaacagaccgtgtaggaataaacacatcagttccttaagggacatggaaaattgtgtggtgggtggggaataactaacagaattattaatcttaatggcatgcagccatgattagagctaataaagttgatgccaaagcttgactttaatgtttaacaacaaggaaaaattaaagataaggaataaattctatctcttctaataagagctagattccaggacaatcaaaaattccaaggagaagaaccgagagccagaaagatctcccagaaatgttcccttctgtaggtaattcctcttccctctcaggattgaaaaataaccaacctaaactggggaagggcgatggaaaaaggaaagaaaagttcagccctttctttgttgatgcaartcacatgtataatatcaaaaattagaaaataaagccactcgtaagcctg

SEQ ID NO: 901842 - DNA, 725 bp, Homo sapiens
gccactaaaatattctgtaactaaataaacagtttgtctctgacccagaagccttgtgtttactgtgagatatatgtgtgtgtatatakatatatagatagatatagatatagatatagatatagatatagatattcagtaacttcagagattaggtcataaaaggcactgtggcttctctctctctctctgtgttagagttgctctatattgaggtccttgtggcaacaaggctgaaggctttggccaacagctagtgaggaactgaggcctcttgtcatcagccatgtaaagcagcttagaagtgaatcccccaaacccagtctagccttcagatgactgcagccctggctgacattttggatgcaaccttttgagaaagactgatgcagaagcacccattaagttgcttctgaattcctgacccacagaaactgaggtagtatatgttagtttttttaagccactaattttaggggtaatttattatgtagcaaaagataactaaaacagttggccaggttggtttctattgcttgcaactgaagaaccatgactaatacagtgcataagacacttggtacagaaccttacaaatactcaacacatggtagcaattactatcatattattaagagattaaatccacttattctctagccctccagagggcagacatagaaccaatgggaggaagttatagggaggaagagttcaatttgatg

SEQ ID NO: 901843 - DNA, 725 bp, Homo sapiens
gccactaaaatattctgtaactaaataaacagtttgtctctgacccagaagccttgtgtttactgtgagatatatgtgtgtgtatatatatatatagatagatatagatatagatatagatatagatatagatattcagtaacttcagagattaggtcataaaaggcactgtggcttctctctctctctctgtgttagagttgctctatattgaggtccttgtggcaacaaggctgaaggctttggccaacagctagtgaggaactgaggcctcttgtcatcagccatgtaaagcagcttagaagtgaatcccccaaacccagtctagccttcagatgactgcagccctggctgacattttggatgcaaccttttgagaaagactgatgcagaagcacccattaagttgcttctgaattcctgacccacagaaactgaggtagtatatgttagtttttttaagccactaattttaggggtaatttattatgtagcaaaagataactaaaacagttggccaggttggtttctattgcttgcaactgaagaaccatgactaatacagtgcataagacacttggtacagaaccttacaaatactcaacacatggtagcaattactatyatattattaagagattaaatccacttattctctagccctccagagggcagacatagaaccaatgggaggaagttatagggaggaagagttcaatttgatg

SEQ ID NO: 901844 - DNA, 748 bp, Homo sapiens
actataggagcagaggccaggtgtgatagctcacacctttaatcccagcactttgggaggccaaggcgggcctgatcatctgaggtcaggagtttgaaaatagcctggccaacatggtgaaaccccatctctactaaaaatatttttaaaaatcagccaggagtggtggtacacacctgtaatcccagctacttgggaggctgaggcaccagaatcgcttgaacccgggaggcagagtttgcagtgagccgagattgcaccactgcactccagcctgggcaacagaatgagaccctgtctcaaaaaaacaaacaacaaaaacaaaaaaaatacaagggaaggcaggggaatgcaagggaaggcaaagtaaatatcagaggatatcatatgtaataacaatacatattgttttattgaacttgtatctcagttaagagtgtatagatgtgtgtaatgggttgagatgtaaaaggttctccgtgggtctcagtgcaaaagtttggaagccactggactaaagcaaagataagattaggtgttggctgaaaaataaatatacagtataaatttaaagtaatatgttttatattaacaaccagggacccctgctttctagtgtagctttctagaagcattcagggaccstgacacaccacatgacatctgtaaaacactctccctttctgcacctcttggccttggggaaactactcacccccgacaccacccctcaaccctgcccagatcc

SEQ ID NO: 901845 - DNA, 623 bp, Homo sapiens
gcccaaatagtcaaagcaattctaagcaaaaacaaaaaatccagagacatcacactatctgactttgaaccataccataagactatagtaaccaaaacagcatggtaccgktacacaaacagacacatagacaactggaagagaacaaaaaactcagaaataaagccacacccttacaaccatctgatttttgacaaggccaacaaaagcgagcaatggggaaaggactccctgttcaataaatggtgctggataactggctagccatatgcagaagattgaaactggacccttacctttaaccatatacgaaaattaactcaagatggatcaaatatttaaatgtaaaacctcaagctataaaaatcctagaaaaaaataggaaatacccttcttgacactggccttggcaaagaatttttggctaggtccccaaaagcaattgcaacaaaaacgaaaattgacaagtggaacctaagtaaactatagagcttctgcacagcaaaagaaactatcattaccgtaaacagacatcttacagaatgagagaaaatatttgcaaactatgtacccaacaaaaggtctaatatccagaatctataaggagcttaaaccaataagca

SEQ ID NO: 901846 - DNA, 482 bp, Homo sapiens
gctctcattgttcaattcccacctatgagtgagaacatgcggtgtttggttttttgtccttgtgatagtttgctgagaatgatggtttccggcttcatccatgtccctacaagtttcagtagctgattcgatcagctggaagaaagggtatcagtgattgaagatcaaatgaatgaaatgaagcgagaagagaagtttagagaaaaaagaataaaaagaaactaacaaagcctccaagaaatatgggactatgtgaaaagaccaaatctacatctgattggtgtaccagatgtacaccagatgtgtaccaactggggagaatggaaccaagttggaaaacactctgcaggatattatccaggagaacttccccaacctagaaaggaaggccaacattcaaattcaggaarcacagagaacgccacaaagatactcctcgagaagagcaactccaagatacataattgtcagattcaccgaag

SEQ ID NO: 901847 - DNA, 634 bp, Homo sapiens
atactgatgattctttaattttaactacaactgctatgcaacccaagcttatgcaggtggttarcaaaggggttgagagaaatggcaatacgaaggcagcttgtgtccttttggaatcactgagaagtttaccttacagaatatcttacagaatgccaacagcattcagttgcagtggagtcaaaatggcagcatgatgtatttaggcagagggagggtctgggtcagaagccccaaattttcagcagctcctgtttgacattgaagagatgcagaggtttactagcatccgctacgagggtgagaggaaagaatgttacttggggtagaaaagaagtatcaagtgactttttttgcacgtaagagatgcagcgtgtaaattgttaactccaatctacagagaatatttggtaataataattttgaaaatagtaacaaaatagacaaacttctaggtagtctgatcaaaatcaaaatggaaaaaacagcaatataaggaattgtaaatacaatagttttataaaaataatttaaaattatagttaattttatgccaataaatttgaaaatttcagtgaaatggtcagttttctagaaaaaaaagttaccaaataactcttcaaaagtatcagaa

SEQ ID NO: 901848 - DNA, 577 bp, Homo sapiens
aaaataaaaatattagtgagacaactcatgaaatttgaataaggtttatttttgtcaatggtgttgcaccaatcttaatttcctagctttcataactatatttcgataattatactggctttgtaggatgttaacatttaaggaagctgagtgaagaagacatgggaactgtgtttactatttctgcaactttttatgagtctgaaattgttttaaaatgagaagctaaaaactaaaatgtgtcattgaggtaccagagagaggggagagaaaacgcaggaggtggtggtcagagagtgggatgcatgcaattgtggggtcttcatggaactaatgaggcttgaattctagctcccctgccccaccccacttccttacaggagcttatttcctgggaggggctttaccaatatgttcacagggatatgtgcttttgacatatttacagaagtaaactattttgaccacaaccagttaagatcactctctgccaatctwgcttcttgtctgcaatacttgtctccttgttggacagcaatggagagaggccataggtatttttgagatcttacaaagt

SEQ ID NO: 901849 - DNA, 543 bp, Homo sapiens
ttcttatcaaagtattccaaaaaatttacgtgggagggagttctcccaaattcattgtacaaggtcagtattaccctaatgccaacaccacacaaagacacaagaaaraaaggaaagtacattccaatatccctgataaagatagatgcaaaaatcctcacaaaatgctggaaaactgaataaaacagcacatcagaaaggttattcaccatgatcaagcaaaatttattccaggaatgtaaggatctttcaacatatctaaactgatcactatgatacactacatcaacaaactgaaggacagaaaccatatgattatctccatagaggcagaaaacacattgataaagttcaactttccttcataataaaaatacttaacaaactagacatagaaggaatgtacctcaaaacaataaaggtgatatatgaaaaatccataggtaatatcctatgaatagagaataattgaaagcctttcttctaagatctggaacaaggcaaagaggtccactttccccacttttactcaacatagtattg

SEQ ID NO: 901850 - DNA, 618 bp, Homo sapiens
atcattagatgtcatgatgtttaattataaaaaccttgcagagagaagggtttgttccctgtcttgatggtaagtagcctaaagttttactgactttgagttttgtgcaraagtcattgcaggatgtcaagcttcgtgaatagtaatgtgaacaaattcaggcaacataagtggtattcaggcactgctgttttaaaatgaaatgactttttgcatctaaagataactcttagagtcaaactccagaataatctgcaagaaaaataagatcttcactacatggaataaaagcattcagtttttcaggtgtctaccacagccatcacatacttagggtttaggcctttgttttttaattgaatgaaatgattatttttgacccttgcccctgccactactagcaatagtaacagctaatatttattgcttaattaccttgtcctaggtactatgctaagcattttgtatgcagcatgtaatttaatcttcacaactctacaaggaagggattattattatttccattttacagatgaggaaggtaaggcacagagctcagcatgtaactagaaagaggcaggaactgcaaaagcaaacaaaaaaccacctggcacctga

SEQ ID NO: 901851 - DNA, 633 bp, Homo sapiens
tcagaagacttaatattgttaaaatgactatactgcctaaagcaatctgtatattcagtgtaatccctatcaaaataccaatgwcatttttcacagaattgggaaaaaaaaatcctaaaagtaatatggaaccaaaagagcctgaatagccaaagcaattctaagcaaaaagagcaaagttagacatcacattacctgacctcaaattatactttgaggcaataataaccaatacagcatggcacttctataaaaatagacacataggtcaaagaaacagaatagagaacccagaaatgaagccacacacctacagccaactgatttttgacaaagttgacagaaacatacactaagaataccattttcaataaatggtgctgggaaaattggattgccatatgcagaagaatgaaattggacccctgtctctcaccacatataaaaattaataatgatgaatcaaagccttaaatgtaatatctgaaactattaaaataactagaataaaacctagggaaacctcttttgaacattggtctactcaaataattctcgattaagacctcaaaatcacaagcaacaaaaacaaaagttgacagatgggacttaataaaactaaacagcttctcc

SEQ ID NO: 901852 - DNA, 599 bp, Homo sapiens
gtagctgtcattatatgaaattaactttgtgggaaattaaccaataagtcaatatatatttaaatatctgtttaatccaaagaaaagttgttgattttattataaagttaattcragatcaaacacacataaatacttataattgagatattttataattatttatagattattctagggttgttgctaaagaaagcttaaactaaatgataaagaaattctgattaattatgaatttcctttgatgtctgagcacattgtcatgagatgaaaagaataaaacattcacctctgccctctaagaacttataatttaattcaataattgcattcaaattcaaatctattggatttgtatttaattttattgagggaaaatgtgtcagcatatcacgggagtcaaataacattaacaactaccactttctccaaactactaagtttataaaatgcttgtttatttcagagaagaaaagaaagacgaatctaaaaagctaaaaggagacaaatatgaaagaaaaaacttatctacagaaggtaaaaatcaattttttgaaactatgaggaaaacacaaactgatgtcttggaagaatgctat

SEQ ID NO: 901853 - DNA, 612 bp, Homo sapiens
tgaccttgacttcttttaaatgctactttgtaagctgcttctaagtcatttctgaatgaggggatrggttggtagataggcacaaggatgcagaatttttaaattgcagaagagtaatttgaatccaggtctctttgcaacatccacatttttatactctattctccccaaattttgattgtctcgaatttggcctacggaatatggaaacggtatttgaaaatgtggtcctcttactctctaaggactatatattattctccatcatacttttctagagttctggattataataaataatgtaatatctctgcacattccataagatcaaaacaagatgagctgaagctgagctacttgcatcatcatgccacggcagtctcctttctgtgcgtagcagccctgagtcctgtgataacagctgtgggaagatgcagttttcaacttcagggatctcttcattcatttaacatttttgtggatccacaaacatttaacatatttgtggatctacctacctgcccagtcttagttttcacagagacagaatgtaatccttggaactcagcaattgctcctgttctcatccattccacgaatatttccataaaa

SEQ ID NO: 901854 - DNA, 612 bp, Homo sapiens
tgaccttgacttcttttaaatgctactttgtaagctgcttctaagtcatttctgaatgaggggatgggttggtagataggcacaaggatgcagaatttttaaattgcagaagagtaatttgaatccaggtctctttgcaacatccacatttttatactctattctccccaaattttgattgtctcgaatttggcctacggaatatggaaacggtatttgaaaatgtggtcctcttactctctaaggactatatattattctccatcatacttttctagagttctggattataataaataatgtaatatctctgcacattccataagatcaaaacaagatgagctgaagctgagctacttgcatcatcatgccacggcagtctcctttctgtgcgtagcagccctgagtcctgtgataacagctgtgggaagatgcagttttcaacttcagggatctcttcattcatttaacatttttgtggatccacaaacatttaacatatttgtggatctacctacctgcccagtcttagttttcacagmgacagaatgtaatccttggaactcagcaattgctcctgttctcatccattccacgaatatttccataaaa

SEQ ID NO: 901855 - DNA, 622 bp, Homo sapiens
atgccatctatacatcagaaagacgcaaataaaagttgtttatgattaatcagcaatttaaagcaaagtgtgaaaatcaaagggccttttggcaacatataaagactctgatctccagaagggcataacaagctgagcctttggttcatggctcagttaagtatcgtggagcactgggaaggttgaattctcatttccagccagtctgctggccaaagtaggggcaatggttaggaagagctagggccctgagactgcaataggaatgtctgattcatgcacttaagagccttgaaatcccagagtctcctcacccttttggacatatagaagtggttttacttttccctttcaaagctgagcacttcccctgtggctgaaaacaatacagaggcctctgccttgcaagacaacacagccctccttctcctccccaactgggatctacccacctcttttctccctgctgccagaccagtaacttggatcatgtcacaatwtagccaagctagagaaatgtcggacacactaagggagaaaagggatgatatgttgaaggagctgcaggacctagccaatgtgtactagtaggaactaaaagtatctatggaactggatcctg

SEQ ID NO: 901856 - DNA, 648 bp, Homo sapiens
tggcagagacacaacaacaaaaaaagagaattttakaccaatatccctgatgaacatcaatgcaaaaatcctcagtaaaatagtggcaaaccaccgattccagcagcacatcaagaagctcatctaccatgataaagtgggcttcatccctgggatgcaaggctggttcaacatatgcaaatcaatcaacgtaatccagcatataaacagaaccaacgacaaaaagcataagattatctcaacagatgcagaaaaggcctactgttcttctgagtacctatttttaactttgtttctcttgatattcatcaagaaaatatacacatgcttttaaaaaaattaagcaaaatacagaataatatgtttcaattccaagatgtttacaattttggcttgtttctgttcatttttaagggagtatgtcaaacttccacctctcttatttacgcctaacttgagttgtgtgtcactttattttgacaacgtactgtaattatccttaaagcaactattcctacaatgtacaaggttagcctaaatgctattaaataacaatatttaatggttacacacaagtaactactactactgagcaatcctctctatgacaaatacttggagttaatttcaaaaagtagaaatgaattc

SEQ ID NO: 901857 - DNA, 651 bp, Homo sapiens
aaatgacccttaggtacattacaaattgctcaatgttattaattatcagaaaatgcaatccaaaaccacaatgagatatatcaccccagttaaaacgactcttatccaaaagagatgcaataacgaatgctgataaggatttggagaaaggagaacgcttatacactgttggtggaaaagtaaatcagtatagccactatgaataaccttataaaattcctcaaaaaactaaaaatagaactaccatgtaatccatcgatcccactgctgagtgtatattcagaagaaagaaaaccattatatcagagttatctgcactcccatgtttcttgcagcactattcacagtagtcaaaatatggaagcaacccatgtgttcatcagtggattattggatgaaaaagaagtatgtgtgtgtgtgtgtgtgtgtgtctgtgtctgtgtctgtgtgtatgaacaatagaatattattcatccataaaaaaagaataaaatcctgtcatttgcaagaacatagatgggctggaaaacattatgttgtttgaaataagccaggcacagaaagacaaatatcacatagtgtcaattgcatgtgagagctaawaaagaaaatttaactcatggagatcgaatgtgaaataatgtttgccag

SEQ ID NO: 901858 - DNA, 692 bp, Homo sapiens
caatttgtaccatggaagttaaagttccaaagaagacagaacctcagaaaggtaagctaatgatctgaagccactttcttcctgtgagtatctggtcactctaggctcaggcaagagggtgagaatctggcagggaatgacacaatgttagggtgacaaaatcagagtcttgagaggtctgaaaacatgctggcatcttcaagacattttccaaattctgaaggcacacatggctggaagtagaaatctctgaacagaaaaagggttttcagtcttaaagatttgaacactatggattaatgttaagaagccaccaccagggaagggttcccagtgagtacagcaggatcctagtacaaagctccatagaactataccctaggataaagaaaggaaaaaaaaaacactagttgcaactttaaaaataatttttaaatgcaattcactcttagcactgctcagtacctgttttagtccgttttcacgctgctgataaagacatacccaagactggtacaaaagaaagagtgttattgaacttaacagttccacatggctggggaggcctcacaatcaaagggwaggtgaaaggcacatctcacatggtgggagacaagggaagagagcttgtgcagggaaactccccttttaaaaatcatcagatctcttgacgcttacacactatcatgaga

SEQ ID NO: 901859 - DNA, 593 bp, Homo sapiens
cagcagcaagagtacttttgaatgtgactatatgacctgtcaaagaatttacatcaggtctttctgaagtgctgtcattctcattcacaatacaggccctcaagcccctcactgccccacagtaaaggctgtcacccagtcagcaccaatttcattcttgtgtgatattgctgatgtgtatcatgctcttgttaaattcactgtaggtcaactaactatttcttctaagtgactcaatcataaaacataaggcccacaaatacctagagaggtatagtaactggcatgtttatgatagttgcattaggaacctgatgaattggggtagaatctgaatttaacttgaatatcagtaagaatgaaattgtaaaaattctaataaatttattttgtatatttgtatattttttcaaaggaatttggttaattactttaaattactggctgtcttttgattaaaatggkttgattttagggcttactaaaagcattcaaattgctgttcattcattcgctcatcaaactttccttgagccaagtgctgcacgaagcactgaaaatacaataacaactaagatgtggcctccatttcc

SEQ ID NO: 901860 - DNA, 633 bp, Homo sapiens
tcattacttatgcaaatttctgtaaccagcttgcatttctccctagaagatggggttttccttttaccacatggtcaagctgcaaattttccaaacttttatgttttgcttctcttttaaacataagtttcaattttagatcatgtctttttgaatgcatatgactgtacactttcagaaagtgcaaggtcacctcttgaatgctttactgtttagaaacttcttccaccagataccctaaattatctctctcaagttcaaagatctacaggtctctagagcaggggcaaaatgcttccagtctctttactaaagcatagtaagtgtgacctttgctccagttcccaataagatccttattttcatctgagaccacctcagcctggatttcactgtccatatcaccatcagcattttcgtcaaaaccattcgacaagtctctggaaaatttcaaactttcctgcatattcccgtcctcttctgagccttccaaactgttccaacctctgcccattgcttggttccaaagctgyttctacattttcaggtatcttatagcaatgccccaattatctcggtactaatcttttgtattagtccatttttgcacttctataaagaactacttgagat

SEQ ID NO: 901861 - DNA, 613 bp, Homo sapiens
agccatttacattcaatgttactaatgagatgtgaggtactattcygttaatcgtactatttgttgccttttgttttacctttgtttttaccttttgtttgtttgtttgtttgtttgtttgtttttcagatggagtctagctctgtcacccaggctggagtgcagtggtgccatctccactcactgcaagctccacctcctgggttcaggccattctcctgcctcagcctcccgagtagctgggactacaggtgcccaccaccacgcccggctaattttttttgtatttttagtagagacggggtttcaccatgttagccaggatggtctcaatctcctgaccttgtgatccaccctcctcagcctcccaaagtgctgggattacaggcgtgagccactgcgcccggccccgtctgttttttaattgtacttttgtttcataggtcttgtgagatttataccttaaagtgattctgttttggtatgttttcagtatttgtttcaagatttagagcttctttcagcagttcttttagtgcttgcttggtagtggtgaattctctctgcatttgtttgtctgaaaaagactataactttcctcgatttataaagc

SEQ ID NO: 901862 - DNA, 604 bp, Homo sapiens
gctctaagacctccattatcatattgtgttatttctctactattttactgtattatacctcagtattataatataaactctgctaataattacttatcccctcccctttattttatgagtcctcacaacatasagattttctgttgttaacctttgtacctgtatcgtctaggacaatgcctcgctaaatattcacaagacatataagaaattggaaagaataactgaaaacatttatagttctgtcggtaatattttgtttcccaatattgtgctctttcctcaaccagtattgcttaactaatcctaacaaaataaatcagatttctaaaaaatgcttctagaactccattcttcaatcatattagaaaccctaaagacttcagcaatatcctcttctatttttgaagcaatcctgttatttccttctttcaaatactaattgcttcccacatcctataaatcagaattgttttttctcactttattatgagttactcactattctgttccagaagggaatacattatcttgtaaaaccgtcctatgagcttttgctcactttgttctgttggcacactttctgcttcacttaacctattct

SEQ ID NO: 901863 - DNA, 623 bp, Homo sapiens
atgtgggttctagaaagactacaagggtggctccctgcaggatggccaggagaggagggagactggtgttctagagtctgcgggaatccacagcagtcaaacgagagagacttctgtccagagacacattatccctgcagtccacacatggggcgaatgcctgggaaacaactgaatttagggagaggaaagagaaacacattgtttatttcttaattaggagctgattcgtaattacttccaccccatttctttttattttcacctattgactttgtttgatccctaaatcaaccctgcaagacaaccagcatgttccccttttagaggaggggaagctaaacctcagagaagttcaagtttgtttaaggctttgcataaagtgagttgtggacatggaaacagaactcatgtctttctcacttcagaaacaggacttccttccttccatcctcccttcctcccttcctctcttcctctctcgctcaaccccagcactttgggaggccgaggygagtggatcacctgaggtcaggagttcaagaccagtctggccaacatggcaaaagcccatctctactacaaatacaaaaaattagccgggcgtggtggcaggtgcctgt

SEQ ID NO: 901864 - DNA, 646 bp, Homo sapiens
cattttatatcagctgcggtcactgagtgctgactgcagcagytatgacttagtttcatgcatcttctttatgctgggatctgggttaaagcagcagcttctgcctgaaacatgttattctcatggcagtgattcttacagctgctttctctcatcatctattagccagattatgtcacctgaccaagcctgacgttaagcacaaggaaaagaattatcttccaataggaatctcataacaaaggaaagggatacccattcatcttaaaggaaaggcaggaaatccctgggaagaacaacaattaaaaggaggtgatttttcctacaaagaatgcatgcctctgcgagcaaaagtaaaggcaaaacgaccatctcagtggctcctggggccctgtataagtcaattcaggcgctataacaaaagcaaacaaacaaataaatagactgtgccactgtaaacaacagaaatttatcttcacacagttctgaaggatgaaaagtccaagataaattttcatctgattgcatttctggtgaggtctctgttcctggtttgcagacagcgccttctcactgtgtcctcgtatgacttttccttggtgtgtgcatggagagagagggagagaggaagctctgtggtatctcc

SEQ ID NO: 901865 - DNA, 675 bp, Homo sapiens
taactattcaatgtagagagtatcttttatatctcaattaggtcattgcaattcccctagcttttttgttccttctcccaaattatatatgtaacgtggggaaaagcaagttgaaagatgagtgtgctgctattaggggaaagacaggttaaataagggaaattattctaaggttgacttgtccatctctcaaaatctgattgtgtcttctcccgaattttatcttcgatactgagccactcttttccctgtgccttcccaaactctgtagctattccttttattttcaattgctccctaatgcatcttttaaacaaccattaaagctgtggtacattacttataataagtactcaatacatgtttcttcacgttttcagtgccttacattaattttaaaatttgaacttttagatgcactttcacttaggatgtttggacctcgtagcagctctgacaaattccttcgtaccactcattcactaggttatatttagctagtgaggaaactaaaacgtaaaaagttgagccacctcattctcaattcttcatgccttccgttggagcaaactgcattattctgatgtgggtaaagggacagtaatgatgcatatcactcactggaatttgagaagcataattaatgcatgcaacmgtgcccagaataatcaaagc

SEQ ID NO: 901866 - DNA, 624 bp, Homo sapiens
gcaggggtggggcccttatggagaatctctgctagggcagtgtggaagggaaatgtagggttgtagcccctgtaaagrgtccccactggggcactgcctagtggagctgtgagaagagggccaccatcctccagaccctggaaaggtagatgcaccaacagcttgtaccgtgcacctggaaaagtcacagacactcaacaccagcctctgaaagcagccaggagaagggctgtaccctgcaaagccacaggggtggagctacacaaggcaatgggaacccacctcttgcatcagtgtggcctggatataagacatggagtcaaaggagatcattttggagctttaagatttggctgcccctctggattttggactttcatggggcttgtagctcttttgttttggccaatttctcccatttggaatgggtctatttactcaatgcctgtattcaggaagaagctaacttgcttatgattttacaggctcataggtgggatggacttgccttatttcagacaagactttgaactgtggtcttctgagttaatgctgaaatgagttaagactttgggggactgttgagaaggcatgattggttttgaaatgtgaggacatgaaatt

SEQ ID NO: 901867 - DNA, 624 bp, Homo sapiens
gcaggggtggggcccttatggagaatctctgctagggcagtgtggaagggaaatgtagggttgtagcccctgtaaagagtccccactggggcactgcctagtggagctgtgagaagagggccaccatcctccagaccctggaaaggtagatgcaccaacagcttgtaccgtgcacctggaaaagtcacagacactcaacaccagcctctgaaagcagccaggagaagggctgtaccctgcaaagccacaggggtggagctacacaaggcaatgggaacccacctcttgcatcagtgtggcctggatataagacatggagtcaaaggagatcattttggagctttaagatttggctgcccctctggattttggactttcatggggcttgtagctcttttgttttggccaatttctcccatttggaatgggtctatttactcaatgcctgtattcaggaagaagctaacttgcttatgattttacaggctcataggtgggatggacttgccttrtttcagacaagactttgaactgtggtcttctgagttaatgctgaaatgagttaagactttgggggactgttgagaaggcatgattggttttgaaatgtgaggacatgaaatt

SEQ ID NO: 901868 - DNA, 622 bp, Homo sapiens
ttgggaccttcctagacctcgccctataagtctyttcatttgactggttctgatttttacactttataatacaactgaaatcataagtatagtgctttcctgagttctgcgagtcattctagcaaattatcaaacatgaggggatagtaggaacccctgaatttatagccagttgattaaaactgcaagtggcctggggaccccatactgtgactgacatctgaagtgagggcagttttgttgaggactgtgtccttttttttttttttttttttgagatggagtcttgctctgccgcccaggctggagtgcagtggcacgatctcagctcactgcaagctccgcctcccaggttcacaccattctcctgcctcagcctcctaattagctgggactacaggcacccgccaccacacctggctaattttttgtatttttagtagagacggggtttcaccatgttagccaggatggtcttgatctcctgacctcgtgatccacctgcctcggcctcccaaagtgctgggattacgggcgtgagccactgtgcccagccgaggactgtgtccttaacttgtggagtctggtccactatggatagctagtgtcagaattgcattgc

SEQ ID NO: 901869 - DNA, 641 bp, Homo sapiens
gtgaaagttattcccatgctctacaatgttctacataacctagctctgaactcatttcctggtactctttccattgttattgccatgctctacaatggcctacatgacctagctctgaactcatttccttgtacttttttcattataccctccttcctaggtgcactgacctcctcactgttcttgaaagtggcaagcatatccccatctgaagacttctgcattttctgtttcctctttcagaaatgctatctccccaaatagctgcatgattttctcccttatttccttcaagtcttagttgaaatattgacttcttggtcaacttcaattcctacacaccttttctattcccttttcttgcttaattgttttcttcttagcatttattacatccaacattctcaacttacaataatatctaagttattgcctacttctttatcaccagaatgtagtctttctgggggtagttattgtttattttatttattgttgcatctctagctctctagatcagtaaccaaaacacasaaagtgcataggaaatagttactgacctaatgaatgaatgggggatgaaggaatgagggtagaaaaaaggagagaaaatagtatgttgttctgttcttgcattgcta

SEQ ID NO: 901870 - DNA, 645 bp, Homo sapiens
tgaagataagatggttgtaggtgtgtggtgttatttctgggctctgtattctgttccattagtccaggtaactgtttttgtacagtaccatgctgttttggttactgtagccttgtagtagagtttgaagtcgkgtacagtgattcctccagctttgttctttatgcttaggatttccttggctacttgagccatttttttgatccatatgaattttaaaatagtttttctttgttctgtgaagaatatcattggtagtttggtagcaatggcattgaatctataaattgcttttggcaatatggccattttaacaatattgattcttcctgcccatgatcatggaatgtttttccatttgggtcatctctgatttctttgaacaatgttttgtaattctcattgaaaagatctttcacctccctggattagttgtattcctaagtattttattctttttgtggctattgtgagtgggattgcatttgcttttttttttttttccttttttttttttttcttttttgagacatggtttcactctgtcacccaggctgcagtgcagtggtgtgatcatggtttactgcagcctcaacctcctgggctcaagcaattctcccatttcagcctctcacgtagctagga

SEQ ID NO: 901871 - DNA, 559 bp, Homo sapiens
acagaagacaaatctacatggacctcattcattatgggtcaagagggtagagtgctcatgtatccatttggcaagaacaagaacwctaacaacagttaccagtgccaacgctttacgtatattatctcatctaattttcagaagaacccagtgaggtaggcgctatcatccctgtttttcagatgaggaaactgaggtaaagggaagttaagtaactcatccaaagtcacatagatgataaatggtagggataggattggaattcaggttgtcaagttccagaatctgtacccctaaccattatggagtgaggattttcttcagtaatctgtccaatatgcagccaatcaagataatcttgttttcaatttcacagcaagactatgtgtttaattttcttcatgattgcctcaattatccatttaatcaccatattaacaataacgataatcaaagtgtttttattgcatgtcagtgatgtgccttgcactataataggcacattgccttgatcatctcatttagctgaatcccttaaaaattccatgaaggcagaaat

SEQ ID NO: 901872 - DNA, 614 bp, Homo sapiens
tggctttttagtcttgcccaaataagcccaagtaaatgaataaggaaagaatttctatggctatgactcaacattagccatcatttcatgggcagatacaagctgaatcatacagaaatgagtagcttgaacttacaagacatttgtcctcttgaatgaaataggaattgctgtgtaatagacagttttaaggattacccttttcccccatcatgcacagacacacatgtacactatacctatgtatgtagacacaatgctcattttaaactattagaataattcctacatcatttaaaaaatggtcatgtcaatctaaatattacatgaattgctaacagtgcctgcttttacattccctcactataagtagctagttcacacaaggtagccacccatcaccgttactacatagtttagaaacatatggtatagctttgccatgccaacttctaggtattcactttaccattctgacaaaagaagaagaaaaagcaaagaactgctttccaaactgtcatttmtgagctactgaaacatacattgttacattctggtggggagatttttgttttggtcataaattatttcgccatgttatatttcaattcaca

SEQ ID NO: 901873 - DNA, 612 bp, Homo sapiens
actaacatatgctggatgttggaagatttgtttataaagtggtgatgggaaaggtagtcttggtctaaactaatctgtctggatttcgaaagtgctttattataaaaggaaratatagtgagtcctcaaatagtagtgtgtgtttcattaacataacaaaaaatgggcttcagattgcctcagaaatatgccataaaacctaagctttttaaatttcactccagaaacttgaaagaaagtctgctctcacctctattattgttctgaattagaaattctttttgaacggttgatattttactatgaatatttcaaagacatggttactaaagagttttcctaacctggagaggtatttggagggtcaaacagggtgattatttttaacagaaaggaaggcctgaattagtcaaataattttttttataatttcaagaagaccagaggagagctgtgcatttgagtggtttgcttcagtaaaagagaacagattttcttttgctatgattttgtaggtttaaatttctcagtgtaattttcctgccacctgaccttattttcttttgcaaaggcaaaacaaataaacttgaaaggaagagggaaggaaaacaa

SEQ ID NO: 901874 - DNA, 601 bp, Homo sapiens
aactgaaaagttaaaaaaagaaaaaaagaaaaataaaaggtttcctgaaagtaatctataacaaaaaaatcttttgagactgaaaaatgtaacatatatattttttagaaacgaccatgaaaactaataaatgcaaaacttaatgtttgacattcattcattcattcgttcaacaaatactgagcatctgctgtgttctaggcactacatttggagctgtggatacaaaagtgagtatgaaagacatggcagacagacaatatacaagtaagcattaaataaacattccagactgagataaacgcaatgaagcagataaacaatgtgatggctaatactgagtgtcaacttgattggattgctcctgggtgtgtctgtgagggtggtgccaaaggagattaacactggagtcagtcgactgggagagacagacccatccttaatctgggtgggcaccatctaatcagctgccagtgtggctaagataaagcaggcagaagaacgtggaaggacttgatttgctgaatcttccagccttcatcctccttcyagcaggaagctgtatgcttcctgctcttgaacatcagactctaaattattc

SEQ ID NO: 901875 - DNA, 379 bp, Homo sapiens
tatgtttaaaaagagtggcatttgaaaatacagtatagcagtgtgatgctgcactgcctctaattaagtgcagactaggawaaattattcttagtttagtctatgaaaggggggtggtggaaatttctctctttgcaattcaaaattattttaaagatagaacatttcttttccaatgtcttcattaaacagagctgttaagaattgtctcccaaccatccccaaagagtacaaagctaaccagtattcgtcccatatgctctgctttgaagtgtgaagctgtgaccatcccactagactcttacaccaccatcaaagccgtctcattacgcccagtgctgagagttaaagcgcggggccctaaccgctccaacacaaa

SEQ ID NO: 901876 - DNA, 633 bp, Homo sapiens
tggctgggtcaaatggtatttctagttctagatccctgaggaatcgccacaccgacttccacaatggttgaactagttcacagtcccaacaacagtgtaaaagtgttcctatttcaaatgacaaagggktatcaccactgatcccacagaaatacaaactaccatcagagaatactataaacacctctaagtaaataaactagaaaatctagaagaaatggataaattccttgacacatacactctcccaagactaaaccaggaagaagttgaatctctgaatagaccaataacaggctctgaaattgaggcaataattaatagcttaccaaccaaaaaaagtccaggaccagatggattcacagccgatttccaccagaggtacaagaaggagctggtaccattccttctgaaactattccaatcaatagaaaaagagggaatactacctaactcattttatgaggccagcatcatcctgataccaaagcctggcagagacacaacaaaaaaaagagaattttagaccaatatccttgatgaacattgatgcaaaaatcctcaataaaatcctggcaaaccaaatacagcaacacatcaaaaagcttatccaccatgatcaagtgggcttca

SEQ ID NO: 901877 - DNA, 646 bp, Homo sapiens
tcctttgctttcttcctttcttcccttctttcttcctttcttcccttctttctttctctttctttctttctctctctctctttctttctttttctttctctttctttctttctttttttcttcctccctccctccctccttccttccttctttcttcattcctctcatccttccttcttgcctttctcctgtgtttcctacattttgtaccttacctatgtattgcttgtgttttccccaccagaaggtaagctccatgagtgcaggaatttttgtttcttttgttcactgctgtattcctagtgcctaaaacagtgcctggcatttggtaggcactcaataaacatttgttgagtaatgaataatgtgcaatttaaaagtgagaatttttttttaattgcaggcaacacaaattatgtcttaaagcagtagttttcaatctttttggactacagcccatggtaaaaaatatttttaaaattgtgacatcacagtacataaattcacacacacaaatatgacatatataacaaagatttcacaaagtaatacttattattataacttgtggcrtactttgatattttaaaatcacttctatttccatttttgaaatactgactcactaaatttatttcaagactca

SEQ ID NO: 901878 - DNA, 565 bp, Homo sapiens
ggggcaccagaatttcaatctaaatcttaaaaaattttagggcaatcatttttcttcctccttgaaagccacagacaatgatgtgcactatttaccccataagaagaacacgtattaaccagggcacagcttctcggtgtctccaaaaagccttatttgtttaagagattcatctttgacagtttaacaaataataataatgttagtcaatattattagtagatatagtactttcacctctagaaacagaaattgaccgcaaccttccaaacggtagctcttctaaaaaaggttttttaaattaaagttactttacattgggcaacttgctacacatgtatgtttagaacttcagtaaataagtacattaaattattgaaatatctctaattaataacagctaacatttattgatgttagcatacactacgctaagcactttatttaatcctcatggcaaatctataagattgatacarttatcatcatccccattttacagagaaggatattgagacataaaaggtgtaattgtccttggtcacatggtgaggacgtagaacat

SEQ ID NO: 901879 - DNA, 612 bp, Homo sapiens
gattcagcctgacacagtttggaggaaattacatgagtgtgaatatgaaaaagtaaggattgggagaagggagcattttggaggcttgctaccaggggcgatatmactcagattatatgttgaccttccagtatgccaatttatttttcttaatagtgtttttagtatttattggataccgcaggataatggagatttttaacatttgtccagatagtttgtaatgaaaagcaagcagagctataaatgtatctttatctttttctttgctgctagaatatcctggaagtcaatctcaggactattttcaaataaaaatttaaaaggaagatgtcagaactgaaagtagtacagagaattaggtgaacatagcagctaaacttagcaaggtaaaatgtcatactcccagaataaactgataagtcaatcatacaaatgcaaccaaattattggaaaaaatcaatataataagaatagcatcagatttctcagctgtaaccaaaaattatgagaaatattattgaaatatttgcaaagttaaaagatagaggactgtatacactgtcaaacaaataaatacaagtgaaggcaaaattaaaggcatttttaaac

SEQ ID NO: 901880 - DNA, 612 bp, Homo sapiens
gattcagcctgacacagtttggaggaaattacatgagtgtgaatatgaaaaagtaaggattgggagaagggagcattttggaggcttgctaccaggggcgatatcactcagattatatgttgaccttccagtatgccaatttatttttcttaatagtgtttttagtatttattggataccgcaggataatggagatttttaacatttgtccagatagtttgtaatgaaaagcaagcagagctataaatgtatctttatctttttctttgctgctagaatatcctggaagtcaatctcaggactattttcaaataaaaatttaaaaggaagatgtcagaactgaaagtagtacagagaattaggtgaacatagcagctaaacttagcaaggtaaaatgtcatactcccagaataaactgataagtcaatcatacaaatgcaaccaaattattggaaaaaatcaatataataagaatagcatcagatttctcagctgtaaccaaaaattatgagaaatattattgaaatatttgcaaagttaaaagataraggactgtatacactgtcaaacaaataaatacaagtgaaggcaaaattaaaggcatttttaaac

SEQ ID NO: 901881 - DNA, 612 bp, Homo sapiens
gattcagcctgacacagtttggaggaaattacatgagtgtgaatatgaaaaagtaaggattgggagaagggagcattttggaggcttgctaccaggggcgatatcactcagattatatgttgaccttccagtatgccaatttatttttcttaatagtgtttttagtatttattggataccgcaggataatggagatttttaacatttgtccagatagtttgtaatgaaaagcaagcagagctataaatgtatctttatctttttctttgctgctagaatatcctggaagtcaatctcaggactattttcaaataaaaatttaaaaggaagatgtcagaactgaaagtagtacagagaattaggtgaacatagcagctaaacttagcaaggtaaaatgtcatactcccagaataaactgataagtcaatcatacaaatgcaaccaaattattggaaaaaatcaatataataagaatagcatcagatttctcagctgtaaccaaaaattatgagaaatattattgaaatatttgcaaagttaaaagatagaggamtgtatacactgtcaaacaaataaatacaagtgaaggcaaaattaaaggcatttttaaac

SEQ ID NO: 901882 - DNA, 516 bp, Homo sapiens
cgtttgtaatacaatttctataaacagagtgatatataagctgttctttttacattactatactgcattgtatagtatactgcattgatcaccttacaaatagtctctataatattgtttaataaaatatgttagaagaaaacatgtatttacaagcatccattattgtattgttactattggttctcatatttataatacagtagtgtttaattatgctgtaaattagtgaacatttacagaaaaatatgttgaaatggtacatcatacaatgtaaatttagttaccttaaagtatcaatagcaccaccttggggtgttcgctatttcagaaatgctataatatgtttcaatataaattcttttctgcagacacaatgtgtcagaaacataattaaatctaaatatcatggagatgggtgacaagtacttaaatttgtaacatttgtacagaagcatactttatggcagaaaaaaagatgaaagaaaggraagaggacaataaagacaaacaaaa

SEQ ID NO: 901883 - DNA, 624 bp, Homo sapiens
atcatgtatccagtataagctaaacattatcccagatacaaagatgaataaaacaatgcttctcaccctcaaaggattaaatctagtaagtgtagacaaacaaatgaacaaagttaatgcaaaagaatatcgagggtactctgatagaagtggggggtcagtgctactttgaacttgaatgactttttgaaaaattcccttccaattaagcaaggcagtcttttctatattcctaggatccttgctacatatctagacagaatctgggggatgaatactaatatttaaattaccagaatatacataattaaatgacaaattgtgtggcacatacaaaatttctcaaggacatatataagaggagaggaataatgaggaccagagtactaagatatattatcaaatcagaggcagaacaaaatttaaagagaggaaaataatctctacataaagaaatacatatatcagatttatactgacatctgtatacagagatatgtatacacacgacaagcttaataggaaacaacatttcataacatatctgcatacacwcaaaaactttctaataatgttttgccatatcctgttttaaaagggtttttctttaaatggctttttaaa

SEQ ID NO: 901884 - DNA, 622 bp, Homo sapiens
cacctataactttgagtttcaaactagactttttattaaggtaagtaagaagaaagtctttgaaggaaccagagcttggaagattgacggtggagtttatcacagaaggagatacttgagggaagttcctgcctaactagaaggggaaagcctttccagtgctaagagggaatctgtttttctcctttgcacactctaaaattcagcattatcagtgatcatggaacaatgaagcttatgatatcagccttcatcctaactaaattcataaaagagcagtgcagaaagtacaatgtcccttgttttataactgattcactcatttaacaaggaaatgcagcacaagattaagaatgccagctctggagtcaacagcaggtgtgactggggccacaggactcagtcagattttttatttagccctttagcgcacacctaagattttctctccaatctatagagtctcaatcctctattctctttgtatatataagatccttagattagcacatagaacataagaagagatctagaaatatcagccatacaagctgagagccgaatcacatatgaactcccattcatgactgcyacaaaaagaataaaatacctaggaatacag

SEQ ID NO: 901885 - DNA, 670 bp, Homo sapiens
ttatttctgggctcccaccatctggcagagaactgagctatttttcctgcaactcttcccacataagaagagcggtgcctgctgcatgaatgatatgacattatattaaaattgaaatattaaggattcaatgcttcatttctggacacaagcaataaacaaaaacagattgatttctggatttcgatagcactgacttcccagggatcagactgtggtctttacactctcagatttgaaggcaattatgtgttttacatacagagtataaagtttaaaaacagcatcagcagtcttgcaaatttttttaaagatttttgaaatgcaacagctcagttagattaattttccttggattactttttttttgtgacaacccatcttcaaaactgtggaacataaaagtatagaattttagagttgaaacattttctaggtttatatttcacaataacatttttctataaaagctcttcattttatctaacaatctgtctacttttatctacaggtaacagaaatttccttgtaatttttttcaatattatcatctcatgaggataggagggtgagagcactatttaaaaatcaaatcatctaattttttgatttaaattagaaatactgaatattttgcaygtgaaataaaatgtacattataaaattgagt

SEQ ID NO: 901886 - DNA, 564 bp, Homo sapiens
attcagctttataatctctttcaatctattctcaaatttgcttatctttcatcacccattctaagtctacgttcaagcccttctcatgaatgtgaaattactataatacttgtgggtttggttcataatttctatctctgtattgatattagctcctcaatgcaacattgtcatcatcccttccttctcttctctgaccatacttaccttcagttctgtgaacatatttataatggctattttgaagtctgtttctttcaaatctggcatctggttgctctcacaggcagttgtgtagcctgcaatattttttccagtgtaaactccatactttcctgtttatttgcatgcctcgaaatcctttgttggaaacctgacatttcagtatactttctagcaactctgggtactgatattctttgttccaggacttggttttgttgtttatttcctaatgactggactaggcatatcatttctgtgaagtacatccccccacacctatacagtgttaaaccagtaatgttaacacacaagkaggcatctctttagagatactcacag

SEQ ID NO: 901887 - DNA, 723 bp, Homo sapiens
ctgaatgacagcacatctgtgtaacagcaggattcactgaaatttaaatctactgtttgagagctactgcttagaggacaagactcctttcaaaatattactgctcaytgacaatgcacctaatcccctgagagttttgattaagtgtatgcagatattaacattgttttcatgcctgctgacacaagatctatgctgtggctaatggatcaaggagtaattttgactttcaagtcttatcatcgaagaaagacttttcataagactgtatctgccatagagagtgaattatctgatggatctgggtaaagtaaattgaaaccttttggaaaggattcactagacaagatgccactaagaacattcaggattcatgggaggaagtcaaaatatcaacattcataggagtttgaaagttgattctaatcctcacaggtgactttgaggggttaagacttcagtggaggaagtaactgcagatatggtagaaatagcaagaatactagatctagaagggaagcctggagatgtaacttcattgctacaatctcatgataacacttttatagacaggaattgcttcttgtggataagcaaagaaagtggtttcttgtgatagtatctattcctggtaaagaggctatgaacatatttgaaatgacaacaaagggtttagattacatacatttagttgataaaacagtggcagggttgaaaagaatc

SEQ ID NO: 901888 - DNA, 672 bp, Homo sapiens
aagcttcagttttcttaaccataagttgggggtaaaaaacgttgcttactacatatggtcatcaggaggatggaatgagataatgtgtgcaaacagcttaacttacttccaggtacactcagtattacagtcagtagtagacataataatagcagcagttgtatctaaaataggcagaataaaataatattgctaatcatttaaaaatttcttttatgtatacatccaaggcagcttatcacttctttgaaaaagaaattcattttggtattctatattccatttcagagtgatgtagatattattggggactggatttttacaaagcatcttgtacttgaataaatttaatcttgataaaaaatccctgtataaagggatgtcctgtgccttggggggataacccttagctctgcctccccaaagaaggctgagcagagctgcacctgggcttctctgctgcttgatgaggatgaatcaggaggctgctttggaaagctgccggagttgggaggaaggctgaacacagcacggaatgtgamaaagacagcgctgagaagctacacagacacaggccaaacgcttttctgaagtctctctgacattcccagaacgaactttctcaaacacctgtcattgcacagatgagatcaagggcctggtgtgaactgt

SEQ ID NO: 901889 - DNA, 636 bp, Homo sapiens
ataaaataatgcatgtaaactgatgaggaagctgattctgagctgggtggtttcacatatttagtcacaaakttcatcaatgcttgtgcccagttttaagccctagcttgtttaacttcattatgccactttgtttccaaggttccttcccatatataaagggggaaaaatataaatgggatggctgaggtgagtacatcgaaagggaaaggaattagtcccactctttaagtttggccacatagttaatgaaatggtcttatcaatggagttatcctgtttaaacaccaaaaggtgcaatttcttctccatcatccccaatccccacattctctgcctcctcccttcattgctctttagccactagcaggctaggtagggtgttcctaatctgcaaccggaatgtttctggtaggagccatttctcacccactctttgtcctcttttatcacttaaaatcacggaaggctgttctgaaagcggctgggctccttgtaacattaaaaaattattaaactcagaaactaattctgttttttaatcataaatatgaaaactaggaagcaaactgagaagaatgaaagaccaaatcagcggatctgaagcaggccactctcaggaagactcctgaggaa

SEQ ID NO: 901890 - DNA, 582 bp, Homo sapiens
tccctcctcccaccatctaccctctgacaggccctagtgtgtgttgtttcccctgaccatgtgtccatgtgttctcatcatttggctcccaattataaawgagaacacccagtatttagtttcctgttcctgtgttagtttgctgaggataatggcctccagcttcatccatgttcctgcaaaggacatgatcttgttcctttttatgactgcatagtatttcgtgatgtatatgtaccacattttctttatccagtctatcattgatgggcatttaggttgattccatgccttcgttattgtgaatagtgctgcaatgaacatatcatgtatctttgtaaaagaatgactcatattcctttgggtatatacccagtaatgggactactgggtcaaatgatatttctgcctctaggtctttgaggaattgccacactgttttccacaatggttgatttattttacactcccgccaacagtgtaaaagtgttccctttcctccataaccttgccagcatctgttattttttgactttttaataatagcctttctgaagggcatgaaagaacacttaaagcata

SEQ ID NO: 901891 - DNA, 668 bp, Homo sapiens
ggctcatgtctgtaatcccagcactttgggaggccgaggcgggcagatcacctgaggttgggagtttgagaccagcctgaccaaattggagaaaccctgtctctactaaaaatacaaaattaggtggacgtggtggcacatgcctgtaatcccagatattggtaggctgaggcaggagaatcgcttgaacccaggaggcagaggttgtggtgagctgagatcgtgccattgcactctagcctgggcaacaagagcgaaactgtctcaaaaaaaaaaaaaaaagaattattaatctgaaaggcagaaatttttctatagatgtagctctacttcctagacagttgtctgggctccatgtgccccacaattagataggaatggagtcactgagaaggaagttgattttaactttatattcatgcatttatgtgctgggcagtagggttatgtgtcaacaagataggcactactcctgcccccagagaacttacttgcatcgagttgggaaaacagataagagaacagcagttacaatacagtgtggcaagaaatrtgggaagagaaaaccagggaacacagtagagaagttgaatttatgttgttggttgggaaatagtgagcttgaagtgcttctggaacatacaagaaatacttggactagaggtatc

SEQ ID NO: 901892 - DNA, 628 bp, Homo sapiens
cacaatggagtactatttagccctaaacaaagaatgagatcctatcatttgcaaaaacacggattgaactggttgtgattttattaagtgaaataaaccaggcacaaaaagrcaaacttgtcatgttctcacttatttgtgggagctaaaaattaaaataattgaacccatggagatagagcgtggaatgatggttaccagaggctgggaaggtagtgcaaggggagttggggaggaagtgggggatgattaataggtataaaatatagtttgaatgaataaatctagtatttgatagcacaacagcatgactacagtcaataataatttactgtacattgaaaaatagctaaaagagtattacggaattgtaacacaaagggtaaatgcttcagatgatggatacttcatttaccttgatgtgattattacacattgtatgcctttgtattattacatattgtatcaaaataaaccatataccccaaaaatatatacaagtactatgtacccataaaaataaaaaaaaatgttacctggggaaagtaataacctgggcaattctgtctaaaaatgaaaacagtcactatggtcacagaacagaatcatcttctctctatcattccta

SEQ ID NO: 901893 - DNA, 584 bp, Homo sapiens
aatttatatagtgcgtctccaaagaacagtgtagtaattttagattactaggggagcagtcttgccattaatctgctgagattttgactactttctttctctcttcacttgctacattattgaagtgggtcagctctatttctccataaagcaatagagaaaagcatgttttgattacaactacacttttaatttgcatgtatatgttcagatgctgcactaaggacagtatgcactactcattttatgcctacagaattaatatttcctgagagaaaaaagtgagtagctttcagaactttacagccacaaaggactttggacttcatctttagtttaattagcatcttccctacttgggctatttataatttgtgctaagcactataccaagtgtgtggcacatggattatcttattaaatctttacaataagcctaagaggaaagtgcaatgattaactytcactgatggttgagggcactgaatgttagagaggttaggtaacatgctgtagatcatatgtatggcaaacggtagagcagtgatagaaaaggtggtagtcacttcaggtctgtgcttctg

SEQ ID NO: 901894 - DNA, 589 bp, Homo sapiens
tggcaaaccacaggaaattaaatgcaaatgaaatttgcaaacatgacaaaaatgagggaaagaggaattaaggtccaagaacaaaaatgtagcatttttcatactaaccctaggaggccagcttaatcaaattttcagctcagactgataatgaccctggtggccagtttctttatagggctttgctatggcaaaagcagagagaggagcaggtgatgagggggtggggggaattagcttttcacatttttgttccaggaaattgccattttttaatgttagcaaatcttctgagtttaattacctttgctcatgtttccatgccaaacttgattaccttaagcagaggtgagtctttttataaccatctgtatatgaagactcatcgtttgaactctgaatggctaaacttcactcaggatgaccagtagatgtcaaatatgatcatcaatggatttcaatgaattctgagaattaaacatttccgttctagcagaccatgttctttgtataacaggaactacagtatttaaattkttcgaccatcaaaaaaaatccaagaggaagtgaaattatatccagtggtctt

SEQ ID NO: 901895 - DNA, 589 bp, Homo sapiens
tggcaaaccacaggaaattaaatgcaaatgaaatttgcaaacatgacaaaaatgagggaaagaggaattaaggtccaagaacaaaaatgtagcatttttcatactaaccctaggaggccagcttaatcaaattttcagctcagactgataatgaccctggtggccagtttctttatagggctttgctatggcaaaagcagagagaggagcaggtgatgagggggtggggggaattagcttttcacatttttgttccaggaaattgccattttttaatgttagcaaatcttctgagtttaattacctttgctcatgtttccatgccaaacttgattaccttaagcagaggtgagtctttttataaccatctgtatatgaagactcatcgtttgaactctgaatggctaaacttcactcaggatgaccagtagatgtcaaatatgatcatcaatggatttcaatgaattctgagaattaaacatttccgttctagcagaccatgttctttgtataacaggaactacagtatttaaatttttmgaccatcaaaaaaaatccaagaggaagtgaaattatatccagtggtctt

SEQ ID NO: 901896 - DNA, 569 bp, Homo sapiens
tgtttagaattttgtgtctaaaytaatgagagatatttgtctgctgcttcctatttttgttgctctggttttagtatcaggataatactgtcttcatcaaatgaattagaaaatgtttccctttcatctgtttttttttttttttttttggaaggggtcatgtaaaattggtgttaattatttgaatattttgaaaaattcaccagtgaaaccattcatgcctgaatgttttttaatagaattttaattattaattcaatttatttagtaggaatatttaaattatctatattatctttgctgagttttggtagtttgtggttttcaaggaatttgtccatctcttctaagttgttaaatttattaatgtaaactcatttctggtattccttaattaacatttgagggctgctagctcttttgtaatattccatcatttcattcctgatcctggtgatttcaatcttctctattttaatctttgtcagtcttcccagaagtttatcaatattattgattttctcttaaacagtttttttgtcactagtttttttctgttgtttctttgt

SEQ ID NO: 901897 - DNA, 615 bp, Homo sapiens
tgtcattatttccatttcaaataatagctmgaattcagatgaaaaaattcaagttaaagatgtgacatttcaaggtgtattagtctctaacgtaagcatgtctgaagttagtcatccagtggttttcccgacagtaattgattggcactcatcccaaaatataggcaagcatttacaactaacagagagttaatcccacccaggcactgcctccatgactaagcaagtgaaaatactaggggtttagcaataattgtttttctgggtgggaccttcctaaaacacaaattcatgtgttgccatacttttattgatagtttctatatatggtgatatacaatttttgttagctttttttcctatgggcatttgggaaaatggcaagccaactttgaagttgttagagtcattttaccattaatgctttaaaaatcacagtctaggaaaacatcactgaaactatgtgtacattgttccacttttctctttttttttgttcacccttagcccattataccattatcacttccctcaattaaggagaacaaacctttatcaaggtctatctctatggcctttaccttaagtaactaatttctttttatattccagtga

SEQ ID NO: 901898 - DNA, 564 bp, Homo sapiens
ccactaacagaaatctgttactatctgcakctggaaactccctacattttcaataaatacatacattgaggtataggcatttaatggaacgcagagtagcaatgaaaaggagctaacagaagctgtacacaacagcatgaacaaatctcacaaacatcaaattaaataaaagaagcaagtcatgaaagaatacatacacagctgggtgcagtcactcctgcctgtaatcccagcactttgggaggctgaggcaggaggatcgcttgatgccaggagttccagatcagcctgggcgatatagccagtctctgtctctaaaaaaaaatttaatttttcaaaaattagtcaggtgcagtggtgtgtgcctgtagtcccaggtacctgggagactgaggcaggaagatctcttgagcccaggagttcaaggctgtagtgagctatgattataccactgtactccaaccagagtgagatcctgtctcaaataaaaaaaaaggaaaaaggaaaaaggatatatgtagtatgattctacatatagaacattcaaaatccagcaaaattaaa

SEQ ID NO: 901899 - DNA, 586 bp, Homo sapiens
ggtagaaagaagagggtggttccccagggcaaagccccaccttcaagcctggaaacccagggccctaaatgagaacaggcattcctgtttctgtgcccaaaaagttgccttttggccaaccacacccccctatcctgtacccatataaaccccagacccaggatccagaaagagaggaggagatgaagagagagcagaagaacagcagaacagcactgcagagagaagagaaggaacgtttgaatgctgagaggagtttggctggggaccattagagtgaagattggctactggacagcccaactccaggggaagatcatcttcgcaccccattccccttccagctcctcatccatccagctgaaagccacctccaccactcaataaaacccccacattcataattcaagtccgtgcatgaccggattcttcctggacgttggacaaagacctgggtaccaagagagcactgaggtgattaacacataagccatctgtggatgacaaagctgaaagagcacagtgtagcacacacccacttggacttcargagctgcagacacccatccctagacattactgtgga

SEQ ID NO: 901900 - DNA, 661 bp, Homo sapiens
catgcaacccttctgagacagggactcttgccagtgggcagagccctgaatacccctgtcttttcaaccagaacccctctactgctttatgcactgagatcataggctaggtttatgtcaaaaaaagtgacattactaaaagaaaatatgaaaacaaatagacaaaatgattgctactggttcttcaagtaccaataggtcttagtttgtaattctaattccctttctgaacttccatggtttccagcatcctcttctaacctaaaacttcctttcctcagtgaaaagcaaagataaaaaggttctattggctttggttgctttttctattctttacgttttaagaatgacaataatattgctcgcattttttttactgcaaatttagagcatttcaatagtaatcacagcagcctgtgagataggtaatattattatccccattttactgatgaggaaacaaggctcagaaagattaaatcccttttcataaagctgcgtggctgaaaagtggtagaggagggtccattcaactscagaacttacattttaaccatgtaggatatggccccagctctttaaccttccctgtatccatgcactttcatgtagctttgcattctcccactagagctgaagtttacttgcctgactttagact

SEQ ID NO: 901901 - DNA, 620 bp, Homo sapiens
gaacaggcagggaccttcccgaggsgctcctgccactgctcctcggtacaggttagtgtatcatcctcataaagagctggtcgagttcggagttggcgggaggggtgcagtgggtgggaagtgcgcacggggcctttgtatcagagctctgtggggtggactgcagggcctcatggaagggctggccaggagtcctgcaagggcctgggtggcagaggcctcgggtggatgggagtgtaggtggaaagagttcccagagcaggcagcgccagggagcaaggtccagggcccttgctgagttgatgggaatgacggggtaaacagaggccgagagccccccaagggccgggtcttctggaaacactgaggctgtggtgagacacagagaaccagccctgctgggttcatgagagccacagccttggttgggcacctcctgggtatagggcccatcccctggctggaggggggattgcacctcagcctggctgtgtggctcaaagcctagcagggagatggcacctcgtgcatgacagtggcagaggggtggctgcactcagtgaggctttctgggggtggcacgagctgagtgctggaggatgagcaattgttggccagaa

SEQ ID NO: 901902 - DNA, 611 bp, Homo sapiens
gtgtttttactattggatacagggcattattttttttaatgtttgttcccttatcatgaactaccatctaaccattgtttaagcagtaagaagaacaataccataaacaagaaaactagagatcaagaaaaattctgaaagtaatgtgaagagaaaacaagtcttggagctctcaaatcattaagctaaagggaaaagtcaagctgggaactgcttagggctaacatgcctctcattctactcaaagtcacccctctgctcactaagataaattcacatctgtttgcttcctttggaaaggctaattagaaactcaaaagaatgcaaccatttgtctcttctctacctatgacttggaagtcccatccctgcttcaagtcttccagcttttgcttccagttgtcccgcctttccagaccaaatcaaggttttttttacatatgttgattgatgtctcatgtctccctaaaatgtataaaaccaaactgtgctctgatcaccttcagcacaagtcgtcaggacctcctgaggaggctgtgtcacgggtgcgtgtcctcaaccctggcaaggtaagctttytaaattacctgagacctgtctcagatattcgg

SEQ ID NO: 901903 - DNA, 642 bp, Homo sapiens
tgctgagtttcccaaaaaaaagtgccacctaaaattaactaatattataccaatccattgactgtagttatatttagcctcaggacttggagataaattttgactgattgtcacaaggataaaggcaacataactaatagccaccatttatttggcaactatgatatgccagatattcattaagcactgtgttacattatcaccaatcttcacaataaagattaacaacttttacagtattgatttttcccttgctgtcaaataaggcagccactagccttgtaagaagctctttttggagactgacattagcagtgatatgctcatggtctggcaaacatataggaggatgctattcagagttttcaaactttgaagaacttatcttgcagataaactacttcaagtgtgcagtgacatatctccagagatgtttgttgcagagatgtttgtaaaagcaaaagattggaaacaaacatccacaatgtccatcaagaggggttggttaaagggtacattccattaatggaatcccagcaagtcactcaaaagactcaaaagaatgaggcagatctgtgggtactggtatgtaaaaawgtccaagatataggatctgtagagcacagtcacttttttataaaa

SEQ ID NO: 901904 - DNA, 569 bp, Homo sapiens
ttaagagggccagttctgagcagatggcccaggcagaacaatgctggaggcaggagctaattgaggctgatgaattaacagacaggctttaagtctacatgtcagaaactaaagatacttccaagtaatgacagtggagactctgctgaaaatggagccatgaaactgatttcccccaggaagtcaagttgcaccagagaaacttcgtgtctcattttgcttttgtcaacaagatgaagcccaggttcatgagtatctccctactcaatagggcatgttacttccaggcctgagtagaccaagaatctaggtcttctgatttactgagtcaagcatgctgttaacttacctgaacacctggtgctttaaaatgaaaacacacacacacacacacacacacacaccagtcatatcttaggtacctaggcacatatcagatgattgaatgaaattagataaattaaaataataaaatwaaattaaaaagtacaagaccacaagtcttctttttcaaatctacttgttcacatttttaaaatttagtttttgcgctgaaaaactatttttac

SEQ ID NO: 901905 - DNA, 558 bp, Homo sapiens
gaaagtcaggaggagtgaagcaagactgatattcctttgcagacccagagtaaatgacaaatgacattttccctttgtgatctttgggatttttgttgacttatttggaggcttttgttggatcccaagaaatggcctgtggctgaggcctattctaccgatttccacgctccatctgtggaatccatcagcagggcatttaccctcattcagggttctgacacctgcctggcagggcgcaggagacacaaagaaagctggagtggatgagaaaggggaggttggggtgggtttttttttcagagagagaaggaggggggaggttgaaatggatacacagtaggggttaatccaagtcagttgagagacttcagcacctggaagcttctcttccacattaattcacaagctaagaagtaatcagcgatgttatttttaatttattttaaaattgtatatatgttgagaaaagaaaacagatatgcaggtggaaaaaaaacagagatttaaaataaaattttaacgtgtasctagaactgtacattgtgtaactatcaa

SEQ ID NO: 901906 - DNA, 601 bp, Homo sapiens
gcaacagatgtgggaatgcagatatgctgyccagactcttaaatcacctggttgctagagatcataacaacattctttgttaaaaacatggcctctctttttagcagggctacgccaggtgagcagtttcaataaaggatgagggagcaggatagaatgagagttgaaaacagtactggctaatgctaggacttccaatttagaaactttgttcatttatggtaatctaggtcaaaaagcatgaatttctggagctggggccaagttgggggcccaggtggcagtgagtgatgggagaaaatgtgcagtcacctcatgtcagtgcccactggggaggggtctgggaagaaggatgggtgcctggtgggtacttttccaccttttatttccagattttgtttttaatctaaacttacaggtttgtattatacaaggacagccaataaaggaagactataacggtgaaaaaacaaaacaaaacaaaacaaaaaaccatgcatttcctcttacccaagcagccacgtaggtacagaataaagctgtgtcaaaatttttggcaccatggaaataatagcagataacatcagtgagaatgtttttt

SEQ ID NO: 901907 - DNA, 601 bp, Homo sapiens
gcaacagatgtgggaatgcagatatgctgcccagactcttaaatcacctggttgctagagatcataacaacattctttgttaaaaacatggcctctctttttagcagggctacgccaggtgagcagtttcaataaaggatgagggagcaggatagaatgagagttgaaaacagtactggctaatgctaggacttccaatttagaaactttgttcatttatggtaatctaggtcaaaaagcatgaatttctggagctggggccaagttgggggcccaggtggcagtgagtgatgggagaaaatgtgcagtcacctcatgtcagtgcccactggggaggggtctgggaagaaggatgggtgcctggtgggtacttttccaccttttatttccagattttgtttttaatctaaacttacaggtttgtattatacaaggacagccaataaaggaagactataacggtgaaaaarcaaaacaaaacaaaacaaaaaaccatgcatttcctcttacccaagcagccacgtaggtacagaataaagctgtgtcaaaatttttggcaccatggaaataatagcagataacatcagtgagaatgtttttt

SEQ ID NO: 901908 - DNA, 594 bp, Homo sapiens
aaagctcctcaatataagctcacaattttctgctagtacagatgattccaagagaagaaaatggttctactgtctctttgtctggtgttctctctcatatattttttgttgtggcataaataactctaaagatgtttccttcacacttggagtgtatggaaaggactttaggatttacaagatttacaaaggcctccaagctgggacaagtttgttttgcacttcaccagttatcctggtataactatttttaatggcactgtctttcagttctcaaagagttctggcttgaacattaaattatgtgctaccttcacctataacccatacccttagcctgcctagacatccataaggtatgagtaatatggagttatcttcctatcagtgcaaaatttcacttaggttattcttcatcactcgcactagatgaaatacctagcaagtatttcttttcaaaagaaagccatattttacttgcttcactgattgcacagtttaatgatgaaataaactccaaagtgctaagaagaatccstagcatatagtagagaacagctaaatttgaagtatatgagactattgattgttgtt

SEQ ID NO: 901909 - DNA, 656 bp, Homo sapiens
gggacagagatggagaaaatggagttcctcacagctcattctgtggtatagaaagcggaggtctgattacttacagaaattagaagcttagacyatttgtatgtataaagaatgtctaagcatcatattagattttaccagagctatccatttaaaaagccaaaaagggccaggtgcggtggctcacgcctgtaatcctagcactttgggaggctgaggtgggcggatcacctgaagtgaggagaccagcctggacaacatggcgaaaccctgtcactactcaaaaataaaaaaaacttagctggtaatggtggcacatgcctgtaatcccagctactcgggaggctaaggcaggagaatcgcttgaactcaggaagcagagattgtagtgaagcgagatcacgccactgcactccaggatgggcaacagagtgagactctgtctcaagaaataaataaataaataaataacaaaaatataggcaatataaaaattgtcgttctccctgattcctaaactatttatctttgtcatggtaggataatcaacatttctattatctataaatggttgcagatggagaaaaaaatatatccaaaatcttcaaactatttaacaaatgctgagtaattaagaattagccacatctttcttt

SEQ ID NO: 901910 - DNA, 595 bp, Homo sapiens
aagtgtccatgtggccagatccatgtgctcactcaagttctgagacatctggatgacgcctgcaagattttggtgctaagtgcccatttattcatcataaaatcaaatttaccatgttataaactgaaggcagggctctcctttatggccagatctaagacaatgaattcaaagaatgaacttttaccttcccaggtgtaggtttgagacccggcctaggaaacgggtgtgccacaccaaggtgaattaaaaactgccagccagctaaaagttgctcttcctaaaaaaaaaggaaccaagatgaaattctaggctcagagatgaagaactggaggctttgaaacaaaggggtaaaactggttccagttgcttcctgtaacatgtcttctttcccttgtggaaaataatgatttccaaacacaaccgtcttttaaatccaagaacttaactgagtatttgtttagctgttgtctgaaaagggtttggctttcacacatcacttacacccrtggattcaggagagactaaacagcctattcaaatatcttccaagttatgaagaaatcgatttcaacttaatgactttcaacccgtc

SEQ ID NO: 901911 - DNA, 590 bp, Homo sapiens
ctatgtgtcattttaaggatataccattattattattattattttttttggagagacagggactggctatgttgcccaggctggtctcaaactcctgcactcaagctatcctccagcctcagactccyaaagtgctgggattacaggcatgagccaccacaccaggccaatagaccatgatttctttaactgttctctttatgtaggaattcaaagttgtttcaaatttttctattataaataattttcaatgaatatcttcgtgtgtaaattttccttgtgttatttcttagaggagatttccagaaaggaaatattttagtttaagaatatcttttaaagatttgtattataatttccaaaatgcttttcataaaatttataccaaactaaattccaaccaactaggtatgagaataactattacaagacccttttgctagctctgaaagtgtcatttaaaaaaaaaatctagataattgtatcagagacattttattatagttttatttcctttttcattgttattaatgaccttgaagttgtggcccatttgtgaaactctactactttttgtttggtacactgtt

SEQ ID NO: 901912 - DNA, 670 bp, Homo sapiens
gtaaatctgcaggaaaaggcaaagaatgcattgtttcccagacttatttcatcccagagctttttgtctagacagcatccagaatgaacaggatgccacggagcatactttgggaaattctgcattatgkaatgtcttagtctgttcaagcttctccgaagtgtatttctcacagttctgaaggctgggaagttcaagatcaaggtgccagccatgtctgacaagggtctgcttcctcacagatggtgcattctagctgtgtcctcacatggtgaaaacggcaagacagcaatctagaacctcttcaataaggacactaatcccatttgtgaaaggtctacctcatgacctgatcacctctcaaagtccccaccttctaatccatcaccttagtgattaggatttaacatacacgtttttggagggatgtgaacattcagatcataggaggaaatgcagatagggaagaagctctcacagaaagccatttactccctccctcctttctggggactgtccttactcagctgaaactattttccacttagtaatattgtagtcctttaaaaaaggagaacaccagaagatactagatgaagtcactgaagtcacagagctgtttagttgcaaaactaagagtagaaccctattcctggactcttttcttttc

SEQ ID NO: 901913 - DNA, 678 bp, Homo sapiens
aggtaaacttcacttagcatcattgtttcgatgaaagctaccttttactcaacttctaatatgtgtcaggaccacctaggtactttatggtatcgtctcatttaatccacacaaacgtttttaaaggtgaatatgttacctgttttatagatggtaagactcaaaatggtcattgacttctctaaagttgcatagggtggaaagtgggagagctgggacttagcttgttctgtttgtctctgttggctcctttcccacaactgttacgtgaatatggacaagaaatagacctatttgcttacgatgtgtacctctgatgcctacacagagcctgcttcctcagaggtcaatttgtggaaaaatgaatgtggcccacagcttctaaatatatttttatataccttttgctcttttagtttctttgagtcatttttatgtctcaatttgttctcccagatattaatgttttgtaatgaatttagacttcttcttggaacatgatttattccttcttgatattggcaaatcttaagactttggcgtgatttaatttagtgatatatcttaaccaaacaaccataaatctcattttcacattaaagttaaaagacgtatartactatattttgttaaaccacatgatttgtcataatagttgtaattgtatcatgttttcaa

SEQ ID NO: 901914 - DNA, 637 bp, Homo sapiens
aaccatcacatcttcagaaacttgctatgatatggaaagccaactcatagaaaaaaatcatctgacaaagtatttttatttgcaattcgttcaaatttcttagtatgaacatgacaagcctctcatatatgtgtaatttgaaggcttgattttttgatatgaatacagctatattcaagtcatatttaatatttaagataaagcagaaaaagagtgggctatatttgataataaaagtagatatctagagagttaggaagcaaatcagaagtgttagtattcccaaattccgagtgaatttagtatttcaatcaagaagaaatgaattgcctatggtgatacatgatgaacaaggactgtaattaccatgaggtaagtcagttggtaataagcatttcatcatgtgtgctcttggtgatagaaatcagattacaatgtttacagaataaataagacattcaaaactgaagatgaaaaaaggaagtggttacgtagaattctgtctcatgtctgcccaaggtgggatgcagagtgagtaacctgatagagcaaaacwatgagcttagacagctgtttcttaatgcttatttatatttgataaaggaaggatgttgagaggaaaatattaaacatgggt

SEQ ID NO: 901915 - DNA, 697 bp, Homo sapiens
gtttggagctttgtgttgctccaccaggaagaaaaaaaaaaaaatatggcttgctgaagtgcttactgaaggcaaaggaaatacagaatgggtagtagaagaaggtagttattaataccaactatgaccacatgaccagttgcagaaaagagcactgtaattgtcatgagtattttctcctttttttattagaaacatgtttgtgtatgtatacacttgctctaagaaaatatctttattttattcctttatcatgtgacataggatttactgacttcatatcagcatttaagtattgttaactttatgtaatagcatttgggttggggattggtgcgtttccagtagtacaaaggatagttgtattatgttaggtgtaattatgacctcattgttgtctttatttgaggattacatatgatctaaggagatgtgtatgggttcaagttgacaagaggtggacttatggtggttaatactgagtgtcaacttcatcggattcaaaggtgcaagtattgatcctgggtgtgtctgtgagggtgttgccttaggagattaacatttgagtcagtggactgggaaaggcagacccacccttaatctgggtaggcaccatctaatcagctgctagcacagctagaatataaagcaggcagaaaaatgcraaagggctaacttggcttagcgtctcagtcta

SEQ ID NO: 901916 - DNA, 631 bp, Homo sapiens
ttttaagtcactctgattgagtcttaaaaagaaaaaatataactcattctttctccactaaatcaatggctgttttattgtatttttatatttttaattgatgcaaatatttgtacatatttatggggtataggtgatattttgttacatgcatggaatgtgtaatgatcaagtcagggttggggcgtccatcaccttgagtatcatttctaagtgttgggaacatttccagtcctcttttagctgttttgaaacatacagtacattgttgttaactatagtcaccctactctgctgtcgaacattagaacttactccttttatctaactgcatgtttgtacccattaaacaacttctcttaacccctcttcccaatcgctaccctaagtcaaatactcttcccagcctctggtgtctgtccttctactctccacttctgtgagatcaactttttttttttttagctcccaaatatgagtgagaacataggatatttgtctttctgtgcctggcttattttgcttaatagaatgacctccagtttcattcatgttgctacaaatgatatgatttcatagktttttatgactaaatagtattccattgtttatatatataccacattttctt

SEQ ID NO: 901917 - DNA, 661 bp, Homo sapiens
ttaaaaaaataaataaaatgcacagaatgagaagcatttccacgagtaatttcacacatgctgctaagtactgcagagtattgccaagcctagcctttaatctctatgggaagccatacagctgtaaactcttatttgctgtcacatgtcttttgcaaggttattagaaaagataggagaccagaagtccttccatgttaccttactttattttttgaccaggttttattacattatccctttatatctgttgatagctcaacatgtgcatatttcaccagcctcaggcaaaattatgaagtaggattcatgaggctttggtgttcttcccactctgccttctgggtcctcgcctgcattctctccccggaagtttctcactttctgaacccagcccctgctctctgtccaatctacttattgacaattttaagggtgtattttcggccaaatgcagaccaacgtggtccattcatggatcaccgtgttttgtctcccaggtaagaatctcatgtgataaaacttgggcttgctgaagtggtctatctcttggagtggggatgcatacttctagatcttcagcaggctctaaatttgcttcagcctgtcttcttgcaagactcaayagatgtgctttggagtattactgaattcctttgcc

SEQ ID NO: 901918 - DNA, 495 bp, Homo sapiens
tattactttatattaaacatcaattattacctttatgatgttcatgcatcataaccatatcagacttcacrggaattggaatgttggcctctggtggtatggttctgaacatatctggagctacattctgggtacaggtcatgaaagaaactgcatgcttggcttccatgtaatacataatgtataagttgcacatttcatcactagacgtgccactgcaggcaaaaaaaagatataacaaatcaactattcacataaaacacatgcttaatgcaagaaaaatgaagcccttagatctgccagcaatggattcaaaggtagaaatattgtgcatttattttatagctttcattaaaacccatcacagttttcaacatcaaaagcacattgtcaaaggcatatttccacttaacaatggagtgtcagtttgcaggcacaccatgaacactactaaataccactgatgaaaatggcattttagtagatgagggaata

SEQ ID NO: 901919 - DNA, 606 bp, Homo sapiens
actcctgacctgaagtgatccaaccacctcagcctccaaaagtggtaggattataggcgtgagccactgtgcctagccaaggcaaggatttttatcccttctgtttgctgacacctccctagtggcctgcagagagcctgataccacctctccgggccatctgaacccatcagggctcatctgtcagctgggacatctcttctttttgcccaggtagcatccactcccctttcttctgctaactgtatcactcttttagttttggggtgacccaggcctggataatcagtgcatttcatcccccagataacacaactggctcagggactgacatgtgatccaagccaggccaataagatgggattctgaaacttctgtgggaatgcttggagaaagtagctctttccatgccctgggaccactagcaataaagctagcagaagctgaggacagcttgtgaagctcgagaatgcacccaaccaagggcaaggtctttttttttctcttttcttttttttttttggagacggagtctcgccctgtygcccaggctggagtgcagtggcgtgatcttggcccactgcaatctccacctcctgggttcaa

SEQ ID NO: 901920 - DNA, 671 bp, Homo sapiens
tctgttcactctgatgatagttttgttttgtttttgctgtgcagaaactctttagtttaattagatctcgtttgaaatgataaaatgccaaaagcaattgcaacaaaagcaacattttagtcaagaaatctttgcctgtgcctatgtccttaatggcatgtagcctaggttgtcttccagactttttatagttttgggttttacatttaagtctctaatccatcttaagttttgtatgtgtgaggaaggggtccaatttcaattttctgcatatggctagccagttctcccagcaccatttgttaaatagagaatcctttccccattgcttgtttttgtcaggtttgtcaaagatcagatggttgtaggtgtgtggtcttatttctgagttctctattctgttcctttggtctatgtgtctgtttttgtacaagtaccatgctattttggttattgtagccttgtagtatagtttaaagttgggtagtatgatgcctccagctttgttctttttgcttaggattgtcttggctatatgaattttttgttgttgctgttccacatgaattttaaaatagtttcttctamttctatgaagaatatcaagtttaataagaatagcattgaatctataaattactttgagcagtatgggcattttcacaatattg

SEQ ID NO: 901921 - DNA, 667 bp, Homo sapiens
gtttctacccttcatttagtcaaaaagcagtaagtataaaccaaaagtagagggttaagttaaaattctgattctacctcaaagcagkatcaatactgaacagtggcatccatgtctagtttgcaaatcatttggccttcgtagccaaggatgacaaagtacttgacctggcacttgaatttatcatttaagctagtacttctagagatgagtaaatgaaaaatataccttagattgttgtaataattatcattaacatttttgaatacttcaatgtgccaggcacttgtttgaacactttatatcattatcttatttaatctttattctaactgtaggaagtagatactcttattttattccagtttataaattaagatattgaagtctagaaaaattaagggacatgcctaaaatcacacatctgctaaggtaaaagtggaatagaaactcagagtcagattccaaaagtagatctctgaacactaggttttggcctttggagaaggacaaccatttggtgcctgtggaagctagtccaggttaagaaatgcaaaaacatttagttaccctgttaaccaacattcgctctcactgcaaggcttgtgataactacacataattaaccgagctcctgttcaagccaaaagaaaagtacaataagaaa

SEQ ID NO: 901922 - DNA, 610 bp, Homo sapiens
gggcaatcaggcaagagaaagaaatagagtgtattcaaataagcacagaggaagttaaactgtctctgtttacagatttcatgattctatatstggaaaaccccatcatctcaatccaaaaacttcttaaactgataagcaacttcagcaatctgtggatacaaaatcaatgtgcaaaaatcacaagcatttctatacatcaacagtagacaagcagacagcaaactcatgaatgaactcccatttacaattgctacaaagagaagaaaataccgaggaatacagctaacaagggaaatgaaagacctcttcaagaagaactaaaaccactgttgaaggaaatcagagaggacacaaacaaatggaaaacattccatgctcatggataggaagagtcaatatcatgaaaatggccatactgctcaaagttatttatagattctatgctattcccattaaattatcattgacatttttcacaaaattagaaaaaaaaaactacctttaaattcatatggagccaagaaagagcccatatagccaagacaattctaagctaaaagaataaagctggaggcatcacactacctgacctcaaactatactgcaa

SEQ ID NO: 901923 - DNA, 606 bp, Homo sapiens
ggggcattgtcatcctctgcaagtttggaggttagggctgamgtttcaggtactccactcgacaaccagaattcaaagatggttaagattgtgtattgaaaaatagtaccaggttaacagtcattgatataaagtctctaaaattctaaataaaacacccctaaaaacacagggggaaaaatagaagaaaatttgcaacactactgtaattaagagcaacagtcctactgcagtcgggatgtccacttgttaactaggtctatggaactgaactgacagacacattgatggttcctgctgcatagtttctatcttgaaagacaacaaggagatcttttgccaattgtatactgcctatttctggaattgaacaggcaagatctatagttaatacaacctagaaaaattgttggttatctttctactgcaaagaaaatatgttctacaagattattagaacacattcttctcttctctagcaagaatatctacctctccaccaaacccaagattttcttacacatgctatcctcatgtaaggaagagacagaaagattcttagacataggtgagaacagaggtgagtaagtaaatagtatacatacc

SEQ ID NO: 901924 - DNA, 606 bp, Homo sapiens
ggggcattgtcatcctctgcaagtttggaggttagggctgacgtttcaggtactccactmgacaaccagaattcaaagatggttaagattgtgtattgaaaaatagtaccaggttaacagtcattgatataaagtctctaaaattctaaataaaacacccctaaaaacacagggggaaaaatagaagaaaatttgcaacactactgtaattaagagcaacagtcctactgcagtcgggatgtccacttgttaactaggtctatggaactgaactgacagacacattgatggttcctgctgcatagtttctatcttgaaagacaacaaggagatcttttgccaattgtatactgcctatttctggaattgaacaggcaagatctatagttaatacaacctagaaaaattgttggttatctttctactgcaaagaaaatatgttctacaagattattagaacacattcttctcttctctagcaagaatatctacctctccaccaaacccaagattttcttacacatgctatcctcatgtaaggaagagacagaaagattcttagacataggtgagaacagaggtgagtaagtaaatagtatacatacc

SEQ ID NO: 901925 - DNA, 699 bp, Homo sapiens
ttttctgaaaggcactagttttctaatttcttttatgtwttactttacttatttatttattcattcaacagacatttattaagaactgcatagtgctaagccctgggttagattcttggaagtaggtatggaggtggtagatagtacacaaagatgtgtaagactaggtgtctgccctccaggagtgtacagtctaagattacgtagaattcgtataagcaattaaacagatatcacaggagcaaatggtaggtgcaattaagtgctgcaaggaaagattggaggaatctaggagggcataggtcagatcttggtggatgggcagaatgtcactttatgaagattctgtagaagcaggacatcccaggaggagggaattttctttatatgaactcttattcagtttagtctgattcaatcatcatttattgagtgactgctaagattagctacctgggactcagaaataaaaatgagcttccagattgaaagataccctaaatgtctggcacagaggatgaaaatagacctgtgctgaggctcatcattgtgaaatttcagaatgttaggggtgcattttttaatttttcaaaagccttcagaaagaaaatacagaagatagtcatgaacttctcaacaaaaaatttgtcagcattaagacattggagcaatgtttgcaattattcagggaaaattata

SEQ ID NO: 901926 - DNA, 639 bp, Homo sapiens
aaagattgcaattaaaacagccattagataccactacacacccattagaatagctaaaataaaaaaactgacaataccaaatgctggtgaggatgtggaacaatatgaactctcattcattgctagtggaatgcaaaatggtaaagctactttggaaggcagtttgacagtttcttacaaaactaaaaatagttttgtctttttttttttttttgagactaagtcttgctgtcgcccaggctggagtgcagtggcgcgatctcggctcactgcaggctccgccccccggggttcacgccattcttctgcctcagcctcctgagtagttgggactacaggcacccgccacctcgcccggctaattttttgtatttttagtagagacggggtttcactgtgttagccaggatggtctcgatctcctgacctcgtgatccacccgcctcagcctcccaaagtgctgggattacaggcgtgagccaccgcgtccggcctccaaaaatagttttgtcttaacatatgatcccgcaattgcactgctaggtatttagccaattgaatytaaaagctgtctacacaaaaacacgcacatgaatcttcatagccactttactaataattgccaaaaactggaagcaa

SEQ ID NO: 901927 - DNA, 666 bp, Homo sapiens
ttggatttggggtaaatagaagaagatactcagaaaaataagagactgggatatatgcatgagagttayccctggggactatataatgcacatttaatgcagaccaacagccttcaggtcgaagacctagggaaaaaagtggtgaaaacaagataacactacaaaaatttgctgggcattactcctccaggcctccctgcctggtattcactgactgacctgaaagtctcaggtttggggtttcttctactatccatggctctgctccttgctctagcttgaagatcatctcaggtttggtaatgtaatgccctggtaatgagaaacaatggaagactttgtcaaaccactaagtcaaatccttttcagaatgacgacagctgggcttcagggactgtgcaatgaaggagccaatttgaacatttcattagagtagtgacacatttttcatcaactggaagcttacaagtaaatattattataccttaaaagggttcctatatttaccagcaacaaaatacaatcctgggagttactggcaagtttcactcacccaatgataccaggctgctgtaggtctccagcatcacgtccctgtacagggtcctctgagcatcatccaggtcctgccactcctcccaggtgaagtgcacagctacctcctca

SEQ ID NO: 901928 - DNA, 666 bp, Homo sapiens
ttggatttggggtaaatagaagaagatactcagaaaaataagagactgggatatatgcatgagagttacccctggggactatataatgcacatttaatgcagaccaacagccttcaggtcgaagacctagggaaaaaagtggtgaaaacaagataacactacaaaaatttgctgggcattactcctccaggcctccctgcctggtattcactgactgacctgaaagtctcaggtttggggtttcttctactatccatggctctgctccttgctctagcttgaagatcatctcaggtttggtaatgtaatgccctggtaatgagaaacaatggaagactttgtcaaaccactaagtcaaatccttttcagaatgacgacagctgggcttcagggactgtgcaatgaaggagccaatttgaacatttcattagagtagtgacacatttttcatcaactggaagcttacaagtaaatattattataccttaaaagggttcctatatttaccagcaacaaaatacaatcctgggagttactggcaagtttcactyacccaatgataccaggctgctgtaggtctccagcatcacgtccctgtacagggtcctctgagcatcatccaggtcctgccactcctcccaggtgaagtgcacagctacctcctca

SEQ ID NO: 901929 - DNA, 688 bp, Homo sapiens
accactgcccccaggattgcagagacagagaagtgaatataggacttaatagcttacaggaaaatggactcactactgaaaccaactttggaacccgtgctggagtagaaaaactcaaaccgtaactggtgaacggctggaggatccgcgtggacaactctaagtgttaaaaactacaaagagatagagttattgtcggggagggggcacaatactgtaaaattgtctcatggagcttcaccaggctcctgtgacaaacacctgacaaaactcccctcctgcttcaacctttcggaaggaaaaaggaaaaccattttgaaatatgtcagagcacccatttcttaacaaggcttgtccacaggagaaactacttaacttcagcctaatctgctctagtataatcggagactaaataacctaggggaagggaattatccccttccactgcagcccattctaatcatgttccgcccaaggtggaaaattaattaaacagaggaacacttctgaggttcacagtatagacccaatcatagcattccagaacacggctgccggggtctgygtgtttgtccctcacatatggtaccaaaacactgctcctgaggtctgaatgtttctccctcacatagaattccagaacactgctacgagggtctgaatgtttgtccctcacaacactgctgct

SEQ ID NO: 901930 - DNA, 671 bp, Homo sapiens
ttgctattaaaataagcaaaagttaagtttgaggacaggtaaaatcaaaatgcacatgctctctggaacagaaagtccttaatgaagatagctttgcttgaatgagccgaattacaatgygaatgctaaggctcattgtcttggctgtacagttaccacagtttcaatgaaggggtggcctgcccctccacacctgtgggtgtttctcatcaggtggaatgagagactgagaaaagaaagagacacagagacaaagtatagagaaagaaaagtgagcccaggggactggcgctcagcatacagaggaccaacgctggcgctggtctgagttccctcagtatttattgatcactatttctaccatctttgagagggggatgtggcaggacaatagggtaatagtggggagagggtcagcaggaaaacatgtgaacaaatgtctctgtgtcataaacaaggttagaaaagttgctgtgccttgatgtgcatgtatacaaacatctccatccattaaaaacagtattgccaccagcatgtctcaactccagccctaaggcagttttctcctatctcagtaaatagaacatacaatcgggttttacagcgagatattccattgcccaaggatgagcaggagacagatgccttcctcttatctcaactgcaaatag

SEQ ID NO: 901931 - DNA, 602 bp, Homo sapiens
gatttaatgatatgtggcaataataaaataccttagatgcttccrgattttgaaaattaaaacagaacagcagtggatttgaggtttctgcttaggtttttagcaattgctatctctaataactgcttggaatggatgaaacattgattgaaaaaggaatgaggagttggtagaggtcaactaaacatttgaaaaaaagtttgacctgatttagggcataagtaaagcataatatgttataacccataatatttaaatgcatgcaattaatatatatggtgataactgcatgaacattttgaaggactcttgaggggagaatacccaggaagaatgaaaataattgagtaattctctgaaacatcccaggattatttaaaaaggtgagggggataacacagcagtagttgcttaatgcaaaaatcaaactgacttaactaattgtttagtaaatgttgatcagaatgagacttttattcttaatggttaattagtacctaattaagtcagttaggaagatctattgaccctagaactcactacagcctttgtgtaaccccttgcctgctcctagggagtatacagcatttgccatgtggaca

SEQ ID NO: 901932 - DNA, 586 bp, Homo sapiens
gtttgcacattcattgttcagactttrtagcctgtttgatttttgagctatctaataatttcactaatttcagactcttcctagaccaatgatgtgtatgtcttcattagcacagatcttagtacttgtccttatagaaagtcatgcgcttagttactttgaggcaacagcttggtacaggcaaatacattttaaaggtaaaattattcttcattttcaacattgttttggtatttaagtactatgcattctcatatacatttaaggtcagtttttaattttttttaaaagccagttgggatattggttagaattgcagtagatctatgtggagacaattgatatcttaataatattgatctttccaatccacaaacatggtatatctctccacttgtttaggttttatttctctcttaatgtttatagtttttagttagaaaccccatatgccttttgtatatttttatgctaatacagaaatattttgatgttaccttttgttttgtgaagtggtatataaatgtgatttttttctctgtatttactcatacactgtgtcattgctaaattcacttattagttc

SEQ ID NO: 901933 - DNA, 616 bp, Homo sapiens
attgacagtgcaggagtttcgtatgacacgctcttttgatataaaatgctattctgcatatagaacttttgtttacaaatgtacttactcatttattattttatttgatccacacatccactctatgggtaaacacggcaactctgggcatcccattttgtaatggggatgctgaaacacagagctaatgagagggccaggactagggtaagcaaatgaggagggtcattgtacgtgcaaagtgggattctgtcttcctttaaaatgatgatattttgttcatcgcagaatttttgcattaactttgattttttaaatatattgcactaaaatattatttatcttgattattgaatcttttgtactcaaggctagtgaattatttgcttcatcctaatccctgagtctcaggccctgcaaggtgaatggattagcttgagtcatataaagtatccatttattgcatatgaaaaacagataaatatctgtcattccatatgattcaacytaatggatcctcctaggatggagtcaggaggccacactgcacatgagtgcttcaattataccactcggtggtcctaagcctggtgcacattagagctctttctgaaat

SEQ ID NO: 901934 - DNA, 616 bp, Homo sapiens
attgacagtgcaggagtttcgtatgacacgctcttttgatataaaatgctattctgcatatagaacttttgtttacaaatgtacttactcatttattattttatttgatccacacatccactctatgggtaaacacggcaactctgggcatcccattttgtaatggggatgctgaaacacagagctaatgagagggccaggactagggtaagcaaatgaggagggtcattgtacgtgcaaagtgggattctgtcttcctttaaaatgatgatattttgttcatcgcagaatttttgcattaactttgattttttaaatatattgcactaaaatattatttatcttgattattgaatcttttgtactcaaggctagtgaattatttgcttcatcctaatccctgagtctcaggccctgcaaggtgaatggattagcttgagtcatataaagtatccatttattgcatatgaaaaacagataaatatctgtcattccatatgattcaacctaatggatcctcytaggatggagtcaggaggccacactgcacatgagtgcttcaattataccactcggtggtcctaagcctggtgcacattagagctctttctgaaat

SEQ ID NO: 901935 - DNA, 594 bp, Homo sapiens
ataaggactcaagggtggcagaatgtctgcatgaaaagactggtgrtgttgaaatcagacaaacttggactcctttctctgggcacgagactaataatcaacttgtttagcctcttggagtcttgattttcctcatctataaaggagaaatacttatactttctaaacatttctgtgagaattaaatgtgtgatttttatctgtggtgggtttaaaacacaactgcaaattctgtgtcacttctttcattgagaggtggggtctatgtatcttctccttgaaactggacaaattgtgtctgcttggagcaaaagagtatggcagaaatactctgtgctccaagactaggtcataaaaggccagacagagcttttattcttgaaactctgagctaccatgtgagaagcctgactaccccgagactatcatgctggtatggccacatgtggcattctggttgagccccagttgaactattcattagctattccagcttgggcacagatttgtgagtgaagaagacatcttcgctgtggatcctccaaactgagctattctagtcctcagtgacttgaatcactcccagtcatgaaa

SEQ ID NO: 901936 - DNA, 641 bp, Homo sapiens
acccctttctcaactatgttgccaaacacatcctaatagtaaatctattaatctatarattatgtataaatacaaatgttgatataaatattagaataaatataaataatataagaaatcttcatttacctatcacccagcttcaacaattaacaatgcgctgccattttgtttgatccatgcccagtaacttcattttttttctcagtatttaaagcaaatcccaggcaccattctatttttcccatcaggatagatgtatctctcagtattaagaacttcctttttcaaaacataatcacaatactagcaacatgtccaacaataattccttgaaatcatttaatgtttagtctatgttaattttgcttttattgtttcaaatatgtcttttattgatttattttcatcaggatctaaacaaggaacacacattgaatttcacccttatgtctcctagaatcttatctataatattttccccttcctttattttactttgcccatgctgttaaaaggtaaactaaggcataaaataattttaaagagtatacttgaacaaacaacaattcataaatgaggcagcttcaaactgtaagtgctttggggtcttccatgaggggacacaagagaaaggcttt

SEQ ID NO: 901937 - DNA, 723 bp, Homo sapiens
gcatttcaggactcctaaaaactaatttttaaaggctctcaatatcctagttcataagggcaatctgacctactagcattggaaagaaatgctcatcccaaaagacttaaatgataatcagacaaagcttctgtgaatgtgtaaacgtgtgatggtgacatttctcagtctgcacatggtccatttgccagagatctgagatttgctggctccatagagagctgccctaataaatctcaacagtccagggagatttggtccagtgttcccaggtgattgtcttgccgattccccgaaaggaaacagaagggtatttaattctacagcagcggcccacattcacccacaagtgacattattttagaaaccgattttagagattaaaggtgaaacagagaaatcctacactgcacaagaaatcactgccaattttagtgactagttgcagaaaaacacatttaaggagagtgtttctaacgtagcgttctctgacagcattcctgcctagatgtaatgctgatgtcaggttatttttatatcatactttaaaatcacatctggtaacttaatttctgggactatgtaaccccctttcattcaggcatgtaactttccaagttgcggcattaaagggatatagaaaacaatgcaaaccaaggaaattcycgttttcacacccaaaaagtgttttacccccaatgttttccacttacactgttacac

SEQ ID NO: 901938 - DNA, 665 bp, Homo sapiens
ttagccattcaagacctgcctagccaacatggcgaaaccccatatcaactaatagtacaaaaatcakcccggcgtggtggcaggtgtttgtggtcccagctactcaggtggctgaggcacgagaatcactggaacccaggaggcagaggttgcagtgagctgagatagtccaactgcactccgggctgggcaacagagtgaagctgtgtctcaaaaaaaaaaaaaaaaattagcctggcatggtgccgcacacctgtaatcccagctactggagaggctgaggcatgagaatcgttttgaacccgggagcagaggttgcagtgagccaagattatgccactgcactccagcctgggtgacagagagcgagactgtctcaaaaaaaaaaaaaaaaaggtataaaactatacacatattgtaccgttgcactgtaattatataaaatatacccactcggggagactggctaaaaggtactctgtactatgtttgcaagttcttgtgaatttataattattttaaaattaaaatttaagaaaaaaatcacttacttgtgtataaagttaaataaaatctatagattagggattggcaaactatgaacaatagatcaaatctggcccaccacctatttttgtatgacctgcaatctgaggataattttt

SEQ ID NO: 901939 - DNA, 601 bp, Homo sapiens
ggtgcatacggagttgtttgttccttccggcaggttcgtgatctcactgacttcaggaatgaagccgcagaccctcgcagtgagtgttacagctcataaaggtagtgtggacccaaagagtgagcagcagcaagatttattgtgaagagcaaaagaacaaagcttccacagcatggaaggggacctgagcaggttgccgctgctggctcgggtggccagcttttattcccttatttggccccacccacatcctcctgattgttctattttacagagtgctgattggtgcatttataatcctttagctagatacagagcgctgattggtgcatttacaatcctttagttagacacaaaagttctccaagtccccacccgacccagaagcccagctggcttcacctcttaaaaggaagtaaagtacacttggaagagggccaagtgggtgacttgaaagagttaagtgcctggtttgacctttggcttggggttttatatggtggcatgcatccagggtcttstgttatgtctcccctgattcttcccttgaggtgggctgtctgcatgcacagcggcctgccagcacttgggagggactgca

SEQ ID NO: 901940 - DNA, 618 bp, Homo sapiens
atttagtttatagtattattcaagtttcttattgattttatgtctggatgtcctgtcaattattsaaattaaggtattgaagtgttcctactaccattgtatttctgtctatttctctcttcactaccatcagtgtttgctttatatatttacatcttctgatgctgggttcatatgtatttatcattgttctattctcatgatggagtgaccctttcatcattataaaatgtccttctttgtctcttttggaaagtttttggcttaaagtctattttgtctgatataagtatagacacacctgctgtctttttgttaccatttgccctcaatattttttttttccatcccttaaaattcagcctatgagcatccttaaatttaaagtgaatttctttaaacaacatgtagttttgtcttgttttttttttttaaatcagtttgttcaatctatttcttttgattagagagtttaaatcatttacatataaggtaattattgatagggaagggtttgctattggcattttgttagttgttttctgtcatttttctaggtcttttgctgtctttttgtctcttgctgtcttcttttatattttgttgattattttgtat

SEQ ID NO: 901941 - DNA, 618 bp, Homo sapiens
atttagtttatagtattattcaagtttcttattgattttatgtctggatgtcctgtcaattattcaaattaaggtattgaagtgttcctactaccattgtatttctgtctatttctctcttcactaccatcagtgtttgctttatatatttacatcttctgatgctgggttcatatgtatttatcattgttctattctcatgatggagtgaccctttcatcattataaaatgtccttctttgtctcttttggaaagtttttggcttaaagtctattttgtctgatataagtatagacacacctgctgtctttttgttaccatttgccctcaatattttttttttccatcccttaaaattcagcctatgagcatccttaaatttaaagtgaatttctttaaacaacatgtagttttgtcttgttttttttttttaaatcagtttgttcaatctatttcttttgattagagagtttaaatcatttacatataaggtaattattgatagggaagggtttgctattgrcattttgttagttgttttctgtcatttttctaggtcttttgctgtctttttgtctcttgctgtcttcttttatattttgttgattattttgtat

SEQ ID NO: 901942 - DNA, 656 bp, Homo sapiens
ctgtacacaatgccctgtagcgggtataagtactcaaaaataaaccaggtggtaactaagttatttacatcactgggactcttccagtgttattaaagttgaagaacttgaaaagcagcatttattaataacaggggcattaatccagctgcctgccctgtactccacttacccagagagtctctcccagtcctgccaagcaaggattaagtagaattaagccggcagctaaccaggtagaccttgtgccctgggccacaggtgactctggcaagggtgggcgcctgacctacatcaaaccattcagattctttcccccaggaaggaggaatacagttagtctctatcatccccttgaatgaggcacagggagttgcacgggtagccatagctggctggatatgcaaagaagccagtctgcagacagaagaggtgagaggctatgaggatcctgagacagtctcctgctctttaggatgggatgctgagagatatgtttgtccatttacccatcccactctggttagtttttgagggtcaaccacttcctggcctaaggcttcaggaagctcaccatctaamcttttgtcaaatgagtaagctatcctgtggccttgtagaagcctcacctttcatcgtttttgtcactgtttctt

SEQ ID NO: 901943 - DNA, 511 bp, Homo sapiens
caggtattgttaatactgtcccctaacccacaaaagtacatgcctccagctagtcccaagtctataataaccttggtgatagtggygggttgatttgccctaatatattcttttttttttttttttaggtggagtttccctctgtcacccaggctggagtgcagtggtgtgatgttggctcactgcaacctccaccccccgggtttcaagcaattctcctgcctcagcctcctgagtagctgggattataggcgcccgccaccatgcctggctaatttttgtatttttagtagagatggggtttcactatgttggccaggctggtctcgaactgctgatctcaggtgatcgcccgcctcagcctcccaaagtgctaggattataggcgtgagccaccacgcctagcctaccctaatatactttctatgagagttgtactttgaatttttccgctttactaaagtacttctgatctgaccaccatacttttagggcttgaagctttgtttcc

SEQ ID NO: 901944 - DNA, 589 bp, Homo sapiens
cagatcactgccatcccagcttccaggaaacctgatataaatttctcagtagctatacaagaaaacaattgcaataaattgtttattaatgtctaccatgtgccatacctttgaagaatcacttggttcctcaaaagcagttaggattcttgttgcaagcaatagaactctgaagtggtttaagctatagggaatttattaactcatgtaattgtgaagtccaaaagcagggtgagttggtttgttctcaaggctcatgctgtcatcagtctgtggctcggtttccctgtggaaaaccgagttttgcccttagttttgccctcatctcggtgactgcatcatcctcaagccggtagccaaatctctgccatcagttcctggggtcacacgtttccccagcccataggttctctttcctccatttgcagaacaaaagcccatttaggacacaggttgaacccacctaagacrcaggttctgccactggatcaatcactaccatgagggtgatgttttgctctgacctgtccaggctggtctcatgtgcccatttctgaaccagtcactgtgggtgaggggcacttaggca

SEQ ID NO: 901945 - DNA, 597 bp, Homo sapiens
tttttaagtcatgccttagaaaggcatttagatttattagaattgcytgaatatgggaataggaaaatgtagctcatgatatttctgcttaatatgagaaagatctttataacattataattgtccaacaatgtaaaaggcttcagtagatagtactgagctctaaaatcttagaaaggcttaaagcaaagatttaaacatttccatagaattattggagaaggaatcatgataggaaactgaccaaagacagataagttctgtttccattctaagattctatgattctgctaatcatacaatgcaaatactcggcaaacaccattcagcacttagcccttctcatgtctgggcagcctggccaacccagaaaaaaacttaatcaatttcagtaaattctatgagcaaaagatgtagacatggtcacctcaagatgtaatgtcagtttaccttagctctaacaaatggaaaaacaatgatgttggaagtagggttttgaacactctgaatccccacagtagaagacaaaaaaaaaaaaaaaaaaatgaccaaattaaagtgtgcagggtttgagaaagaggaggtcacattaaatga

SEQ ID NO: 901946 - DNA, 593 bp, Homo sapiens
acaccatgtccactccacgtggttttagcaattagacctttattaataccatggagcagctggaactagaaatagtctcaagtgccttacattcttctgaacataccaatttccagagtgggtggcagctgttgaggcccaggtttatccatcttgggccaaaattctcatactcttgaccccatgtattggacctggattttgtggctccccaaaaacatggctacaaagctttgttctgaaaaatcaaagcctcctcattaaagtaagcatcttctccccctaatcctttgtcccctccattgtcattagttcagattttagaaaagaactactcttcctgtacttggggttttgtttctccccaagtgggagagttactggttcataacgctcttacacctgtcccctacccaaggcttctccctgtaaccttgggccaggccggacttgacgagaagacaagaattgatctaatccaattgcctttccagtgaaacaggctccgtttccccaggcatcacttacttatgggatggccgatttccatgccaggmcagctctgggtattttgacgttctttcttgtattcc

SEQ ID NO: 901947 - DNA, 677 bp, Homo sapiens
aattctaggacagttgacactcatcaaatatacraagtaattgatcacagtaaaatactgagttctattaacaggaataaagtgggagaaatgcagaaaataatcttattttataaatgtagttttcaaaatcatatgaagtcactggaaaaatacggtgaggtgaatactgaaatatatccttttctcaaagggaggataatgtcacacatgcagggcacttttacaaataaaagtcactgcattagcagcaccttccttttagcacaagggtcagcaaataagcacctgtgggccaaatccagcccactgcccgtttttgtaagtcaagtatcttggaacacagccatgcttattcactttacagtccatagtgtcagttagctgggtgtgatgttgcacacctgtggtctcagctagtagagactgaggtcagaggatcactagagcccagaaagtcgaggctgcagtgagccatgatcacacaactgcactccagcctgggaaacagagtgagaccctgtctcaagaaaatcaatatatgtagtccacaaagcctaaaatatttactaactagctctttgcagaaaaagctggccaactcctggtttagtagatcaaagattctttgatgtattttaataaaagttttaccaaatatactgaaatgtttatat

SEQ ID NO: 901948 - DNA, 643 bp, Homo sapiens
ctgaataaatgaccttgttcaaatgacttaattgctctgtgcctcagtttcctcatctaaaaaaacttggggataataatgattaccatgaagattgactgtggaaatatatatgacatgtgtatatatatatgtgtgtgtgtgtgtgtgtgtgtgtgtgtgcgtgaagaactcaggttggagagcctgatacagcaagtattagacaaatattggctaccattattattagtggtaataatggcaaacacttttcctattgcctacccctttctttggagcactgactggcggagatgtcatgcagctgtggctctgtgaagggctatggaagaaggaagagttctattcatccagtgcctcaatggcacaggaactagagtaggggacaccgcagaggtggattttccctgcactgacattaaggaagatgaccccttctcacctctaacttagtattgcaaatagctgacttcctgcagccagcatagttgagcacttacttgcacttttgtcttgcgttgtcttgcattgatctcttgttcctccgcytcctctttgttccagtcctagctccggtcaaaactcaaccaggatcctcctccctcagaaaccccctgactgctccagcccatgccctctc

SEQ ID NO: 901949 - DNA, 643 bp, Homo sapiens
ctgaataaatgaccttgttcaaatgacttaattgctctgtgcctcagtttcctcatctaaaaaaacttggggataataatgattaccatgaagattgactgtggaaatatatatgacatgtgtatatatatatgtgtgtgtgtgtgtgtgtgtgtgtgtgtgcgtgaagaactcaggttggagagcctgatacagcaagtattagacaaatattggctaccattattattagtggtaataatggcaaacacttttcctattgcctacccctttctttggagcactgactggcggagatgtcatgcagctgtggctctgtgaagggctatggaagaaggaagagttctattcatccagtgcctcaatggcacaggaactagagtaggggacaccgcagaggtggattttccctgcactgacattaaggaagatgaccccttctcacctctaacttagtattgcaaatagctgacttcctgcagccagcatagttgagcacttacttgcacttttgtcttgcgttgtcttgcattgatctcttgttcctccgcttcctctttgttccagtcctagctccrgtcaaaactcaaccaggatcctcctccctcagaaaccccctgactgctccagcccatgccctctc

SEQ ID NO: 901950 - DNA, 315 bp, Homo sapiens
ggtcctcacagtcagatatgaggtaataggtggaaaatacttccctgtgataaggcagtgatgcctgagccacccacttctggtaagaaagctgttcctaaagaatagcaaatggtactcatgttttgggggactctatgctacttagaagcgagtggctaaagttgcacggtgactaattcaagaacaaacagaagaaaaggacaaacagaaaaataaacagaaagaggcatgcccttagcctcawtcaggtagttctaagaaagtgattaggatggtttggagaccaccagccccataccttatccagtcacc

SEQ ID NO: 901951 - DNA, 651 bp, Homo sapiens
tccctaggtgggagtttgcctttttgaactaaattgccaaactaccctgtgtttacttctgtcataaaaacatctttctttaattccccccaccaaaatctaagccactgagtatagtcatttagggagttttttcgttcacatctgtatctccaacacctaaaatgtccccaggtgcattgtaggcactcaataaaagtgatggataaatgaggtaataagttgcatttattttctatcagttttactactctctgaaagcagcgacagagtcttaattacttttttatacctatgaggtaataagttgcatttattttctatcagttttactacattgtgaactctttgaaagcagggacagagtcttaattacttttttatacctaacatctagcacaaattaagagctcagtaaatgcttactacagaaataatggaagtgtgacttaccaaatgtttactctgtatttttccttgtccctgaatacttcacttttattccaaagatttttttaaaaacsacattctgaagaatttgcacagatttgcattgctgtatctggagaaattatactagcaacaagggttataaatcacaaaatactggtggtaggatcagacatcagcagtttttaaagacctgcgggt

SEQ ID NO: 901952 - DNA, 658 bp, Homo sapiens
gattgtgggctcccacctcatcaactttggccaacatattcccgttgtgtgtcagcagggaagggaacttgccagccttatttaggcctgggccaaggatccatgggatctgcttgatctgagactccaaggccaaatggtaccatacctcttggccagcctcttgttcttgtcgagtttctccagtgcctccaggtccatacgggggactccacaaccttggccttgtcacagtgctgctggcccccaggatacacacagaggagtggaagtgggttgtggacttcagcccaatgatgccccagaagtgtttgtccttcttagagtcacagtgagcaatggtctgggccacaccctgcaggaggcatcgctggggccgtccaggaacttcacacactcacatgtttttggaaaggtagagctgcagaacagcttgaagccaacagaaatacctgtttttattgttattattattattattattttaacagtctctgtcttccaggctggaatgcagtaatgatgtgatcatagctcaaggcatcttctaactcttgggctcaagtgatcctcccacctctrcctcccaagtagctgggactacaggcacaagccactatgctcagctgatttttatttttattactatttttgtaga

SEQ ID NO: 901953 - DNA, 565 bp, Homo sapiens
gtaaaagtgtaaattaattcaaccattgtggaagacagtgtgttaattcatcaatcatctagaagcagaaataccatttcacacagcaatctcattactgggtatatacccaaagggatataagtcattccattataaagacacatgaatgcatatattcatttcagcactattcacaatagcaaagacatagaatcgacccaaatgcccatcaatgatagactggataaagaaaatgaagtacacatgcaccaggaatactatgcaaccataaaaaagattaagatcatgttctttgtagggacatggatggagctggaagccattatccttagcaaactaatgcaggaacagaaaaccaaacactgcatgttctcacttataagtgggagctgaacgatgagaacacatggacacaggttggaggaggaacaayacaccctgaggcatgtcggtgggggcgtgggaagggaaagcatcaggaagaatagctaatggatgcctggtgtaatacctgggtgatgggtttttctgtgcagcaaacaaccatggcacacgtttacct

SEQ ID NO: 901954 - DNA, 616 bp, Homo sapiens
gcctgataaatttgccacttacttgctgatttatagatttgtcttaaggaacasttacggaacactgcaagttcctgtggactgtcattgttggtagatggggttcggggtcaagaggctgcaaatcccaaggtaaggacagccaaagtggttgtcagccatgaccagagaaacatgggttttaaaggaccagaattaactacaaccttccccagtttttcatttgcttgaaaatcacagaaacacagctcttttcaatattgcctctcctagtcttttcttttgctttgtaatagaagcaagatcatatataactgatccgctttcttgtggtctgtctgctcataatcttagacttcattaattagcagccacattcaacaggcatgcagcatggctgagttgaaagagcacagaattgagaatcaagaaaattgggttcactaggaatttatccttcccaagtaagtaataaaggagatgtacaaagttttgctggaaggaagcctaacaatatgtgagcaggaataaaaagtcagaaatcacttaatatcccgcaaatagggaattctaatcagtcatgaagcacatgaagtacaatggctttaaagacaga

SEQ ID NO: 901955 - DNA, 637 bp, Homo sapiens
atatgaaaaaagtaatataggatgctttttttcaagcatgtattattgtaatctcatacttatgaagctcaacagagaaaaaagtcattataacatgaaaatttttaattcatttccttttgatataacagaaatatttataaaagtaaaaataaatagtaccaattgcttggtgtttttacttctcagaactttgttttaataagcaataaaaataatatgccaaattatttgagtttgtatatatattttagactctttcaaagaagttagacgtaagtttatatttattcacaatattttatagctattgttcttaaaaaaatacatgaacatacagtcattattgcaattttcctcttcatataaataatattaccttgaatcaatagcatattctctattttaatactctttagtctactaggcaaaaaaattccaattgtcatggcaaagcagtgtgggtgaagatatacatattcatttagttatgaagatttcattgtcatttggtttagtgaatraagattcttatatctattaaaagaaataaatgtcactagcaatagaggtataatggtacactttcatgtattagaaatatatacactgtccatgccagccataaggttttact

SEQ ID NO: 901956 - DNA, 634 bp, Homo sapiens
tctatattcaacatttaatgaacctccacattgacatcatttgagattttgaaattagatgtgccaactcacaactctgtcagttactttattttactaaatctcaagaggtttcaagacctttgctgaagtgaggcaggaggtaagagaatggaagttttgagaaaaaaccattttatataagactgatgtaaataggtttcctcaagtgaactttcgggttaaaggatgtaaacactagggctactgaatacagatggcaaattactcactcaaaataatgaacactttgcttggcaacatgtagtgaatgaatctctttaaatcatataatagttaatacagattataattatcaaaatgtgttttaatagcaacaacatgtttttcctctatgaacttatgtatgtttgattactagtgtggctgatatttttctgtacatgaaccatctattgtcctccatgtaaaaattaaagattcatattatttgtccattcctttagggttttaacattttccttacttatttaatgaggtcttaatatgcaaaggctatttgctgagctgtcctctcaaattggtttgagataattarctattaacaatgggctgttgcttttaatgaataggt

SEQ ID NO: 901957 - DNA, 653 bp, Homo sapiens
tgtgaattagagccaatgagcagagcataggggtcagcaaatagaaaattagtatggggagacataaargatagggagattattgctaaattaacaaaacaagattcttgctgtaaaccggccaaggacatacttaacatcacaactaaaagaattagaggatcaagagcaaacaaaccccaaagccagcagaagacaagaaataaccatgatcagaactgaactgaaggagatatagacacaaaaacccctcaaaaaaattaacaaatccaggagctgggtttcttttttttttttttaaataataaaatagacctctagctagacagctagactaataaagaagaaaagagagaagaatcaaataaacataatcaaaaatgagaagagagatatcagcactgaccccacagaaacacaaacaaccaccagagaatactacaaatacgtctgtgcatatagactagaaaatctagaagaaatagatacattcttggacacatacaccctcccaagattgaaccaggaagaaattaaatccctgcatagatcaataacaagttctgaaattgcggcagtaaaaattacactaccaagcaaaaacaaaacaaaacaaaactaaaacaacaacaacaacaacaacaacaaaaaca

SEQ ID NO: 901958 - DNA, 653 bp, Homo sapiens
tgtgaattagagccaatgagcagagcataggggtcagcaaatagaaaattagtatggggagacataaaagatagggagattattgctaaattaacaaaacaagattcttgctgtaaacyggccaaggacatacttaacatcacaactaaaagaattagaggatcaagagcaaacaaaccccaaagccagcagaagacaagaaataaccatgatcagaactgaactgaaggagatatagacacaaaaacccctcaaaaaaattaacaaatccaggagctgggtttcttttttttttttttaaataataaaatagacctctagctagacagctagactaataaagaagaaaagagagaagaatcaaataaacataatcaaaaatgagaagagagatatcagcactgaccccacagaaacacaaacaaccaccagagaatactacaaatacgtctgtgcatatagactagaaaatctagaagaaatagatacattcttggacacatacaccctcccaagattgaaccaggaagaaattaaatccctgcatagatcaataacaagttctgaaattgcggcagtaaaaattacactaccaagcaaaaacaaaacaaaacaaaactaaaacaacaacaacaacaacaacaacaaaaaca

SEQ ID NO: 901959 - DNA, 585 bp, Homo sapiens
ttttgctgagataactcatatctgttaagttagaaaaagtctttgggccaattttagratacatgtatttcctacaaaattctctttcaggattttactttattagtagcacagaattgaacaattcttttcatgcattggaagactcaatattctaaagatgtcaagtagccccaaattgatctttagattaaatgcaaaaccaagtaaaatctcagaattatcgtatagaaaatgacgagcaaattctaaattttaagaaaatggaaggatcaatgatatccaaggcaatcataaattttaaaagttggggacgtacactaacacttgttgatttatatttcaaagccatagatattaaggcattgtgatattgacacagcgcagacgaatagatccatggagcattataaaggttctagaaataggcatacatatattgccaaggaataatttatgacaagcatatcactgcagtgtaatataaaaagtccattcttcttagtaaatggcaccagatagtcattttgaaaacaatgtatgttgccactatctcataaaatacaagaaattaaactccagata

SEQ ID NO: 901960 - DNA, 619 bp, Homo sapiens
tgctggccaagagaacattctgcaatgataaaaatgtcctctatgtgtattgtttaatatggtagccctgtatgtttactkaatatatagaggaggaaatatttcttttcctcatccatcacttggatcatgtatggaggaccctataacaaaagacagattaacaagggaaaggcatgcaaacttatttaaaataagttttgcatgtcacggaagctttcataaggacatgaaaacccaaagaaagaggttaacagggtatttttatgatcgggtttgatgaatcaatgcatagtcatggagaagtatgattggacaaatgaggtctgatctaatgataaaaaactggggggaattagcaaggcctgtttgttcatattcttctctgtgtccctgtgtctttaaggatatgaatgtttctatcctctgggtacaggaagggcacatcttaaatgagtgttttctgacctgcttcagaggaaaacagttaaagaaagatgagaatgaccttcccgcttctgctgttttctcaatatcaagatgccttattttggggaagtgtgtcctgaactccatcaagcatttgaaatatgctctcataacagagaaatttaaaatt

SEQ ID NO: 901961 - DNA, 591 bp, Homo sapiens
tttagcatgcatgaggtgaattgaagtgtaatccatttctacggcagtattcaacaatatcaggagcacaaaaaaaaaagggaagaaagtctctttagtagctcacagcttcttcactacgtaaagctggaatgtataaagccaaaatctagcagagcaacgtaatcctggtgatcctagtgttaattttaggaggtggtctcaaataatataatctaaggtgaatcaaatggagaggataaattgaagctattggagagagcatgagtgagtgaaggaaataaatttatgagaaagtatgggaatacaaggtcaagggcataagtagctaggattttctcataacgggcataaaaacatgaaagatataaggactggtaaatgcatcttgtctctaaaccctgggaaaaggaggtaaaggtagttataaatatacaattttatcttggtgggagagaggaactgataaagcttgaatatctgtcccctccaaatctcatgttgaaatttgatccccaatgctggaggtgggrcctggtgggaggcatttaggtcatggcttcagaatccctcatgaatggcttggtgctc

SEQ ID NO: 901962 - DNA, 615 bp, Homo sapiens
tcccagttttgtatctagatctttttaccttggacatatttttatcccttctatcacttatttgcttatttgtaaactgcaaacataatagcacctatctattagagttattctaaaaattaaatgagttaatatatttataatgggttataaaaagaaaatgttttgtaaagtccttagaagagggtcttgtattatcccattttcacactgctataaagacatacctgagactgggtaatttataaagaaaagaggtttaattgactcatagtttcacaggcctgggaaggcctcaggaaacttacaatcatggtagaaggggaataggcatgtcctacatggtggcaggagcaagagagaggtgtgaggagcaaagtgggaagagctcctcataaaacgatcagatcttgtgagcactcactcaatatcacaagaacagcatgggggaaactacccccatgatccaatcacctcctatccctagacatgtgtgaattatgggaattgtaattcaagatgagatttggatggggacacaaagcctaaccgtatcaggcctgktacagaataagcacttaataatttaacctttacagtgtcaatcattctagt

SEQ ID NO: 901963 - DNA, 638 bp, Homo sapiens
aattgaaacaattacataataaaatcatctaygtttgcagatgatatgattttatatttagaaaaccctcacaacaccataaaaaaccatcagaaatgtgaattcaataagttttcagggcaaaaaattaacacacaaaaatcagttacattgttgcacactaaaactatctgaaaaggaaattaagaaaccatacaatataccatagcatcaggaataataaaataattaggaataaacttaactaaggaggtgaaagacctgtacactaaaacattttatgttagggaaagtaattaaataagacacaaataaatggaaagatatcctgtgtttatggattaaaaaacttaatattgttaaaatggccatattatccaaagcaatctactgcaaatgtcaatgcaaaccctgtcaaaattccaatggccattttcacagaaacaaaaaaaagtcccaaaatttatattgtactacaaatgccccaaataacaaaagcaatcttgagaaagaagaacaaagctgaaggcattacagcctctgatttcaaaatatactataaagctacagggattaaaacagcatgttactggcatggcaaatatatagacaaatggaactgaacagaaagcccagaa

SEQ ID NO: 901964 - DNA, 581 bp, Homo sapiens
tccttgttatttatgcaaatttctggagctggcttgaatttctcctcggaaaatgggtttttcttttctactgcatcatcaggctgcaaatttttctaagttttgtgctctgtttcctttttaaaacagaatgctattaacagcacccaagtaacctcttgaatgctttgttggttagaaatttcttctgccagatactctaaatcatctctcttaagttcaaagtttcactattctctagggcaggggcaaaatgccaccagtctctttgctaaaacttagcaagagttacttttgctccagttcccaacaggttcctcatttcatctgagaacacctcagcctggaccttactgttcatgtcactatcagcatttttgtcaaagccattcacaagtctttaggaggtttcaaactttcccacattttcctgtcttcttctgagccatccaaactgttccatcatctgcctgtgactcagttccaaagtcacttccacattttggggtatcttttcaacagtgcctyattctactggtaccaatttactgtattagtctgttttcatgctgctgataaag

SEQ ID NO: 901965 - DNA, 686 bp, Homo sapiens
aggactcttagatccaatcctgacctctgaatcagaatctgcatttgaagaagatccacagatgatttgattactcattaacgtttggaaagcactgcccagaactttgagatcatcttctaatacactgcatcaataaataaaatgttgaaagagaaaattgtagatgttgatgatgacaattttaaccgaacttggtggtgttctgtttcacctgatgctaacaatttttaggttaggggacctaggaaaaatgtccttttgtctctaccagttgctggttaagtggaacagtgaagtgtccttttcctcctttttaaaatttccggggtacttgactaactgatttctgcatgtttaaacttacattaaatgacctaagagatgacttttgctttaatttgatggagacaatccagtggcagttatctgtcactgatttcatcttaacttccttttcatttaagatctctgaatgattatgttaagtatgcttaaaaaccagagaaaacaaaatgatctcaactatttttcaaaaatgcataggagatagtattttaggaaaatacagtggtaacaatattcaccagaattttggatgatttctctttcttcattttaattttctgtctacaccagcatgtagtactcttatagtcggwaaatcatattacagtatttaaaac

SEQ ID NO: 901966 - DNA, 593 bp, Homo sapiens
gtcagaccacagtgcaatcaaattagaactcaggattaagaaactcactcaaaactgcacaactacatggaagctgaacagcctgctcctgaatgactgctgggtaaataacgaaataaaggcagaaataaataagttctttgaaaccaaagagaacaaagatacaatgtaccagaaactcaggaacacagctaaagcagcgtttagagggaaatttatagtactaaatgcccacaggagaaagcaggaaagatctaaaattaacatcacaattaaaagaactagagaaacaagagcaaacaatttcaaatctagcagaagacaagaaataactaagattagagcagaactgaaggagatagagacacgaaaaacccttcaaaaaaatcaatgaatccaggagctggtgttttgaaaagattaacaaaatatatagaccactagccagactgttaaataagaaaagaaagaagaatcaaatagacacaataataaatgataaaggggatattaccactgatcccamagaaatacaaactaccatcagagaatactataaacacctctacacaagtaaactagaaaatctagaa

SEQ ID NO: 901967 - DNA, 654 bp, Homo sapiens
  misc_feature 1, 2, 3, 4, 5, 6, 7, 8, 9, 10, 11, 12, 13, 14, 15: n = A,T,C or G
nnnnnnnnnnnnnnngcttgtcatttaaaatttagtattcaatacttatatcatttggaatatagctgtagtcttataattcagaaggtatagctttgcttgtaatgttttataggcctacatagtgagctcttaaaatggcactgctttaaaaaatttctcatgagtattttgcttttaacagagaaataacttgctccagagaccaggctttcattcttttctctcctggtaaaaattgactgactttctgtgagttctacaattttctgtatatatctgtcaggacaagtgttgtattgtactttattttatttatttatttaccttcttctctcccccacaatgcttgctagggttaggaaacagtcttatttaaatcctaacaatgcatggtatgtattaataattagaaggtcacttaatgttaaaaatgattatcaaataaataacatatatctttgtgttgttttcactgtctcctgctaattccaatttagtccatttttaattttctgatgattaaatgaaatttagtgagtaaacaaatcagtaaaatatagtatctctttctgctaatgtattagaaactaagttttagtaaaactttgatygtgtaccctaggtacctgactgcaaatgttactcatcctt

SEQ ID NO: 901968 - DNA, 677 bp, Homo sapiens
aaggaaggaaagaagaggaatctattgcaatcaaaatcaattgtgatgaaggctggtttcctaattttttacatttttcctacctaattttatttacacatttttattttctaaggctaaagaaagtgagactggaacaggcaaaaaaaatgcaattgtttctcatttatttccaatactcacaatgtataattacaaagtatattgccaatcacttaaacattctaatgcctcaaataatgtataaggtattcagccaaaactaacctttgaaattaaagaaaaacattgtaagaggaagtttttaatatcttgtccatttaaaggaagttttacttaaagtaatttatacagttcagaactcgccactaaagttcaacatttctaagagctatacctttctgtgacttcatttttctcaagtgacattacaaatttctggtatttataacttttaaaatgtacttgttagggaaaataacaattaagttatttttaatgttctttgcaaattttaattaggacttttttattatcaggcttgattaaggaaataatttattagagcagaaaaaggttttagagagcaaatgtttatactattaattaatrtcagttagctatgtgcttacaataaatttttaattttcagacctattgttattaaaggcacggtg

SEQ ID NO: 901969 - DNA, 630 bp, Homo sapiens
agcctttgggctgagactatggggttttctagatatagaatcatgttatccacaaacaggggtrgtttgacttcctctctttctatttgtttatttatttctcttgcctgattgccctggccagaactttcgatattgtattaaataggaggagtgagagagggtatccttgtcttgtgacaatttcaaggggaatgcttccagctattgcttctattgagatattaataatcatgtaatttttgcctttagttctgtttatgtgatgaatcacatttatttacttgcatatatttaaccaaccttgtttcctggaaatgaagcctacttgatcataatggataagctttttgatgttctgctagatttagtttgctagtatttcattgaggatttttgaatgaacatcaaaaatattgacctgaagttttcttttttgcgtgtgtctctgccagattttggtatcaggatgatactggtctcatagaatgagttagggaggaggtccttctcaattttttggaatagtttcagtaggaatggtaccagctcttctttatacctctagtagaattcagctgtgaatccatctggtcctgggcttgttttgcttgtaggatatttattact

SEQ ID NO: 901970 - DNA, 578 bp, Homo sapiens
tttgaggaaaaattcatgttttcctcaatagttctgaagaaccttttttaaagccaattttatgctttttgtgaggttaagtttaattaaaactggatcataaatctatcaactccttaagcaggcccatccatggaaactgcagcaagttgtgatatgctgagggcaaacgttacaagtgagagtaaggcagagtgtatttgtctgttctcacgctgctaataaagacatattcaagactgggtaatttataaaggaaagaggtttaattgattcacagttccacatggctggagagacctcacaatcatggtggaaggcaaaggaggagcaaagtcacgtctttcttggtggcaggcaaagcgagtgtgcaagggaactcccctttagaaaaccatcagatctcttgagacttattcaccatcatgagaacagcacaggaaagacccacsccatgattctgttaggtcccaccaggtccctcccacaacacgtgggaattatgggagttacaattcaagatgagatttgggtaggtacacacccaaaccgtatcacagagcttcactgtcatcctc

SEQ ID NO: 901971 - DNA, 585 bp, Homo sapiens
aaattagttcaatctaaagggatttatttttaccaataaaattgtgtttcttcaaaatgcataacattgatacagatttgagatgctgccaggtccacttctcattagttttttttttgttacttgcaatgatagaatccccttatgtattggcagagtgttgtgccaaggcatctttctagtttacttcaggaacctcaaggagtaacaaacggtgaagaaaaaatattgatattaggagaataaagaccagaaactttctccttgttgttgttgatgatgttatttgtttgttttctactacagacattaactaaaacactgctcagagtgaaattccaaagctgaaagaacatttaatgagagaattttaatatgtacactgtggcttgggtggaaaaataacgaaaatgagtagcaaaatgttttctctggatatgaaaagaatagagaactattctgacattcaggattgagatatctgggagcagcacttttgctgtagaccagaggttcccaaacttytgcagctaacagagtccttactctggcctgatcactaccagctagtgatgtcattgccat

SEQ ID NO: 901972 - DNA, 607 bp, Homo sapiens
tgtttgtctattattggtgtatctgaatgtttgtaatttttgcacattgattttgtatcctgagactttgctaaagttgcttatcagtttaaggagattttgggctgagatgatggagttttctaaatatacaatcatgtcatctgcaaacagagacaatttgacttcctttcttcctatttgaataccctttattgctttctcttgcctgattgccccagccagaatttccaatactgtgttgaataggagtgatgagagagggcatccttgtcttgtgcctgttttcaaatggaatgcttccagcttttgcccattcagtatgatattggctgtgggtttgtcaaaaatagctcttattattttgagatactttccattaatacttagtttattgagagtttttagcatgaaggggtgttgaattttatcaaagggcttttctgcagctattgagataatcatgtggttttygtcattggttctgtttatgtgatggattacatttattgatttgcatatgttgaatcagccttgcatcccagggatgaagctgacttgatcgtggtggataagcttttttatgtgctgctggatttggtttgcc

SEQ ID NO: 901973 - DNA, 599 bp, Homo sapiens
ccttttgcacagtaccaaagtgtttctaattatagatttgagaatataagtattttaatttaaaaattgaagctgatgaggaggttccaagatggtcgaataggaacagctccagtctacagctcccagggtgagcagcgcagaagaggggtgatttctgcatttccaactgaggtaccaggttcatctcattgtggcttgtcggacagtgggtgcagcccactgaccgtgagccaaagcagagcagggcatcgcctcacccaggaagcgcaaggggttggggaattcccttttctagccaagggaagccatgaccaacagtacccggaaaatcaggacactcccaccctaatactgcacttttccaaaggtcttagcaaatgacacaccaggagattatattccgcgcctggctcggagggtcccatgcccatggagccttactcactgctagcacagcagtctgagatcaaactgcaaggcggcagcaaggctgggggagggacatccaccaytgctgaggcttgagtaggtaaacaaagcggcctggaagctcaaactgggtggagcccaccgcagctcaaggaggcctgcctgcc

SEQ ID NO: 901974 - DNA, 591 bp, Homo sapiens
acatgttatgggagggacctggtgggagataagtgaatcatgggggtggtttcctccatactattcttgtggtagtgaataagccttacgagttttgatggttttatcagggatttccacttttacatattcctcattctctctttgtctgctgccatccacataagatgtgatttgctcctccttgcctttggccatgattgtgaggcttccccagccacatggaactgtaagtccaattaaacctctttcttttataaattgcccagtctcaggtatgtatttatcagcagcatgaaattgaactaatatgtaaattggtaccagtagagtggggtgctgctgaaaagatacctgaaaatgtggaagcaactttggaactgggtaacaggcagaggttggaacaatttggagggcttagaaaactcgaaaatgtgcgtaagtttggaacttcctagacacttgttgaatgactttgcccaaaatgctgatagcaatatggacaataaaatccaggctgaggtggtctyagatggaaatgaggaacttattgggaactggagcaaaggtggctcatgttatgttttagca

SEQ ID NO: 901975 - DNA, 702 bp, Homo sapiens
aatagggcaaaacatccagagctgaagtggagacagartgaggagtaatgaggtaatataagatctggcaccttcaaagaaagagcagagcttacttttgataaccctgcctaaaagacaaaataccttaagagaaaacagttaaggatgattggcaagcattctatttaaagagagatcatatctcacggtctgcaaacaccatcacgtttagaatgacggcgacagagcctttatcatgatgaaataggagagatggagtaaatagaatcatagctgagagatatcatgtgcgctttcttttgggattgttaaattattccacaatgaggaaaaaaactatcctaaatccagcagaaagacagtaggatggatgaaaatagcctctgtattctccttttcagcagcgttaactacatccttccagttgcacagaacaatattgtcttctttggatatgccttttgcatactcccataataattattataactacttacattaatttaataacccatttattgacaactcttttgatatcttgcagttttgtttacatatctttaagaagtagatttgtttgctttcctttttttcatcggctgtcaaaaatttagtaggaatcaggaaaatttccttaagaattctaaatatgtctcacatgcactttgcagtcactgctaacacttagtagtttttgag

SEQ ID NO: 901976 - DNA, 631 bp, Homo sapiens
tatgctataaaagtgaattaagatccctactttctacgcaaattgtggcattggcctttcatatggaagtctcgagctacgctataaatacaaaataccaaatatcagtaatttttcrtatctgacagacttgaatttattattattcttgaaaatgcatttgttaacatattgattttacattaacaaagagcaaaatttatcattcttacataaaaccaaacaaatattttagacaacaaaatatttaagaaataaagtaggacacttttgaaacaacacatttttgtgcatagtattatagcttcataattttataggccattctgttggattgtcaataaaaactagtaaatgttatttaatgcgttatcctagaaattgtattttttttatatctgaaaaagacataccctggcctttttcatatctttagacaaaagaggcttgaggctttcacaagtcactcagcttgaagaacacattggatccaaaatccagatatttcatagattcaaagcacaaaattatattaggtactctatcttctaatacaggtgtccccaatccccgggccgtggacccatatctacctgcccatggcctgttaggaaccgggccgcacagcagg

SEQ ID NO: 901977 - DNA, 683 bp, Homo sapiens
ttctgaccttagaataaagaataatmaagcaagtcataaccttaatgtatttttaaaagattgtgtatgcttctcttatgaactctttgcttataatgccactatattcatttattcacaccacaaatatttatgaaatgtctatcatgtgccagacacaacaatgaaaaaaatactcaaaattccctgatttcatggagcttaggttctaattggagagggtgagaaacattatcaataaaaaataaaattcatgatatgtcatgaatgccagatgatagtaaactctagagagaaaatgaatacaggggtggcctaataaagtaccagggagttgtgtttaaataagatggtcatagaaagatatgcaggaatatctaagatcatctagaggaagattatttcagccagaaaataaaataaggtttgcaaaggcgttgaggaagatgcatacctgacatgcctgtagtttgaacacagtgagtgagggcatgaggagagagaactttagctggagaggaagtgagagaagtagcaggtcagaggaagaaatgaagataaattgaagtattgaaagtgttcaaaaggattttatgaggaaaagatacttttatatactacttttatgaggaaaagataagaatctatcagtggattttgaagtatatttgccccccctcaga

SEQ ID NO: 901978 - DNA, 647 bp, Homo sapiens
acaaagaagaacatgaagagctttcgtttttgcattcgttataaattatattccattctctttcattataaggataatgaaacatttctggcgatataattcatggycatttcactttttgtgtgttctcaaagtcacttgcctattgcatggttgttacaagagtacctatctcttgggtcatgtctatggagctcaatcatatgcaattatgctgtgctatttgaaccattattgcccttatataccttattattccatatgtagcaccacaagatgattcaaaatttcagttattaatatgtcacttcaaacgtgaagtttacacacacacaaacactaaatatgtatgaatgcatgtattatttacatgaaaacaaattgaaatattatccatatttgtagaatgaccttatttactgtatgtatcatacaacatattaaacctaaccatgatgagaacttttttcacataataatataaaataaatattattaaattattttagtaaaattaatttgttacctagttgtactacaatttttctttcaaatagaaaacaatgacaagataaaatacattgtactttgtgcctcaaatataattattttcaccaaagcagaagtaaaggtaggaagaaaaaaat

SEQ ID NO: 901979 - DNA, 644 bp, Homo sapiens
atagagtcttgtacaggtttgaaacttccgggaatagtcttggatggtaaattacaattaattttggtcaagtttaggttttagtacaggagcagctaaccatccctcatcttcagcaccatgacaggcagccatacctgtgttccatgagaagctcatatgtagcttacagaagccaggatatatcaaaagcatgctgttctcaaaatattagagacaggtgtgcagattccaaattgctctttccaatctcagaagggtagacaaaaagttcggtggctatttttgttgtaccctaccccttttttgtaagcctctgcacctctgcctgaagtaacttccagaggatttaaagagctagtgtttttccctatcctccattaatgtttatctctgtaccttttgggagccagacaataaacatgagaacattcaaaagtaactacatatgtgaagaaaataagaaagatctcacatgcccaaggactagtgcaggctcagggaagatatgagaagacytgaagtttacacctcagactactcttcagcataaagacagcctacaataatgaaaaagacaaaacaaatacacaaaaaagagcaatccctgggaaagacggacaagctaactttcagagttacta

SEQ ID NO: 901980 - DNA, 447 bp, Homo sapiens
tgccccaggtaatttatagattcaatgccattcccatcaagctaccaatgactttcttcatagaatcggaaaaaactactttaaacttcatatggaaccaaaaaagaccctgcatttccaagacaatgccaagcaaaaagaacaaagcaagaggcatcccgctacctgacttcaaactatactataaggctacagtaaccaaaacagcatgatactggtacaaaaactgagatgtagaccaatggaacagaacagagccctcacaaacactaccacacatctacaaccatctgatctttgacaaacctgacaaaaacaagaaatggggaaaggattccctrtttaataaatggtgctgggaaaactggctagccatacgtagaaagctgaaactggatcccttccttgcaccttatacaaaaattaattcaagatggattaaagact

SEQ ID NO: 901981 - DNA, 626 bp, Homo sapiens
aagtcccagatggctgacacctgggtcaagataccaacattcatggagagtagggagaaacaactcaccagtagtcaaaagttcccgagcacttagacattacccaggtaccaccgtggagggctcctttacttcctggtgcactttccttcccccttttgtctgggctgaacatgtgaccagtcctgggcaatgaaatgtaaatggaaacagcctatgtccttgccagagcttttaaatcaacagtacctgaatctccaggcttctctgtctctcctgtggccatggtacaagtgcatattgggatggagatgctaaaaagtcaaagcagtctggatgtcgggctggggacctggaggggaattgctgtggctattcagcagcacctatggctttgcatgaagaagaaataaaaaattctgcagagttcagcccctgaggtttagggttgtttgctgccagagcccaacctggcccaacctgactgctaccccaagtttcagttttcagttcaaattcmttgaggcctgactggtgcacttaggcagagctctctaacctagcaggaaacccgggaacagtagaacgctgaaactgtcgtggggaaagccataataattcttagg

SEQ ID NO: 901982 - DNA, 642 bp, Homo sapiens
gggtttagaaagcagtatctgtattggtatggatggtstgcagaaacctttgctcctttgagctactgtagtgaagactcaagcccttagggaaatcataggtgtaggcttggcaccgtggccatcatggtgcctgagtgagtgtaggtggtaccaggagcccaggtctgccattctggaccccagggacttatgtaactccaagtcccaaggaggagaggtggagatgctgagggccctggtgaaccagcagaggccctcatgcaggagagagttcattttgggtgaggacttaaagatgagaataaatagctcggatcttgggttccagcagtcggtgccagcacatgatctcaaatggccagacaggtccatttgttcctctgtggtcagcagttcagggagaaactcagtctggctcctctgcagcagaggcccagtgagaattcagatgaccaggtgaagctctgaggaccccctttcttcctctatcacgccatcattaatgagcgtacctggcccctccaaccagtcaccttcttgaattggaggatggggagggaaagattttacacaaatagatcaagcaattaattaaagagactgccataattattgcatcagatcaaggttgatggattg

SEQ ID NO: 901983 - DNA, 565 bp, Homo sapiens
gccaaggaagagagagaaacaaattaccaatatcagcaataaaaaggaattctaaccacagattctrtagacaataacaagataataagaaaatgctatgttatcgaattctaccacttaaataaaatggacagatttcttgaaaaatgtagcttaccaaaattgatgcaagatgaaataaaaaatttaaatggtgctatttttttgagaatataattattttaccttttatttaatgctttgtgtattgtttgaatttttcttttgttcaactatgtgtgaatgtatttgacagttaaaatgaaaaaattttaattttttaatattatattttctttttttaaaacttgtattttaggttcaggggtacatgtggaggattgttatataggtaaattgcatgtcatgggggtttggtgtacagattgtttcatcaccgaggtgataagcatagtatctgataggtagttttttgatcctcaccttcctcctgctctctaccctcaagtaggccctggagtctattgttcctttctttgtgttcatataaactcaatgtttagcc

SEQ ID NO: 901984 - DNA, 642 bp, Homo sapiens
tcttgctatagataccaagattctgaagttgagtcagatttccgtgactcatgacatcagcgaacatgacctgtargtgatgtttattttgatagaagggaaaaagttcagtttctgagtgagagaaagtccgatgatgtctctaaaacaatgcaaataagccattgagaagtcaaaatgtgggaaagccagaattaatctaaaagagggccctcccaagggcatcttcacaccactgaatccttctttcagctgggttagagaggtgcgatggaataggaagatttggggatagaaggtctggatactagtgtaagtagtggaaagaatgggtttggagcctgtttctctgattacaatctgtacagctagtctccatatctgtaaagtagaggataataatactgtctttaccacaaatataaaggctataagggttgaatgaattaggcatgctgggggactggtatgcagtagacactcaatacaaataagtccacatttcttttgcttttattctcttgtcctcttcccccacttacccacacccagacacatatcacctcccacacacacttgcataggaatttgtagtggaaccacagtcaggtaacttaatgtatttcttgggtttttaacatg

SEQ ID NO: 901985 - DNA, 559 bp, Homo sapiens
aagaattattgccccactagtgtataaagagcctctaggatatgtgtgcatgcaagggtgtstgtgtgtgtgagacagagagagagagaaagagagaaagagagagagggaggaagagaaaggagagacttggctcttgaataaaaaggaacagtgaaacagtgcacttggaaatacatgtctaatgcaaaaataatacacattttgtctccatttggactgtacttccaggtagaggttgtgctcaatgagaatcaagttgaaaatgtttctctggtcccatttaaaaggttatacataatgagatttctgccgttgtgggaaagttaagaattctgggtgacttgccaaatcttttgatcgcaaagagtgcttttaatacacattgcaaagcatttgtctttgcaaggtgtaaaatgccaaagctcagcttccttttttagtgtctgatactctccatagcatcatttatcttcaatttcccagcagtgttaactctttaagctcagtagcaacagagctacatgtagatacatatgacttcagtctaggggtcagt

SEQ ID NO: 901986 - DNA, 521 bp, Homo sapiens
tgtatgtttattgcagcactgttcaccatagcaaagactcggaaccaacccacatgcccatcagtgatagactggataaagaaaatgtggcacatatacaccatgaaatactatgcagccataaaaagggatgagttcatgtcctttgcagggacatggatgaagctggaaactatcgttctcagcaaactaatacatgaacagaaaaccaaacaccacatgttctcactcataagtgggagttgaacaatgagaacacatggacacagggaggggaacatcacacactggggtctgtcagggggtgggaggctaggggagggatatcattaggagaaatacctagtgtagatgacgggttgatgggtgcggcaaaccaccatggcacgtgtatacctatgtaacaaacctgcacgttctgcwcatgtatcccaggacatgaagtataataataaaaggcattgctaagtgagggactttgccgccctagttttaatctattaagaatattatgcacaggg

SEQ ID NO: 901987 - DNA, 666 bp, Homo sapiens
ctatgcctttttctagcccctgctgtgcttagtcataggctaggagatgcctggaagaagcacaaactggggtgaatgctgtcatggatctacagttrtggcagctgaagcctgtcagtcaatcatagtcccagcagcagattccctcgagggagacctgaccagggcacctccatcgatgacacacgcacatgactcttggctcaacagaaaattcttttaaattctgtgctctgactaggcatggtggctcatgcctgcaaccccagtactttgggaggccaagatgggaaaatcacttgaggccaggagttaaagaccaacctggggaaagtaacaaggccccatttctacaacaacaacaacaaattagctgggagtggtggcacacacctgtagttttagttactaaggaggctgaggtgggaagatcgcttacacccaggtgttggaggctgcagtgatctgtgattgcatgtgccactgcgctcctgcactctagcctgggtggcagagcaagatcctgtctttaaatgaaacaaaacaaaaattctgtaatttctctgctctgataagaagtaagtttttctccagcagcgatttgggaagattgatctctatcatgattgtttcaacgccctcctacttcaaacctcctcttctaat

SEQ ID NO: 901988 - DNA, 660 bp, Homo sapiens
aattgatccctttgccattatgtaatgcccctctttgtytttttttaaaatctgtgttggtgtaaaatctgttttatcagagactagggttatactagggttgtaacccatgctttttttgtttttcttttcatttttggtaaattttcctcaatacctctattttgagcctatataggtctttgcatgtgacataggtctcctgaatacagcacatgatgggttttcactctttaaccaactttccagtctgtgtcttttaattggggcatttagctcatttacatttaaggttaatattgttatgtgtgaatttgatcctgtcatcatgatgctatctggttattttgcacactagttggtgaagtttcttcatggtgccattgtgccactggtttttatattttggtgtgttttgcagtggctggtaccaacttttcctttccatatttagtgctttcttcaggagcttttgcaaggtggtgacaaaatctctcagcatttttttgtctggaaaggatttaatttctcctttgcttatgaagattcgtttgactggatatgaaattctgggttgaaaattcttttctttaagaatgttgaatattgactcccactctcttctggcttgttaaatttctgttgagagatccactgtta

SEQ ID NO: 901989 - DNA, 679 bp, Homo sapiens
ctgaatttcacatttatacatctgttataacttagattaatctgtctaataaaaatctcaagcttactaaacccaaagccgaggtattaatttcccttgtttgttaacctactttgggttcatgcttgaccagttcagttaatgataccatcatccatttatttgttcagaaaataagcttatcctgatttctctctttacctcacccatcatataacatccaaacagtttccagtcctatcagtttcacagctatgagagacctgtagctgccactttcacatctcaattacaccaccctagactgagtcatcaccctctctctcctggattactgcactggcttcctaacttctcttactacattcactcttgctcactgcctctgctgcactctctccttctcaccatatatctttctctactttaagagccagaggtaaaaaatgcttctttaaaaatttccaatggcttgtctttgccattagaaaaaactcttaagtctttactatgtttttcaaggttctattgtatatctgggcccaactaactctttaatctccttttatatgactgccttgttkgttccctctctttgagtcaacattggcctcctagtcattccttaaacactcccagctggttcccaatgcagggcttttatatctgttgcttctta

SEQ ID NO: 901990 - DNA, 564 bp, Homo sapiens
cctttcctcccctcctccaagctcagagtcaaggccctgtgtgtctctttgcctgggagactttgcagaggggaaagcagactcatcagctacttttccygtctttggtaaaaacttaatcagagagagaatgttagctctggagaggcagacataccagagacttattcgaaagatattaagagagaagaaggagaaaagttttccccaggatgaaaaaaaaaaaaaaaaaaagaggagcaaggccaggtgtggtggctcacacctgtaatcccagtactttgggaggccgagccaggtggatcacctgaggtcaggagttccagaccagcctgaccaacatgtcaaaaccccgtctctactaaaaatacaaaaattagccaggcatggtggcatgcacctgtactcccagctacttgggaggctgaggcaggagaattgcttgaacttgagaggcagatgttgcagtgagccgagatcgcaccatcgcaatccagcctgggcgacaggagtgaaattccttctcaagaagaaaaaaaataaaaaataaaaagaggagcagga

SEQ ID NO: 901991 - DNA, 564 bp, Homo sapiens
cctttcctcccctcctccaagctcagagtcaaggccctgtgtgtctctttgcctgggagactttgcagaggggaaagcagactcatcagctacttttcctgtctttggtaaaaacttaatcagagagagaatgttagctctggagaggcagacataccagagacttattcgaaagatattaagagagaagaaggagaaaagttttccccaggatgaaaaaaaaaaaaaaaaaaagaggagcaaggccaggtgtggtggctcacacctgtaatcccagtactttgggaggccgagccaggtggatcacctgaggtcaggagttccagaccagcctgaccaacatgtcaaaaccccgtctctactaaaaatacaaaaattagccaggcatggtggcatgcacctgtactcccagctacttgggaggctgaggcaggagaatygcttgaacttgagaggcagatgttgcagtgagccgagatcgcaccatcgcaatccagcctgggcgacaggagtgaaattccttctcaagaagaaaaaaaataaaaaataaaaagaggagcagga

SEQ ID NO: 901992 - DNA, 680 bp, Homo sapiens
ttaactagaatgatgatcttatctcacgctcacgagtattagtggacaggaacctgaggcacagggcagacccaccagaagtgcccagagttaaggtagatataatttgttttgactttatacttcagagtataacacctagcagcaatgacaggatgtagccagagggcacttgcaaactgtctgaaagatagagccaaagcttcaaaacagaagacgccatatatgccatgagtcaaaggagcaatgtgggggtcaagaaaagaagataaagccaaaagtcatgagtctgaaaaaaaaagcagggttgaagaaggaggtgaagaagaaaagagggaactagagagggcggggtcactagttggtgctctgagaggaacatactacccagagagtttgaaaatcaatgtaactaaccaagcaaatgtgaagtatgatcacacatcaagtttgatttatggtgcgcatcataagttttgttaactgtcactccttgaaggcatttgagtttacaacccctggggacagtgcttaataaaagattagaatgtctaaggttattttcaatcgaaagtcaatggcttrtttcatgtatgtctggctcttgtttaaaggacagcttagggattaggacaaggaaagatctgtctacattcattagaatcatttggaatgtttca

SEQ ID NO: 901993 - DNA, 387 bp, Homo sapiens
agacaaagaaattacagagacaacatttttctgagttaatagggtttaagtcatttttttattttgatagcctaatataaactctcatgctactacaaacattgctcccaatttaaaaatgaagagattcaccactcatctcttttcaagacagcttgaaaacaccctgctacctttttccaattagctttctagctttactgagtctgatcaagagttttgagctgtgtctctacgtttatttatgtttcagagaaatgttctctggtgctgtctttagaagcagatcaagatagagcttactctattgcaaaaaaaagtcactgaaaatttcaaaaacttttaggcactgttttaggtactgggcawaccacagtgaataaaaca

SEQ ID NO: 901994 - DNA, 574 bp, Homo sapiens
ctttaatgctctgtttcccttttaaaactgaatgcctttaacagcacccaagtcatctctgaaatgctttgctgcttasaaatttcttctgccagataacctaaatcatctctctcaagttcaaagttccacaaatctttagggcaggggcaaaaatgctgtcaatctctttgctaaaatataacaagagtcacctttgctccagttcccaacaagtttatcatctccacctgagaccacctcagcctggaccttattgttcatatcactgtcaagatttttgtcaaagccattcaacaagcctctagaaagttccaaactttcccacattttcgtgtcttcttctgagccctccaaactgttccaacctctgcctgttacccagttccaaagttgcttccacattttcaggtatcttttcagcaacaccccactctactggtactgtttacttattagtccattttcacattgctgataaagacatacctcagaccaggccatttacaaaagaaagcggctcaattgtgatatggctctgatgactggaggaacaccagggttcttggtcttc

SEQ ID NO: 901995 - DNA, 649 bp, Homo sapiens
aaatcattctgactactgtttctgattttgtcctacaatttattgcctttctgaattgcgaattttttctgaaatgctgatctagtttctaatgctgccaaggagagtgtcwcactcagccaatatttacaactacttcattttgttccacaaagggtaatttgtccttttgggttttctataaccctcctttatctacttaataatgtggaacaatttcccttggatgggtctgagcacttttgaatggtcactgggaaatttccttcaatcttagtatctgtacatgaagcacttgtcttttgacaacctcctaagaatataatgaaaggtcttaatgttaatatcctgatactcaagtctttttcactaataggaggattcttaaaaattgtcattcaagcaattatcctgccagtctgctttgatatcatggtctaatgaaaacttagtgatttctttatgatttgatggccctatgacggtaaagattgctgtgtgagagtaaactaaatctaatttaggaggtgaggaatggccaggaaaagcttctctggagaaataaaattaaaatgagggctgaggtcaaataagaataagccaacgtgggaaaagaaatattttaggcaaggaaaatgcacatgccttg

SEQ ID NO: 901996 - DNA, 589 bp, Homo sapiens
ttatgctattgtagcttgttcctgaaataaagggtagatttgtaagcactgtcatttgagtcttgtgggtcagggcctggactagggtgatgcaagtacagagtaagtatctcctaaaattttctggtctcagctttgttgtgggtcttcagtgtcaatcaaactcgttgtcaccattaatcaagtcgacttcatcctcaagctagtttactactgtcacaacatacctaccagtggcagtggaagatccatactttctccttcatacacagcaagagacaaaactttgactccagcaatgaactatcaatttttcttttaattcccttaatctgggatatttcacctcaatcactaggagaatgccaggtctttgttagtttactaatcaggatggctctatagagctggtgttagtgtgagtagctggaaagaaaaaatattaacacagaattctgttaargaggagaaaagagggaggtctgtgttcacttgtgcaggcaacagtgtccactttgccttcttactggcagaaacattaacttaaaagggaatacacgcagcttatgagtaaaatgccaaatacttc

SEQ ID NO: 901997 - DNA, 579 bp, Homo sapiens
ttccacagctctgctttctaagcattttattcactggatgcttttttctctactgtattggataaaactagaggggaaatgcaacctattttctgggttccaaaagcaatccactctcaccagtgatttcatgagttttaatcaatgttgctgaagattggtgggccacaaagagaaaaacattatggagaacgtggtttaccattacccaggctctactcccttcctgttggatcctctggtccacatactttttcctccattatgcaaagcaattcagtgcccccagcttgtatccacagagctgcatatccaaatctatcaagggattcagcacaacagggccttctgtatagctgaatctagactccatcagagacaattagagtaatgaatagagaaacctggggaaaagcaacaaccacaaaaagaagtaactgcaacatatgtccatgcaatgttccttggttccttgaaatctttatggagtgtgtgcatctgctagtaatgttgrctaaactaggtagggtcataagagatttgagaaacatttctaaatggagccacattactattcag

SEQ ID NO: 901998 - DNA, 657 bp, Homo sapiens
aagagaaatcataatgacaaattattttttaagtttctratcagaatgctggatctataaattccacagagactattactcaaacgtgttcattttgcagataaggaaaccactgcctagacaggctttgctgtgtgtcaaaatttatcaaacagttagtgtaagaacagggactataatgtaccgtatgtctgtcttttcactatactatagctacttaatacagcccaaaggtatagatgtgataaagccctcattgaccttaatttataagattggctttcctagcaatcccttcaaatacagcaaaatgttcaatacatttttttttctatatgtgactatcactagataaagacagaataaataacaagttgaataatttactaatttgctggaaattatccagtaaattcaggctatgtgtgcaaacgttagggcaaaaatgttattaaatatactgccttctgcctctcaaataaacaaactcagagggcactcaactttgtgaggttagagaaaagaactctggtgttgtttgtttgtgatttacgttgtaaagcacagaagtacttagacaggagatctatttgcaaaagtctgattatcttgtagaggctccttcctaggtcagaagagcttttccttgctgtcaca

SEQ ID NO: 901999 - DNA, 614 bp, Homo sapiens
ggaaacaacaccagtgtatatagaaagctatcttttyttgcctttcctatttgactttcatcacttcttgatgtttggtaattatttctctacaagtgcattttgcatggttcccaggtccctccctcaatctgtggctaatacagattaatgttgtctcagtctagcttcaaattgcatgctggtgtgattttcagattctcactcttaactaaaagaacaagtttcagaaaatttcttaacatgtttatatatttcttgatttgtggctagttcatcacaggagaggcataaaatttaatatttaagaaagggtaatttcactaagccacaaaaaaataaaacttacactctcgtaaggtagaaatacaggtttacaataaatatatatttattgattgaataagtgtgaaaatacttcagttagctaaagaatttcaaaagtctccttctaggcttatggaaagtacatgcatgacatgatacatagaagttagagaagtcctcattttgcccctttcttttctttcttctttgtggtcacagtttattgactctttaaaatgatgggattttacagaattcatactattacctttttgcctatgttgtat

SEQ ID NO: 902000 - DNA, 617 bp, Homo sapiens
aaggggagaatggcaagttcctgtttgatgggtacagtgtgtcagtttcgcaggccgaaaaatttctgggcccagcacggtggctcacgcctgtaatcccagcactttgggaggctgaggtggggggaatcactcgaggtcagaagttcgtgaccagcctccatgtaacaaatccaactagccaagactctcacgacaaaaagcccacatgtaggtggtctggttgacagtctcaaatggagtcctctgccaactgtcagcatcttctgccagtggtgagtgagtcatcttggacacccagcccatttgagccttcagatgatgacagcaccatctagtatctgaccataactacttgagaaatcctcagcaagacctgcccagagaagcctcccaaatttctggcccacaaaatcatgagcaaaaaacctattgcttcaagcaggtatgtttggggatcatttgttatgcagcagtagaaactagaacattgaaactcttgctttcttatcttgccccacagaaaagtatatattstcagcaatcagaaagacaatagggcaaaaggcaggaaaagctctaagtttattgagtcctaccacaggacagatacttta

SEQ ID NO: 902001 - DNA, 647 bp, Homo sapiens
gtgtctatctgcggatctccattgttttttagccaggctactccagtgacatggcattcttctcacacccataaaggtgggaccagctagagtaccaaacagctgcccaggatgccacagccctgctctcactgattgcctttcatatgacctaaatcctaaattcaactctgcagcctagttttgatcattacttctgtggcttcctcccaactcccaagatttggccttcatccatactcttctcatgtctgtctttgttaactcaggcctgttctgcagctggtgcctatctcctgggctgggcttcagggtagagacccaaatgcatggaatgcaaccccttctcaaatcaagcaaaccaaatcctaatgctacataaagagaaggcaatttaatcaatgacatcaaaatagaggttttcaaatttgagaattcagtaaaccctttttaaaagtgtttattttcctgaaccatggcttaaattatgtgacttaaattgtactaccatgaaattagttataagcttcttttatacatttttgtaactattcttaaacatctgtagaacccaactaaatgtatacattaaatagaaactacatacaaatataattctarttagcaaaattaatataatgtggcag

SEQ ID NO: 902002 - DNA, 627 bp, Homo sapiens
atataaagcttaaacaaataaatgaataaaagtacaataaaaaccagattgctctttatataatattaaagtggagaaggttttgctatgcatatcataaaatttgaaagacataaaactgcatataaaattaaacattcttcatagcaattaatatcataaacaaagtcaaaacacaaggaagaaatacttgaaaacatctgtcaatgagatattttctttaagacatcaaggtttctcacaaattgatgagaagatcaacaaaccaatagaaacgtttacacaagatataaatggttcacaagaaaaacaaaatatttgcaaactaacatagctaaaggtgttcaactcaaaattaaacctaagacaaagtttgacacctatgggattgactttctctaggttcctcaactcttcaattttcaccttctcttcactttctgggtggactcaactacacctcagacatcaattatcacctgtgtgccagccaaatgctcatcacagactgtcttctgagttccagacccctcttctcttcctccccatagtttaacagtcaccaagagcttccagttctacctctttcckatcccattaaaccaagttttcccaaatagaagacag

SEQ ID NO: 902003 - DNA, 569 bp, Homo sapiens
caagagccagaaatattggctgcttggtgtggctaaagtcaggtaatagagatttaaacaaattttcttttttttttttttttttgagacagagtcttgctctgtcgcccgggctggagtgcagtggcacgatctcggctcactgcaagctctgcctccagggttcacaccattctcctgcctcagcctcccgagtagctgggactacaggcacccaccaccatgcccagctaattttttgtatttttagtagagacagggttttaccgtgttagccaggatggtcttgatctcctgacctcgtgatctgcccacctcggccagccaaagtgctgggattacaggcatgagtcactgaaactggccctacaaattttcttaaagtgtgctcagcttaattaaaagtggatatgcaagttataggcataattgaaaggcctttatgtttttattttcttgggtcttgttttgctggaaaagttttktttttttttttctcagtagactgaattattcttctccattttgcattgccactctttttttttttcttttttttttttgagatt

SEQ ID NO: 902004 - DNA, 679 bp, Homo sapiens
gttattcagctgagaccattccatgttaattatcacaacacttcagtaatgtgtattatgtctcaatttttttttccaagagacaaagtctcactctgtcacccaggctggtgtgcagtkgtgcaatcatagctcacttcaacctcaggctgaatttcccacttcagcctcacaagtagctgggcctacaggcaagggccaccacgcatagctaaatttctttttttttttttttttttttttttgagatggagtctcgctctgtcactcaggctggagtgcagtggctcgatcttggctcactgcaagctccacctcccaggttcacaccattctcctgcctcagcctcccgagtagctgggactacaggcgcccaccaccacacctggctaattttttgtatttttagtagagacggggtttcaccatgttagctaggatggtcttgatctcctaaccatgtgatccgcctgccttggcctcccaaagtgctgggactacaggcatgagccatcacgcccagccactcttggctaaatttctttagtttttgtagagatggggtcttgaactcctgggaatcctcctgtctcagcttcccaaagtgctgagattataggcatgaaccattgcacctggcctatgttcccgttttttaacatgagaatgtgctgtcct

SEQ ID NO: 902005 - DNA, 597 bp, Homo sapiens
ttgtcagatggatagatagtgaaaattttctccctttccataggttgcctgttcactctgatcatagtttcttttgttatgccraagctctttagtttaattagatcccacttgtcaattttggctgtggttgcagttacttttggcattttcatcatgaagtctttgcccatgcctatattctgaatggtattacctaggttttcttttagggtttttacggttttgtgttttacatttaagtctttaatccatctttagttaatttttgtataaggtgtgaggaagggatccagtttcaattttctgcatatggctagccagttttcccagcaccatttattgaacaggagatcctttcttcattgcttgtttttgtcaggtttattgaagatcagatggttgtagatgtgtcatgttatttctggggtctctgttctgatagaataatttatattctgatagaattggtctatatgtctgttttggtaccagaaccatgctgttttggttactgtagccttgcagtattgtttgaagtcaggtagtgtgatgcctccagctttgttcttttgcttaggattgtcttggctatat

SEQ ID NO: 902006 - DNA, 600 bp, Homo sapiens
ttgttattgttgtatctctgccaggttttggtatcaagatgatgtgagcctcataaaatgagttagagaggattcccccttttttaattgtttggaatattttcagaagaaatattccaccattgcctctttgtacctctggtagaatttggctgtaaattcatctggtcctgggatttttttggttggtaggcttttattactgcttcaattttagaacttgttattgatctattcagggattcggctccttcctggcttagtcttagtagggtgtatgtgtcctggaatttaatcatttttttctagattttctagtttatttttgtagaggtatttatagtattctctgatggttgtttgtatttctgtgacgtcagtggtgatatcccctttatcatgttttattgtatctatttgattctttcctcatttcttctttattagtctagctagtggtctattttattttttwaaaaaaaacaggtcttggattcattgattttttgaagagtttttcatgtctctatctccttcagttctgctctgatcttatttattgtcttctgctagcttttggatttgttagctcatgcttct

SEQ ID NO: 902007 - DNA, 694 bp, Homo sapiens
tgtcttaaagaatttgccctgatattctgatcagatatatagtaacaaattattgcctagaaggacattatgtacatgaacaaaactagggctgacagtttgttcagtttgtagcagtttggagagttttatttcaagaaaaataaactgggtttttttacattttttaaaattgtactttaagttctgggatacatgtacagaatgtgcaggtttgttacataggtatacatgcgccatggtggtttgctgcacccatcaacctgtcatctacattaggtatttctcctaatgctatccctcccctagccccccaccccctctaacaggtcctgttgtgttatgttcccctcctcatgtccatgtgttctcattgttcaactcccacttatgagtgagaacaatgaggtatttggttttctgttcctgtgttagtttgctgagaatgaaactcagatccaatgtggctgaagaaataaacaagcccaaaggtagggcagacttagggatttattgataaaaagggaccaagaagggcatcaagaacccagattctttctatccctaggctatgccattcttaatggaawttttttcctcacatggattggaggatggctgcagcagctccaggcatcatagcctgatacaacagggtccaaaggcattatattgtccagccctacttgtggct

SEQ ID NO: 902008 - DNA, 562 bp, Homo sapiens
atatacttttcaagctatatgactatgtgtaaacgtgcattcatctaaagacataagttattaacttcttttaatctatakctaagatctgagtcctgaaaaccttcctctggagcctcaggtaaatttacttaatctaaatgggttcaggtgccggagtgattacctttctcttgtctgctgctaaatcatggaggtctggggagttccttcaaacccccaataaacttgtttgtggaggcctggggagtttcttcagatccctaataaaacttgtttaatcccagatgggtcttgttaagagtttattcattattttgtcatgctttaaggcccaggaaaggcctaggcaaaatgcttggtgggcttttgttacattccagcctttgcataaggacactggctctttcagcttttaatatttaactactcagtcagtactgagacagttgttatggaggcctgtgtgaaacctggcctgccacacaaggttagggaaaaaaatggattcaaccaacagattgtttcttctccctaagaaattacttttgcaatgaagaac

SEQ ID NO: 902009 - DNA, 445 bp, Homo sapiens
gaaaggggcagctcaaatctcagttcagattctttctctttagctgacctcttttgtctgcatcacacatacataggtcatagattagtcataaatatgggtagaragaattatggaccccatttttggctctttcccttctagaatttctttttttttttttttttagtggagtttcactcttgttgcccaggctggagtgtagtggtgtgatctaggcaggttcaagtgattctcctgcctgactccagagtagctgggattacaggcacctgccaccacgcctggctgatttttatatttttagtagagacggggtttcaccatgttggccaggctggtctcgaactcctgacctcaggtgatccgcctgccttggcctcccaaagtcctgagattacaggcgtgagccaccgcacctggcctcaccattgtcttgtctctg

SEQ ID NO: 902010 - DNA, 509 bp, Homo sapiens
agaaaaatcaagttaaaactccacagttctccaagatttttcattcattataagtaatcttggccaaacattgaggtgctagtcctttacaacacttataaaaatcaacctcattcatggattttgtgaagtttgttgaaatactgtaatagtgagagattggtttacatctagggtgatatttgctgggtctggaaagttaaagtgagaatgatctgattggttaatttctatgacatggatctaaactaaaataagatgcatacttaatgatagaaacttatgatataatgcccttatctaaacattatgtgccaagtgcctttaacattctgtgatattttaattttgtataatttgtatgaaaaatatgttggacataagaatgttttatatatatatatatatatatatatatacacataaatacacacacacacatataygtatatgtttgcttatgttatttgttaatgagtgcttttacctacacataatagagaatgcac

SEQ ID NO: 902011 - DNA, 509 bp, Homo sapiens
agaaaaatcaagttaaaactccacagttctccaagatttttcattcattataagtaatcttggccaaacattgaggtgctagtcctttacaacacttataaaaatcaacctcattcatggattttgtgaagtttgttgaaatactgtaatagtgagagattggtttacatctagggtgatatttgctgggtctggaaagttaaagtgagaatgatctgattggttaatttctatgacatggatctaaactaaaataagatgcatacttaatgatagaaacttatgatataatgcccttatctaaacattatgtgccaagtgcctttaacattctgtgatattttaattttgtataatttgtatgaaaaatatgttggacataagaatgttttatatatatatatatatatatatatatacacataaatacacacacacacatatatgtatatgtttgcttatgttatttgttaatgagtrcttttacctacacataatagagaatgcac

SEQ ID NO: 902012 - DNA, 539 bp, Homo sapiens
ctctttttcatctttcatttccatggtagatctttttcattctttttactttgagtctgtgggtgtcattacatgtgggaygggtttctttaaaaccacaaacagttggattttgcttcttcatccagtctgccactctgtattttaagcggacatttatctcatttacattcaggattactactgatatgtgtgattttgattctgtcattatgttgtttgctgattgttgtgtatacttgattgtgtagttgctttatagcacctgtgtgctatgggcttgagtgtgattttgtggtagcaggtgtcattcttttgaatccatgttcagcgctctcttaaggacaacttgtaggccttgtctagttgaaatgtactttctctcagtatttgcttgtctgagatgggttttatttctccatcacgtatgaagcacattttgatagaatatgaaatttttggttggaatgtttaaaaaaatgctgaaaataggtctcccatctcttctgctgagagatttgctgcatgcctgattgggt

SEQ ID NO: 902013 - DNA, 630 bp, Homo sapiens
gacctttctctctggctgcccttaacattttttccttcgtttcaactttggtgaatctgacaattatgtgtcttggagttgctcttctcaaggagtatctttgtggtgttctctgtatttcctgaatgtgaattttggcctgccttgctagtttggggaaattctcctggataatatcctgcagagtgttttccaacttggttccattctccctgtcactttcaggtacaccaatcagatgtagatttggtcttttcacatagtcccatatttcttggaggctttgttcatttctttttattcttttttctctaaacttctcttctcacttcatttcattcatttcgtcctccatcactgataccctttcctccagttgatcacattggctactgaggcttgtgcattcatcacgtagctctcatgccttggttttcagctccatcaggtcctttaaggacttctctgcattggttattctagttatccatttgtcyaattttttttcaaagcttttaacttctttgccattggttcaaatttcctcctgtagctcggagtagtttgatcatctgaagtgttcttctctcaactcatcaaagtcagtctctgtctagctttgttccgttg

SEQ ID NO: 902014 - DNA, 675 bp, Homo sapiens
cccacacatttatagtcaactgattttgacaaacgtgtaaagctaattcaaaacctaaaacgtgaaaggtaatcctttccagaaaaaggatraactttccaaaacactgtgctggaacacacatgcaaaaacaaaaaccctgatgcatacttcacaccatctacaaaaataaactcaaagtggatcatagatagacctaaatgtaaaacttaaaactaaaaaaaaaaaaaaattctggaagataagacaaagatctttgtatgtttggggtagattttgtgtatgcgacaccaaatgaataatctccaaaagtaaaaattgatataaattggattttcaaagaccaattaaagtatagtattggaaaggtaccagtaagataattaaaagacaaatcacagactgtgagaaaatatttgccaatcatacatctaataaagatcttgtattcagaatatataaacgcatttcaagacagaagaaaataacccgatgttttacatagacaatgactgagataggcacttcaccaaagaagttatgaagctgggtgtggtggtgtggtttcaattactcaggaggctgaggcaggaggattgcttgagcccaggggtttaaggctgcagcgagctataatcatgccactgcattctagcctgggtggcagagtgagag

SEQ ID NO: 902015 - DNA, 623 bp, Homo sapiens
gacccccaatttggaaagaatgaaaatattctgaaacactcaacactaaaactactgtacacagttgaatctttctaatgtctgagaaaatgctctacaacactatctggatggaggttaccctttcaaataaatgcctgacatcctttctttctcaaaagccaatagcatccagatatttgcacttttcggttgcttggtttctagacaaatgttagtggcccgatcattcctacaagaaatggcactgacttgcccttctccatggagacgatgagcacagccatgaactcaattcaaagagcagcagaagagtcaaaagtggcaccttgaaactgaattctctgttgtgttgattttctgagctttcaaagtgttattcatttttttctacctgtgaatgaatccttgatttctcaatctgcctactcgctgagatagatttcagcaaaataacagtagacatgggtttccttctcctctctctctctctctcttccccctctccaacttyccatcctccctctccatatctccccctctctaattcaccaaggtaacaaaagaaacaataattaagtcaatgagcatgctcgcatgtgcaacaaaaaatacctctctta

SEQ ID NO: 902016 - DNA, 673 bp, Homo sapiens
gctctgtgtctacacacaagttacttagcccctctgtgcctattaagggctgatttatgttccccaccaaaaattcacattgaagtcctaatgcccagtacctcagaatgggatgtattcagagacagggtattcaaagatgtgataaaattaaaatgaggtcattagggtgggtcctaatgcaatatgactggtgtccttagaagaagaggaaattaggacacagacatatacaggagggagatgatacatacacagggagaagaaggcagtcttccacaaggcaatgagagagtcctggaaccgatccttccttcacaacccagagaaggaaccagccctgccaacaccttgatctcagacttctggcctctagaactgtaagaaaattaatttctgttgtgtaagccacctggcctgtagtactttgtcacagcaggcctagcaaactaatacagtgcctccctttcctcatcaagaaaatagaaatgataatagtcccttcctcacagagatgtgttgagtacccagttcccagcactcagtaggtgtccagcaaatgtttcttgcactacttgtgattagtacagagtcttaacccaacctggtctctgcatgcttcatcttactcttctgtgtgagaaaaraggcttataatgaaagcagagaacag

SEQ ID NO: 902017 - DNA, 591 bp, Homo sapiens
ctaatttccagatgagtgccctggtggaggatgcacaggttatcttaagaatgccaagaaatggctgggggcgcggtggctcacgtctgtaatcccagcactttgggaggccaaggtggacggatcacttgaggtcaggagtttgagaccagcctggtcaacatggtgaaacctagtctctactaaaaatacaaaaattagctgggcatggtggtgcacacctgtagtccaagctacttgggaggttgaggcacgagaatcacttggacctgggagacagaggttgcagtgagccgagatcatgccgctgcactccaacttgggtgacagagggagattctgatacaaaacaaaacaaaacaaacaaacaatgcccagaaaagatcctgacttgtggtggtcttggtggggtgtcaggaaaacttcctacccaggaggggagggggatagctgggcaaagtatggaggctggaaactgcatcttacgtgctgtgccacgagtcttgttgtgttacaagatagtgagggcaggaattggaggagtgaggctggaggagtcagyggggacctcactatggagggccttccatg

SEQ ID NO: 902018 - DNA, 622 bp, Homo sapiens
agcttaaatttctccccagaaaatggatttttattttctatcacatggtcaggctgcaaattttccaaacttttacaccctgccacctcttgaatgttttgctgcttagaaatttcttccaccagataccctaaataatctctctcaagttaaaagttccacagatctctagagcagagaaaaaatgccaccagtctctttgctaaagtatagcaagagtgacctttgcttcagttcctaagaaattcctcatcttcatctgagaccacctcagcctggacttcattgtccgttgtctatcagcatattggtcaaaaccattcaacaagtctctaggaaattccaagctttcccacatcttcctatcttcttttgagccctccaaactgttccaacctcagcctgttacccagttcaaagtcccttccacatttttaggtatatttatagcagtaccccattctcctggtactagtttactgtattactctgttctcacactgctataaagatactacctgagactgggtaatttttaaagaaaagaggtttaaytgattcacagttccacatggctggggaggcctcaagaaacttagaatcatggcaaaaggcaaaggag

SEQ ID NO: 902019 - DNA, 627 bp, Homo sapiens
gaaagttataaaatgctaatgaaagagatcaaagaagatctaaataattgatgagatattctgtatccatggattggaagagtcaacataataaagatgacagttctccctaaatctgtaagtttaagacaatttctattaaaaatcttgtcagctttgtatatttttatttatttattattagctggttacttgaagctttttatagatgtagacaagtctagtctaaaatttatatgcaatgccaaagatgtacaccagcaaaaactattctatattgtatgaaaagaaataatgtgaaaaaatcactctacttgacattgaggcttactatataggtacaatattcaagacagtgtggtactggaggaggaatagataaaaagatcaacagaacagaagagagaaccaagatggagacccatacaaaagtgtcccagtgatttttttcaaaggtgaaaaagcaattcaacagaggaaggtacccttttcaagaaatggtacaggagcaataccattagataatacaggaagataccctttttaagaaatggtatgggagacactcatcagcagaagaagagaccttgacctaaacytcacacctcatacaaaaatgtgctaaaa

SEQ ID NO: 902020 - DNA, 617 bp, Homo sapiens
ctgtatacctgcaggctcaacaccatgtggaagctgtcaaggcttggrgcttgtatccttctgaagcaaaagcccaagctataccttggctccttttagccatggctgaaatggctgggatgcagggctttaagtccctggctgcacagagcaagggggccctgggcctggcccataaaaccattttttcctcctaggcctccaggcctgtgatgggaggggctgccatgaaggcctctgacatggcctggagacattttccccattgtcttgaggattaacattcagctcctcattacttatgcaaatttctgcagtgagcttgaatttctccacagaaaatgggatgttcttttctgtcacattgtcaggctgcaaattttctaaacttttatgctctgattcccttataacactgaatgtctttaacagcattcttgaatgctttgctgcttagaaatttcttccaccagataccctaaatcatctctcttaagttcaaagttccacaaatctccaggaaaggggcaaaatgcctccagtctctttgctgaaacatagcaagaagcgcaccttcactccagttcctaacaagttcctcatctccatctgagacc

SEQ ID NO: 902021 - DNA, 605 bp, Homo sapiens
tttttcaaaaatggattacatatttttgaaagccaactttattctccttataagacatgagtattgaccctatgttttacaatatctaaaactgtatagtaagtaccgttctctaccttagcatatatcaactctcattgaaactttaccatgtcaccattatgcatagtctctttatgtgtaaacttttttagtctagaaaaattatttttaaaaatagattatctctatcttctttcttaccaacccatcctctgggttaaatttgcttctttctaattttttttcatactcatacttttagttataaagtctgtaagttcaacttagtggtttatatctaaagtttttattttggctttacaattgcatgattgtttgccttgatgtataattccagattgacaattatcttccctaagcactttcattctattattccatttttgtctggcatttattattggtgatgaaacatctgcttgtcttgataataagacattctaattgccatttgctagtaagtaacctgtttttttgctttagaacgttayattttttatgttcttcagttttattactatatgtttactgtagatttattt

SEQ ID NO: 902022 - DNA, 548 bp, Homo sapiens
actttctatttcatgaggagctctrtaaggcaatcttttttttttctaaaggataattttggatacaagaaaaatcttcctctaattatttctacaaatgtagttatttttggcagattttgatggatgtacattgatggatagccacgtggatccagaaaataaaggtaagtatgtaccagagtgaatcaagaaagtcctaagatttgatatgtcagtccaggattctccaactagcttttctgtttccaactgaagacttctactctgcatttgactaaagcagaagatatgcaaggaagctcagtctctcaattgagtggattctgaaatttatcctgttgtcttcagctactaaggctaatttgcaaatcacactgtgcacgggtaagcataaactgtaagcatatatattaatcttcatttttttaaattgtaatcattcacatataagcctggtccacacttaatttctttcttggcttcattattttttttctgtcaaacattttaaattgctgtgttccaggtacttaatatatatatga

SEQ ID NO: 902023 - DNA, 671 bp, Homo sapiens
ggagtgtcctgtaaggtctaactcaagcactagagtgttgttgaagataaaccaattgataaaactttctatttcatgaggagctctgtaaggcaatcttttttttttctaaaggataattttggatacaagaaaaatcttcctctaattatttctacaaatgtagttatttttggcagattttgatggatgtacattgatggatagccacgtggatccagaaaataaaggtaagtatgtaccagagtgaatcaagaaagtcctaagatttgatatgtcagtccaggattctccaactagcttttctgtttccaactgaagacttctactctgcatttgactaaagcagaagatatgcaaggaagctcagtctctcaattgagtggattctgaaatttatcctgttgtcttcagctactaaggctaatttgcaaatcacactgtgcacgggtaagcataaactgtaagcatatatattaatcttcatttttttaaattgtaatcattcacatataagcctggtccacacttaatttctttcttggcttcattattttttttctgtcaaacattttaaattgctgtgttccaggtacttaatatatatatgagagtragatgtgatgtttattctctgacatctcatagcctggtttccaggtactggtcca

SEQ ID NO: 902024 - DNA, 618 bp, Homo sapiens
ccacatagtaaagaaaccataagtctaaaattttcaattttttaagaattggtgaacccaataggagagaggagaaaacaaccataaaaatcatgctctggaaggcatccacaaggcatgaaccacatgagactactgaggatttaacctcatggaatttgaactcctagaccacagatatgtatatgggcatataagaaagtgcaatgctaagaaagacaactgtaaattaaataactggaaggatttatatctggggattcgatatattaaagtcacttgaaaagacctttaatataaatattcgaaatgtgtaaataaataaagggattggtaacatccagaaaatacaaagagggaaattagggagcaagatgagacaatataaatcaacaaagtagaaattttctttttcttatttttttttcttctatatcttagaagaaactagaagagaaattagaaatcttagaagtaaggattactcattgcctgtgagacgttagacatgttacttaaccctgttcttttcagttttccagtctgtaagattggataactaatcgaggtgatgtggaatttaacatarttaaagcacttagaatagtgcttggtgca

SEQ ID NO: 902025 - DNA, 594 bp, Homo sapiens
acatcctaacatcacaatgaaaagaactagagaagcaagagcaatcacattcaaaagctagcagaaggcaagaaataactaagatcagagcagaactgaaggagatagagacacaaaaaactcttcaaaaaatcaatgaatccaggagctggttttttgaaaagatcaacaaaattcgtagaccactagcaagcctaataaagaagaaaagagagaagaatcaaatagatgcaataaaaatgataaaggggatatcaccaccgatcccacagaaatacaaattaccatcagagaatcctataaacacctctatgcaaataaactagaaaatctagaagaaatggataaattcctcaacacatacaccctcccaagactaaaccaggaagaagttgaatctctgaatagaccaataatgggctctgaaattgaggcaataattaatagcttaccaatgttcaacattcttaaagaaaagawtttccaatctagaatttcatatttggccaaactaaggcttcataagcgaagaagaaataacatccttttcaggcaggcaaatactgaaggaatttgttaccaccagatctgcct

SEQ ID NO: 902026 - DNA, 619 bp, Homo sapiens
aaaaaacatactttaggagaattatttttacagcaccatgtgttatcatcaattaraagagcatcacaatgttccatgaatgggtcatgattacatgaatttgggtgttgagggtacaaatatgaaacaaaggaaaatgagaaatagtgaatcacagatgaattcgtggacctcaggtcaagtgactcagaaaaaggtgaaacactaactgaagggaatattggtccgggataaagatcaagagtttatcattgaaggtgggaagttttgtacgagagccgtacctccaagcagaagtggcccatacacaattaaagatatgagacactgtctgggttgagaggatagaccatattagttacctgtaaatatatacccactaaacatcacatttaaatactcatagcagtgttgtcagtgacagaatatatattacataacataaatctctcatcactacccagatggaacataatttatttatgatacattatatactatttgtactaatgtaggtaaccaatgctagtgtatatttctaaacaataggatttatatccagccttgtaaagttttgatgaacttatatttgtcctctatcagtgagctgtgattattg

SEQ ID NO: 902027 - DNA, 668 bp, Homo sapiens
atatgtataaataagataatcgcttactagaattgtctatcaggtagatcatttggaattgtgtgggattcaatctgattctgctttgtaagatactgtcctaagtcatgcaactctggccctcaatcattgagcactcaacaatgatatttgctgcgactgacttcaatcaacactttaggaagtgtttaaattttaagtaacagaatgagttgtttacaattcaagggtgtttaattagcatttgaaagactttaatcaaaggcccacacttcagccacaagtatagcaagccattcaattagtgttatcttaatctacactagagaatttgttaattaacataaggaatggtaaaaataaattttcattatctaaatgagagttgtacaagatacatgattggttaaaaacaaaaagtacagttatcattaatgagatctaaaaatctgaggagctcagcaagcacactagttccagtgacccattaagacttgtccctttcacttgctagaagattttgtctcttgatccaactataaagttagatcatcctaacttgtccccttgtgaagcccctttcacagcaggctcctttctcttgtatccacctgcttcagcracttttctgcaagataagcaatcctacgggaccgccagatggttac

SEQ ID NO: 902028 - DNA, 657 bp, Homo sapiens
ctcaaggcatgtgcattttccttgcctaaaatatttcttttcccacgttggcttattcttatttgacctcagccctcattttaattttatttctccagagaagcttttcctggccattcctcacctcctaaattagatttagtttactctcacacagcaatctttaccgtcatagggccatcaaatcataaagaaatcactaagttttcattagaccatgatatcaaagcagactggcaggataattgcttgaatgacaatttttaagaatcctcctattagtgaaaaagacttgagtatcaggatattaacattaagacctttcattatattcttaggaggttgtcaaaagacaagtgcttcatgtacagatactaagattgaaggaaatttcccagtgaccattcaaaagtgctcagacccatccaagggaaattgttccacattattaagtagataaaggagggttatagaaaacccaaaaggacaaattaccctttgtggaacaaaatgaagtagttgtaaatattggctgagtgwgacactctccttggcagcattagaaactagatcagcatttcagaaaaaattcgcaattcagaaaggcaataaattgtaggacaaaatcagaaacagtagtcagaatgattttacaac

SEQ ID NO: 902029 - DNA, 647 bp, Homo sapiens
catctgcacttaaattattaagcatcactaatgttctagaatctccccaagaaagccagaaaccaggctgctttgtaggctttctgtgatgactcatcttagacttaatgacagagacacagaaggtaaaaatctggtctcactttacctgcttccagtcctactgctggaccaacctatcagcagtacttgggttaaaaatccaaccaaccataaaattccacagaaactgaagtacttggcaaataccgttcatgtgtcctggtctgcaagcgtttgtgaatttggaacatattctaagattaaaacaaagctgtaagtgataccagtgtttagagagctagtagcattatatagctctgcgtaaacaccaccagcttcctaactattgtactaagccaacctgcaggactagcactgctttagtagatttatattctactaaattcctcagttaggatgggctgattcaattgcattcacttctgatttgagccatcacgttctaaggccataggtactcayatctagatctcaggcatttcacttgaccttgacaaacttcggacacctcagtgaccagagctggttaagagaccagcattgtagttatggccagctctagaatgtggttaaatctggctcta

SEQ ID NO: 902030 - DNA, 632 bp, Homo sapiens
tcaaaacatcatgtacactacaaatatatacaatttttatttgtcrattaataaaaaggaaaaaagaaaaataactggctacagtgaggagaatgacttcaagctgtacaatcctggaagtaagatctcagaacgtttctgtaggttgttatgctgtctgtaattacttgaaaatacttatgttctgaccttttgcatgagctatatgtgtctgttaatctatgagtgtggttagcctgatggttggaataccctaaccaggaatgcacactcacacttatggtggcagggtgaggctattagttaacatttgagagacaccaaccagctcctgcaaactcttccactatgactatctgatctgccctggaggagttagtaattcacataggggaatgttggaaatacattttcattcttgaattgagttgtattccaaatagatgggctgattagaaatgtctgctttcttgagaggtgcaaacctcagcaatatcagccttgcaactcttgagcgaagggtccctctgatgtgaacccgtgttcctaccattccttacggattttctctcatctgataggacaaggttctgccactagaattctgtcagatttgtctctggaaactgttt

SEQ ID NO: 902031 - DNA, 641 bp, Homo sapiens
acatcagagtcacactgaccatattcacagatgggcatgtaaccccaaatgccagtatgtaaccatacactgacaactataactatcacttggtcctaaatcctcaagttgacacgaccagcccattttctccctgatactgaagggaagccataacatcatcgggagcatgaagagtgtttggtgagccctgaaccaaggtgaggggtgttggtattacatttcaattgtcaaatcactctaggttgcaattttcttgatttccttgtgcattcatctccaacagagacgcagtccctttagaaattggagtccatggggtggatctctctacccttaactgtgttagggtaatgctgacaactcacgcctctctgaatgattttcttagggctttcatacttagcctctgctgattcccctagaagttcagttccatttgtcaagtactggtctggtctgaaagccattctttccattacagtaacttcacacatttctgctctaattcaattggaattgagtttacagttggagcrgagaaaaaccttattcactattatttgttttccctcatggcaactctcaagtctattgttttaaaataaagcaataaaataagccacccctaaaagtaatag

SEQ ID NO: 902032 - DNA, 624 bp, Homo sapiens
tttaaagaagtgaagaagagaagaatagtctgctataattagcccaatatttatcatttttattgtttttactcctccctgakgtagtaagcttccttctcatcatttcccttctgtctgaagaactttctttagcaattctttaagcagatctgccagcaatgaattcttttagttttctttcatcatagaatgtctttatttcactttcatccctgaagaatatttttgccggatatagatctggtatgacagttcttttcttgcaacacttaaaaaaatatgacacttcctcctggaacccttgatttccaatgagagaaaattacaataattagaaatcaatgttctcctattggtaatgcatcatttttttctctggctgttttcaatatgttttttgtctttagtgtttgtttggcagcttgattctgatgtttcttggcatggaattcattgggtttatcctttttgggatcacacagcttcttgtgtctataactttatgtctttgccaaatgtgggaagttttcagccattatttctgcaaatattttttgttactgaatttttcctgtctttcctatgaatgacacaaatgttagatcttttgttattgaccca

SEQ ID NO: 902033 - DNA, 455 bp, Homo sapiens
ttgtgactaattcaaattagtcacaaatgtgactrtaagtgtaaaatacacaccagatttcatagatatagtactttaagaagaaaggtaaaatatattaatgatttttatgttggttacataatgacatgatatattttgcatctaatgggttgaattaaatatattattaaatttgttttaaaactggaggaggtgataaaagagtgacaatttatcttttgttcaataaggatataaaaactgaaatcagtgacattaatattttatcaaataatgaacattttgtccacccaattaagtagggaaaacattctaaaataggacagctaacattgtattcaatataaagataaataggtaaatgtagataaagctccttatatattgattacagttttgtttttttttttttttgtaaatttctacagaccaaggggaatacagtcctttct

SEQ ID NO: 902034 - DNA, 620 bp, Homo sapiens
tttttattgaactattctttaattccttttagcatgctttgtagttttcagtgtacaagacatttgcctcattggtamgttaatgcattggtattttattctttttgatgcaattgtaaatgtaactattttcttgacttcctttttggattgttcttcattagcgtataagaatgaaactaatgtttgcatgctgattattgtatcctgctactttgctagatgtatgagctctaacagttatgtgtgtgtgtctgtgtgcatgtgtgtgtgtggagtcccagctaatatggctagaacttccagtactatgttgaatagaagtggtgaaagtaggcatccttgtcttgtgatcttagggaaaaagtttcagcctttcactatttagtataatgctatctcagtttttcatatatgacttattatgttgaggtggttatattctattactagtctgtttagtgtttttcttatactttaagttctagggtacatgtgcacaatgtgcagttttgttacgtatgtatacatgtgccatgttggtgtgctgcacctgttaattcgtcatttacattaggtatatctcctaatgctatccctccctcctcccccaaccccac

SEQ ID NO: 902035 - DNA, 615 bp, Homo sapiens
atttcagaaagagctctaatgtgcaccaggcttaggaccaccgagtggtataattgaagcactcatgtgcagtgtggcctcctgactccatcctargaggatccattaggttgaatcatatggaatgacagatatttatctgtttttcatatgcaataaatggatactttatatgactcaagctaatccattcaccttgcagggcctgagactcagggattaggatgaagcaaataattcactagccttgagtacaaaagattcaataatcaagataaataatattttagtgcaatatatttaaaaaatcaaagttaatgcaaaaattctgcgatgaacaaaatatcatcattttaaaggaagacagaatcccactttgcacgtacaatgaccctcctcatttgcttaccctagtcctggctctctcattagctctgtgtttcagcatccccattacaaaatgggatgcccagagttgccgtgtttacccatagagtggatgtgtggatcaaataaaataataaatgagtaagtacatttgtaaacgaaaggttctattgccgaatagtcatttatatcacaagagcgtgtcatacgaaactcctgcactgtcaa

SEQ ID NO: 902036 - DNA, 615 bp, Homo sapiens
atttcagaaagagctctaatgtgcaccaggcttaggaccaccgagtggtataattgaagcactcatgtgcagtgtggcctcctgactccatcctaggaggatccattargttgaatcatatggaatgacagatatttatctgtttttcatatgcaataaatggatactttatatgactcaagctaatccattcaccttgcagggcctgagactcagggattaggatgaagcaaataattcactagccttgagtacaaaagattcaataatcaagataaataatattttagtgcaatatatttaaaaaatcaaagttaatgcaaaaattctgcgatgaacaaaatatcatcattttaaaggaagacagaatcccactttgcacgtacaatgaccctcctcatttgcttaccctagtcctggctctctcattagctctgtgtttcagcatccccattacaaaatgggatgcccagagttgccgtgtttacccatagagtggatgtgtggatcaaataaaataataaatgagtaagtacatttgtaaacgaaaggttctattgccgaatagtcatttatatcacaagagcgtgtcatacgaaactcctgcactgtcaa

SEQ ID NO: 902037 - DNA, 570 bp, Homo sapiens
ttaaaacactgatagagttgggaaaatactctggaatgagtgaaagataaacactcccatttttacttaaatgatttttaaaatatttttgaatgagaaaaatgataaaagtgaaccaggacttgcataaaacttagcacactaagttccaactcagaattttttttcagtccaatatgtaggtcaacaaaaatgacctccagtttgtctggaaacttttcagagacttacgtgataaaaaggagaatctattttaaatacaacaatgtgtacgtaccatcacctgatatcactgtccagttctgatgtacacccatagaattcacctcaagtctatgaacaaactggatcagatctttctctcaggtttttttttaattttaaagtgatttatcaatgaattgaatgaataaaagtaggttaatcttgtgattgacagacaaaataaatttcaagatgattgtcatataacmttttagaaattgatgcaaatttgtgatttgaaatttgggagaaattaacaaattggaaagccttgagaaaagaaaagaaatgtcttggaaggagaaa

SEQ ID NO: 902038 - DNA, 613 bp, Homo sapiens
acaacaaaaaactccaggccaatattcttgatgaacattgaaacaaaaatcctcaaaaaaattgtcaaatcaaatccagcagcacatcaaaaagcttattcactacactcaaataggcttcatccccaggatgcaaggttagctcaacatccataaatcaataaatgtgattcattaaatagatacaaataaagacaaaaaccacatgattatctcaatagatgcagaaaaggcttttgatatatttcaacatctctttgtgttaaaaactctcaataaattatgtattgaaggaacatacttcaaaataataacagccatgtaggacaaaccaataggcaacttcatactgaattggaacaagctggaagcatcccccttgaaaactggcacaagacaaggatgtgctctcttgccattcctattcaacatagtattggaaattctggccaggcaatcaggcaagagaaagtaataaagcgcattcaaatargaagagagaaagtcaaactattcctatttgcagatgacatgatcctatatctagaaagctccactgtctcagccccaaaagcttcttaccctgataaacaacttcagcagtctcaggata

SEQ ID NO: 902039 - DNA, 689 bp, Homo sapiens
attgaagacccacactggccccagaatgaagaagyaaaccactgattaattcactaaatattagtttacaagaacttcttaaagtacatgtgttatatcaaatgaggtaatagacatttacatttaacatactatatgaaagctttttcaaattatacattagttaaatacatgttattttggttgttgtaaatgtgaacatttaagaacaaaagtgaattaaacttaatccttccatcataaacaaatgtcagctggcttgggtacctttggctcatttttatcatgtttgttgagagctctgtcttttatcaaaagttgaatttgcattactattgataaatcctctacaagatttttcaaagagttctttaaattttgttgtaatttcagacacaatattcaagcactgaactcttcagcccagtgattttcctgtggattactcatcagaagatacacacttactatagtaactccagaggctataaatccctggaaagttcattcgaatgaaatttctatatcctcattttcctagtaccaggatagaaagtattgaatatttctgaaagtctctctcactgcagaatagcaggcaaaattaaaaaagaaaaaaaccaaaaaaaacacaccaagattcttgagtagagaagagctagagataggctgatatttttcattccata

SEQ ID NO: 902040 - DNA, 576 bp, Homo sapiens
agtggtttcagcctgatgccaaggacagttttttcctttactacatctctctgcttgggttgcattctccacaagcagccctctgattatgatttggctcccatggggcttttctacaggtagggattgtgatagtcttacaggagtgtctgtatctggtctttccaacagatgcagctccccctgcaaattaataaatcatgattctggttatgaccattggtgtctgggggattggtttgtcttgatcagcatccctgagtctagttaaccctggggtcctcgggagacaagttcacagacctgaaggccaaacactggcagagccagagggatttaggggacctggaagctcctatagacacctcctttaaaatcggtcccaccttcaccttcagacatccacccactatgtcaaagcacccagaccatctcctcttcattttacaactgctttatggctgtaataaaagaaaacagggatttatttaggctgtatagtgtgttcatgtcatgcmttctcaaataaaaaaacacacacacacgcaaggtgccaggcactgtgtcatgttatta

SEQ ID NO: 902041 - DNA, 592 bp, Homo sapiens
caatgaatacaaagttacagttagcaagaataaatgctggtgttctattgcacagtagggtgactatagttaaaaataatgtatatttcaaaatagctagaagataaaatttagaatgttttcataacaaagaaatgataaatgtttgaggtgatggatttgctaattaccctgatttgatcattaccaaagtttacatgtataaaacataagtttgtcttccataaatacatgcagttattgcatatcaattaaagagaaagtaaaacatagaaacatagatgatgaggaaaaaaaaacctatctgcttcagccttataggaaaaaatatatatgagatattgtctattattaaatctctaagatgtaatgtatactattatagaaagagaaattccttatagaagaaataagtcaatgtacattaatgcttattgaaggataagctttatgctggtaagaaattttgatgttgttattgatgtttaacacacagaakaaaacagtccctgccacattacacttgattaataaatatttgatgaatacatgaataaatttagctcttctgggaaggcagagactagaaagc

SEQ ID NO: 902042 - DNA, 617 bp, Homo sapiens
ccttctgaaactattccaaacaatagaaaaagagggaatcctcccaaaytcatttttgtgaggccaacatcatactggtaccaaaacctggcagaaacacaacaaaaaaggaaaacttcaggccaatatccctgatgaacatcgatgcgaaaatcctcagcaaaatactggcaaactgaattcagcagcacatcaaaaagcttatctgccatgatcaagtcggtttcatacctgagatgcaaggctggttcaacattcacaaatcaataaacataatccatcacataaacagaaccaataacaaaatccacataattatctcaatagatgcagaaaaggcctttgacaaaattcaacactccttcatgctaaaaactctcaataaactaggtatcgatggaacgtatctcaaaataataagagctatttatgacaaacccacagccaatatcatactgaatgggcaaaaactggaagcattccctatgaaaaccagcacaagacaaggatgccctctctccccactcctatttaacatagcaatggaagtcctggccagggcaaacaggcaagagaaagaataaagggtattcatatagaaagagaggaagtcaaat

SEQ ID NO: 902043 - DNA, 617 bp, Homo sapiens
ccttctgaaactattccaaacaatagaaaaagagggaatcctcccaaactcatttttgtgaggccaacatcatactggtaccaaaacctggcagaaacacaacaaaaaaggaaaacttcaggccaatatccctgatgaacatcgatgcgaaaatcctcagcaaaatactggcaaactgaattcagcagcacatcaaaaagcttatctgccatgatcaagtcggtttcatacctgagatgcaaggctggttcaacattcacaaatcaataaacataatccatcacataaacagaaccaataacaaaatccacataattatctcaatagatgcagaaaaggcctttgacaaaattcaacactccttcatgctaaaaactctcaataaactaggtatcgatggaacgtatctcaaaataataagagctatttatgacaaacccacagccaatatcatactgaatgggcaaaaactggaagcattccctatgaaaaccagcacaagacaaggatgccctctctccccactsctatttaacatagcaatggaagtcctggccagggcaaacaggcaagagaaagaataaagggtattcatatagaaagagaggaagtcaaat

SEQ ID NO: 902044 - DNA, 549 bp, Homo sapiens
acatggcctatttttaattacttatttgtttttaatattttttttctttttcttatgtagtctcatgtgagtgtcacagcaaagacagagggtgtgaattttgcagagttccctgtttactggtcaacatttttagcatgtagctaaaaataataattttgcaaggttatttattacttgtttacattatttgaacttttatatttcttttttgagagaacttcagtaagcagggcacaatatattgctaaatacattttttaaaggattttcaaaaacctttctattgtataagagtaatttaatataaaaataattttttcattatagatttcttcttttttatttcagtaggttttaggggaacaggtggtgtttggttacatgcataagttctttaacagtgatttccgagattttgacgcacccatcactcgagcagtgtaccctrtacccagtatgtagtcttttatactttaccccacccttcccccccaagttcccagagtccattgtataattcttatgactttacctcctcatagcatc

SEQ ID NO: 902045 - DNA, 641 bp, Homo sapiens
agaagtcctaatccccagtgtgatggtacgtggagatggggcctttgggagacaatgatggttggattaggtcatgggggttgatccttcatgttgggattagtggcttwacaagaagaggaagagagaccctcacccccaattcccagagtacatgcattaaggaaaggccttttgagcacagaaccagatggcagctgactgaagccgggaagaaagcccttaccagaaaccaaacatgctggaccttgaccttgaacttctcagcttccagaactataagaaatacatttctgtttttggagccactcagtctatgataatgtatttataggcagcctctccaggctaataccacttcttagaggaaaatttatagcattaaatgcttatatgagagaagagtagaaacacctcagatgaatgacttaagctttcactttaagaaacaaacaataattttaaaagagcaaaagaaatacaaaataagcaggattaagaaaataacaaatataaaagagaacacataaaacagaaaacaaaattttaattgttgaaaccagaaactgtttctttgaagaagatcaataagtcaataagcctctaaggatattgattacaaaaaaatttaaaaacataaa

SEQ ID NO: 902046 - DNA, 641 bp, Homo sapiens
agaagtcctaatccccagtgtgatggtacgtggagatggggcctttgggagacaatgatggttggattaggtcatgggggttgatccttcatgttgggattagtggctttacaagaagrggaagagagaccctcacccccaattcccagagtacatgcattaaggaaaggccttttgagcacagaaccagatggcagctgactgaagccgggaagaaagcccttaccagaaaccaaacatgctggaccttgaccttgaacttctcagcttccagaactataagaaatacatttctgtttttggagccactcagtctatgataatgtatttataggcagcctctccaggctaataccacttcttagaggaaaatttatagcattaaatgcttatatgagagaagagtagaaacacctcagatgaatgacttaagctttcactttaagaaacaaacaataattttaaaagagcaaaagaaatacaaaataagcaggattaagaaaataacaaatataaaagagaacacataaaacagaaaacaaaattttaattgttgaaaccagaaactgtttctttgaagaagatcaataagtcaataagcctctaaggatattgattacaaaaaaatttaaaaacataaa

SEQ ID NO: 902047 - DNA, 617 bp, Homo sapiens
acaagccagaagacagtgggggccaatattcaacattcttaaagaaaagaattttcaacccagaatttcatatccagccaaactaagcttcataagtgaaggagaaataaaatcctttagacaagcaaatgctaagagattttgtcaccaccaggcctgcctcacatgaactcctgaaggaagcactaaacatagaaaggaacaaccggtaccagccactgcaaaagcatgccaaattgtaaagaccatcgatactaggaagaaactgcatcaactaataggcaaaatacccagcgaacatcaaaatgacaggatcaaattcacacatagctatattacccttaaatgtaaatgggctcaatgctccaattaaaagacacagactggcaaattggataaagagtcaagacccatcagtatgctgtattcaggagacccatctcatatgcagagacacacataggctcaaaataaagggatggagraagacctaccaagtgaatggacagcaaaaaaaagcaggggttgcaatcctagtctctgataaaacagactttaaaccaacaaagatcaaaagaaacaaagcaggccattacataatggtaaagggaacaatt

SEQ ID NO: 902048 - DNA, 499 bp, Homo sapiens
aaatggaatgaatgaatgatgtgattgtgatatctgaatatgctagagagktaatgcaaaaagaaggcgcgtctggataagctattacaagagtaaggaagacgagagaagacaggaataaaaagaagaaaatgagagagaccttatctctacgaaaaactgaaaaattagccgcatgtagcggcacacaactgtgatcctagctatgtgggaagctaaggctggaggattacttgagcccaggaatttgaggctgcagtgagctatgatggccccattgtactctagcttgggttatagaggaagactctgtctagttttttctctgtctctaaaaaaacaaacaaaaataatacaattataaaatagagcaactacgcagtcagtctgaggaaatttgccactactttgtgtcccagtttagcatctcttaaaggtacaaaaacatctactttgaatgcaactatgcacttgaggcaagagaatagggtctggaggc

SEQ ID NO: 902049 - DNA, 620 bp, Homo sapiens
tctcaataaataaataaataaatraataaataaatttattacatcttgtcttatgtctagcctatggtctatgctgaagaatgctttatgtgtgcatatgaagaatgtgtaatctgttgttgggtgaagtattatttatctatcatctgtctatcgtctattaggtctagttagcttatagtgttggtcatattctcaatatctctatttatcttctgtttagatatcatatccattattgaaatggtgtattcaagtctctcattattattgtatagctgtccatttctcctgtcaattcaggctatgtttggtttatatatttgggggctttgatgtttgatgaatatatgcttataattgttatatcttcttaatgaattgaccattttaacaagatataatgatgttatttatttcttgtaacaatttttgagttaaaatctattaagtctgatattaaacagccactacagatattgtttggttactatttgcaaactatttgtgtctctgaacctaaagtgagtctcttatagacagcatataattagatcattttaaaatccattctgtcagtctctgatttttaattgtcaagtttaagccatttacattta

SEQ ID NO: 902050 - DNA, 602 bp, Homo sapiens
tagaagggatatatatatatattccttctacaaatataaattgtaatatatatttaaattgttatatatatatatatatatatatatatatatatatatatatatatttaggrctaagaaagacatgactttgaatagtaacccagtaccattttctatctatctatctatctatctatctatctatcatctatttatcatctattctatcatagtgataaatatacataacataaagtttaccattttaacctttttttgagtgctcaatttagtggcagtaaatacattctcagtgttatgcagtcattgccactatccgtttcaagaactttgcatcaccccaaactgaaactccacacccgttaaacactaactcaccattcctccctccccacagctcctagtagcctctattctacttctcttctccattaatttgcctattctaggtacctcagtggaataatgcaatatttgtccttttgtgtttggcttatttcgtttagcatacacactttgaaggtttattcatgttgtagcttacatcagaatttcattcctttttaaggcctaaaaataatacattttctgggtgctgt

SEQ ID NO: 902051 - DNA, 630 bp, Homo sapiens
gataaagaaaaagaaaaaagccaggcacagcatgtaaatggcggaagttaaatctgaatctagggagtctaggtctagagtctactcccttaaatcactgcgctatagtgcccttcacccttcaattcccttatgagctcccacagatctttctagcaccaacttacacgtctccttaactataaagccttttcggaagcagaactgactttcaccctcttttgtactatcattatttttcagcattgcatatatcacaccatattgcaatgatttgttgacatggccatctcttcattagagtgagaggttctagagaacagaaactacctaattcattcttatgtccctctcatcaatcacaatgcctgccatagcaagcattcactaaacatttacagaactgaataaacttcagtagagatgcctatttttattcaaaaacatttcaagttatctacacagcccaataattaacctactcttgatgcactcagttttagctataaagaactgtatatattcacttstaaaaattggtaacaaaacaaaacaaatacttaagttgtcctaagaatatctgttagtgtcctccctaaaccaatacacaatatctaaaattcagcttag

SEQ ID NO: 902052 - DNA, 591 bp, Homo sapiens
gttagcagtctgagtccagtggaggagggggatggataaggcatcatttgcttaaggagcagggatgacctagagctgtagtgttaaagaggtgcttattataaccctagattataatgtggcagtgtgtaccctgatataaacattttatgttcagaagattttatatgggcttgttaatgtgcctgtcacagaaaggtgctagggatacaaatatcaggaggattacctgggtctccaagactagtctataaggagagacagacatgtaactaataatggccatcaattgttcagcacttattttgtgatcagcactcaaggctaggtactttatgtacatttcccctttcttccttgccacaacagtgcaatcttgcaacatgacatgctgactctgataggactctctccatctcacaaatgaggaaattgaggcttgtgggggttgaaatttcttgcctggagtcacacagctagtaaayagccagcctgcaatttttaactcacgcccatggttctatccactacactgttctgcctcctctaaaactccatccatgtggctgagtccctgtattagtcttttct

SEQ ID NO: 902053 - DNA, 534 bp, Homo sapiens
tcttctgcatgtggatagacagtttttccaacattatttatggaggagtctgtcctttccccaaaatgtgttcttcaaacctttgttcaatatcaattgaccttggatatgtgggtttatttctgtgctttctatcctattccattggttgatatatgtagttttatgccagtactatgctgttttgattactataactttataatgtattttgaagtcaggtagtgtggtgtctccagttttctttcttttgcttaaaattgctttggctattcaagatattttgtcattttatacaagttttaagattgtttttcctatttcggtgaagaacaacattagaaatttgataggaattgcattgaatctgtaaatcacttttgatggcatggatattttgacaatattaaatcttctaactcatgaacataargtatcttttcatttatatgtgtcattttcaattgatttcaacaatattttatagttctcattgatcttttagctccttggttaaatttactcctaagtatt

SEQ ID NO: 902054 - DNA, 659 bp, Homo sapiens
gttctcagcttcctcagggtcctcctacacatcttcattccaagttgtagtgtcccattcttttctaattaatgtcctcactttaacagtagacacctggtgaggctgcacatgcacctttcgttgcaggtcagccacttgcatgataagagcttgtgtctgatttttcaccatttcagctctttgtctacaggagataagactctcactcagggcaatcttagcggatttgaggctcagtatctgcttgtgaagcctggagttagaatccctgagttcatcatttgtttttcatcactttgtccagtgaacttaggagcagccaaccaacttctttatgtttcttggttctccacatttagtcaaaggtattatgtgtagaatccctaaagtccttgcctctctctagccatgaatcaggagtgtcaaatgcactcatttggcgtaactctctaaacagttcatgccaaggatcatcagtgttctccatactattagaagtatagtcctcagcattttgaggtctaattatattaaacagtcaactcyagaaatccgaaaaccaatgaaagaactgcatccttaatattctatttctctgtaaacactcctggcacaaaagtctgtattagtcagggttctctagagggacagaacta

SEQ ID NO: 902055 - DNA, 413 bp, Homo sapiens
cagtggattattgtaagcttaaccwcatggagttaagactccagctgaagcttctgtaccagatgtggtttaactgattgaggaaattaacatattcccgggtacctggtatgtagcattaatctggaaaatgttttgttgggtttttttcctccatacctgtcaataaagtctaccagaagtagttgctttcagggggaaaggccataaatccaccttcactgttcccctacctcaggggtaggtcaactctccagtcatgtaccataatttcatccatagggatcctgattgccttttcattccacaatatatcatactggtctactacattgatgacattatgctgattgaacctagcgactgagaagtagcaatgactctagacttactgcatatgtatttgaatgtca

SEQ ID NO: 902056 - DNA, 620 bp, Homo sapiens
taccatttctactgaaactattccaaaagattgaagaagaggaactcctccctaactcattatatgagtccagcatcatcctgataccaaaacctggcagagatataacaaaaaaagaaaacttcaggccaatatttttgatgacatcaatgcaaaaatcctcaataaaatactggtaaaccaaacccaccagggcatcaaagcttatcaaccatgatcaagttggcttcatccctgggatgcaaggttgattcaacatatgcaaatcaataaatgtgattcattacataaacagaactaaagtcaaaatccacatggttattccaatagatgcagaaaaggtctttgataaaattcaacatccctttatgtttaaaacatcacactctggggactgttgtggggtggggggagtggggagggatagcgttaggagatatacctaatgctaaatgacgagttaatgggtgcagcacaccagcatggcacatgtatacatatgtaactaacctgcacattgtgcacatgtaccctaaaacttgaagtataataataaaaaaaactctcaataaactacgyattgaaggaatacctcaaaatagtaagagccatatatgaca

SEQ ID NO: 902057 - DNA, 524 bp, Homo sapiens
aaagaacggttcacagaaagctttgagcagtgctgagcaaaacatgcttagcgcttcaccagtctcaacccccagggatccccacatagactgtgcagaaaccactctgtctctcctacgcacaccctctccatgtagcctccacactgctgtgcctctcctcttcttccaccataagccctacacatggtctctccgccaatactacccgctgcaaagtgcagccacgttgcacactctgactctttccagcaaggcccagtctcctgaagatgtggggaataaacttttaactacaattcaatttaatttaaaagaattacaaagtgtataatctgtgttcaaggcccatggctaagtgctatgaaagtcaggtgaggaacaaagaacatttgcayagttttggccccctgagagcatgcaatgtggtgaaagccaaaaaaaaaaaaaaaaaaaaaaaaaaggagaagtactaaagaaatatataatttaatgttgtatattgtagaagtgctgagaaaaaa

SEQ ID NO: 902058 - DNA, 524 bp, Homo sapiens
aaagaacggttcacagaaagctttgagcagtgctgagcaaaacatgcttagcgcttcaccagtctcaacccccagggatccccacatagactgtgcagaaaccactctgtctctcctacgcacaccctctccatgtagcctccacactgctgtgcctctcctcttcttccaccataagccctacacatggtctctccgccaatactacccgctgcaaagtgcagccacgttgcacactctgactctttccagcaaggcccagtctcctgaagatgtggggaataaacttttaactacaattcaatttaatttaaaagaattacaaagtgtataatctgtgttcaaggcccatggctaagtgctatgaaagtcaggtgaggaacaaagaacatttgcacagttttggcccmctgagagcatgcaatgtggtgaaagccaaaaaaaaaaaaaaaaaaaaaaaaaaggagaagtactaaagaaatatataatttaatgttgtatattgtagaagtgctgagaaaaaa

SEQ ID NO: 902059 - DNA, 689 bp, Homo sapiens
tgtggttgtttgtgtggtcaatggtttggggcttcctgctcactgaaggatggtggttttttgtttggctttttcttccttcttctacctgagaagaaactgggggagaaatagttaaccctgcaccgtttgtgtgtgcttttacttccagcttatcagagcagggggcagtggtgttcccaaggccaggacataggctccttcaagtttgccccttgggttagagagaaagtttcaaaaatgaagcttctcatctaatctaagttactttattaagtctttgcttctgagatgggaggaaaataattataattaaggaagatataacaatattctttttcctctcttggggactgcaggaaaaagcttacgtccatgtggaaaatcaagctatcctctttttaatctagtaatcctactcctgggaatttattccaaggacagaagtcaaaagaacaaatgctgtatatacacagtgatctgtatgtagtagtattagccatagtagcaaacaatggaaacaccctgttaggatgtccccaacaggctgatcaaacacattatggaacagcaaataagcaaarttttctccagctattaaaattacagctaggaagaaaaaaattcatgcaattttaggaaatggtagtaaataaaacattggacacaacatatgcatattataattg

SEQ ID NO: 902060 - DNA, 689 bp, Homo sapiens
tgtggttgtttgtgtggtcaatggtttggggcttcctgctcactgaaggatggtggttttttgtttggctttttcttccttcttctacctgagaagaaactgggggagaaatagttaaccctgcaccgtttgtgtgtgcttttacttccagcttatcagagcagggggcagtggtgttcccaaggccaggacataggctccttcaagtttgccccttgggttagagagaaagtttcaaaaatgaagcttctcatctaatctaagttactttattaagtctttgcttctgagatgggaggaaaataattataattaaggaagatataacaatattctttttcctctcttggggactgcaggaaaaagcttacgtccatgtggaaaatcaagctatcctctttttaatctagtaatcctactcctgggaatttattccaaggacagaagtcaaaagaacaaatgctgtatatacacagtgatctgtatgtagtagtattagccatagtagcaaacaatggaaacaccctgttaggatgtccccaacaggctgatcaaacacattatggaacagcaaataagcaaaattttctccagctattaaaattacagctaggaagaaaaaaattcatgcaattttaggaaatggtagtaaataaaacaytggacacaacatatgcatattataattg

SEQ ID NO: 902061 - DNA, 593 bp, Homo sapiens
accctttgggccaaatggaacccagccaagagctaaaccagatcttttttctgagattttctagctttaactctaagtcagcacttaacctcagcactattcacttttaargttgatcattctttgttctgagggacctcctgtgcatgataagatgttttagcagcttttctggcctttacctactagatgccaataacacccctccccctccagttgtgacaaccaaaattgtctcaagacactgccaaatgggaggtaaaattgcttctgtggggtcctcttctcctctgccctgcaacccaccttttgagaatcactgctctaagtgtattacataattggttgatcaagaatgttttcccaattttagttctacttttaaatattttgtcgtattttaagtatcttggtggaataggctttacttttaagaactgtaaaaataaactggaaacacatttctaatttaggggtgaaaatgagaacgaggtctttccttgatttgcaaattcaatgttaagacctttgcatacctagcacagtgtttttcagattgcagttggggacacattagggggtcatgaaatact

SEQ ID NO: 902062 - DNA, 650 bp, Homo sapiens
ctggtgggcggtgattgaatcatggtggtgctttcctccaagctgttcttgtgatagtgagcaacttctcacgagatctgatggtttaaaagtgtgtggcasttcccccttcaagctctctctctcttctcctgccaccatgtaagatgttccttgcctcctcttccccttccaccatgattgtaagtttcctgaggcctcctcagcaatatggaactgtgagtcaattaaacctctttactttataaattacccagtctcaggtagttctttatagcagtgtgaaaatggactaatacagaaaattgatgctagaagagtagggtactgctataaagatacctgaaaatgtggaagcaactctggaactgagtaacaggcagaggttggaacagtatggagggcttgggagaaaacaggaagatgtgggaaagttttgaaattcctactgactgttgaatggttttgaccacaattctgatagtgatatggacaatgaactcaggctgaggtggtatcagaaggagattaggaacttattgggaactggaataaaggtcactcttgctatgctttagcaaagagattggcagcattttcccctgccctagagatatgtggaacttggaacttgagagagataatttagg

SEQ ID NO: 902063 - DNA, 695 bp, Homo sapiens
  misc_feature 487: n = A,T,C or G
gctccttctccaggatcatgccccctacccagcttctctgctggggtcactttatcccagcaagcagtcctttagggcaggttcctcttaagataactctaatctggctcttattgtgacatctgcttatcccagggaaagccccactagactcggggctcccaggtagctctgacaggcagctccagccggccccaaccttctgctgccaggtgaggatcaggtgccagtccctagtctctgtgcccctcaaactccccagatgtagtttaggtcctccagaagctctttccctgctttgcttcagccttatggagtgaaggtttccttctgctcattgcagatggcctatgctttctaaatgtgtttctctgcaagactgaggtgaggggacaggactccttactaagtaaggtaacaagtcccaggaaatccgctctctgaaccatccttgatttacctgcttttatttatgggactgaagcangtgatggggtgagggtcacagatggaattttcctgtgcaaaccctgaagatgagatgtgtctaagcactctctcagaatgtgtgggcatttcaccatcatttttctcagttttsgagcctcagcccaaattccaagacaataaaaaaaaatttcatgtaacatactgttatagttctcacaaccagcctgcccacccccacttctaat

SEQ ID NO: 902064 - DNA, 639 bp, Homo sapiens
agacatacaaggccccaatataggaaactggtgcctgcaagaaactgcaaagccaagacrgcccaagtgtagaggcagagggattgttaggagaagaagatggagggtaggtgaggacttgatagtgtggggccctccaggtttcttagaagtctaggtttcttctaagcacagtaggaagtcactgaaggatttcagcagagaaggaacataatccacccttcactttgagtgctgcatggagaaagattggacccgctacagagttaagttaggagactgtggcagggaagattttagactaaaggagtggcaatggatgtgcagagaagtgacaatattggagaaatattttgggagatataatatttgagatacagttattgccaccaaatttcttgaatgtattttcttatttattgtcaatgtttcacaattagaacataagctccatgaggacaaggacttgtcttatacactgctgagtcccactgcctacaacagtgcttggcatatagtgggtattgggtaatatttgtcaaatgaaattatgatggaatgacttataaatttgaggtaaaaatgaaaaggaagaaggtgtagagagagaattccaggattgaaggtgatatttattga

SEQ ID NO: 902065 - DNA, 596 bp, Homo sapiens
ttgaccagatatctggacagcttgtggcctaatcaagttgacacataaaagtaaccattataataggtggagttcayttcctaattattgaaatgaggcttcataaaaatctcaaataaatgaaaccataatatacacaaagaaaaaatggcttcctcaattagcagaacataaataattatttctgtagaagctgaggatcattatggcagagtgagctactaagagtgaaaaggaggaagtgatttcaaaaattcacaataagaaaaacacagactattaacacacttttcccaaaagtgaatagagcacacaatcaccaccacaaccacaaaatgagaatatcagcttgtggcccactcaaaggacaactttctaaccacacactgggatgcctgatgagccatgattttagtggcaatccaacatggaaatgaaggaaaaaatccttgtgtttgatgatgtatctctcagtagactgcatttaacaattcctgtaagggaacagataaaaacagaaaccacggaggagtatcaaaatttaattttcctcggagaactaaagggaactctttgagaaaaagaagctataaaca

SEQ ID NO: 902066 - DNA, 540 bp, Homo sapiens
ggcaaaggcagggaagtagggaggagcggagagcagggagactggccctgtgggatggagggcaaccttgggaagtggagaagaggcagtggagaggcaggggttggggcccagagagctggtggaagagaatttgcttgaaggtgaggaatcttccctgggattctccttctggattctgaacttcttccttcaataaagaggagtttgtgaattagctcatggcttgatttaaatcaaatgcaggccaggcggcaccgtggctcacacctgtaatcccagcgctttgggaggccgagtcagatggatcacctgaggtcaggagttcaagaccagcctggccaacatggtgaaatctgtctctactaaaaatgcaaaaattagctgggcgtggtggtgggcccctgtaatcccagctactcaggaggctgaggtgggagaatcacytgaacctgggagacggaggttccagtgagccgagatcgcaccattgcactccagcctgggtgacagccccatctcaaaaacaaacaaacaaaa

SEQ ID NO: 902067 - DNA, 574 bp, Homo sapiens
aaacacactgaagtacacagatcaatgacactatgaagcaactacatcaagaggtctgtgcaataatcaggtagcatcatgatgacaggaacaaattcacataataatattaaccttaaaagtaaatgggctamatgtgccaataaaaagacacagaatggcaagctggatagagacaagacccatgcatgtcctgtattcaagagacctatctcacgtgcaaagatacacataggctcaaaataaagggatggaggaaaatctaccaagcaaatggaaatcaggaaaaagcaggagttgcaatcttagtttctgacaaaacaggctttaaaccaacaagataaaaaagacaaaggcattacataatgataaagtgttcaacaagaagagctaactaccctaaatatatatgaacccaataaaggagcccccagattcttaaaacaggttcttagaaacctatgaaaagacctactctcccacacaataatgttgggagattttaataccacattttcaatattagatcattgagacagaaaattgacaaagttaatcaggacttgaattcagc

SEQ ID NO: 902068 - DNA, 638 bp, Homo sapiens
ttacaccttttacaaaaattaactcaagatggattaaagacttaaatgtaaaactcaaaaccataaaaatcctggaagaaaatataggcaatactattcaggacataggtatgggaaaagatgttataacaaaaacatcgaaagcaattgcaacaaaagcaaaaattgacaaatgagacctaattaaggagcttctgcacagcacaagaaactgtcatcagagtgaacaggcaacctacagaatgggaggaaatttttgcaatctacccatctgacaaggtctaatatccagaatctacaaggaacttaaacaaatttacaagaaaagtgggcaaaaaatatgaacagacacttttcaaaagaagcaatttgtgcagccagcaaacatatgaaaaagagctcaacatcattgatcattagagaaatgcaaattaaagccacaatgagataccatctcacacctgtaagaatggtgctttttaaaaagttaaaaaacaacagatgctgrtgaggctgtggagaaataagaatgatttcacactgttggtgggactatatattagttcaaccattatgaagacagtgtggtgattcctgaagggcctagaaccagaaataccatttgacctaacaatccc

SEQ ID NO: 902069 - DNA, 611 bp, Homo sapiens
cagcagtgatacctaggtactacacaaaaggttctgggtcaacttctgagatttgctggcttcagatgagactcagctcattaccaactgtgatggctatgggacaaaactccttctgcttgagaaaagcagagaaaaaagtaaaggggactttgccttgcacctaaggtaggatcgtggccatagaggtatagagcaccaagtgggcctttgaggtccctaattacaggacttgacccttggatggcatttctggaccagccctgggccagaggggagcccaaagcccttaaagggtgagatctagggcaggcagcattcaccaccagttgactgaaaagaccttgagccttaaggagacatcagcagtagcctagcagtagtccgtgtggcctggggtggtggtggctacagaatgagactcttctgcctttggaaaggggaaggatgagagggaaggactgtgttttgtgatttcagtgccagttagccacagtacaacagaacaccacgtagacctctaaggttttgtatcctagtccctgactccaagacagcatctstcaacccacccagtacttgggggacctcactatgctgaagggaagaac

SEQ ID NO: 902070 - DNA, 762 bp, Homo sapiens
gctatgttgaaaaaaacatactgaaggatcacactaacaacatgtccatcattcctcccaattctaagattcttggcatatgctatggtctgaatgtttgtgtctgcctccctccccacattcatatgttgaagtcctaacccccaaggtgattatattaggaggtggagtttggggcagctgattatgacatgaaggtggatttagtgtactcataaaagagaccccagggtctcttttccccttccaccataggaggatacagcgagaaggcaccatctacgaaccaggaaataggacctcgacagacaccgaatctgccagcaccttaatcttggacttcccgacctcaagaactgtaggaaataaatttctgttgtttataagccacccagtttatgatattttgttatagcagccgaagcagactaagacagcatatgtagaaataatcactttgattcatacagtaggaaagtcagaaacaaggaggttcctgaagattaaaacagataattattatgcctccctttgatataatgaattacttacatcaaaccctctgacttttgcaaacaagacctgaaagtaatcctcactggtgccctggtgtaattccactgatgtcagtaatactctctwtgtagctatgcaaacattgcatcaagaagtcttccagcagaccttcataaaagacaggcacagttgaaaacctcaaataagtttccaggcatgtattgttttctgtgttgtaagtcagta

SEQ ID NO: 902071 - DNA, 761 bp, Homo sapiens
cttttaagtactccaattttytaataagctaagtttcccagatacttaaccactttttataaatttaatagatcaaaattacaagtatcttgttatacttttcacagatatagtaaaattgtcttaaactattcaaattagaatgacaagcaaaatcaaattttctaatccacattttaaattggaatcaaattaatctgttatatactctaggatgtcaaattatactttaacatgccaaagtcttataagttatgagtaattaaaatgtcaaataagctcaggttatttccaaacttaacacaaaaatattaacactatgagttataatttgcttcatcatgttcagaattaagtctagaatttcctgtggttaaactactcactcatgcaccaatttattcatacaaccttcagagcctgccatatgccaggcaccatctgagacgctcgatctaaaacagcagggaaaaaaagaccagtatccccaacctcatgaaacttaaatgcaaggggaatgcaaagcagaaagaccaacaaagaactacaaattaaatcatgtggcatgtcagatggagattaccatgaacaaaagaacactggatagggagttcctgagttattacggtggcacttttacttagcacagtcaggaaagagctcctgtaaatggtgacaattgaggaaacacctggaggaggtaaagaagtcagcccatggatatctgggtcagaagcactccaggcagagggatgagcaaa

SEQ ID NO: 902072 - DNA, 614 bp, Homo sapiens
agttcgggggtacatgagcaggtttgttatataggtaaacttgtgtcatggcggtttgttgtacagactgtttcatcaccaaggtatgctgcctagtatccattagttatttttcctgatcctctccttcttctcaccctccaccctccaataggccccagtgtgtgttgttcccctctttgtgtccatgtgttctcatcacttagctccaaaatagccagtatgaaatagaaccaaagcttccttggtttcaagcattaattttcgtgggtatctgtggttttgcatttaatggtccaggaacaccaagtagctttctgttcccattgtccactctctgctacctcctccttccatgcctttagtcatgatccttgagcatcagtgcttctcaagcttctgggagggctaattcttcctggccattaagactccttgagaacatcctgcagaaagcctggagctagccctcctctgaggttcttgtagcccttgggaacttgtactttcmtaacactcactgaagcattgtaatgggttctctctgagagtctgtgtccacccatagaccatagtcttcctaagagcagaactatagtttgtcacctccacaa

SEQ ID NO: 902073 - DNA, 640 bp, Homo sapiens
agtggtggtagtgctgtattttagaaagaatatggtttttttaaagcccaacttgtttggatttaaatccagacttcagcatttscatcctgtagaaatcaggcaatatttttttaaaaacttctctaagccttaatacttttctctgtaaaatgtagaaagcaaaaattaaagaaaattcgacttagcattttccatacatatggaatcatatgtatggcttccacatggtatgtgcttctcatatattactttcttgctgctttcaattgacatcttcatacaaataaatacttattgatataacatactatacaaacataacaattcgtaagaactaattactaaaatctatgtgcaattatataaaatgttattatataacaagcataagagcatatttcttactatatatatatatatatatatatatataaaatctaagaattatctgagataaattctataaaacttgctaatatgttacaccttactctaataatcacacatacactcaaggttatactaatttacctagcagaacccaccaaaagaaaaataaacaaatctaagtatgatagtcagaattaaggttcccaaagatgttcacatgtcaatctgtagaatctgcagaaatgct

SEQ ID NO: 902074 - DNA, 626 bp, Homo sapiens
cggatcacttgaggtcaggagttcaagaccagcctagacaacatagtgaaactctgcctctactaaaatacaaaaattagtgaggcactgtggcacatgcctatggtcccagtttcttggaaggctgaggcaggaggatcccttgaacctgggaagcgaacattgcattgagctgagattacaccactgcactccagcctgagtgtgagactctgtctcaaaaaaaaaaaaaaaaaaaaaaaaaaaaaggaatctaatgggtgatatttttgttaacctactagaaacaatgaaacgtgaggagatcctcactgtttcccagcatgtatgcttatgaagcattagaaatgctttaaaagggaatcaggggcttgaaggatgggcctctcttacaattcttaaaaagaactcagtgtcttgcagctgtaactacgtgaattgcttaaattcaaatgaatggatgaattctcaactaaaagtcactgttaatagttgtattgttaaggctgtgamctgatgggtgatagtataaaatagctttgggattctagacaaactggcatcagtaataaggaaaacacaagtttgtctagtcttataaacactattgattttttttcaaaatt

SEQ ID NO: 902075 - DNA, 678 bp, Homo sapiens
atttgagagcagcagcatgattagacatgctctctgaatagtattggcaattatgataaatagtaactgcagtgagtagtgacaggaagaacgcatttagaactattctgtgagctcatgagccttcatcttcttccttttgaagaacacaaaagagcttccatttctgggtaggatatagttttgtggtaggccagtgcttccacagctacaactatgaaaaccttcataccttataaaattataatttttagggcatcagagatttgtggaagcactaaggactaaaggaactaaattcttaataaaaaggctaggtagaccatgccctgtaaaggggtttacatgatcagccactcaccatgtttgcctgacagagggaaagggaaacttcttctggtgaaatgtaatctggaaaccacagacacagtgtctgtcatatgataaaaaaattgtgaggcccacaaagagataagaccatatgactgataatcaactgtgtcaagaaacaagccagacatggtgacacacactggtagtcctagatattcaggaggctaaggcaggaggatttcttgagcccaggagtttgaggctgtagtgcactatgatcatgtctgtgaatttaccactgcactccagcctggaccacatarcaagaccacatctctttaaaaa

SEQ ID NO: 902076 - DNA, 576 bp, Homo sapiens
ctgctttatctcccagctagattataaacttcttcagggcaagatccacatctgattcactcttgaactcttgcccaagcacttagcacagagaaaccccttaataaatatttaytgaaggacgtaaaaatagaggaaggaaagcaaggagggaaacttcaaaaaccatcagatttatcatctcgtctcctgacaaggttacaccaatctgcctccaatagatgactctgcaagtaccagttactaaatcgctttaggaaaatcactttctcagtgcggttcatgggctacagccgaggaccctgattcaactcaatctatattctatctctgttactaatttgatgtgtcaccttgtgcaactaataccagatttgcaagaggtcttggaaaatacataacagatgcagaaagcattaagtaatcaggatgaggaaattgctggaataacttggctctgttaaataatgaccaaagttttgtcagtgattcactcagggattatgaatatactgatgtgtcaaaagtcagtttcaggaaatacatttgatgaggtgaattagacaatagaaaaat

SEQ ID NO: 902077 - DNA, 576 bp, Homo sapiens
ctgctttatctcccagctagattataaacttcttcagggcaagatccacatctgattcactcttgaactcttgcccaagcacttagcacagagaaaccccttaataaatatttattgaaggacgtaaaaatagaggaaggaaagcaaggagggaaacttcaaaaaccatcagatttatcatctcgtctcctgacaaggttacaccaatctgcctccaatagatgactctgcaagtaccagttactaaatcgctttaggaaaatcactttctcagtgcggttcatgggctacagccgaggaccctgattcaactcaatctatattctatctctgttactaatttgatgtgtcaccttgtgcaactaataccagatttgcaagaggtcttggaaaatacataacagatgcagaaagcattaagtaatcaggatgaggaaattgctggaataacttggctctgttaaataatgaccaaagttttgtcagtgattcactcagggattatgaatatactgatgtgtcaaaagtcagtttyaggaaatacatttgatgaggtgaattagacaatagaaaaat

SEQ ID NO: 902078 - DNA, 563 bp, Homo sapiens
tctcggctcacggcaacctcaaactcccaggctcaggtgatcctcctgcctcagcctcccaagtagctgggaccacaggtgctcgccaacacacctggctaattttttgtagagacagagttttgccatgttactcagactggtcttgaactcctgagctcgagtgatcttcctgcctcagcctcccaaagtgctgagattacaggtgtgagcaaccgcatccagctgagatttcttgacatataacacatgattttctgagtcctcaggggttgaagaagaggcctgaggttctgctttggttcaggcaaagcagataagctgggaggctgtgtgggtcaaggggaagaactctagcccaggtcctttgcctccctgagtattttgtgcctgccctaccatgaatgactctcttaccctgggtaagcccctggcatctcttagcctctgctttctgtcctatgaaatgggaaggggctggcataggctgagctctgagactgtgagaaaacccttaacccctcccagtcctrcagagcactgtgaggcctccaagagacttc

SEQ ID NO: 902079 - DNA, 670 bp, Homo sapiens
gtcaatgcacaatccaagggtcttttctttctgaatccacaaactaaacttgtcagtgcgctagatctgatgagcctcagggaactgactaatatttagaatagactatttatttattaatttacaaacaaagcttttatttcctgtgaacataataatggtgcccaccaccaaagaacgtttttcttggtactaaggtaattgtgctatagactctgtaacctaagtttgattagtgaatagactcagaagaaatggaattaggtgaccatgtgggtactttctccagttcacagaagagagtgtgccactttagtgaccagaacattctcatatggtagaaaactgctacaacattattgttctttggtgccacttttcctaaactccacatagttcttactgccttcaaagagtcatttaattctttaaactactgttataaaaatatacactctagtaaccttagccggatccccataagccctctttagtgtccagaatgtggaaaactcaagataattagatacttatgtccattgccagtctcctccattagtataaatctcgggttttacacaaattccaaagtctgatgctatcttctcgtagtcatcgtgtatrtcaactataggcacatcaagcttctctgaacagtctgacctgacag

SEQ ID NO: 902080 - DNA, 705 bp, Homo sapiens
ctcgatcaagtagaagaaagggtatcagtgattgaagatcaaatgaatgaaataaagtgagaagagaagtttagagaaaaaagagtaaaaagaaatgaacaaagcctccaagaaatataggactatgtgaaaagaccaaatctacatgtgattggtgtacctgaaagtgacagggagaatggaatcaagttggaaaacactcttcaggacattatccaggagaacttccccaacctagcaaggcaggccaacattaaaattcaggaaatacagagaacaccacaaagatattccccggtaagagcaaccccaggacacataattatcagattctccaagtttgaaatgaaggaaaaaatgttaagggcaaccagagagaaaggttgggttatccacaaagggaagcccatcagattaacagcagatctctcagcagaaactctacaagccagaagagagtgagggccaatactcaacattcttaaagaaaataagtttcaacccagagaatttcatatccagccaaactaagcttcataagtgaaggagaaataaaatcctttacagacaagwaaatgctgagagatgttgtcaccaccaggtctgccttacaagagcttctgaaggaccaaacatggaaaggaacaactggtaccagccactgcaaaaacatgccaaattgtaaagaccatcaatgctaagaag

SEQ ID NO: 902081 - DNA, 599 bp, Homo sapiens
tgaaatagaaaacagaaaaacaatagagractcaaaccaaaactgattctttaaaatgatcaataaaattgaccaacctctcagctagaacaaacaagaaaaaaaagggagatgacacaagttaccaaaataaatgaaagagataatatcattattaaccctagggaaaataaaaggagtataaggcaatattataaacaactttttgcaaacaaattggacaatttagatgaaatgagcagattcttagaaagacgcaaattaccaaacttagaaagaaatggaaaatccaaatagacctataccaagtgaagaaattgaagtagtaattttaagtcttaccacaaggaaacccccagatggtttcactggtgagttctattaaatgtttaaagaacaaataatatcaatccttcatcaattatttcaggaaataacagaagagggaacacgtcagttcattcattatataagtatttctgtgataccaaagcaagacaaaaacatcacaagaaaattgtatatcaatatccctcaggaacatagacacaaaaaattttaacaaaatgttataaatccaagtccagtagcatataaaa

SEQ ID NO: 902082 - DNA, 654 bp, Homo sapiens
tctagaagttaagggaggacaaaaaggaagagatgttatgatttttaaaaaagagataggagactatttgtggatgatacaatccccaatatagaaatgcaacaaacaattagaactaatacagttaagcaaagttgttggatgcaagatcaacttacaaaagtcaaaagtcattctttcaaactcagtaaccaactagaaaatataataaaaataatattaccttcataacagcaatagaaaagcttaaagtatccagagagtttaactaacaatttactatgcagaaaaattttttaagtttaataaagtacaaagaaaatagaggcacagaatgaagttgcatcccatggtcttgaataggattacattgtaggcatgtaaattctttaccaaatgatctacaaattatatgtatttacaattattgtattgcagaggcaatcactatgaaaattccacctgatcttttaggcacttaatgatcttgatcacctctataaacaaatagaggtccaccaaaggaaaaaagattgggaatttacaaaagctataattacaaaatacagtttaattttagagaaaatgcgaacaaatagaaatagagcaaaatatttcaggaaagaaaaaaawatatatatatatatatatatg

SEQ ID NO: 902083 - DNA, 642 bp, Homo sapiens
atcctaacttggtgattctggttagccagtcatgtaatagaaacctggaggacagcgttcacagtgtcacccacaaagttggtgccttaattaagtggcagtccttggctagatatttccaggtaattgggcatttggtagaaacagtggcttatttagacatgtgtccattattgcatatactttactataaaacgattctttttgtctgaggcaataatatgtgaaatttcatgtcaatatatcagttactctctaagcccttggatagtggtaactgcagaaacatttggggctgggaaataaattcgtatctggagtgaggcatcaattccaacaaggaacactgttgcccaggtcaggatgaaagaggtccaatataatcaatttgtccctaatggtaacttattctccttcagggcccagtgctaatgaaacattacacatagcagtcattggatcagcctcagtgaggggaagcacatactcttgacttcatctttaccaacattgccacttccttcatgagtccattgtacaaacaatgctatagctagacacagaggctggttagcatacgctagaaaagccatttgttcaccmggtggtggaattgtccttctgctgtattctctctgctgg

SEQ ID NO: 902084 - DNA, 611 bp, Homo sapiens
ctgatgtatcaagataacaacatacttattccatggctccaagtacctcctttcacatttctgcaacccctaygtgcactccagttttagaagcaatgacatggtcctgcagaatgggagagccaagaggcttcttcaaggtattattcaaggataatgggtcagtcttggacaaaaaaatcccctgaatcttagtaaagattcttagtagattcttggtacactctgccactcgagtaatctttctgttccaaccaatgacataggtcttgaaaatttaaaaagtatcaatacctgaaaaaggtgttgtctgaaatcaccaatgatcatggaggatggatgcatgtgttactgattctaacagcttttgtatggtttcaggggttaaggtggtgataggagatgatgtctttggtgtagatgtccacactgtctatatattaccagcattaaggacctcttcaaatacaaaacaaaaacaaacaaacaaaaaaaacaagcatcaacagggggtatcacagtaagttgggaaagaatgtaggaaaaattataggagcttaatggtgaccaagaggagctggaaagcatacgtgcactgattcctcacagcc

SEQ ID NO: 902085 - DNA, 646 bp, Homo sapiens
atggaactagaaaatcactaatttatgtattcaaaagaaataatgaagtcaattgatatggtttggctctgtgtcccctcccaaatcttatctcaaattgtaatccacacatgttggaggaggggcctgatgggagataattagatcatggtggtggatttctcccttcttattctcatgatagtgaatgaattgtcatgagagctgatggccttaaagtgtggcactcccccttgctctctctctatcctgcagctatgtaagacatgctacgtttcccttttaacttctgccatcattgtaagtttcctgaggcctccccagccatatggaactgtaaatcgatgaaacctttttttctttataaattacccagtctcgggtaactgtgaaaacaggctaatatagaaaattggtaccaaattagtgggacatttctataaagataactgagaatgtggaaatgacattggaactaggtaaccagtagagtttgaaacagcttggagggttcagaacaagacagtaagatgagaaaaagtttggaacttcctagagactagttgaatggttttgaccaaaatgctgatagtgatattracaatgaagtccaggctgaggtagcctcagatggagatgaggaact

SEQ ID NO: 902086 - DNA, 610 bp, Homo sapiens
cagggaacagctagctagtggtagaactcatttagaaactttgacacccactcccattatcacagaacaatcaggaggcctggtttgtaattaacccttcaacataacataaggacagaggcagccccatattatatttagagtactggattattttgggtccttttgctaagccaaggggcccatttaaaaaactgatctgggaaaagtagagagagaagagagtatatatatatacatatatatatatatatatatatatatacatatatatatacatatatatatacacacacacacatatgtatatatatgtgtgtgtgtatctatataaaaagcacaaagatgttataatgctttgcttctgctatcaccaaagcagagaaatgagagtgcccttcatccttttacaggaagccttgggatggaattgtaattaactttctccttctaaagctgtgtttagggctgactgtaaattatatttgcctgaataaacatcaggggagaggaagattcataaaaggagggcccttggaggtgaccagtcttcttgttcctggtctggaatttgagtggacsctcatacacatggaacctcacttcaggt

SEQ ID NO: 902087 - DNA, 601 bp, Homo sapiens
tagagtggaacaaaagcagggggtaaaaaacmcagaagttcccagaggtagttaggaaaaaaaaaaaaaaggaaagatagaatggaagaagtgaggggctcaaagaaaaaagaatgaagattcaaggatgggtaaatctcctctttacttggcttttcaaaaggtttgtgataaccagcttttgtgtaaatggatttgatggctctgggctgaaggtgactgacagatgaatctaggacccctcggagtgtcaccctggggattgccattgttgcagacagtttcttcagactgacccagaagaatcattatctcaagggggctctaacaacagccacccccaagcggcctaggcgcttggagtaagcaacttagtctctctcttgagcagtaattacagcggtaaggcgaacaagggatgttactgggttgagcttaagtctctctccaacttacaattaagaaaaaaaagtattcaagtatccgaagatttttcccaagcaaaaatgtcagagagcttctcttactctttgttagttggaaaaataaacagacctctgggtccccctcaggaagtgcttagctgaagagggtattgtag

SEQ ID NO: 902088 - DNA, 650 bp, Homo sapiens
tttactatttgagtggtatatgtttacatttttccatttcctcatcttaaagattaggaaatcaaaagaactaggtaaattcttttgagcattaacatacaaaattttaagttgtttgcttcctttgttggaaaaacatgaattagtaatcagaagttgtttgtttgctacacttcctcccatttatgtaataaaagtacctctacttgacttgtctctcctaaaaagctccaaaccagataatcattgtgatcccctcttggctcatagagtcctcaggatccagaatattttcagggctggtcagctttatgtgtttcttagttaataattgtaacccaggttatttatgtatttgtctatttcctcttccactcctacctcctagttcatgcgtatagactgcaggaaagagagacttcgccccttgccccttcggggtacctgagtatggcagatgtttgttggatgagtttttctttataacctaactgaaaatgtataggaaattcagtgaaatgaatttagactggctggtaaaatgtttctactgtatgagatagatagattcctgtaaaccatgtgtaaatcaagtgctacattaaaagcacctgctgggaactrctgggcaaaaggaaatcagtatgtgg

SEQ ID NO: 902089 - DNA, 574 bp, Homo sapiens
ctaaaatatttaacatctagttctttacagaaaaaatttgatgacccctgctctacatcaaagtcccattccttcctctctacttaatttaaatccccyacaacgttcctagcctaggtcaggttccatctcccatgggaaattttctctgatacctctagcctactaccatgtgtgccttgccttgaccaccagactgctcctcttgggagcaggaagtacccctctcatacttctatatctccaccatgaccacagtactttgcctagaaagagcaggataaacatttatggatggaaatggagttgggagagactatgttcagttcacccagctgacccatcaataaaccaactttaaggataagggtgagggtaaggagggtgaaggagtgctggtaagcaaacaccacaaatgggggaaggtcttaccttctgttccacacatttgataaaatcaccttgcctggaatgccccactggctgcttccgaaattcactgcgtttctccaggcgggactcaaaagcagctgggtctgacctgatcagaggtaaaccaaagggtaaaccaact

SEQ ID NO: 902090 - DNA, 574 bp, Homo sapiens
ctaaaatatttaacatctagttctttacagaaaaaatttgatgacccctgctctacatcaaagtcccattccttcctctctacttaatttaaatcccccacaacgttcctagcctaggtcaggttccatctcycatgggaaattttctctgatacctctagcctactaccatgtgtgccttgccttgaccaccagactgctcctcttgggagcaggaagtacccctctcatacttctatatctccaccatgaccacagtactttgcctagaaagagcaggataaacatttatggatggaaatggagttgggagagactatgttcagttcacccagctgacccatcaataaaccaactttaaggataagggtgagggtaaggagggtgaaggagtgctggtaagcaaacaccacaaatgggggaaggtcttaccttctgttccacacatttgataaaatcaccttgcctggaatgccccactggctgcttccgaaattcactgcgtttctccaggcgggactcaaaagcagctgggtctgacctgatcagaggtaaaccaaagggtaaaccaact

SEQ ID NO: 902091 - DNA, 593 bp, Homo sapiens
aacttggtgtggtggctcacacctgtaattacagtatttcgggaggctgaagtagcaatcctgtttgagccaggaggccaaggctgcagtgagccatgatcatgccaatgcactccagcttgagcaacagagcaagacttctctttttctcttgaagaaaaagacaaagtcagatcatattgtacccatcttatagtgttgttaggaggattaaatgaaattatttatataaactgtactgtggtatgacgaaatgtttaatttcaaaaataaataaaagaaatagaccacatctgtggtgtggtgaaataaaacaagtaaataaaaattaaaagtaaattatttatataacatagcacagagctcaataagtggctattgttattcccaagcatccactctgggccctgacatccttcaacagacatttgtcctgggcctggtaagagagttggaaccagcagaccaggttcaaatcccaggcaaaccagttaacaactcaatggcttcaggtaaatgactaaatctctgagccagtctccccatytggaaaatagacatggccatccctgctatggagagctgtgatgacc

SEQ ID NO: 902092 - DNA, 570 bp, Homo sapiens
gtacacattgagaatcagtaacaaagagttcacagaccagaacaaatatgtgaccacactttgattagtggtactgtatctgtatttgtaagacctatgtttgccagaggatgggacaaatatactctttataagttaagggatctgccatttcagtgaagtttttgggaatccagttgtatggggcatgtgaagatacccccattcaaagcaaaagacaatttgatatactttgtatttcctaaaacacacaaacacaagttcacacacatctgcaatacttgctacattttgtatattttgaatgcaatctaaatcatattttggtccttttctatgatccaataattccattatgttgcctgttttgagtgtgtcccagtgcaagaaatagttcttcagttgcttcaggctgcaaagtaatcagatttctgagactcttttccacttaaccttatgacctactaaacctactaaaccaatgacaggagaggattgtgtgttgagaatcatttgcagtcaccttggacttygaataaagttatggatgctgtatcaatcagggattca

SEQ ID NO: 902093 - DNA, 539 bp, Homo sapiens
ggattcacagatgaattctaccagaggtacaaagatgagctggtgccattacttctgaaactatttcaaacaatagaaaaggaaggagggactccctcctaactcattttatgaggccagcatcatccggataccaaaacctggcagagacacaacaaaaaaagaaaacttcatgccaatatccctgatgaacatccatgcaaaaatcctcaataaaatactggcaaaccgaattcagcagcacactgaaaagcttatccaccatgatcaagttggcttcatccctgggatgcaagtctggtacaacatatgcaaatcaataaatgtaattcatcacataaacagaacaaatgacaaaaaccacatgattatctcaatagactcagagaaagccttccagaaaattaaacatcccttcatattaaaaactctcaataaactacatattgatggaacgtatctcaaaataataagagctattcatgayaaacttacagccaatatcatactaaatgggcaaaagctggaagcattccctt

SEQ ID NO: 902094 - DNA, 476 bp, Homo sapiens
atgcacatcccagtccctgccctgcattcctctttttttccagggcaccaacatgctggccaaaagcaaagccagaaagtaaaaaggaggctgggtgtggtggctcacaccctaatcccagtactttgggaagccaaggtgggcagatcgcttgaggtcaggagttcgagaccagcctggccaacctggtgaaaccctgcctctattaaaaatacaaaaatgagctaggcgtggtggcacctgcctgtagtcccagctactagggaggctgaggcatgaggatcacttgaacccaggaggcggaggttgcagtgaggcgagatcccaccactgcactccagcctgggcaacagagkgaaactccatctcaaaagaaaaaaaaaaagccacaaagtaaaaaggaaagaatgggacaggcgccgatgaccagcagctcacagacaagagggcccatgacgtgtagcctaccttgttgg

SEQ ID NO: 902095 - DNA, 643 bp, Homo sapiens
gaagaacattacgtgactgctagggaaccttcctgaatatgtggctctgatgatggccaaggggatcttaaaatttttccctcagcttgactaaactttatacaggtttcttcctaactgcatgtccctgacctcccttttagagcatgtacttgagaaaacttgctattgtaaattatttttctgctcctttgagatgaaatctcacagcctcttgccagtttacaacccagaagggtctttctcaaggaccgggcagcctttcctttgaaatgtaatcatcaagaaacatagtattcctatctcctaatctcaataaaagggtagaaacctaactttaataagcaccaattagcaaacagatggcctaatacatggaccaacctctctggtagtatcctccggtgctttttcactggcttatcccagcacttagaaattctcagaacttttgtttcagtggagttcagttcaatctctttcatcttgaaagtcttgaaccctgttgtaatagtcttaaacraagtcctccatgcctgtttcacttgtccagtgcaatttttctctgacataacaagctgagcaagccagtgcactgctgctgcccagttaagtgagaagagttttaatgtgtcatcctcta

SEQ ID NO: 902096 - DNA, 664 bp, Homo sapiens
tgtgccatatggtattagaaatatgattcaatatgtgacattaaaatgacattttcatagttgacttcctgaacaacttattaaaaatrttataataccaatgttttagaaattattctaaactaaaaaataagatgaaatattcgcaaaccgtcttagaaaaataacataaaattaatgtcacaacgcaatactgatagtaaaatatgaaaataaatgggacaaactgtataaaaagcgtgaagactatactaaataaaatgtaaaaattaagcaatgtaacaaataacatcaaactttgataactttggatttacgccaggaactgaagagaagtgtggtagtagaaaatttagtaacattagtttatctcataaaaatgaaagaaaataaatcaaataatttaatttatgaatgctaaaagggcatctgataatctttagaaatatttcctattcaaaaagataagataaaaaagtttataaacattatttaaaaaatacaaaaatcaaatataaaactcacagattttaactgaacttaggtaataaagagtaattcttgctactaaaacattactcagattgattaaaggtaaaattttgtgcaagaaaataacccacatataaagaattaaaatgatattttgtttgtgatatggcct

SEQ ID NO: 902097 - DNA, 658 bp, Homo sapiens
ccagactgcagactgcacttctctccaatataaacctcaggggatgtatgttaaataaatgggtttacagcagctatctgcgttataacaacaagattaatcccagacccttcctgcaggtggggaaatgttctcctatgaaagattttcaggcaagactggagtgtatagggaggtctaaggtgaaggagaagaaatgagaaattgagagagtaaaataaagacacagagagcaagtaggtgaagtgcagagagaggcacagagaatactcactcataggaagaggacttgggtaccacagaagcctcgagaggagagagttttaaggcactgatcgacactgagacattttgtttcgtgttaaaggctcataaggaatattaggtctcattagtaggagcctgttgtcaaaatgtgaataatttatgtgagatagaacacattcatagtcatttccatcttagtattgaggtgttcatcaattcccacattaaggatggtggacacgatgggcaaatgttgccagttattggaagaggatgaggcaaaaccaaagacctgggaagagggccctgcctaggttttctctacagtgaaggtcatgatgggtgagggatgacaggagagtactrtgaacatgatatagctaaaaagcct

SEQ ID NO: 902098 - DNA, 595 bp, Homo sapiens
gttgccttaaaacattatcttttagaatggattgttatgtaccgatagacaactggtcaccctccttataggtaatagtttaccatccacatacaaaactacttagactagtattagcccataaaagcaacacattccatttcctctctatttgacagtccttacaagggaaaatcccaagtgatctgaaaacacagttacagttgctgccagataggtaaatcacatgaccttgaacacaggtagctacatttacaaagtgtcccttcaatgatttctttagatttcaaaaggagaggccaatacaccaacattttcattgacttctttttctgttatttttttctcttttctgatatctttaccaaatggttttggataactagaacacctttcgatcttcaagtatctgtttgcaagcttggtatcttagctgttaagttgtttggaaagtcagataaatgtctcttacccagagctttttaaaattcttagcagcaaagtcctgaaaaatttgctcctcagcaacaactgtgagtcctactggatggtcataacattcaataagatrattgtggcaggggggaaatgggga

SEQ ID NO: 902099 - DNA, 629 bp, Homo sapiens
tgctctaggtcaaaatattgcaaatttcctaagcaaaatttgtttctgttctagaaaaataggttatgttcacctggatcacttaccaaaggcttctgggattcaatggaatacgaggacctactgaactgtgaagtgcttgaaggcagaaaatgtatcattcatttttaaaatccctgacattaagcatagggactggtggtgctggtggtggtggtggtgatgatgataatgatgatgacgatgatgatagcagcaactgttcattgagcacttacaatgtgtcagggactttgctgtttcctttacatatattaattcatttataactcagtattatatatacttatatacttatatatttactacttacagtatatatatataatatatattatatacattaattcatttattactcacagcaacctgtgagccaggtactattaacaaccctatcctacagatgaggacactcggtaataaactcagagtttaagtaatggccaaagccagagagtttaagtaatggccaaagtcatacctctggtaaatggtagagacaggattcaaagccaggtctttctgaacctgtaaattrcactactcctgaacctgtaaattacaca

SEQ ID NO: 902100 - DNA, 677 bp, Homo sapiens
aggtgacttcctcattatacttcacgtttatactaagaaacatatccctatcaacagtttctctttactacagttgattcccatacttacacaggagctacctttgcaaaacacaaatttacgtgttattcccttgttataaacatttgggtgggctccacatttcgtataagatagcatccctaaacagtgatctctttcatgcctagatgtttttgtgtgtgtttcttctttggaatgccttacagtctctaatgaaaagtgacagatgattgatagcatccctcccatcaagatccagctaagtgccacctcctcagtgaggcagtaaacctctctcaagcaaaactattgctgcatcctatcccactctgagaagagttttctttgtatctcttatagcattgccatgtcgtgttccattatttccatctgcataccctttgtttgcaagcatgagggttatattcccagagttactaaatatcttagtagtagctgaatatttaaatcaagcttatgaatcaaactcattaaaatattagaggcttttaccagcaggttccagatgtattgcaaatgtgaatgtctgaaatrctcatggctcgtgattgatggtgttaccaatgttccgtggaacagatgacaaagagtttcctataggaaacgttactggg

SEQ ID NO: 902101 - DNA, 607 bp, Homo sapiens
caaagaatcacacagtcttttgcctcttccaggatcacacctttgcccttactggcctgaacgactactacttcagagccctactagaaagtgaaactcccatagtccctgatcattaagctattctctttcataggtttctatattttatataagttactgaaatttgcatttttattgtttgtatcttacccaaaacaaaacctttttgaactcagggttcaggtctgtcgattttgttatattccccattgtgtacctaagatatagcacagggtgcagcatatagaatgttttctacaagtaattgtaggatgaggcaatacatgaataagccaaccacagtaccaggcacttgagactcattataccaactcttttttttttttgagacagagtcttgctctgtcacccaagctggagtgcagtggcgcgatctcggctcactgcaagcttcgcctcccggggttcacgccattctcctgcctcagcctccygagtagctgggactacaggcgcccgccaccgtgcccggctaattttttgtatttttagtagagacggggtttcactgtgttagccaggattgtctcgatctcctgacctt

SEQ ID NO: 902102 - DNA, 529 bp, Homo sapiens
atggatacatagatagataaatagatagatagatagatagacagatagacagacaggacttaatttgagatttaggtgacatacgtatgggagccaagaagccccacaatgtactgtgtgcaagctgcatgaccaggaaagtctgtggtataattcattctgagtctgaaagcctgaagactgaggatgctgaccactggctgaatgaaatagacatcccagctcaataagatacagtggatttgacctttttccattgttttgttctatccaggctcttgaggggttggatgattcctgctcccattggtggaagtggatcttctttattcaggctactgctaatctcttttaccctcgtagaaaaactcagaaaagatgtttttctagctatcatataagtttattttaggcttaggggtacatgtgcaggtttgctatgtargtaaactgcagtttatgggggtttaacgtatagattattttattatcaaggtaataagcatagtacccaacagtcatttttttc

SEQ ID NO: 902103 - DNA, 587 bp, Homo sapiens
aaagatatacccaatagctacttaaaatacaaatattctatttcattattagaaattattattttaaaaggttgttaaaacatcaaaaatatgcttatttctagtaaccagagaayacagcagggttatgaaactttggattcctgtttgatttggcaggtaactagattaacaaaaatacaaggttttgagtttcaaaacagaatagcatatttaaaaaatacttggtgggtgtctggcaattgagagaccttagtagcacaatcattggtcttcacaatcactgctaggtactctttcaaactagcttgaataactgcaaaacacattatcaacccagcttctttttgctggacctgggcatatataaactgattagatttaaaaataaaaaaaatagagttttttcagttgtgtttgaagaggtgaacccttggactcaaaatctctcaaaagtcctgtctttcacttcagaatctgcattaatttgcacaggaatatacttctgtgttttaataaacacatgcaatttttctgttttcatcttgcaagtaatgacagctttgttctcaaaccaattttgtttt

SEQ ID NO: 902104 - DNA, 442 bp, Homo sapiens
aactgcgccgcccagaagtggggcctgggtcccccacagacgaacgtccctacctatcagccctgaactgggcccyggagaccctagcgtccctggctcgaaaccagggtgcgcttcgggcccgctagtggtacctcaaggcgggcagaaaacccatgaggggaaggtgaggcacctggggaaaagcgaaaaaaacaaaaacaaaaacgtcgcagaggagcagagcctgggtccccgaggaagaaagtgtcttcgcatcagcccttgcgctgggccccggggaccctggtgtcccagtttcgaacccagggtgtgcgtctggccactaggggtaccccaagtcggacagaaggcccatgaggggaaggtgaggtttgagggaggagacgtgaggcaactgtggcagaaaaaaaaaaaaaaaaaacacgccgcggagaagcgg

SEQ ID NO: 902105 - DNA, 508 bp, Homo sapiens
tttttttttgtgacaggatcttactatgttgcccaggctgaagtgcagtgtgctcatgcaatcctcccatctcagcctcctgagtaactgggactacaggcacatgccgccatgcccagctaatttttgtatctttagtagaaacaaggttttgccacattgcccaggctggtctccaactcgtgggctgaagtgatctgcccaccttggcctcccagtgttctgggattacaggagtgagccactgtacccggctgatgcaaatgatttctattattaatatcttgcagttattcttccattggataaccatcaatgtcaaaataaagattattagttactgaaggactgaaaaatcaaaaatcaacttcatgagatgctttacaaacwagtgttctcttttaatatttgactcagtaaaagtttttaagaaaagttaagtttgtgtttttatttgtgcatactctctagtgcttaaatgtatcaggatagaacttttctaaactag

SEQ ID NO: 902106 - DNA, 674 bp, Homo sapiens
aggaagacacttacatggtgttatgtcttttagacacaacaggctaagctgtctgcctttgtgtcgttttctaaactgagtgtctatgaatataaaactttgcccagtgctggggcacacagaggctgggagggagaggcccatgtgctgctgagagagctttccaggccattatctcctgcggctcagtgggaggcaaagtaggtgtcattagaggcctgtaaagggctggtctgcctcccccagagacacaaaaaagggttaattacaaagaggagctggatggacaaaggaccaaagacaagaaattgtaaaaggtagaaaaaaaagaaaaaaaaagtaaagacaagttaacttgggaccaaatggcagttccctaaacaataaactcagtgggaaatttctgggcctctctgcaattgtgggggccatgaggtaaaaggagcttttagaataccattaagataggaatgttcaaaccatagctggtcctaaatcctgcagagccaggtctggaaaaagaagagttcctggacttctaggcagtgttctttctctacatcctacaggttatcttacctccttagatatttaaaaatactctaactttctcatcttctgaaatcagccaacttatcagaayaattaactgcattgcctcttttggcttgctt

SEQ ID NO: 902107 - DNA, 546 bp, Homo sapiens
gtgctcatgtccaggccatgattagcagataatctcctaaaggtctgtggtccatgcacgcctgcatcccagctgccaagacccacctgatggaggaaagaaaaggtctgtgttgaagaccccttcccacggccttgagggcccacctccttgaagttgctcctttctgtctggggggtaatcccagccctctcctccttgctgacttggttccctccccggctgctatataccttctcaaagagaaccccgccaccaaccacccagattctacgaagagagaccctcattctctgactaaatcatagaaatattgagctgggaactttgaaagctgtccagtagtaaaactctttcattttgctgagaaggaaaatgaggctcagagacatcaagtgacttcctgagggtcacaccacaaagagacggcagaagacggatggaaatccagatctcctgacacccattggatggagctatggtctacactcayctggccattatttgggactatttcttggctgggtgtttgtatcagagccacct

SEQ ID NO: 902108 - DNA, 707 bp, Homo sapiens
gcaatcccttggctattgtggctatcacagagcggctttaagcacagacatatggatccacttacgaggcttcacactaaatttgttcagtgcttgatcttccatctctctaatggcactttttttttgtcaccaacacattcatggcctgcagttgactgcttttattgcttttaattaaagtctgaaatagaaagtgtctattaatcagcgtgtgaagccaatcatgagtaaggattttataaactctttacaagatggataatagttacatcaattgtcccacctttgtcatcttggcagaaagacaatcatttaagtcattaagggaacacctgtaatctggaaatttggaaggcagcaactattttgacaggccagctacatttttttttttttaggagcaagagatgtatttaaaaattcatcatgttatggttgttgtattcatttttgcggcacagtcgaggagaaaacggtgggggactattgtgtgtgttcctcttaaataagagtagagtcaactaatcactgaaaatgaattgcaggctttgaatattctgtcctccctttctctctctctctctctctctctctmtatatatatatatatacacacacacacacacacacacacacacattttagtttttaatttttatgggtacatacaagttgtatatatttatggggtacatgagatgttt

SEQ ID NO: 902109 - DNA, 547 bp, Homo sapiens
tgctggggtctggctaaaagcagaactgtggccaggtgtggtggctcaagcctgtaatcccagcacgttgggaggccgaggcggrcagatcaccaggctgggagtcctttctttagcttgcttttctcactcattattgagtctttcctgagggccttcactttgtaaggtgcatcataaaagccctgctcctaaggaacctgacccaagacaccgtgtacaacagtgcaaacattccctaggacactgtaagttcctaataaatgtttattactattgtcattatgattacaggttgagtatcatttatccaacatgcttgaaatcagaagtgatttggattttggactttttctgatttttgtaatatttgcataaccataataggatatctttgggatgggacccaagtctaaacacaaaatgcatttctgtttcatgtacactgtacacaaatacactgaaggtaattatatagaatagttttaataattttgtgaatgaaataaagttttgactgcatttttaaatgcaatctgtcacataa

SEQ ID NO: 902110 - DNA, 580 bp, Homo sapiens; identical to SEQ ID NO: 901386

SEQ ID NO: 902111 - DNA, 557 bp, Homo sapiens
gtgctctagtgttggatatgtatacatttaggattgttatgtcttcttgttgagtcgattctgttatcatgtaataactttctttgtctttttttactactgttgatttaaaccttgttttatctgatataaacatagctacttctattctcttttggttttcatctgtgtggaatatatttttctatacctctgcctttagtctataagtgcctttatcagtaagttaagttttttataagcagcatatagttggaggagttctgtcatgcagccattttatttcttttctgtcatttctgtaattgttttataagccccatggtttggtggagttctgtcatattgccattttgtttctttctctttctcatttctttgttttataagacaagtgagttttatactttcatgtatttttatgataggtgartatcgatctttcattcccatgtttagaattcctttgagcatttcttgcagagccagtctagagagttaagaaattaattactacagaagaatagaaaactagtattgactcttgtactccaaaa

SEQ ID NO: 902112 - DNA, 656 bp, Homo sapiens
ataacttgcttcagtcttttgattatgaatattatggatattaaggattctagactattctagatttaaaaaataatattgtcacctcaatcagaagggaaatattaaatagttctcattttttcaatgtttactcagtttttgtccaatgtaatgaaagtgtcagcagtacaggttacaaaataaaatgtgtattaaagtaaactcatttgaacaggttaataattgtagagggagggaaaaggctaaaagattgaatgtaaaacttatgaaaagtagatacatcgtctctatgatttgcagtagtcaactgcatacagatgaatcattttaatacacgttaactactttccttttacagatggagaaactgagaggaagaaagtttatatggttcattaaactttgtgatgcaagctaaactaacctgtctctgtattttccatctactgcccttatcactatctcattagaatactcttcaagcatctccttactgattttcttaccaagcatttgttaagttctaatgagagttggtagtaacattttcacccactctgtgaaatatgaartcttattcataggcctcttcttttattcttgtatttgcatatcaaccaattaatcaacttgctttctttatgttgcttatt

SEQ ID NO: 902113 - DNA, 639 bp, Homo sapiens
tgtggttgattttagaataagtgccatgtggcactgagaggaatgtatatgctgttgatttggggggtggagagtcctgcagatgtctattaggtctacttgatccagagctgagttcaaatcatgaatatccgtgttaattttctgtcttgttgatctggctaatattcacagtggggtgttaaagtctcccactattattatgtgggagtctaagtctctttgtaggtctctaagaacttgctttatgaatctgggtgctcctgtattgggtgcatatatatttaggatagttagctcttcttgttgcattgatccctttaccattatgtaatgctcttctttgtctttttagatctttgttgatttaaagtctgttttgtcagtgactaggattgcgaaccctgcttctttttgctttgcatttgcttaataaactttcctccacccctttattttgagcctatgtatgtctttgcacatgagatgggtctcctgaatatagcacaccaatgggtcttgactctttatccaatttgccagtctgtstctaattggggcattagcccatttacatttaagtttaatgtcgttatgtgtgaatttgatcctgtcatcatgatgctaactggctatttt

SEQ ID NO: 902114 - DNA, 570 bp, Homo sapiens
taaccgatctttctctttggctgcccttaacagtttttccttcatttcaaccttgctgaatctgacgattatgtgtcttggggtttctcttctcaaggagtatctttgtggtcatctctgtatttcctgaatttgaatgttgacctgtcttgctagattggggaagttctcctggataatatcctgaagatattttccatcttggttccattctccccattactttcaggtacaccaatcaaatgtaagtttggtcttttcacatagtaccatatttcttggaggctttgttcattccttttcattcttttttctctaatcttgtcttcacactttatttcattaagttgatcttcaatctctgatatcctttcttcagcttgattgattcggctattgatacttgtgtatgcttcatgaagttctcatgctgtgtttttcagctccatcaggtcatttatgtycttctctaaactgtttattctagttagcaattcttctaaccttttttcaaggttcttagcttccttgcattggtttagaacatgctcctttagcttgggggagttt

SEQ ID NO: 902115 - DNA, 473 bp, Homo sapiens
tttgtttatagtttatatcttatcccttatatttggcaccagaacaaggacgttgaagtgttttttaaagccagaaatcttcaaaaaggctcatagttttacaatcacactatgtattgaatgaatactaaaaactcaaaaacaaaaacttgccatgcctaatatgatttgtaggcaagttttttaacttcataaaacagactatttctatcttataccaaatattttaaacagtagaataaaagaagggaaactacagaacttgtttaatgagactgttagaatatttcatccaaatatggtaagggcaatacaggaaaaacaaaaactaccaaccattgtaacacataaagatagaaatacctcaaacttattgcaaattaaaatagtaacaacaatagaagtactattgcatgattagcrgtcatcctaagcattaaaaatcaacatagaaagtgtatctgtataagtga

SEQ ID NO: 902116 - DNA, 628 bp, Homo sapiens
ctaacacagtgatctttctctttgaaataaatgaataatctaaatgcctccttarcaatctagttcgtagtacagctctgaaaaaatggaattaatttttcattctataatctaaaagtatactgctcaatattatgaagtcactccgtctaatgtctccattatttcaaaatttaaaataatgctggaattcaggccctgaacagcatagagattatagcaacaactgcattaatctagcgttcattgtcctgtatgagaaggcttattttaagctgcatgaagtttactagtttatcggtttttaattacattttattaaaatatgactctggggcttcttttataaccatagaagaacatttgatcttcatttaaaaataaaactctcatttcaaaatcccaatgcttatgggaagcagaattaaatgctcttatttttttcaagtttttattataattgggattaaataccaataaatttatgtctgaattttataatctcctcatgcaatatagaacgcaagctgaactctttgtgtctactgttaaaattacttcttaaagttaattccatatccattattctttttcttctaattgagttgccttaacttcagtaaattgc

SEQ ID NO: 902117 - DNA, 665 bp, Homo sapiens
tccaggataatctgcccatctcaaatccttaatgatgtctgaaaagtcaaagtaacgtatsacagggtccatgggattaggatgtggatatgtttgggaggaggttcttccatctaccattccaggactcattcagcctccccttcatgttgacattgcatctggggccatagtttttgacaatatactaagccccacattctgagaatgtaattttttctgggataattgctttagaggatgaggtttggcttcttttctcaatatggtaggtgtggcccaccagtgaaaataataactgcttgaaacttttcatcagtaaagtcatcagaaacccagcatatattttctgcagtcctgcaggaaccacaccagcctcaagaagagcgagccccagctgcaagccctggcaggacccctcactctgctaacactgtggagacccctcaccccaacccttaatgggaagtcagtatataattagtcacgttgggttgggcttttaattcaccaaagcagtagagtttgattcagactttaattcacttgggttttgttaacattagacttaaacttgcgaagggactaatgtatcgattttaattcttctgagagaatttcacagagggaggaactatattcaaatttggggcatcctcgctttc

SEQ ID NO: 902118 - DNA, 609 bp, Homo sapiens
tgctgtccaagttcaggaaaaaacaattgttctgctaagactctccctccccactaccaattttcttcctatctctaaaagatcccctgtttcccgccttgcctattcataatgccaacggccaataggtattgaccaagtcacagccaagcttgaagagaacccaagcgtgggaaattccactgttgaggctctgatcctcgtgctgatgtctgttaaggaaaattgtctaaaactttgctgattcctagaagcattgaccttaaccttctactctgcctataatcaatcattcactgcatttttgttctgcttgatgtcagtggattcttttgaaccaataatgtctcaacataaattgttaaactctaattcttttttttttttttttgacagagtctcactgtgtctcccaggctggagtgcagcagtacaatctcggctctctgcaacatcttccttccaggttcaagcgattctcatgcctcagccccrcaagtagctgggattacaggcatgcatcaccacaccctgctaatttttgtatttttagtagagacggcgtttcaccatcttggccagactggtctcaaactcctggcctcaagt

SEQ ID NO: 902119 - DNA, 646 bp, Homo sapiens
gcagagagataaaaagttgtccataatggcagaagcacagaaaaggtaagggtcatggacattccaagagggagaagattacagacaggtaatgtgacgtgatcagaaatggcttggaggacaagtggcttggattagacatgaaaagcaagagatttatccatgtagaaaatagagaaaaggctttcctagatgagaaaaaagtgcttccagcacaggaattaaactggaagtccggtttgtgctgtgaaaacaaggacaactggtttggcaggatcacaggttacaggaagcacaggaagtgggcttatatctagtaacttcaaatgtggctaactcaatgaagcctctgactaccatgctaggaagcatgactgtcactgtaggcaactgggagctgccaaagaagctcttaagaaagaaacagcatgttcagtgttgtgttttagaatgtagaaaaggtggaattctaattattttaacaaagatcacatgcagttaagcgcagtattctttacatggcaagatatttgtattcaataaactatttattgatggatgtacatattgatagaattggttacagcagaraatgctaattgtggcttaacatctatttatcctttccttagtaaaaacaaacaac

SEQ ID NO: 902120 - DNA, 595 bp, Homo sapiens
aaggacttaaatgtgaggtagagcaatgtaaaaaggatattcagagcttccctttcccttctacctctaaggaatcagctcccaccctcttcccgttaagagaggtgcccctaggacggggagccattggcttcacgaatttccccttaacgagcttggaagttcaaaatttgaaaaaagaactcaagccactgttagatgacccttatggagtggtggatctaattgtccaatccagttgcatacttgagcctagttaacgtccatcctggacatcctcttctcaggggaagaaaggagcatgattcatagggctgctatggtaatttgggaacgtgaacattctcctggtcaaaacgttctctccacagaccaaaaattccccacctaagaccactgaagggacaataacaatgcagctcaccaggaaaataggcaagaccttagggaaatgataataaaaggaatttgggaatcagtaccccaaacacaaaatctttcctgagcattcaacatacaacaaaggaaagatgaagggcctatgggattcttagacwgactaaaagagcaaatgagaaaatatgtgggcctagat

SEQ ID NO: 902121 - DNA, 534 bp, Homo sapiens
cctctcagattactttaagagcctcctaacttgtcttcctatacctagtcttggtcccattcttcacataacagccagaaagttttaaaatctcacctaaaatcttcaaattgttaaccatcaattactctacaaggaggctgactttaactattcaatatcagatccctggtacccagaacactgcctgacctaaggtgagcacatgacaattatttgttgaaggaattaatatatggttctgaaccaggagagcatgacagaaatacctgggattcttcacactgcacacatgaactttcagctagagtctctgttagcttccagacctagagaacagagcctaattttcttggcattgtgtgccgggaccttcctaatctagctgatgtgcacaatcctagcatcagctcctgcartgccctttaattctgtatcctcaagtaatgacaaattacttggaacactgacacaatgcctcaatttcttgccctgttcatattaaatatagttaacctcctctttttcctttac

SEQ ID NO: 902122 - DNA, 534 bp, Homo sapiens
cctctcagattactttaagagcctcctaacttgtcttcctatacctagtcttggtcccattcttcacataacagccagaaagttttaaaatctcacctaaaatcttcaaattgttaaccatcaattactctacaaggaggctgactttaactattcaatatcagatccctggtacccagaacactgcctgacctaaggtgagcacatgacaattatttgttgaaggaattaatatatggttctgaaccaggagagcatgacagaaatacctgggattcttcacactgcacacatgaactttcagctagagtctctgttagcttccagacctagagaacagagcctaattttcttggcattgtgtgccgggaccttcctaatctagctgatgtgcacaatcctagcatcagctcctgcaatgycctttaattctgtatcctcaagtaatgacaaattacttggaacactgacacaatgcctcaatttcttgccctgttcatattaaatatagttaacctcctctttttcctttac

SEQ ID NO: 902123 - DNA, 629 bp, Homo sapiens
ctggctgagtgggcacatgaaattaaccactgcagtggtggtgaagggtgctgggctctggtgcgaggtctctctcttggcyggaggcaggtgctgttacaagcttgaagccacagtgtgtctgtgcatgaaagtgctccatattctcccctccatagggacgatgcttggccccttgggcctcaaagctgcacctgctcttccactcagctctcacagagtcccccatggagcttatatacacagccttttcccacaggagtcaggcctgagtcaggtttagggcctggaatgttttccgagagagtcgcctctctttctctccctctcatgattctcccctgtttgagactctttcccagtggccaaaataagataaagggaagaaaatccctcaaaaccctcccataattcaactcttatgaaccctcccagcccccaccaaggacttcccctgctcatctctcatgtccagatgtgtccaggtacacttggatcccatttgggattggatcccatcctgggctgggacccaggatgctgatgtgtgagatcttggaaaatttcctccgccttcgacggagaaattggagttgctagtctggcagtgaaccagtgaggcaagaaag

SEQ ID NO: 902124 - DNA, 667 bp, Homo sapiens
ggaagcatgcgtgggatggtttgggacacgatgggccaagagarggagagacaagttaggaggtgatcgcagaaatctaaggaagaaaataataaaggagattgagaggctattgagatcaacccatcatttcacagtttaaaccaaagctcagagaggttaagtcagttgcctaaagtcacacagctaatgagcagcataaccaatactagaaaagaaagatggaaaagtagtcataatttctgaaggcctgctctgtgctatgcatgctacatacatgtgcagtttcctttcacctcacagagtaagtgtggtggtttcatttcaatgatgaaaatgcagaggctcaaagaagttaggtggtttgcccaaagtcaaacagcttgtaagtgcagtgatgaaacccagatctttgcaccgcagtgtgctgctgccattgggtattgataacttttgcaatgcaaggtgcattattaataggaaaaagggaatagaaaaggactccttgttctttaactcctgggcctttctgactccacattacttggatttcaaaacaactctgttgtttggtactcaggccttttaccttctttcccctctctggtataggcagcaaaagcctttaattagctagcccgcagctcatcagagaaaggtggctgta

SEQ ID NO: 902125 - DNA, 597 bp, Homo sapiens
acctattggatactatatttactatttggtgatggattyaccagaagcccaagccccagcattagacaatacaactatataacaaacctgtacacctacccctggatctataatagaaggaaaataatggtgttgagaaaagtagatttccacatgcaaaacaataaagttggaccctaatccaacgtcatatataaaaagtaactcaaaaaggattacaagcctaaatgtaagacataaaactatacaatttttagaagaaaacataaggcaaatgctttaagacactggatgtggcaataatatcttagatatgggtaatatagttaataaaatgcagtaaattcctaacagtttatatggtaatgtttgaaggcaattacaaatgaaattctgagatatgattatttgcaatgtgactagcataaagtacattgtttgatttcctatgggaaatggcaaaaattcactttctaacttaaatatttacaaatatcatgggaatttaaatgtgtgttcctttgggaagaagtttaatagatagaagagctatgtgtatattcaggaatttcttcaggacaggatttcatggaagag

SEQ ID NO: 902126 - DNA, 561 bp, Homo sapiens
ttcatttgctaaggataacagcctccagctccatccaagtccctgaaaaggcaaaggacatgatcttgttcttattttttggctgtatagtattcartggtgtatatgtaccacattttctttatccagtctgttattgatgggcatttaggtcggttccatgtctttgcttttgtgaagtgtgttgcaatgaacatttgcctacctgtgtctttatagtagaataatttatattcctttggttatatattcagtaatgagattgctgtgttaaatggtatttctgtctttaggtctttgaggaattgccacactgtcttccacaatggttgagctaatttacaccttccatcaacagggtataattcctttttctccacaacctcaccagcatctgttattttatgacttttgaataacagccattccgcctggtgttagatggtatcacgttgtggttttgatttatatttctctaatgatcagtgatgttgagctttttttcatatgattgttggtcgcaggtatgtcttcttctgaaaagtgtctgttcatgtcctt

SEQ ID NO: 902127 - DNA, 579 bp, Homo sapiens
gccaaagccaaaaaagctaatatcccaggatgaaaactagatggaagctatcwgagaaagtgctatttgaagtgtgcagttatttggcagatttaggcctttcttttcattcgtcagtttaaaaaccacgtttttgtacaatctgcgaagggatatttggccgtgcattgtggcctattttgagaaaggaaacatcttcagataaaaactagaaagaagctttctttgaaactgctttctgatgtgtggattcacctcacagaattaagcctttctttgcattcagcagtttggtaccatggcttttgtccattatgtgaatggacatttgggagctcattgaggccaatggagaaagagtgagtatcccaggatagaaattaaaagaaaactatctgacaaactgcttagtgatgtatgccttcatcttgcagagtggaatctttcttttcattcagcagtttggaagcgctgtttttgtaaaatctgtgaagtgatatttgggagtgaattgaggcctggttgaaaagtaaatatctaagataagaattagaaagaagctttctgagaaactgcttt

SEQ ID NO: 902128 - DNA, 492 bp, Homo sapiens
attaatctcacagaattaaaactttctttggattcagcactttggtatcatggatttgtccactttgcatatagccatttgggagttaattcaggccaayggtgaaaaagcaaatatcctaggataaaaactagaagaaaaacatctgacaaacccattgtgatgtgtgccttcatctagcagacgtaaaagtttcttttcattcatcagtttggaaacactgttttggtagaatctgtgaagggttatttgcaagcacattgaggcctataatgaaaaaggaaatatcttcatataaaaactagaaagaagctttctcagaaactgctttgtaatgtgtgcattcggctcatagagctaaacctttcctttgattgagcagtttggttaacactgtttttgtacattatgagagtcgacatttggcagctccttgaggccaaagtcgaaaaagagaatattccagcataaaatctagaaggaagttaactg

SEQ ID NO: 902129 - DNA, 641 bp, Homo sapiens
gtgaaaaaggaagtttcttcagataaagaccaaaaagaagatttctgagaaaccttttcatgatgtgtgcattcatctcacagagttaaacctttctttggattcatcagtttggaaacattgtttttgtccatactgaaaatagacatttgggagctcattgagttcaatttccaaaaagtgaatatctgaggataaaaactagaagaaaactttctgaaagactactttctgatatgtgcattcatttcacagaatgaaacttttcttttctttcagcagtttggaaaccgtgttttggtattatctgtgaagggatatttgggagtgcattgaatcctctggtgaaaaagaaaataccttcacataaatactagaaggaagcattctgagaaacggctttgtgatgtgtgcattcatctcacagagttaaaagtttctttggattcagcagtttggaaacactatttttgtacaatctatgaagggatatttgatagctcattcaggccaaaggcaaaaaagaaaatatccggaataaaaactaaaaggaagctacctgagaaactgctttgtgatatgtgtgttcatcactcaragttaaagcttacttttcattcagcagtttggaaacactgttt

SEQ ID NO: 902130 - DNA, 599 bp, Homo sapiens
accctgacttgctgatgccccttcagaccccaaaggtaaagatgccctgtgtaaactaaggagttcctctaatggctgagctatttgatgctgatatggtagccactacttacggaagtgccttctrtgtacaaggaattttatattatttatcttatttaatctaaacaaataaaatattggtatatccattttgcaaataaagactgaaagctcaactaagttaggtaacttgccaaattcatgcactgaggaggtcgtaatgctcttctttgaacttagttttgtctaactctccaaagtgggcacatgacatccactcccacttatcatataagtttattactgcttaattaaattttgctgaaaaaccatctgttttactatgttttcaaggtgtcaacttggaattaaaaataactacttcctcattcactgctattaatgttatgaggaaaaatgaacagaaaaactatagttgaaatacatgagttcaagatgagactagtaattgcaaaactttgctaactaaaaagtaatacaaagtaaagagcagtttaaatttcttcttcactgcctggtttcctctaaccctcgtt

SEQ ID NO: 902131 - DNA, 628 bp, Homo sapiens
aaccaagatttctttttttttgctgttgctaacaaacaggtwtaaaaagaaatgaccattttaatgaaggtcagttggggacagcaagaattatggagataaatgggctatagataacaaaggaaaagaatcccaagtgaaaccaaactggacacacacttggctaactgttggaaaggaagggttagaaattttgacagatacctacaattattttatttagagtttataaataattatgcttaaggtacgataacttctatacagtttccatcccaatgtccagtttcaattatttcaactaaaactcttgtattgttcataaagtctagagtataggaggtccctttaggcatcaaagatgagaagccaagtcagaaaaattctaactgaccattatgctcaagattccagtgctgagcagggcagggaagataaacagagctgtttaagcaagattcctgtctagggttgttgccatgacacagtttggaagaagaaggtctatcaacaacttatttcccctgtgcttcaatgagttaaagcattttctcacaagaaataaatgtgtagtgtttaaggatccttgacagagctccttgtaaactgagctctcagaagttgtcac

SEQ ID NO: 902132 - DNA, 563 bp, Homo sapiens
cctgaaatttgaatttgactatgaagaaagtattgattgtggggagaaataatgttaattccctaaaacacagggtgagaactttttaatggagtacacattactcatcaaaatatagtcccaaactatattatcaaacatgtctaacccactttacacacatacacacacacacacacacacacacaccaccctacgatgcagttatatgaatctttattgtttactaaacataatacatttcctccttccccacttacgtgcctttgcacattgtattctttgtatcctcttcctagaatgctcttctttaaattgataaacttatccttcaaaatgcaacaaaaataccaccttttcaatgaagtccttcagaatccccccagtgtcccatagaaatttgcatatcctcttaattcaatgtcctgcaaccttctttgcacattagcacccytgggatttggcatgatcctatcagtaatgctgtctcagtggggttttatatgagaaggggctttctatgggtgaggcaacaatggttctctcttgtgaggttgaaattt

SEQ ID NO: 902133 - DNA, 603 bp, Homo sapiens
gaaagcacacagggcctttagcaggactctgttcatcctcttgtccccaggtgacatactcttttaccackgatcagaaagcccacaattggaggtggaggcttacctggcccatgtttactctgctaacttacacttccttaggtattctctcactgaccttcttctccttctccttctccttcttcttctttcttcttcttccagagtcttgctctgtcacccaggctggagtgcagtggcaccatctcggctcactgcaacctccgcctcatggattcaagcaattctcctgcctcagcctcccgagtagctgggattacaggcaagcgccaccatatccggctaattttcttgtttttttttagtagagatggggtttcaccgtgttaactgagatgatctcaatcttctgacctcatgatctgcccacctcggcctcccaaagtgctgggattacaggtgtgagccacagtgctcggctgacaccctcttcttaataccctcacagttcaccaatacgagggtgagcatctatctaggtttccctgggacactttgagggaaactggcaaaacaaagcactgtctttttttctcttag

SEQ ID NO: 902134 - DNA, 487 bp, Homo sapiens
tttcagaggcccaggcagatctgcttgaggccaggagtytgagaccagcttaggcaacacagagaccccacctccacaaaaaataaattagctgggcatggtggtgtgtgcctgtagtcccagctattcaggaggctgaggcaggaggattgcttaagcccaggaggttatggctatagtgagccatgatcgtgccactgcactgcagtctgggtgatggagagagaccctgtctcacacacacacacacacagacacacacacacacagacacacttaatgtctgaaaggaagcaatggttaacaagccacttcaaagaaatgattaaaggtagttaaagcctcctttttttttctattctgctaaaggatccaaattgctaactgtgcacagtactgtaaatctctagaagcatcagtttttgattctgaagttataagggcaaaacctactgacagacactcatacacaaaatgttgtcagatc

SEQ ID NO: 902135 - DNA, 650 bp, Homo sapiens
gttcttttttatggctgagtagtatcccatggagtatatgcatcacattttctttatccaatccactgttgatgggcaccggggttgatcctacgtttttgctattgtgaatagtgctacaattagcatacgcatgcatgtgtctttttggtagaacaatattttttttcctttgggtatatatcaaatactgggattgctgggttgaatggtaattctattttaagttttatgagaaatctccagactgatttccacagtgactaacctaatttatgttcccaccattagtgtataagcattctcttttatctgtagccttgccagcatctgtaattttttgagtttttagtaatagccattctgactggtgtgacatggaatctccttgtggttttgatttgtatttttatattgattagtgatcttgagcattttttcatatatttgttggctgcttgtatgtcttcttttgagaagtgtctgttcatgtccttttcccattgtttaatagggttgtttgtttttgcttgttaattcgttaattcgttwaagtttcttacagattctggatataagacttttgtcagatgcatagttttcaaatattttctctcattctgtagtctgtgtgtttactctgttgatag

SEQ ID NO: 902136 - DNA, 598 bp, Homo sapiens
cactgatagtaaaacactagatgaatagtaaaatataacatgacagctgtcctttagacctttgagcatatgacaagtgatkcataaggcaattacattgttttgagttactttaataatttttcttctgttttggttttttgtagactaacctcatgtataataaaactttataacaactaacctcatgtataataaaactttataaattcattttatcttgagacttaatattttaagggacagttctttttggaagtagcgtttggtgtcagatagaggtaaactgccctgtcagtatgttttataaaatggatggaactttgaagcagttcagactttaaagacacacataggagattcagccagagtcctgtcacctgtaattgcttactagaatctacgaaggagcccagtaattatacttctctttacctatctggattcttttttttttttttttttttttttttttaaagagacagggtctcgctctgttgcccatgctggagtacagtggtgtgatcacagctcactgcagccacgacctcctgggctcaatcagtcctcccaactcagcctcccatgtagctgggac

SEQ ID NO: 902137 - DNA, 634 bp, Homo sapiens
gaggtggggtgggctgccatctttgctgttttgaaaccttagctgttcttgccttcaggctttggagagtccamagtgactaggagctggagtggacctccagcacagcacagttgccccgtgaaaaagcagccagaatggtttttcatgcaggtcccaatcctattcctcctcactagacaggaccccttgaatgggatttcctgctacccctgccagtgtttttcagccaggagcatttccaaattccatggaatggagctcccaaagggagtgatgggccatcatctatgctgtttagcagccttagctgttcttgcctttgggctttggagagtccaatgcaaatgggggctggagcacaccccaagcaaagcacaacacagctgctctaccaaaaagcagctagactgcttttttacacaggcccccattcccgtttctcctcattgggtgggctctccagactagggtctccagccacctcctgcaagtatgttctgaccagcaacagatccctacctcgctggaacagagctcccacatggcagtggccggtcggggggggcaggttgtcatttttgcagtttggcaatctttactgctgatgccttcaggtactggaaaattcaag

SEQ ID NO: 902138 - DNA, 465 bp, Homo sapiens
tgccaagagaattcttggcaagttttggttcaaatgcagctttcctcaacatccaatcatttctccctgctctgacacctgtcccctctttctcagcttggagtttttgtttcagaattgtcttatccctatgatacatccatttgtacttctatatcccactttaggtaattaggttttagagcccacaggaatcacaattcacatgctgttgctaagttctgtgccattaagccaaaattgctatctaccaaagtatttagtccttatgaagagtattccaaggttttcatgcaaatgtgagggtcccattgcaaatattttgaaactgagttttggacaaagagtataaagtggaaacacasatttccccaaggaggaaaggaagggcagggtgaatcaagcatgatttttgggaaaacaaagtcccctaattaagcacctgccagtttgtgccttgataac

SEQ ID NO: 902139 - DNA, 613 bp, Homo sapiens
aacaccacatggagctgtaataatgtgactccctgtttacattagttctagcacttggagtaaactctccttgagttaggtgctaaccaatttcaaccagggtaggcatataaactaatgaaggattgtattaaacgcagagtgtagataatgctgagaataggcagataaaaggctgtagactatcattttgaatctgcagccaggtgtcaattctctgggtttaatcccatcgattgctatctgtgtgaccttgagtgagtcctcaaattcagtgaaatggagataatcactgtgcatttctcataagactatagtaaggctttaatataataatatacataaaggttttctctacctcctcttccactgcttttttttcctttctctttactttttaaaataaatatctattgccatttttttccttcctttatcaaaaagctactagaaaagaccaagtgaaataagtggcccagggttgtcagacttcattgatggttggggctagtgtacaaagggggtggcaactagttggtgtcaggaaattggctacatttcggggttgkagatgagagccggcttcctcagtgtcagagaagggaaggggaag

SEQ ID NO: 902140 - DNA, 606 bp, Homo sapiens
acataaaagctatacttcctagaatatagtttgtttagtagatttgattttggaaccatataagtatttcacrtaattataaaattgatttttaaaaaagaaatgcctaaacatcaaaagcaaaatgaaacaataatacaaaaaacaaataagttgggggtataacttcacagatatgaattattccaagtgtctttaaaacatagtaatttgactacacctccctagtagtgtacactctatgaacaaaaaaaaaaattgcaggactatcttaagtgggtttcagtaattatacttttgattggcagcattggtgttgttactctattgtgtctacataatgcaggataaagcaaatgagtaatgatgttgttatagttaggaatcaggactttaagggtaggagaaaagagacaatgtgaaaagcttaggcctgcacttgaattggaagtatcagcataatcctatgatacattttttctttaaaaacaaaacaaaaaaacccaacatattttctagctctgttctttgaaaaacctaagtaacaaggtacacataggggaagttttagcaatgatgttgcttagttctcaaattgaggtctct

SEQ ID NO: 902141 - DNA, 603 bp, Homo sapiens
atctaagtctcaagttggttagttagatttaacagagctaaycctcatccatgacttatcagcatttatatgtaaaagtaaggctttgtacttgctttggcagcacaaatactaaaattggaacaatacggagaaaattagctttgttaagcacttcatattttgcagtcaggggaaggtcatttgactgtttgctggctagctaagtcacagtttgaacagaaacaaaatgggtggccccttatatttgaattgtgatttttcactacaaaaacatttgtgtaaggtgatctataaactgagaatggagataagtaacacatagggtgttgtgtaaatattttgttagtatgtatcttggaaatgagaaaatgtcaactttcatctacttcatagaacttaaaaaaaatgaaagtagggttttgtcttccatgtcagttggagataacatcactgatggagattaaccatcattctagcaaacatctgctggttcagttagagtctgtagagaagtaatagtggtagcccaggcaagatcttgacatctgttagttttctgcccttggaattgatgagctcaataatagtgaacaatcatct

SEQ ID NO: 902142 - DNA, 603 bp, Homo sapiens
atctaagtctcaagttggttagttagatttaacagagctaatcctcatccatgacttatcagcatttatatgtaaaagtaaggctttgtacttgctttggcagcacaaatactaaaattggaacaatacrgagaaaattagctttgttaagcacttcatattttgcagtcaggggaaggtcatttgactgtttgctggctagctaagtcacagtttgaacagaaacaaaatgggtggccccttatatttgaattgtgatttttcactacaaaaacatttgtgtaaggtgatctataaactgagaatggagataagtaacacatagggtgttgtgtaaatattttgttagtatgtatcttggaaatgagaaaatgtcaactttcatctacttcatagaacttaaaaaaaatgaaagtagggttttgtcttccatgtcagttggagataacatcactgatggagattaaccatcattctagcaaacatctgctggttcagttagagtctgtagagaagtaatagtggtagcccaggcaagatcttgacatctgttagttttctgcccttggaattgatgagctcaataatagtgaacaatcatct

SEQ ID NO: 902143 - DNA, 543 bp, Homo sapiens
tgagtaagttctcatgtgatctaacggttttataagtgtctggcatttcccctgcttgcagttctttctctcctgcctccttgtgaataaggtgcctgtttcctcttctgccgtgattgtaagtttcctgaggcctcccaagccatgtagaagtgtgagtccattaaacctctttcctggccgggggcagtggctcacgcttgtaatcccagcactttgggaggccgcggcgggcagatcacaaggtcaggaaatcgagaccatcctggctaacactgtgaaaacccgtccctactaaaaacacaaaaaattagccgggcgtggtggtggggtggtgggcacctgtagtcccagttacttctgaggctgaggcaggagaatggcctgaacctgggaggtggagcttgcagtgacccaagatctcgccactgcactccagcctgggcgacagagygaaactctgtcaaaaacaaacaaacaaacaaacaaacaaaaaaccccacctctttcctttatgaattaccaagtctcaggaaagttctt

SEQ ID NO: 902144 - DNA, 606 bp, Homo sapiens
atggctttgacaaaagtgctaacagtgatatgaacaataaggttcaggctgaggtagtcttagatggaaatgaagaacttgttgagaactggagcaaaggtgactcttgttatgttggagcaaagagactggcagcatattgcctctgccctagagatttgtggaactttgaacttgagagagatgatttagggtgtctggtatctggtggaagaaatttctaagcagcaaagcattcaagatgtgacttgggtgctgttaaaggcattcagttttataagggaagcagagcaaaaaagtttggaaaatttgcaggctgacaatgtgatagaaaagaaaatcccattttctgaggagaaatccaagctggatgcagaaatttgcataagtaatgagaagctgaatgttaatccccaagacaatggcataaatgtctccagggtatttcagaggtcttcaagacagcccttcccatcataggcctagagggctagaaggaaaaaattgtttcttgtgccaggcccagagtccccatgctgtatgcagtctagakacttggtgccctgtgtcccagctgctccagccatgtctaaaaggggccagagt

SEQ ID NO: 902145 - DNA, 660 bp, Homo sapiens
ccaggacaaggaggagatgaaggtgaagctgctggagctgctggagctrcaggagctgcaggagctggtgttgcggcttgtgggcaaccacaacaagtggcatggcaaattcctggcagctgccaagaaccctgttgattagcccgctccaggtgccccagctcccacaggagctcggggctgccaacaaacagggtgatctttgcaagatgagcctcgcccacagcatggagcctgcacaagaagaggccagggagggttctccccatgacaatcccactgcacagcagattatgcaactgcttcctgagatgcagaacccccaggagcacccaggcttgggcagcaacccctgcattccatttttctatcatgctgacaagaaatgaggtgaagatcaccatcatctaaaagccggccactgtcagcaaagcttggagaagtggggccagaggctccatccccaccaggtccttaccaccccttcccagtcaccccattatccttagaggagcaaggtaagacccctgtgtgatggggggagacaaacaagtgcagaccctttgccaccttggccagggctgagtccttaatttctggatgattatgttgttatttaagagccagaggctcatagggttgatttatttgcaggaggcc

SEQ ID NO: 902146 - DNA, 575 bp, Homo sapiens
gtcacagaagaaatttccagtctctaatttcmtagctgctaagaagttatctttgtgttctggaaatatggataattttagatgacttcatattagcattgttagggtttctttggaatgttgaaacatgttatttctctgttgttaatgtggcttctctttttaatttttttctccttgtttaacgactgattatttgttaaggtgatcctctgaggatcttgctcttgggcagtggtggaaacacttctcagaacatacgagacctgagttctttgcctgttttctatcatttccttcctgggagtccttgcaaaagtgatttaatattttgtgacttaataatcactgtaatcttcaaggtcataaaacatgcaacagtttaatctgaaacactgcagaaattaattagctgacctttcccaagggttgagtactccctgaagaataagctttataaatacaagtatgttaattgctgatattatcatcacaggaggaaataccctaagaattgaatccaggtgtttctgagttgcaactgaaagtaatcctagattcctgacagcagcttc

SEQ ID NO: 902147 - DNA, 616 bp, Homo sapiens
ctttccattttacatgtttttgttgcctaktattttctttttattcttttacccccaaaattagacattttaattgctattgtttccagtcagtgcttatttggatttgcccacatgcttgtttgggttcaccactccttctgcatctctgtctatccttcttcccaaaatatatcatttagaaaaagtttccttgagataactctgaagtctctcagtttttgtttatcaaaaaatgagtttattttgcttttattcatgattgatggtttgacttgactgacagttatttttttcccagacgtttgaatatcatattccattgcctttgagcttctgttattgtcattaaaatgtctactatcatttgtgtgtgtctagggtatcttcttttccttcctctggttgcctttaagattgtaagatttctttttgaagtccttcagatttactatgatatgtttaggtgtggaactatcttattttattaatttgaaacagacattttccatattccaactctgaaatctaggtatgtcttacaatctatagcatgcttaaatcaatgttatacaggctacagcaatttcattgcctaaatatatgtggacttggt

SEQ ID NO: 902148 - DNA, 557 bp, Homo sapiens
ctccaatgtgctttgcaaaatgctgggacctgccttcctaggtctaaaktacagccctgtggtgccagagctatctggtcatctgtctaaacccaagttcattggccgagcatgcagcccagcctgcatcctcccagttgccagcagcattctttcttacagcaacaggaagaaacttaacaccttgtgtgatggaaagaataatttcctgcttaggatctgagctgaaatccttggcattggacctctgatgagaggtccttggtaaaagcagtagctggtagattttttttttttttttttttttgagatgaattctcgatctgtcgcccaggctgaagtgcaatggtgcgatctcagctcactgcaacctcaccctcctgggttcaagcgattctcctgcctcctgcctcagcctcctgggtagctgggattacaagcacccaccaccatgccctgctaatttttgtgtttttagtagagacagggtttcaccatgttggtcaggctggtctcaaattcctgacctcaggtgatctgcccacctcagcctccca

SEQ ID NO: 902149 - DNA, 557 bp, Homo sapiens
ctccaatgtgctttgcaaaatgctgggacctgccttcctaggtctaaattacagccctgtggtgccagagctatctggtcatctgtctaaacccaagttcattggccgagcatgcagcccagcctgcatcctcccagttgccagcagcattctttcttacagcaacaggaagaaacttaacaccttgtgtgatggaaagaataatttcctgcttaggatctgagctgaaatccttggcattggacctctgatgagaggtccttggtaaaagcagtagctggtagattttttttttttttttttttttgagatgaattctcgatctgtcgcccaggctgaagtgcaatggtgcgatctcagctcactgcaacctcaccctcctgggttcaagcgattctcctgcctcctgcctcagcctcctgggtagctgggattacaagcacccaccaccatgccctgctaatttttgtrtttttagtagagacagggtttcaccatgttggtcaggctggtctcaaattcctgacctcaggtgatctgcccacctcagcctccca

SEQ ID NO: 902150 - DNA, 591 bp, Homo sapiens
tattttgtgtgtagaggtgagaggcttatagtggtaaattcttcagcatacatttttgcatgatttgtaaatatttttaaaaagaataatataatttagcttgtcagctctgggatgaaagaagccattttatctataaatgtgattcctggcaggctagctgaatatggaacaaagagggaattaccttacctataacacagaaacctttcagcaatagatttaaagataaagaagacaatctcattaggagacctgtagcttatgatttatgaagccagtcaatcaacaaatatttatgtgatgagtaggaaatgtagtcaaagacacaatttctgcctctaatttagcataatttcttgtcatcctcagagaatttgtttagatcttcattttctttcatcaatattataacaatagcttttagtatctctgctcttaatgttgcctccttgaactctgtagccagagttatttgctaaattgsaaaagcattgtaagttctacaatcagactgtgttagttcaaatcctgtctctgttacactctaagtatacacttggtcaagctgcctaacttctcaggatcttc

SEQ ID NO: 902151 - DNA, 688 bp, Homo sapiens
ccccatgtcaactctgaaaatgatatgtttctgccattaaaaaaaaattccccaagagcatttgttccctgacctagaataaggtccacctctatacttctgctctcccaaaggacctgaatttttgagtctagactttatcttcaatgcctggtaacttttctccaactgattgaattaatatcccaaagttttcagtctgtgtttgaccaaattaaacctctgagaagccaaatcatgtctcaatttttttgctttgttttttatttcattcctgaagccctggaatagtatcctttaactcaaggacacaaaatgtgttgccagaaataagagtaagaaaaatatgacagtatgaaagttctgataatgttttctctctagtgatttcaaagcaatgtgaaggtgaggtatatctctggttaatcactggatctcctcaatatcattgcacatgaaagatttaacataagtaactgttgaaatggaaaaaggtacactggctagagaaaaggcaacaaccatgaaggttgtagattttgtgaaaacgtgaaatgaagaatttcaggcagcaggaagagagtggttccttgacmtaaaattatgtaagcatttgtaaactcccaaaacaggcactggagattgtgttaacaaagaacctgaaggaaaaaacatttgtcccacactc

SEQ ID NO: 902152 - DNA, 674 bp, Homo sapiens
aagcatggtatagttccttgaaggtttttctttgygtgtatgctgtaaatatatttagccaatactatagttgaagaggctcaattaacacatataagacaacagaaggaatgtaagatgattatatccacagtaactgccaaaatgtatagtctcgacaccaatttccctaagcatggattttcattaccccatgtagaattctcattccaaattaagatgagtttcaccaggtcttctactccctgatattgtgggcagtaatttaaaggtatgcacttttactttggtcaagtatgcagcttttattagattctcaatggaattcacaaataaaaatatttcaaaaaagcagactagtttcctcattttaaaattagctttcttgagataaaaaaaggatataataaaattcattcatctaaaatatacaatatgttgacttttgagaggtgtatacaactgtgaaaacatcatcatagttgtacacatcacgcaacatattcattaccccaaaaatgtctcttcacacccctttacctctaacctcaggcaaccattgatctcctttgcatcaccataaatatattttctttttccagaatgtaagcaaataccgtaggtattactttgtgcttggcttctttcactcaacataacaattttgagattaa

SEQ ID NO: 902153 - DNA, 474 bp, Homo sapiens
gaaatcttttggacaataatgtcaaatacagaaaataaagaagtagtttcaggccaagtgcggtggctcacgcctgtaatcccagcacttcgggaggccagagcggacgaatcacgaggtcaggagttygagaccaacctggccaacatggtgaaacctcatgtctactaaaaatacaaaatattagctgggcataatggtgggtgcctgtaatttcagctactcaagaggctgagacaggataacagcctgaaccccagaggtggaggttacagtgagctgagatcatgctactgcactccggggtgacagagtgagactgtctcaaaaaaaaaaaaaaaaaaaaggagtaatttcaaaaattgtacctctcagaattaagtgctggttacacctaacggaatcattgtagtaagtagtggctcatttaattgcactcttttacctatgtctttattaatattttataaagtc

SEQ ID NO: 902154 - DNA, 610 bp, Homo sapiens
acttactcaaaaccgcacaactacatggaaactgaacaacctgcttctgaacgactactgggtaaacaaggaaacgaaggcagataaaaagatgttctttaaaataaatgagaacaaagacataacataccagaatctctgggacacatttaaagcagtgtgtagagggaaagtcatagtattaaatgcccacaagagaatgcaggaaagatctaaaattgacacccttacatcacaattaaaagaactagagtagctaaagaaaacaaattcaaaagcgagaggaaggcaagaaataactaaaatcagagcagaactgaagaagatagagacacaaaaacccatcaaaaaatcaatgaatccaggagctggttttttgaaaagatcaacaaaattgatagaccgctagcaaaattaataaagaagaaaagagagaagaatcaaatagatgcaataaaaaaatgataatgtggatatcatcactgatcccacagaaatacaaactaccatcagagaatattataaacacctctacacaaataaactagaaaatctagaagaaatggataaattcctggacacatacacyctcccaagattaaaccaggaa

SEQ ID NO: 902155 - DNA, 618 bp, Homo sapiens
gtctacctccaatgtcaggttcaaatttcaacataagacttggtgggaccaaacagcccatatccaaagcrtaggaaggtatcaggaatattggtttgttctgagaaatatgaggaaagaaactgttctacatctctctctttggcctgtagacagccatcttgttcctgtgtctctgtatcatcttctttctgtacctttgtctgcatccaaatatttcctttttatgaggacaactattatattgaatgagtactcatgttgatgacctcactttaacttgattacctctgtacaaattttatctccaaatcagttcatgttctgagatactgagggttaggacttcaacacaggatttggaggtaacacaactaaacccatagagccttgaaatgccaagagatagttgttttaccaaaaacttcctgaggctctagtttcagttggtcactcttaccaatatattcatattatgtgtgggatttaagtaactagccaaaaaattacagttaacaatttattaaacatatgtgaagagaaaaatattggttaaaatgctgaccctattttgatcaatgtaacatctgcaagcacttgccattttggatttaaagg

SEQ ID NO: 902156 - DNA, 671 bp, Homo sapiens
  misc_feature 654, 655, 656, 657, 658, 659, 660, 661, 662, 663, 664, 665,666, 667, 668, 669, 670, 671: n = A,T,C or G
aggaggccctaggaacttgcctgtgtctttgtttaccccaggcttcgtgacttggcaaatctcttctacttgttttcctcaggatgarggcgagtgctgtgcttgtccatcagtgaaatgggcaggagtgtgtttctggtgagaagtacaattagagtcttgtggtgccttggagggctgatgaaagctgggctaagtgctgagcagatagcatcaatgtggagcagtaaatgtctacccagctcaaccctgcctgctgggctcagaaggatggaacagagagggtggaggagtttgaagtgctgaacatgtccaccttttcctaggacagaggatgcttttggtttgccccttctgccttatttgctgagtattccgattctcatttcctgggcactcccctccactgccattccttttcctgccttcttttccatgggttgtgctcatgtctagagcctttaggctggggtactgagcagcatctgcacttttagtgaccaagaggtggctggaccttcaggccactcttcctggtacctgggaatacagactctgtcctacccaccttggagctctttagagtctcccttctgggttctgcacgccagtgggagacagtgagagctgggtagagaaaaggcatcatgacannnnnnnnnnnnnnnnnn

SEQ ID NO: 902157 - DNA, 524 bp, Homo sapiens
atgggattccctttgcaggtgacctgacccttctctctagctgcctttaacattttgtctttaattttgaccttggagaatctgatgactaygtgtcttgtggatgatcatcttgaatagtatcttgcaggggttctctgcatttcctgaatttgaatgttggcctctctggtgcacttggggacattctcatggatgatattctcaaatatgttttccaagttgcttgctttctcttcctctatttcaggtatgccaatgaatcatacatttggtctctatacataatcccatatttttcagaaattttcttcattcttctttattattttttatttatttttgtctgactgatttatttcagagaacttgtctttgagctctaaaattctttctgcagttttgttgattctgctgttaatacttgtggttgtattatgaaattcttgaagtgagtttttcagttctatcagatccgtttggttctttcttaagatggccatttcatctttactgccctgtgt

SEQ ID NO: 902158 - DNA, 670 bp, Homo sapiens
tccaaatgatgagaacacatggacacattgrgggaaaaacatatactagggcctatcagacggggtagggtaggaggagggaaaggatcaggaaaaataactaatgtgtactaagcttaatacatgagtgacaaaatcatttgtacaacaaacctccatgacacaagttttcctatgtaacaaacatgcacaggtatccttgaacgtaaaataaaaattcagtaaatattttttaaaaaaagataaacaggcagaggctatatttttaaatgattttattttattgtggtacaatttataatttcacaaattaatgacaaaataataaattataataaaagtcattcgttttaactttaaaaaatcctattccaacacacacaaaaattgacaagtgggacctaattaaactaaagcgattcttcacagcaaaataaaccagcagagtaaacaacctgcagaacgggagaaaatactcacaaaaaaatgcacctgatgaagatctaatatctaaaatttttaagtacttaaaacagattaacaagcaaaaaacaaataagcccattacaaagtgggcaaaggacatgaacagacacttctcaaaagaagacatacaagtggccaagaagcctgaaaaaatgcttcacatcattcatcatcatagaaatgc

SEQ ID NO: 902159 - DNA, 639 bp, Homo sapiens
cttttttggtaatacttccctgaacatatttgtcacctccaccaatggaagtccaatttcatcactggtcttcttggctagttctacaacctgagtatagccctattctttcaatcatcacactatattgtatttgtttatttgactgtcttccttactatttataagtgccttagaatcagtgcccatctttttaaatgtttgtgtcacatgtgcctaacaaagcaataaaaattttcaatgaattaactattgaattgaaaaaaaaaaatgtcttcaggtcatatacaaggcttaactaaggttggcaggaataagaaaagcaaatatttgaaatttatgttgctggcccctttgggatccacagtagtaaaaataaagtatcaatcatcattttttgcatctaagcctaaataaaatccttttaacagagaaaggtgctatcaaaagaagcttacataaaatgaaagctatttacaaggctgccatataagctggcagagcaaaaaactcattagctgagcatggtagtactactattttccatccttagccccagttttaacttataaaaccaatataccctagtaagagtatctgtagatamatgaacaccgagcctttggaaaagaagacaaa

SEQ ID NO: 902160 - DNA, 677 bp, Homo sapiens
cctagctaatgtagtaagacaagaaaaggaaataaaaggcatacagattgagaaggaagaaataaacctgtctttgttcacagacaaaattattttctacgtagaaaattccaaaaaatatcaacagactcttggaactaataagtgattatagtaagattgcaggatacaagttgagtacatgaaagtcaaaagctttattttatgccagtaataaacaattggaatataaaatgtaaaacacaataccattacatttgcactaaaaaaagagaaatacttaggtataaatctactaaagtatgtacaatatgtatatgaggaaaatacaaaacactgataaaagaaattaaagatctaaataaagagatagtctgtgttcatggataggaaggcttcatattatcaagatgtcaatttttatttctttctaacttttgttttaggttcagggggtatatatgcatgtttgttacatgagtaaactgcatgttatggaggtttggtgtacagattatttcatcagttagatactaagtgtagtatccaataggtagttttttgatcctctccctcttccttccttcttccctcaagyagtccctggtttctgttgttttcttctttgtgtccatgtgtacttgaagtttagctcccatttataagtgagaacatgc

SEQ ID NO: 902161 - DNA, 431 bp, Homo sapiens
ggcacatttaaccttatatactatgcaataattacagtttctaggtatgtgaagtaggctgatggggttttgtgtcgtcaaagttttgggaagaccakaattctaaagtatgcatttaaaagaaagggctgggtggagcacgtagggtatgtgtgtgtcgccgcagttcccttggtttcaagaggagggattttaggtaaagcaaagggaaagtgtgacggaaaggattgctgtgctaaatgggagcagcaaatgccagtaccgatgcctttgggcatttagatccaaagcctgcctttctcgttcttcagttccccggggaggcctgttgtgggtggggaggtgtcttccttctattattccagtctccctaagaacttcgtagacagttgagcaatactttctaagggctggtcggagtcaggaaagtc

SEQ ID NO: 902162 - DNA, 630 bp, Homo sapiens
aatcaaaactacaatgaaatgttttaccctagttaaaayggtatttataaaaaaataaagaatattgatgctagtgaggatgtggagaaaggggaacccttgcacactattggtgcaggtacaaattagtatagccactgtggataactgtatgaaggttcctcaataaatgaaaaaatcacaactaccttaggatccagcaattccactgctgggtataaagccaagagaaaaaataatgagtaaatcaaagaaatatgtacattcctcatttactgtagcaccctttacaaaaaaaataaaaattgaatcaacctaattgcctgtcaatgtatgaatggataaaggaaatgtgatatatatacacaatgaaataatattcagccataaaaagaacaaaattctgtcatttgcagcaatattaatgaaactgtatatcattatattaagtgagataagccaagcagagcaagacatatatcacatattctcactcctatgtgggagctaaaaaaggagatcttatgaagacagacagtaaattggtgttttccaaaggccagaaagggtagagagtagaaggggttgaagaaagtttgatgaatgggtacgaactaacagttttatacg

SEQ ID NO: 902163 - DNA, 635 bp, Homo sapiens
acaaatgtgcactacaacaaactccagaaagggtctgggggtgaagtttggatataaatttctcccttctgtaaagaggacccaagagtaaatacttgtactgttttccccttggagtatcaagaaggcaagggtgtaaagtgggaatataaatgctagcatgccttatctagatcctaaagggctaatgatccctgggattttgttgcctaagtgatgaggaagaggctgtggttcctttgggctataggaggcctggaagttagtcaggagtgacagccagcaggacaggtaatcaccaagaggtcccctgggagggcgaccagattaaatgccaaggaaagggcgtggcctgtctatggaaacataaaggtgtggctacaattgccatggcaatgacctcagaagagtcagtggctatgcactagagtaatgccatcttcattcacacctctagaatggaagccaagtcagctcttcagaaaatgacagacatgtcccccagtgtcatgatgctgtgtaagtctcccctggaccaacaagctcccctggaagtaaaggmgaaggaaaaatgggaggggcagcaatacttaaactgagtaagttttaaaccagggtagacttggtttagatta

SEQ ID NO: 902164 - DNA, 648 bp, Homo sapiens
ctgctctgcttgaagtcatctgagatggaaagaatgctgggaaatgtagccatgtgaaggctctttcactcacctaggtgacaaaattcaaaacagctaggtctggaacagttaggattccttaggtactttgtttctatgcagcctctctgcatgatttctccagcatgcggattcaatgtagctgaactttttcacatgtcagttgaaggcttccaaggcatgagtcccgacagagggtcacttagaagccatatagctttttatggtgtagcctcaaaatgcacatagcacaccatagtcacagtgctgctcagattggagtggagagaacatagattccatctccctcaatggagaaatttcaatgtcaatttgcaaggaaaacatgtggtatgggagttatcggtgtagtcatttttggaaatacaatctgcagcaatctcctttagcttatatgaaaaataatcaggttggaataggtaaggtcttaaatctctttcatctcagaaaatcttgtgaagtctttgattaaatggaaacaagaatggtttaaaagtgacctgaaacagctagcataatgtcaacacattggagtagataggagaactgayagaaaatgagtaactctgaaagtgtgtaaagcat

SEQ ID NO: 902165 - DNA, 602 bp, Homo sapiens
gaaagcctctacctagttctatactaaaggtaagctartttatttaatcgttttttaataaaaatttagatttgaataactaaactatagctatccaagcctgtatgtgtggtggatattttctaaagaatgaatacaatgagtgtgtcacttcaaggtaaattacctactgtgtgtgttgcaaatggtaaaaaccaaactctgaagtaaaaaaattagagtagaagtcttgtatccaccacagtaaccttgacagcttcccagtacttacaggcttttctgttgacatggtgataatattaatgcatgtgatttgggagtattgcataataaaatgtgtcaacatttagaagctatgcataagttagagaaccaatattttcaaatgacatgataaaatcatgcatgagtaaatgatttattcaaagtgcaagatagaccaatgaattttaatgtaatagaggatgaaaagttcatcactatggtttcagattccacactgcaactaacctttaagtaaccaccacttgtcacgtgttggtgtaatatgaaagaatactcagttatctgtaaaggctattattaaaacgctcctctctttt

SEQ ID NO: 902166 - DNA, 582 bp, Homo sapiens
tgattagcaaagggatgcttcttcctcctggtgcctgcctcttctcttctgctcccsttatgtcccagcctcctcacatccccacttccatcccttccttcccaccttttctgggaaggcctgagtcatagttctaaaatgctaaagacagcaaatttgtcagaggtgttatgagcctactgcaaaaaatacttttattcaacttgctaaaatcacagtgattaacaaccaaccaaaagtttgtcatagcttttcaaatgagtttaacctcctcttaacacacaatcctctaaaatttccaggagggatctcacaatgttaatatgcttacagaaatggatatggccttttaaaatgcccttggctttaacgtccaacagcaatggaaacagcaatgtttaaatgacaaagttagtaacaatatccattatcatttccatagcctgttttttttaaaggattgatgtaagagccccctgaagcagccaataccgccactgcacaaatgaatcaatatgcttgcacataaatgttggaattaatataagcactgagatatcaaattcaaatctccaactggaa

SEQ ID NO: 902167 - DNA, 645 bp, Homo sapiens
cagatatatatatctatatataaataaagcaaataatattagagctaaagagagagatcaaccacaatacaataatagcggaagactccaacacctcactttcagcactggacagatcatctaaacaaaatatcaacaaagaaacattggacttaatctgcactatagaccaaatggacttaatagctatttacagaagaattcctctaacagctgtagaatacgcattctttctcttcggcacataggtcattttcaaggatagaacatatgtgaggacgaaaaatcaagtcttagaatattcaaaagaattgaaataataagtatcttctctgacaataatgaaataaaactaaaaatcaatgattggaggaatttgggaaactatacaaatacatgaaaattaaacaatatgcttctgaatgaccagtgggtcaatgaagagattaagaagaaaattaaaaattttcttgaaacaaacaacaatgaaaacaaaatatagaaatcctatgggatacagtgaatgcagtactaaaaggaaagtttatagtcataagtgcctaaatcaaaaaatggaaaaacttcaaataagccatgaaaygatgcatcttaaaaaagtaaaaaagtaatatcaatctaaagtca

SEQ ID NO: 902168 - DNA, 671 bp, Homo sapiens
ttaggcatatttgcattcctaccccaggtgccttccttcctaagtccttttacttggagtgtttagctgaaatgtccttcggctatctcttccaaagcctccttatgtggggaaggggagagaaaaaccttgaagatatattttccactctttctcagtacctagtacttctgcagtcctagcccttcccccttgcccctctcccctggccctcaggatccataaaattgaagacccctttgtttggagatcccttgtcagtgggatgagccccacatctatgccagtccacctgactcttgaaatgcacgggttccatggaaagaaatgacacagagtggggttggcactttctccaagtttctcttgtttatattatcacagtaagtgatgagagatttcactgttatttttattttggcttattgttcctctgatacctaacaactcactcttgttccacctcagctgagttcctaacaagagtgatttgtttgtattttctaactttttgaaatatattaaaaaattggatgaaacaggctttcccttctgatttggatttagaaacccactagtgacttttattcktgttcttatgatcaaaacaaggcataaaagctaaaaacatttcatagttaaaacaagtcagagagctgaagtggttagac

SEQ ID NO: 902169 - DNA, 634 bp, Homo sapiens
aaaaagaaaacatataggaactaggtcaatggaatagaatagagatcctacaaccaaacacatacacacacacacacacacacacacacacacacgtaatcaacttacctttgaaaaaagakcaaagagggaaaaagtgttttcaacaaacagtgctagaacaactggatagccgcatctaaagaaaagtatataaacaaaccttataccctcccccaaaattgatagataatgaatcacaggtctacttgtaaaaggcaaaacttgaaatctcctagaagaaaaaaggagaaaaatcaaagtgactttgggtttggcaatgtctgtatctataacaccaaaggaatgatctctgaaaaaattgataaatgagacttcattaaaataaagtttctgctctgcaacagagaagggaatgaaaagacaagccacagactgggataaactacttgccaaagacatattagataaaggacagtttttaaaatatacaaagaacccttaaagctcaacaatataaaacaaaacaaaacaaaaaccaatttcttaaaaatgggccaaagaccttaaaaaatacctcaccaaaaaagatatacagatgaaaaccaaccaaatgaaaaggtgcttcacttga

SEQ ID NO: 902170 - DNA, 467 bp, Homo sapiens
agcaatcacaccagatttcaatgcctgcagataaccctcagaatggcatcttctggtgctttccccaggaagcaaataactcagattaacaccaaactttttagcataatacttcctagtgtctgacagactgtgaaactggtaccagtgcaggtcacctttgggtcatgatagcccatgtcattaggaatcttaaagcaaaatgaggctccactagttctggacctcacgaggtgtgcgtcagcaaaactctccatgtctcagacccttctctgtctcagtaccttggtcaccactgtccctacgtaccttttcctcagtaattcagaactcaaagcttggattatctgagacactttccctcctccttccttctggtcccacttgtgtgtgtgtgtgtgtgtgtgtggagcggggtgcasaataactgctggcaagtggggaaggcccaagaatgctcagcaaga

SEQ ID NO: 902171 - DNA, 605 bp, Homo sapiens
tcttctctaacaagattttgttagtgaactttccttttcccgggcattctttgtttgtacctaccacttccaacctgcccagtcccaaggctatcataggmactattgatttcttctgtgaacataccaccactctgcagttgttggtcccagggataagaatggcccaagagattcaaaatgattttttcttccaaaatgttcaaactaaaacagagtcagtttctgatttacccagagttataacaatgaagacttgctaatgaccaccattttctcctcgtttttaagaacacttctgcaatgagagaataatgtagaagagcctatagatgcagaggtcaggtaacttggcccattcttggctcagttatttatgtggcccaattacgtatctgttggaattttaaatatagtctactttttgaataatcggagctatataaaagcataagtaaatgattatatttctttttcaataactcagatcagctctgttctgtaaagtcttcccttcccataccattacaacatcttttgcctttttctcctatgataaattaagctcaatgaaaacctcaatttcatatcaaatttaatgttcc

SEQ ID NO: 902172 - DNA, 582 bp, Homo sapiens
atgggtataaaaatacagttagatagaagaaataagttctggtgttcattagcacagtaggatgactacacttaacaataatttattatacatttcaaaatagctrgaagatttggaatgttcccaacacaaataaatgataaatgtttaaggtgatggatatctcaattaccctgatttgatcattatatgttgtatgcttgtatcaaaatatcacatgtactccatcagtctgcacagtgtatgaataaaaatgctaatttaagacatagatgtatagatagatataggtaaacatctaactgaacttgaagctgtaagacctttttaggcataaaatcaaaattaaaaaccagggagaaaaagtatgatggatttgactatgtacatagtaaaatttttgttgtgtcagaaaattaatagacaaattataaatagaaaatttttgaaacacgtatggcagacaaagggctaacaacctttatgttgaaagaggtctcactaatagttagaaaaatgtaaaccacccagtataacggaaagtaaagtacatgaggtggcaataaatatactaaagaaaaa

SEQ ID NO: 902173 - DNA, 582 bp, Homo sapiens
atgggtataaaaatacagttagatagaagaaataagttctggtgttcattagcacagtaggatgactacacttaacaataatttattatacatttcaaaatagctggaagatttggaatgttcccaacacaaataaatgataaatgtttaaggtgatggatatctcaattaccctgatttgatcattatatgttgtatgcttgtatcaaaatatcacatgtactccatcagtctgcacagtgtatgaataaaaatgctaatttaagacatagatgtatagatagatataggtaaacatctaactgaacttgaagctgtaagacctttttaggcataaaatcaaaattaaaaaccagggagaaaaagtatgatggatttgactatgtacatagtaaaatttttgttgtgtcagaaaattaatagacaaattataaatagaaaatttttgaaacacrtatggcagacaaagggctaacaacctttatgttgaaagaggtctcactaatagttagaaaaatgtaaaccacccagtataacggaaagtaaagtacatgaggtggcaataaatatactaaagaaaaa

SEQ ID NO: 902174 - DNA, 608 bp, Homo sapiens
gcattgtatttctgtggggatggctacctcagaaactgagggtcacagaggcctcaggtcctgcctcgccaaattaagccaagtgcatctagcaaacgctagctatacaaaaaggaaagtaggatggaattaacttccatttctacacagcatgtcattagggtgcttagtgtgtctggttagatgatatcaacgcttttttctttatacttgccagagtccctgctttggtgtctcccagccatgcccttaaaagatttctatcaaagatcatcatccagttctttcaggaggcaccaagcaataaccaacgcacacagttataaatctttgtctgggtaccaaagccatatataaatccataagctatcacatcttcccgtcatcccatgaagcaggttgagcaggctgaagtgattcagggtaaaacgtgcactttgtcaatgtcattgtgtcacaaagagtccagatcctagacgcagctacctccagtctgcagcctctccatgccctagtggtctcatgaatctgaatagctttcctgtttgatgctagcttattttctagtgtgacccgttttyctgcaaaaagccagtttaggttggtaa

SEQ ID NO: 902175 - DNA, 582 bp, Homo sapiens
gaaaatgcctttgataaaattcaacaccccttcatgttaaaaactctcmataaactaggtattgatggaacacatctcaaaataataagcactgtttatgacaaacccacagccaatatcatactgaatgggtaaaaggtgaacgcattccctttaaaaaccggtaaaagacaaggatgccctctctcaccactcctatttaacatagtattggaagttcggtccagggcaatcaggcaagaggaagacataaagcctattcaaataggaagagaggaagtcaggttgtctctgtttgcagatgacatgattgtgtatttaggaaacctcatcatctcagcccaaaagtttcttgaactgataagcaacttcagcaaagtctcaggatacaaaatcaatgtgcaaaaaatcacaagcattcctttacagcaacaataggcaaacagagagcaaaatcttgaatgaactcgcattcacaattgctacaaagagaataaaatacctaggaatacagctaacaagagatgtaatgacctcttcaaagagaactacaaaacattgctcaaagaaataagagaggac

SEQ ID NO: 902176 - DNA, 582 bp, Homo sapiens
gaaaatgcctttgataaaattcaacaccccttcatgttaaaaactctcaataaactaggtattgatggaacacatctcaaaataataagcactgtttatgacaaacccacagccaatatcatactgaatgggtaaaaggtgaacgcattccctttaaaaaccggtaaaagacaaggatgccctctctcaccactcctatttaacatagtattggaagttcggtccagggcaatcaggcaagaggaagacataaagcctattcaaataggaagagaggaagtcaggttgtctctgtttgcagatgacatgattgtgtatttaggaaacctcatcatctcagcccaaaagtttcttgaactgataagcaacttcagcaaagtctcaggatacaaaatcaatgtgcaaaaaatcacaagcattcctttacagcaacaataggcaaacagagagcaaaatcttgaatgaactcgcattcacaattgctacaaagagaataaaatacctaggmatacagctaacaagagatgtaatgacctcttcaaagagaactacaaaacattgctcaaagaaataagagaggac

SEQ ID NO: 902177 - DNA, 594 bp, Homo sapiens
ttttgaattgaatatgtaccttctttcttaatcacataccgatttattttatttcatctcctggtacattcattcaattaacacatagttttcaatccctacaatgtgccaggactgttgtaggcatgttggatgcatcaatgaacaaaacagacaaaaaaaggttctaatctcatgaaggttacaatctacaagggagagagataataaataataaacataataagcatgtttgtaactggcaaatgctatgtgaaaaaacagcacaggtaagggatatttggactgcatggaggaggcatctttatattttaaatgcaagagatcaagtcaagctcttttgaaggaggtaaggaagtaagctgtacaaatatcgggggaaagagtgttccaggcagaggacagagcaagtataaaaactcatggtgggagcaagaaaaaagacagccagtgtggctggatcaaaataagcaagtggtacaataayacatgaggatagggaaaggggatggcaaggtaggtagtcagattatgtggcacttacattcttttttgtggttgtggcatttaaaacactatagcaaggctgcattg

SEQ ID NO: 902178 - DNA, 595 bp, Homo sapiens
ccaaagtgctgggactacaggcrtgagccacctttcttcttttaaagactgaatgttatttgaatgttattccattgtatgtatataccaccttttctttatccattcatgcatcagtaggcgtttgcgttatttccatttcttggctattgtgagtaatgctgcaatgaacatgggtatacacacaccttttcaagatcctgctttcaattcttttggatatatagccagaagtggaattgctgggtcatacggtaattttgacggaccaccatactattttccatagcagctgcaccattttacattaccaccaacagtgcacaagggttctaatttttccatgtccttgccaactgttacttttttttagtggccatcctaattggtgtgaggtgatatctaatgtagttctgatttgcatttctctagtgattagtgatgttgaacatcttttcatgtttgttggccatttgtatatcttctttgaagaaagtctattcaagttctttgcccattttaaaattgggtaatgtggtttttgctgttgttgggttgtagaagttctttttatattctggatgttaaacctata

SEQ ID NO: 902179 - DNA, 610 bp, Homo sapiens
ccagaaaagcaatctaccaaggaaatgctgcccawagcccagcaagccacattctgatgctggtaggttgtcagtcataagcaaaaatccagaaaatacaaatcttcctttgataataatattgacagtttcttctgctcccaaatttttgccttcttcccattaaacaacaaaaattaagtgatctaggttgcccatgttgcacagtctatacattcatatgaaacaaaaatttaacctcataaaaagaaattcaattactattgactaaactgcaaagtaatatttaacacaccaaacaataattttgtaagcaaagcaaattgctaaacctggttctcagccattgtttccatatcacagtcacctgtgggactcaggaaaatcactgatgatcagcaccaccctaggagagtaaggtctggtggggctggggtgcagtggaaacagcccacgagcgaggcgccaagagagcagcagtctaatcccagctagactttgcacttcctgtgtggcctctgggacatcacatctcttccctgtgtttcctcacagggagctctaaaatgggggcattgtatgaaaagataatctaagtctcttccagttt

SEQ ID NO: 902180 - DNA, 530 bp, Homo sapiens
tacaaaaaccaaatagaaaatggattaaagacctaagtgtaagtcttgcaaatgggaaactactagagggaaactttggggaaacatttcaaaacattagtatgggcaaatattttttataacacctgaaaagcataagcaacaatagcaaaaataggcaaatgggattacttcaagctaaaaagtttctacacaacaaaggaagcaatcaacaggatgaagagacaatctacagagtgggacaaaaagtttgcaaattatctatctgacaaaggcttcataaccagaatatacaaggaactcaaacaactcaacagcaaaaaattaaataaataaataaaaatttaaaaaaactttaaaatgcacaaattacctgaaaatacattttacaaaagaagacatgcaaatggacaaaagatatattaaacaatattcaacattactaatcattagggacatgcaaatcaaaaccttaatgacatatcatgtaaycccagttagaatagctattatcaaaacaacagaaaata

SEQ ID NO: 902181 - DNA, 671 bp, Homo sapiens
ttcaaattactattataataagaaatatttgttgttcaacaacattttattttaacatggagtttgtactttgactgatattttttwaaaaattctctctaaagacataaaactttcatttcagtagagtgagatttttgataacatgttatttgtagatgacacagaacaaatggaaagccatttggctaagaaatgtatactaactctgatttatagaaaatatctattttcatatccagatagaagaattcagtagttatgaaagcaatcttataatttaaattcatccatcagtcatgggatcgtttgatgtggttattttgctggactatctaaatatctgaggtgtataaagaattaacatagattctctggaaaacgtgcttttgtgggaatagctgtagcactcactgagaacatctgagtcaataaatagtgtattccaatttgttacttaaaatatgatggcaagaagagactgcctacacaataaatggaaggaaggaaaaagctgtaaaaataagattcataagtttatgttccgagcttaataaatgttaccaccagtattttatcaacaacttgataatctaatgacatatttcttaggagccaatttggttttaaagcattataacttacagcaccaccctttgacactagcaagg

SEQ ID NO: 902182 - DNA, 638 bp, Homo sapiens
attagtctggctgcatttgacaatactgggattgggtgtggtggattttctctgggtctggagttgttcaatggtagtaccagagtaagtcgaggtcagagaaacgtttggtcaaatatctcccagttttatacataagtatatacagttggtcaagtaacttctaattgtatccaagtgtatacacttaaatatgtatgcaagtcatttccatattatactattcaggttgaattttttttttttttttgagatggagtctcactttgttgcccaggctggagtgcagtggtgcgatctcagctcaccaccacctccgcctcctgggttcaagcagttctgcctcagcctccggaatagctgggactacaggcgcgcgccaccatgccccgctaatttttgtatttttagtagagacggggtttcactgtgttggccaggctggtcttgaactcctgacctcaggtgatctgcccatcttggcctcccaaagtgctgggattacaggcgtgagccaccgcgcccgggcgaagatatttttamtaggatgtcaaattagctttaaaggaagttttggtgtaggaatgaacaaactagtatctgcagtgtgtgaggcattgtgctaggccatgagaaag

SEQ ID NO: 902183 - DNA, 640 bp, Homo sapiens
cattacatcacagtaatcagcaataaatctcttaccatagcrgtctatggacaatcaataggtaattgggtgaaaaactatgaagcatccaaacagtggggtactatatacctaaaaatgaattagaataatattgtatgtgattggagtaatcacaaatatattttactaaatggaaaaaaggaaagtgcagaacagtgtttaaggttttttgtttttttttaatataggcacagggcctcactatgttgcctaggttggtcttgaacttgtaagctcaagcaatccaccctccttggcctcccaaagtgttgggattacagtgtgagccaccatgtccagcccagagcactgtttagagtgctctcttttgtatagaaatatatataatatatatatatgtatatgtatatatgtatataaattttttattaggaaacactgacaggttacccaaacctaacacaatagttatctacaggggaaacaagaaaacaaggtccagggataagaatagaagccagagttctgcagtatatcttcatttataagttttagctttgcaccacacaaaagttttacatacttttttttaaagcacaaaagaaaaaaaaaaacaatctctacaaattatataccc

SEQ ID NO: 902184 - DNA, 643 bp, Homo sapiens
gattagttttaactatttctgaattttacgggagtgctcttcttccacccaccatttgttttgtggaatacattcatgttgtgcatataacaaatttctcctgtaaataatgagatattttaggctttgagggtctacatttcagcatgtatggtgttttgggtttttcgtttgtttgtttgttttttgagatggggtctcactctgccacccaggctggagtacaggggcacaatcttggctcactgcaacctccgcctcctgggctcaggcaatcctcccacctcagcctcctgagttgctgggaccacaggtgcagggcaccacacctggttaatattctattattttatttttttattttaggtaaagatggggtttcacaattttgccaaatttctcgaactcctgagttcaagcaatctactacctgcctcagcctcccaaagtgctgggattactggcaggggccactacaaccagcctaaatttcaatttttggtgcaatgacttatagttgcaaaagcagccatagacaatccattaataaatgagcatggctgtgttccattagaactttatttacaaaaagcagtagwggtccaggtttggtccactgataagccctataccataatcaatt

SEQ ID NO: 902185 - DNA, 638 bp, Homo sapiens
taagcctaacactgtctctctataactccttcccaccagtcgcccacgtcctgctctgcgtggatacatggaaaaaatctacaccattttccacaaggcatcttatcaagaattcaagtcttgctatcaacagggttgccacatacaattgtgtaagttgtgcactgaacaagggaatatggctgtgcagagtagtgtgagtgggaaacctggtatggggcttcccctacttgtggagagcggcttttctctttttttgcgcaaaggctatacattaactagcaaagggcatggctattatggtactccaatctcaatatttttggatctgataactatttttcaacacctatgatgtgctgaaatttttctgtgatgttatcctcttaagaaacttcaattttaccaatgtagtacctaaatgtgcgtgacatccagaattggctacaatctaccagaaatcaatgatatgctcacattcccttgatccataaattactacccattagtaaaagttccagtaacttttttgagcagccttatcacactgttggcccacgctgagcttgcagtccacgaaaacctcaggttgtttttttcttgaaaagtgktgttcgcttcaagtcttctgaatctga

SEQ ID NO: 902186 - DNA, 619 bp, Homo sapiens
tttcacaggaatgttatgaacatggaacagggaaagggtgcacagagcttagtgtgactgccctgaggactgggacggcagccgtacttggttaagcccatttgtttcccagaaaagggaaaaataactatttccctgggaagtgtcagagaggtctttgtctcttgtaatggtttccatgctcaccatcttaggtgccttcttctgctaatctgaatgattggatttctgaagtaataagaaaaagtgagttctcatggcccattctgtgttaggctcagccacaaagtcacttaaaacatatttatgctaacatggacttaaaaaaaaaaaaagacaaaccagtctatttatatagaagtctagttagcaagaagaatgaaaacacagctatggcatgtcaataaaaacacattttcctagccagttagggcaaggcctctcagtagaaattccactttgctgactcttgattaaagattttgctttataaccacactgactgtttagacggaaccagctatgtaagttgcagtgcgcaatgcacactgaaaatgtgkgacttttttttccaaatattgttatgatcacaagacagtgacagcaagacaccaagctg

SEQ ID NO: 902187 - DNA, 678 bp, Homo sapiens
atttcctatcatagttctctattatttaaaataacacaaaaaaacacaattttaagttaaatattcatgtgattaaattttaaatgtatctctgctattaytctgtaagctttatccaatgctcattctgtatgaatagaccttagcacagtattcaccaggcacagattaaatggagatctgttgaatgacttaatggatagatggatgcgtggaagcagtgtttcccaagcttcagcattcccttcaaatggctcatctgccttctatgtgttaatgagcttgttccctcttccctcgcaactaacccctagcccccatccaagcagagcccaaaccactttctctgttcccaagagaaaaacatggatctcttctgcttgctcatctgacttggcattgggactcttcattgattacatggctgctgtcctgagagtctttacctttatgatggaagagttagaaattagcccagtcccgaagattacttgaggccatccatcagccaccaccgaatttctagagtaagtttgctaagacctccaagaccactgtggttctgacaaggagagcagcttgattgttttgttcttgttatttgttaggcctgtgtaccttccaaacagtatcattcatcctcccaactaccttgtggtgtagatgctgttcttattt

SEQ ID NO: 902188 - DNA, 700 bp, Homo sapiens
tccaaataattaaatttttctaattaaatatttctctctcttctgtgtagtttgataaggccccatcaaaaaacatagaacagtggctcagtagttcgcaaatatagtagaggcttattgtactgttgatctctagcagcaagggctgttcttaatataattatagaaatggctcaatgcacacatactcagtaaaatttaattcacagctcagccaaattcatagcataatgaagtatttaattgtaagatttttatattttccataagttgtaaactactatttggtcattaaaagcacccaggtatcaaaactcatcagaaaagttacctctgactgggtcttaaaataacccccctttaagagcaatatctgttagtctgcgttttaccttctgagtgaaagggaaaagagacagagatcaaaagtcctacacgtgtgacttagtatttgttttgatctctcatcttttctttagttttctccatcatagttgtgttctcacctattgacctacaatgtggtatccagaacattttctggtgtccccatcaaatgcagtccttttttatgctaagtctgagcrctctctgtaatccctcatatttgctaagaagatccaaaaccattcataccctacaatggagtatctgaatttgggtggagactgtttttatatcaggctgttgagcttacagc

SEQ ID NO: 902189 - DNA, 601 bp, Homo sapiens
ttgaccagatatctggacagcttgtggcctaatcaagttgacacataaaagtaaccattataatargtggagttcatttcctaattattgaaatgaggcttcataaaaatctcaaataaatgaaaccataatatacacaaagaaaaaatggcttcctcaattagcagaacataaataattatttctgtagaagctgaggatcattatggcagagtgagctactaagagtgaaaaggaggaagtgatttcaaaaattcacaataagaaaaacacagactattaacacacttttcccaaaagtgaatagagcacacaatcaccaccacaaccacaaaatgagaatatcagcttgtggcccactcaaaggacaactttctaaccacacactgggatgcctgatgagccatgattttagtggcaatccaacatggaaatgaaggaaaaaatccttgtgtttgatgatgtatctctcagtagactgcatttaacaattcctgtaagggaacagataaaaacagaaaccacggaggagtatcaaaatttaattttcctcggagaactaaagggaactctttgagaaaaagaagctataaacatgaat

SEQ ID NO: 902190 - DNA, 601 bp, Homo sapiens
ttgaccagatatctggacagcttgtggcctaatcaagttgacacataaaagtaaccattataataagtggagttcayttcctaattattgaaatgaggcttcataaaaatctcaaataaatgaaaccataatatacacaaagaaaaaatggcttcctcaattagcagaacataaataattatttctgtagaagctgaggatcattatggcagagtgagctactaagagtgaaaaggaggaagtgatttcaaaaattcacaataagaaaaacacagactattaacacacttttcccaaaagtgaatagagcacacaatcaccaccacaaccacaaaatgagaatatcagcttgtggcccactcaaaggacaactttctaaccacacactgggatgcctgatgagccatgattttagtggcaatccaacatggaaatgaaggaaaaaatccttgtgtttgatgatgtatctctcagtagactgcatttaacaattcctgtaagggaacagataaaaacagaaaccacggaggagtatcaaaatttaattttcctcggagaactaaagggaactctttgagaaaaagaagctataaacatgaat

SEQ ID NO: 902191 - DNA, 641 bp, Homo sapiens
caccatcttgctccacccctctcaaatttatataaaaatttaaaagtcatttcaaaatgattctaaaacaatgtgtaagaaataacaggcaataattattattcaccatactgagattatcatatcaagaattttattgaaattattatattaactttacttctaaaaaattgtaatttttaaaaactatacttatggttaaagacattatttacaaagcaaaaagtaaaataagttcagagaaaatttctcatcaaaaaatattaagagaaggatatcctgtaattaagtataataataatggcaaacatttatatagcatgttacatatacacaattatagtatacacacatattgatatgtaagtgattatgtgaatgtgaatgtactactagcaacttctctgaaaattatgtacagagttagagaggaataaatttaagtatagataagttactcattcaaagtcttacaggtcaaaattggtagagttgggacttaaacacaggtattttggactcagtctttgtttttagccactttgcaatggatacatatatgctaatagcatatattaccaaaacaataaaaaattagagctcaycactaacaggtaaatttgtcatatggaagaggtata

SEQ ID NO: 902192 - DNA, 649 bp, Homo sapiens
taaattttagatattatattttaagctgtagaatttttattacatatttctactcataacttgaaaattcttactttttcattaattgcaagcatatttcctattactaaatggctgctttaaagtttttgtgtgccaattccaacatctagttcattttggcattcgtcttttctctctagtcttattaaatttttctgtaccattatatgtataattttggattgtatcctgcgccttatgaatgttttgtttgtctgtttcctttttttgtggagacttatgtctggtaatgttccttcggagttttcagtggttttaaaaggcaattaacttcatttaactcaaattgcaaacactgatttttgggtgacagctcaaaagttgagtgacagttgggctagtttgtgaatgctttgcatatatgctttgttcattttccgtcaggtacttgagcagagtttatgcatatcatttggggcagcccccttttagctctctcctttgcaatattcctcttttactttccggctctcctcttagataaactgaattttctaccagtgttttagcctttctgtgcagtgtctgcacttaagctaaaagttataaaagwgggagtgttagccacactagaagcaaaagtcct

SEQ ID NO: 902193 - DNA, 681 bp, Homo sapiens
catctcaataagtgcagaaaaagcattcaacaaaatccaccacgcttttatgattaaaaytcagcaaaatcagcatattaagggacatatctcaatgtaataaaagccatctatgacaaacctacagccaatataatactgaatgggaaaaagttgaaagcgttccctctgggaagtggaataggacaaggatgcccactctcaccacttctattcaacacagtactggaagtcctagccagagccatcagacaagagaaagaaagggcacccaaaccaataaagaggaagtcaaactgttgctgcttgctgatgatatgattctatacctagaaaccctaaagactcctccaaaaagctcctagagctgatttaaaaaaaattcagcaaagtttttggatgcaaaattaacatacacaaattggtagctctcttataagcaaatggtgatcaagtggagaatgaaatcaagaactcaaccccttttataatggctacaaaaaataaaacaaaatacttaggaatatacctaacctaggaggtgaaagacctctacaaggaaaactacaagacactgctgaaagaaatcatagacaacacaaacaaatgcaaacacattccatgctcatggatgggtagaatcaatattgtgaaaatgaccatactgccaaaagcaatcca

SEQ ID NO: 902194 - DNA, 578 bp, Homo sapiens
ttctttagtatatttattgccacctcatgtactttactttccgttatactgggtggtttacatttttctaactattagtgagacctctttcaacataaaggttgttagccctttgtctgccataygtgtttcaaaaattttctatttataatttgtctattaattttctgacacaacaaaaattttactatgtacatagtcaaatccatcatactttttctccctggtttttaattttgattttatgcctaaaaaggtcttacagcttcaagttcagttagatgtttacctatatctatctatacatctatgtcttaaattagcatttttattcatacactgtgcagactgatggagtacatgtgatattttgatacaagcatacaacatataatgatcaaatcagggtaattgagatatccatcaccttaaacatttatcatttatttgtgttgggaacattccaaatcttctagctattttgaaatgtataataaattattgttaagtgtagtcatcctactgtgctaatgaacaccagaacttatttcttctatctaactgtatttttataccca

SEQ ID NO: 902195 - DNA, 616 bp, Homo sapiens
cctctgagttgctcctcatactctactctcaacgatttccacctccacttctgctctgcccatggaatttttcaggattaatcttcaatagtcttatctctaatgagtctacttaataaattagcagaaattgtcataaaggaatcatttgctagtgaacatatattcggtcatatataatagagaatatcagttaatgcccctgaaagatgatttactaagcaaatgttctgttccatacacttgctttcagtcacaagtaacaacagtaacaataaaataatcaaacattgattttaaaaataaaagatttatttatctcccacaaataggaatactcggtgcaggctgatacagtggttcagcaatataaaggatttgggctccttttatcttcctgctctgatattttactgtgggactgtggttcctttggcaacaaagttctagtccacctccacacgtctttcttattccaggtaagaaaaatggggaaagggaggcaacattcagaatggtggcataagaacccctgaagatatgctycttcacgaaagcaatgagaacaccagcaaaaatggcaaatcaacgttttaagaactcagcaacattaaca

SEQ ID NO: 902196 - DNA, 606 bp, Homo sapiens
atatagtttggacaaatgtccccacccaaatctcatgttgaattgtaatcccctgtgttggaggtggggcctgatgggaggtgattggatcacgggggtggakttctcaggaatgatttagccccagccccttggtgcagttcttgttatagtgagtgagttcttgtgagatctagttgtttaaaagtgtgtatcacttctctccttcctctctcttgctcctgctctggccatgtgatgtgcctgctcccccttcaccttctgtcatgactgtgagtttcctgaggcctccccagaagctaagcagatgccagcatcatgcttcctgtgcagcctgtggaaccatgagccattaaacctcttttctttagaaattacccagtctcagttatttctttatagcaacgtgagaatggactaacacagggtccaaactccttggtttgtcctcagaatgactgtactttatgctctgtgatactaatgatacatggagctggattgggacagacagacatcaaaaggactaaaattaactctgagtcctatataccttcactgtttttcatactatctcaagccaacttttaccttgtaaaccaaaaa

SEQ ID NO: 902197 - DNA, 606 bp, Homo sapiens
atatagtttggacaaatgtccccacccaaatctcatgttgaattgtaatcccctgtgttggaggtggggcctgatgggaggtgattggatcacgggggtggatttctcaggaatgatttagccccagccccttggtgcagttcttgttatagtgagtgagttcttgtgagatctagttgtttaaaagtgtgtatcacttctctccttcctctctcttgctcctgctctggccatgtgatgtgcctgctcccccttcaccttctgtcatgactgtgagtttcctgaggcctccccagaagctaagcagatgccagcatcatgcttcctgtgcagcctgtggaaccatgagccattaaacctcttttctttagaaattacccagtctcagttatttctttatagcaacgtgagaatggactaacacagggtccaaactccttggtttgtcctcagaatgactgtactttatgctctgtgatactaatgatacatggagctggaytgggacagacagacatcaaaaggactaaaattaactctgagtcctatataccttcactgtttttcatactatctcaagccaacttttaccttgtaaaccaaaaa

SEQ ID NO: 902198 - DNA, 593 bp, Homo sapiens
tcttgataccaagacctaaaatatttagtttaaactagcagacttttgtcatcattctataaatatttagtatggaattaagttagtgtatatgcctgagggatgcagtcagcattctgactcagtattaccatcatattacgtactaattagaaacatggcttattgaatttactgcctcttttttctaagcagttctacccccaaagaaattcaaaacacaaacagacatcactcctttttaaaaatataattactgtttttttcttctttgagacaaggtctcattgtgtcacccaggctagagtgcaatggcgccatcttggctcactgaaacgtcagcctcccaggttctagcgattctttctctgcctccggaggagctggagttacaggcatgtgacatcaaactcaggtaatttttgtatttttagtagagatgggtttttgccatgttaaccaggctggtctcaaacccctggactcaagcaatctgcccatctcggcctcccaaagtgctggcatttacagcctgagccaccackcccagactaaaaatatgtttgattttcatcctttcaaaacttattacc

SEQ ID NO: 902199 - DNA, 546 bp, Homo sapiens
cccaaacaaaaatggaatcacacttttcctgaacaactgcattaacagaatgtgttacaacggatctacaattagaggattgcattcatatgtactggggaaaaaaaaggagacgagaccctactcaagcatacggatacaaattgattatacctgggtccagaatttcaaagtgtgataacactgtattatagtatcatggagaatataatttaccagtacaatcacatctagtaaaattatcattgaaagttagaagtaaagttgtcaatatatttacggcaccatgtgagacctctatattgaagggctaatttagtaaatttgtatgtgttatgactttaagagtttgggcattggtgagttttgtttctgtgtgtttgttcctgttgtgagtgggactggaatactatgattaacaaaatcatatacaggcacttgatatgtggattgtacagtctagwgggtgaagttggttgaagtttatttataggctctacaaataaatataaaattagcactgatgtgaggggaggtgcttgatac

SEQ ID NO: 902200 - DNA, 597 bp, Homo sapiens
ttttttttaaatcaattcctggtaggaaatgggtcctacacacaagtatttttttttttttccaaaaatggggaaatgagtaattcctaagtaatgggccaagaaggaaacccggaacttcagcaggcttttcaccttttgagtgaacaatcataaaagctttattaaagattattttttgaaaatcacccacaattccatgatctaacaataatgtttttaccatttttatttttaaaaatctggtcttactctaaatattttttaaaataaaattgtgattcatagtgtataaacttttgcagaatgcattttgttactaaaaatcttgtgaccatttttgtagatacttaattcctaaatatttttaaaaacttaggctgtttgagggctacataataatccacaaaatcttctttgcgaaattacataaaatcaagccagcatatacatcataggaattaataggggggactcaagttagaaagacctgagtttaaatcctggttctcctactgagaaagcataaacaatrtataaattaataacacagtaacattcattgagcatctgctatgtagcaggcaatttgctaat

SEQ ID NO: 902201 - DNA, 609 bp, Homo sapiens
caaaactgaaactgattccctyccttacaccttatacaaaaattaactcaagatagattaaagtcttaaatatatgacctaaaaccataaaagccctcgaagaaaacctaggcaatagcattcaggacataggcaaggacaatgatttcatgactaaaacaccaaaagcaatggcaacaaaagccaaaattgacaaatgggatctaattaagctaaagagcttctgcacagccaaaactgtatgaaactatcatcatagtgaacacacaacctacagaatgggagaaaatttttgcaatctctccatctgacaaagtgccaatatccagaatctacaaagaacttaaacaaatttacaagaaaaaatcaaacaaccctatcaaaaagtgggcaaagaatatgaacagacacttctcaaaagaagacatttttgcagccaacaaacatatgaaaaaaagctcatcatcacttgtcatcagagaaatgcaaatcaaaatcacaatgagataccatctcatgccagttagaatggtgatcattaaaaatttaggaaacaacagatgctggagaggatgtggagaaataggaatgcttttacacctttggtga

SEQ ID NO: 902202 - DNA, 634 bp, Homo sapiens
acttcatatttgcttttgtttagagagtaatatttaaatgatattacaaataaacaaaatcagattatgtttttcagaatacaaccatttaacaatttacaataatactatacatgtgaagggcataataarggcttatgctgacaagttggacataaaattgagatctgagattttaagtataaaatagtacataacacatcacaggagaaataagcaaagtcatgttgaaatacataaagtgttcagggtcaatataaaaaatttattttaaggagatgcattagcagtagaagtcaaaaataagtattggagagccatgttttggcaaggatcactgaagccctgtccaaaggaaatggcttcactgccaatggctcaatcacaccaggtcctctggtaaatctagtcctctcatattcagatgccaacaaatatctggatcgtaagactttcctgccctgcttcagcaaacttcaacatataatttggcttccaatgtagaccagcttaaagggaaagattgtgctggctacgctcctgtaaatatgcatgcacacatgatagctctatttatttttggaaattagcatattgacattctggttttaaattttttgcgatgtataatttg

SEQ ID NO: 902203 - DNA, 514 bp, Homo sapiens
ccatcataaacacacacctgttataccaaatattgggatctgtaattttattttcattttcagacatgacatcaaaacttastttaagtataaggtacataaggtcataaagatagtaagcagcagaagtgttaaccaaaaatattcttcttgacccaaagtttaccaaaattgcccaaatatgttgtaatgtctaataaaaatcacgtactccaaatttagggagatactcttaaactaaatcattatgggacctaacactatccaacacattctactttcgttgtaaagtctaatgaaaatcactcactctaaatttaaggaaatattcttaaactaatctttatagcacttaagattctctgacactttagagcccattttcattataatcattatactcaactttgtagaactcaagaaaagatactatcagccccttctaaaactgtcaagcctaagacgatggacaagtaccatatctttctttactcagaaatgtgtaactacaaca

SEQ ID NO: 902204 - DNA, 596 bp, Homo sapiens
gggatttgtgagttaattactctctggctgtttttaacatcatcagtttaccatggagtttaaggatgtttgggctttagcctggcagttctctgtgctgttgtctggggttgtctggggaggaagagaggatgttgtgtctgatatctacaggcctgtcctggcagaatagggcctctcactggctgaactgggtgtgtttggtttatgtgggattagaatgcacagtggccatataattcaggagacaagaaagagccttgagaggaatgtcaaataaatctctctactttgtgtactcatgatgcttgttctctatgtaataaaagacttagtgatcatcatttgtattgttcatttaattgtccttttactagcctgtaagttttgtgagtgcagggacaaccatgtctgtgttcatccattatacttatacaagaagtacttactgaatgttgaataaggtgtctttatgcttcttgtatttattttacatttgtagttatagagtttctaattgtaggaattaatattaacakctttaagccctttaggaaagatggaaggtaaatatgaactgtttattagtctgctcc

SEQ ID NO: 902205 - DNA, 564 bp, Homo sapiens
gcaaagttggagaaggcagagaccatgatggtgtgttacagggwcagccagggccctgcaagctcacagtggggcatgggctgttaacagcaatataaaaaggagggtgtttgctgacgtctcttatttatatctcttatttttcttctaatgtctatccatgttacatacattaagaattatcatttaggaacatagtgactatgttttttacaaatacaagattgaaaaggctgcatatttccctttctacacttgtcattcttattcagcttatttgtatctgtagagtatgcgtaatttgtccatgtgcaaagatgctgtgcgtgtgtaatagactattgactttatcatatatttgagtaaaactgaagaaataataagcaacattttcaaaattgtcagagtaataattttaaatgtgctacaaagtaatactgtattccaaataagttatgcattcatttgcttaactttcacccatgaaatctttatataattactgcttgtacttttgaaatcctttcctactatgtagtttgtaaaagctcaaaatagatactg

SEQ ID NO: 902206 - DNA, 645 bp, Homo sapiens
ggaaaggttgaggcaggagtatcagttgagcccaggagttcaaggctgcagtgaggtatgattgtgccactgcactccaacctgggtgacagagtgggggatcttgtctccaataaataaataagtgaataagaaattgaagagacaatctccagaatggaagaaaatacttgtaatcatatatctgatactttacagccactaggatggctataatcaaagaaacagaaaatagcatgtgttggtgaggatgtggagacattggaaccctcatacactactggtgggaatctaaaatgatgcaggcactgtagaaaatagcttggaagtttctcaaaatgttaaatatagagttcatatactgctgaacaattctactcttggtatatattcaagagaatttaaaacatatctacattaaaaaaaacgtgtgcatgaattttcatagcagcattattttaatgatattattcatgataatcaagaactggaagcaactcaaatgtctaataactgataaatgtataaacaaaacgtggtataaccacacaatggaatactatccagtcatataaaggaataaagtattgatacatactactacaacawactgtgaaaatactgtgctaaatgaaagaagccaat

SEQ ID NO: 902207 - DNA, 588 bp, Homo sapiens
gcagaatctgttgtaacaaaagacttctttgtcaaaattgtcatttcatttgggatctctttttcaattctcaaggcaaaaataagataatttatatgtatagtttaatttgcagtctagggagacttggtatataactctagccataatgtttatttcaacttccatttttttgacataaggcactcaatcagacagataatagattttcatttccaaacctaacatttctggcagtcctgggcagcactttctggagggaaatcaataaatcaaattttaatcagtatttattgagcacctgctaacatagatgctatggtagggaaaggttatgggtgaaggaatgacagaggtttatgagatattgttgctgatctaaagaaatttttatgcagaatagatgcacataagacacatgcacgcacacacacacataccaacccaaacacaccgtcacacacaaataaataaaaagcttattatcgttgagcttggccagttcataaatggytggtctgagtggaaagactaatgagaactacagcatccttggtttgcagatgtttccatcttgtgttatataga

SEQ ID NO: 902208 - DNA, 621 bp, Homo sapiens
gtgagcaccctctgccatgctctgtatttgttcttcgtttctttgtttctcccacagagtgggaatgttatgatttgaatgtgattttagtattttaaggaacataacaatatgaccactggatataagtcaatcacttcatctgttatttaactgcaggtaccacaatctattttaacactgaagaaaaaggtgatatattggatttcatgagaaatgatatgttatgatgatatactttatggtgacaagttctttggggcacagttttgactctacatgaattatcctttactcacaaacttcagagcctaatatcaacgtaaaaaattctccttgcaaaacaaataaatatatgctatttcttcacagtccctagagtttagctgttgcatgttttaaatgtatttcaagtctcatgcatcacagacaccaagacagttgttcccaagtagtgaggtctataggtacacaagggcaagtaatttacatgttcattaaagrtaccacataaaagtaagaagaaaaatagtaagcagctttggagtgtgtatttgatcagatcaggtactatcttgggcaactttattaaaataatacaaattaatctttactaatcac

SEQ ID NO: 902209 - DNA, 623 bp, Homo sapiens
ctcagtatatatttatttttattttwattttttttattttactttaagttccgggatacatgtgcagaatgtgcagatttataacgtaggtatacatgtgccatggtggtttgctgcacctgtcaactcatcatctaggttttaagctccacatgcattagatatttgtcctaatgctctccctccccttgcctggcaccccctgagaggccccagtgtgggttgttcccctccctgtgtccatgtgttctcattgttcaacttccatatatgagggagaacaagcagtgtttggttttctgttccagtgttagtttgctgagaatgatggcttccagctttatccatgtccctgcaaagacgtgaactcattcttttttatggctgcatagtattccatggtatatatgtgccacattttatttaaccagtttatcattgatggacatttgggttagttacaaatctttgctattgcaaatagtgctgcagtaaacatatgtgtgcatgtgtctttatattagaatgatttgtaatcctctgggtatatacccagtaatgggattgctgggtcaaatgatatttctggttctagatgcttgaggaatgccacactgtcttcc

SEQ ID NO: 902210 - DNA, 623 bp, Homo sapiens
ctcagtatatatttatttttatttttattttttttattttactttaagttccgggatacatgtgcagaatgtgcagatttataacgyaggtatacatgtgccatggtggtttgctgcacctgtcaactcatcatctaggttttaagctccacatgcattagatatttgtcctaatgctctccctccccttgcctggcaccccctgagaggccccagtgtgggttgttcccctccctgtgtccatgtgttctcattgttcaacttccatatatgagggagaacaagcagtgtttggttttctgttccagtgttagtttgctgagaatgatggcttccagctttatccatgtccctgcaaagacgtgaactcattcttttttatggctgcatagtattccatggtatatatgtgccacattttatttaaccagtttatcattgatggacatttgggttagttacaaatctttgctattgcaaatagtgctgcagtaaacatatgtgtgcatgtgtctttatattagaatgatttgtaatcctctgggtatatacccagtaatgggattgctgggtcaaatgatatttctggttctagatgcttgaggaatgccacactgtcttcc

SEQ ID NO: 902211 - DNA, 570 bp, Homo sapiens
gggaaagggaaacatgtccaaattctctcactctccaccaagcttttcacccacctctcctagcctgataattatggtttcagatctatctgggcgtggaaaatgggaaaggaagacaggaaatggaagcaagagagttatgacttaaggataccatcatcagctggcactgtgctctccctaaatctccagctctcaaaccctttcaaccactgacatgagtgagagattcaccgcttactttttttaaactaaacttctttaaaaattttgtttaaatttagttaaagttacaattacagtagtaatcttcttacatgcatagatcgcatagtggcaaagtcagggttttgggggtttctatcacccaaataacatacattgtacccactaagtaatttctctttatccaccctcttccaaccccctcatcctgagttttcattgtctaccaatccacattctatgtccatgtgtacacattatttagctctcacttagaacaaaattcagtgtttatgtctgacttagttcwcttaagataatggcctccagttccatccatgttga

SEQ ID NO: 902212 - DNA, 631 bp, Homo sapiens
cagtatctgtctattgatgactggtttatttcacttagcataatgttctcaaggttaatccatgttatagcgtgtgtcagaatttccttcctttttaaggctgaataatattccattatatgtacatagcacattttgtttatccattcatccactgcaggttacgctctctcacttttgaaggagtattattttcctaatttcgcagatgaagaaaccaagaatgagcaaagctacataacttcccactggtcacagagctgtaggggtaaaggtggaagttgaatccatatgtacttgaatctaaaagccgtgttcttctcagtttatgaggctatttcccaatatctgaaatacagtttacctacatcagcatggttgggggaattcaatattgcattttagagcctttatttcttttattttaggaataatatagaaggtgcattttctagccatgtttaaattgttcagatttttaacatttagggtttatttacttgctgggagtaaggtatttattcaaggcaattgtatcrtagtatgaatacatggcaatactcaaataaaaagtaaattttattcaaatatatagttcctttgtaaagtacaagatgtaaaaatcaactta

SEQ ID NO: 902213 - DNA, 631 bp, Homo sapiens
cagtatctgtctattgatgactggtttatttcacttagcataatgttctcaaggttaatccatgttatagcgtgtgtcagaatttccttcctttttaaggctgaataatattccattatatgtacatagcacattttgtttatccattcatccactgcaggttacgctctctcacttttgaaggagtattattttcctaatttcgcagatgaagaaaccaagaatgagcaaagctacataacttcccactggtcacagagctgtaggggtaaaggtggaagttgaatccatatgtacttgaatctaaaagccgtgttcttctcagtttatgaggctatttcccaatatctgaaatacagtttacctacatcagcatggttgggggaattcaatattgcattttagagcctttatttcttttattttaggaataatatagaaggtgcattttctagccatgtttaaattgttcagatttttaacatttagggtttatttacttgctgggagtaaggtatttattcaaggcaattgtatcatagtatgaatacatggcaatactcaaataaawagtaaattttattcaaatatatagttcctttgtaaagtacaagatgtaaaaatcaactta

SEQ ID NO: 902214 - DNA, 684 bp, Homo sapiens
aatgctcccattccaaatgggaaaaattggccaaaacaaaggggctacatgccccatgcaagtccaaattccagcagggcagtcattaaatcttaaagctctaaaatcatctcttttgactctctgtctcacatctggggcacactgatgaaaggggtggactcccatggtcttgggcagctccacccctgtgactttgcagggtacaacctctgccccagctgctttcatgggctggtgttgagtgtctgcagcttttccaggtgcacagtgcaagctgtcagtggaactaccattctgggggctggaggacagtggcccttttcccacagctcctctaagcagtgccccaatggggactcagtgtgggagctccaacctcacattctcttccacactaccctagcacaggttctccatgagggctccactcctgcagcaaacttctgcctggacgtccaggcatttccgtacatcctctgagatctaggcaaaggttcccaaacctcaattcttgacttctgcgcatccccaggcccaacaccacatggaagctgccaaggcttggggcttgcaccctcagaagtcatgrcctgagctgtaccttggccccctttaacaccagcttgagctggaacagcagcagctgggatgcagagtgccaagtcctgaggctgcacagag

SEQ ID NO: 902215 - DNA, 614 bp, Homo sapiens
tttggttatgcatttgagtttcatccaaataattgttcaccaagccattgttactgaataaaaatgcattggcccacacacataggttaacaatcttaattaatgatcttgtggcccactaccaaaaggcttgaatgcccctgctgactttaagtgcttagaaaatagatagctgatggctgtacaaccatgtaaatgtgcttaacaccactgaactgtggacttaaaaacggctaaaatggtaaatgttatgtcatgtatattttaccacaaaaaaaaaaaatgttcaggccaagaacaatagttcatatctgaatcccagcactttgggaggtcggggccggaggactgcttgaggtcaggagctcgagaccagcctgggcaatagagtgacaccttgtctctaacttagaaaaataaacaaagtttttaaaaatagcacagtgcagtggtatgagtacaagcttttgggtcaagcagagaggtactcaaattatgactgggctacttatcggctctgtgacctcaagcaagttgctgaatctctctgaatccatttcttyatctgcagaatgggagtaataatgcctaccagtctaattaggtgggtagcc

SEQ ID NO: 902216 - DNA, 631 bp, Homo sapiens
tgatatgtttgaagtgcaactttgtgctttttgataactaataaataggatwttggaactttcttattttgcagcccagtctacagaagacatgtgaaagatatttatagctttcataactgtgatcctactccttcctaattgccaagtagtcctccccacccccatccccctttttttttttctgtgaatcatctaggacttagagtcattgcaactggctagagagggactttaatcatcctgaagattcccagatagcttgggagacaataatatcatgtaaaagatagctgctttcttccctttggtttggggacttggttaaagaaatgttagtagatggacaatatttagattttatattctgtgccagtagtgctaagaaaagattactggcttcaagagtgagcagttctaggagagcgagaaaccacagctaggagctccaccagcccttgaagatgcagagacatttatccagtccagagggatggggagataacacactgagtatggaatagtggttaagagccctggtttcacagttaggctaattcagttcaaattgtacctctattactcattaaggggtgacattagggaaatcacatgatgtttgagcctcaat

SEQ ID NO: 902217 - DNA, 627 bp, Homo sapiens
cttcttaagggttgggaagcatgtctgattatgcccagccttatccaccctaagatagcatgggagtttcccaaaaactctagtcatttstatgttaccaagcaatttctccttatcagtataaggactagagtagtaagagcatatttgcatctctctctctcccccagcagatgaatttaacagtaaggaaagtcaaggtattagacactcatcttctaggtgcatggaatttctagttggctggacgtccttaccctagactgacataatgcttctgcaggttgtccactacacgaaaaactatccaagggggcaggtggagaccaaaatccagtcctcgttctgctcactggcatgtgcctggtgcagggccgaatgcttcaaggtggaggaggttctgttcatgcattcgtttattcattcatttttagagacagggtcccattctgtcacccaggctggagtgcagtggccagaaatcaaagctcactgtagcctcgaactcctgggcttccataatcctcctgcctcagcttcctgagcagctaggactatagatatgtgccatcacgtctggctaattttttttaaattttttgtagagacagagtctcactgtgttgc

SEQ ID NO: 902218 - DNA, 656 bp, Homo sapiens
cagtcctttttttttctccttctttagcagcataagctggcaaaagcacgaagcagctgcagtatccaaagaytgcatttctgttttgtctccatgacactaggcctaatatgtaactctgaagttggttcaagcacaaccacaaccctttcaaaaaaatttttttttaatatttcttatcaactttctggtccccagcagaggagagcaactagataaaggattactcaatatactaatatatttaaagcatccacttacaaaggaatccttgtatttgaccacttcttttgtcctgtgtaatcttttggggctgtcccttctgatgccgtccctaacggcgatggctagtttttggtgtgcctgtgattctatcctcagagaagagtgtgcatgataacacagattcccctgaattccggcactccacctgcaatgagagacaacactcgaagaatgttctattatctttcatcagtgtttgtggcatgcagataactaatgcattgttgcctgtcaaggttgttgctaatttaaggctgctgacatggtgcctgatagcctgctcttcagtatattattaccatgagaagtactgctttcttatcctttaaaattaattggctttattcaataaatatctccagcactaggca

SEQ ID NO: 902219 - DNA, 533 bp, Homo sapiens
aacagaaacagacacagagcaggaaaagaggagacgaagtatgagtatgctgtggtttgggtttggttcaggcaactcttagcatgaatagatcttggaagacaggtatyccttctgttcttttcaggctacccacaggttggatgtgaagatttaatgaggaaggttttcagcagtttttgtcattgtcatgaggttttcactctcatccttatactaggatgaaatttatctggacctagagatatgaattcatctgaagcagcaagttacttttattcctgtatcttgagcttcaattcactattaactatgttatgccactcttccttagaaaagatgcaaactaaggtttgtagcctgagaaccttaatgctgaaaagccccttatttcctaggcggggttctcatagctagttagtacttgttttactgtactactcagtattgggttgaaatactgctttctcttggcctaatgtggcatccttctctcctggttctcctcacattcctctctacttcttctttgc

SEQ ID NO: 902220 - DNA, 659 bp, Homo sapiens
tgaactctgtatttttgtcatttgatatagatgtagatatagacatattagagaagaatggcacttacccaaaccccaattgttccaaatttatgttttttggagtttagatatcttatttccaaaataccaaaataatacagagatacagtgattttgatgaacattttggcccatgtttggtgtgtgtatgcctgtgtgtgcgtgcgtgtgtgtaatctctaagaacacacacacacatttttcttgcagcacagctattccttcagcatcccattatcatctgcagcccatgagatcactctttccccaagctctgtaactttatatggttccattacatagttaaacatgtaaaaaaatcttttagagcatgcaatttttaaaattcttctagcaattagactcctgaataaataatttcttctgcatacacaaagtatatttaacaaaaatgtagcttattttattcacttagcaatagtctaaaaatagctaatgttcctcaggctaatgttataggcttaatattattctaagtgctttagttaaattgacatttataaccaacctaggatgtaggtactactacawgcctctaatttacagatgaagaaaccaagtcacagacaggttaagtaacttgctcaagggcacac

SEQ ID NO: 902221 - DNA, 497 bp, Homo sapiens
acttttttactattgcaaggacagcaccaagccatgggggactcaacctcatgaccaaaacacctccmaccaggccccatctccaacactggggattaaaactcaacatgaaatttgggtggggacaaatatctaaactatatcactctcccagacagcctaatcaaaagctcagtgtcggccgggtgcggtggctcaagcctgtaatcccagcacttagggaggctgaggcaggcggatcacgaggtcaggagatcgagaccatcctggctaacacggtgaaaccccgtctctactaaaaaataccaaaaaattagccgggcatggtggcaggtgcctgtagtcccagctactcgggaggctggggcaggagaatggcgtgaacccgggaggcggagcttgccgtgagctaagatcacgccactgcaccccagattggcgacagagcaagactccatctcaaaaaaaaaaaaaaaaaaaaagctcagtgtcagttt

SEQ ID NO: 902222 - DNA, 629 bp, Homo sapiens
gcatattttgtgttctccgtagttctggtgacagaattctctccttgttccagtctgctgagrtgaccatgggtccatctcttcttggccttgtcactgccccatggtaacatcttctgaggtggtctcatgctcatctgaatcttaactagccagtccattcctcttgattgcagggtcctccattataaccaagagaaccctcttgtttcacccaggttgggtgtctcatttctgtcacttatggtcacttgaagaagatatttggctgcttcctgagccctgatggggtattcagcctactcagggaaacagtgttagatgcatctacccaaccatcctacacaggtgactctactgcacccttctctgccatggggaaatagagaactctttaggggtatgtatgccataaatgcttcaagtgggaagcagaataaaaacaccctctactctcaaccttataaacataaatggagcatttctgccagtaagatcccaccactcttttcagtcttagagatactaaccaggatctcactgacccttctttcccaccccttccagcttcccgttcaaagaggatgcgttggggaggggggctggtacgggtgattgctgggtagcct

SEQ ID NO: 902223 - DNA, 436 bp, Homo sapiens
aatgacccttattctttgcctccacatcctggaactagagatttttgttacagaattataggaaagtatattttccagcctactcaaataacttacttcaatgttgaatttccagaagaaaattaragtcaaatgttgcttaaccctactctgaatgcagaaccatgcaaaaagaacatttatgttgtctatgtaactgtttctaaattccactcccggagcttcctgtctttacaagaaattctcaggcaattttcagacaaataaaatggtttgctttaactataataacacatgcataattaacatatcaatctgtatgtggcaaatagtggaataatgatttgcttattatgcaaaacatattttttggaaggatattgtataaatattacttgggtaaatgtaatgagacttagttataaccaaaaattgt

SEQ ID NO: 902224 - DNA, 634 bp, Homo sapiens
ggtgggaggatgggtgggaagatggaaatctctcatttttttgtctttatgaacctgggaccaaaaaaaaaacgaggaactttacctataaattagattgtgttgtgattcataaaccatgctaattttataatttaaaacattggaattagttatgattttaaaaatttttaaatagaactcaaaaagaaatgttttcctcatatgattgatgttttaagtgtggccattgtttccaagcaaaaatgacatttattcaattgtattaaatgagatttcttagtaggctatttttacttgattctatgtcagtaacatgtgaaataagcattagaggtgtgattaaattattggagagaaaatagttatgtgaatatttgttttcttggacacatttgaattactatatttttcccaagcacactttgaagtacattttaaaaaataatttaacatcagggttgcactacctctctatcttgtaattccatgttacattggagctttttaaacacttatttgactctctcttctsgaaactctttcttcagttgtttttcatcttattattctctcttgttcctccttattccaagggtcactctatcattggctctttggctgattcatatat

SEQ ID NO: 902225 - DNA, 618 bp, Homo sapiens
aataaacaaataaacccagggattaggatgacataatacagggaaaaggtaaagagagagaagagtgccaaaaaccaagcctttgrctacatcatttttttttttttttgtagttacaattagcctgatatatatacattaagttctgggatacatgtgcagaacatgcaggtttgttacataggtatacacatgccatggtggtttgctgcgcccatcaacccttcatctacattaggtatttctcctaattctaaccctcccctagcccccccacccctcgacaggccctggtgtgtgatattcccctcccggtgtctgtgtgctcttcttcttcaactcccacttatgactgagaacatgtgatgtttggttttctgttcctgtgttagtttgctgagaatgatggtttccagcttcatccatgcccctgcaaaggacatgaactcatcctttttaagactgcatagtattgcatggtgtatatgtgccacattttcttcatccagtctatcattgatgggcatttgggttggctccaaaatctttgctattgtgaacagtgctgcaataaacatacgtgtccatgtgtctttatagtagaatgatttatattct

SEQ ID NO: 902226 - DNA, 621 bp, Homo sapiens
ccacccactcgtgtttctacccactagggcaccggggatttataggcacaggatgggggcgtggarggccagagtcgtcttggaaaatggaagatttgggcacgagaacagaaatgcccgtcctcacctaggtccgagggcacaggccaaggggtggacccctaaccagggacccactcttctctacccagcacttacctggccccctcccatgtggcaaagctaagagaaaagaagaaacaaaaataaaaacagaaaatgcccctgtgactggattgcttctccaggttgtgaagatggctatctccatgacccatgagcctttgtttacttttcagggttctcaggtggttttttgttttttttttttgttttctttgtaatttatccaaattttagaattataatcagtaagtggggtggatcttagaagctcacatcatcataggcagaatcggtattcccatatggcatacatttttgaaaagtacatatttcctttctatagtgagatattgaagctattatcacctacattttgaaagataatatgtttgtagcaatctttaagttgcatgtgatcagtcagtggatggtataagcttctgaacctgtactggg

SEQ ID NO: 902227 - DNA, 678 bp, Homo sapiens; identical to SEQ ID NO: 902187

SEQ ID NO: 902228 - DNA, 625 bp, Homo sapiens
tactttcaataaatgatcgctggttgatggaccctaatcccaggctaatccatggtccctcattgtgggcacacttgttacattagctgagtctagtctattcccatcagaaatgttctccttgcccagaaaggtggtccaggagacagtttggctctatctgaacctcatataacagtgctcaagagaccgaagaaccatttctctctacttgtcttccaggccctatggtgattggaccttctcagtgcagttaaaaaataattaggaaatgctgttctttgatgagacccactgcatcttgtctagattgcatgtttgtttgtttgtttgtctctacttacccccaaaacatgttttctctttcttaaatgaccctgagtgacagaaaatgcttcaaataaaagaagctgctctgtcttggtccccaactcttccacctcatttgatacagcctcagaaactccacttaatcctccgtctacacagaattatttatctcatggcctgcaaactccatgcagctttggtccctgacacctccctgtctatccctaagaggagcagagacrtgaagtggcacttccagaaacatctggaaactcccaggagggctgacctagcc

SEQ ID NO: 902229 - DNA, 647 bp, Homo sapiens
cttgcatcctaggaatcaagcctatktgattgtgatgaattaactttctaatatgctagtatttcgttgaggatttttcatctgtgttcttcagggatattgacttgtagttttattttctttttttgtggcatctttgcctggtttgggtatcaaagtgatgttggcttaatagaatgagtgacggaggagtcctacctccttgattttgtgtggtagtttcaatagatttggtgacagatcatctttgtacatttggcagaattagcctgaaaatccacctggtctggcactttttttggttggtaggttttttttattactggttcagttttggaactcaatattggtctgttcaaggtttcaatttcttcctgattcaatcttgggaaattgagtatttccaggaatttatccatttcctccagatcttccagtttgtgtgcatagaggtgttcataatagtctctggggatctttcatatttctatgtgatgagttctaatgtcacctttgtcatttctgattgtgcttctttgcatctttttttcttttaatctgctaatggtctaccttgtttaccctttcaaaaaccaacttttaattttgtggattctttgtatggatttcagggtctcaatttcatt

SEQ ID NO: 902230 - DNA, 638 bp, Homo sapiens
ttttctaagttgaacgcatcctcttacgtcttaaatatcagtttcatttttctatttccctcaaaggaataaaatgacatagtagtttcacctgtggctaaccaggttcgagtccaaggcttgaattaaaactgaaaagtaggggacttcaatttcatttcaagtatgctttggggaacatgccagagaagggaaagggatggaaaagaggctgatgcatgctcagagagtggctgcaagcagttcagagctacgcagagggagtggcgggcatcagcggcagtggtattcacagttaattgatttgcttcctcagttgacacatcttttaacgaagactttggaacccaaatgcaataaaccaagcatgagtctattatattctatactcatagaaaatgttttacgaatcaaaatctgaagcttatttgtataattttaattttaatcctaagatacacatatatagaggggtaagatggaaatgggaacccagagaagacagtgtagtaaaaagaggtgggaacttagatccaaagaatccagttctgccactgcctagctgtaatctcaggcagcttccctccaagttatgsatttgtttcctccttagaaggaagatcagacttagatgattc

SEQ ID NO: 902231 - DNA, 622 bp, Homo sapiens
tttcacaggaatgttatgaacatggaacagggaaagggtgcacagagcttagtgtgactgccctgaggactgggacggcagccgtacttggttaagcccatttgtttcccagaaaagggaaaaataactatttccctgggaagtgtcagagaggtctttgtctcttgtaatggtttccatgctcaccatcttaggtgccttcttctgctaatctgaatgattggatttctgaagtaataagaaaaagtgagttctcatggcccattctgtgttaggctcagccacaaagtcacttaaaacatatttatgctaacatggacttaaaaaaaaaaaaagacaaaccagtctatttatatagaagtctagttagcaagaagaatgaaaacacagctatggcatgtcaataaaaacacattttcctagccagttagggcaaggcctctcagtagaaattccactttgctgactcttgattaaagattttgctttataaccacactgactgtttagacggaaccagctatgtaagttgcagtgcgcaatgcacactgaaaatgtgkgacttttttttccaaatattgttatgatcacaagacagtgacagcaagacaccaagctgggg

SEQ ID NO: 902232 - DNA, 608 bp, Homo sapiens
tccaaaataaagaactcactaagctccaaactaaagaacgggtaacaaaatatacataacaataaaaargaaactcttaacaagtagtctggcaaaaagaacatgttacctacaaaggaaaagaaaaaaacagattggcatttgagcttatacaagaaatcagagaatatcacccagagaacttaactgaacaaaaatacttaagaacgtatcaggcaaatacaaatgatccaaaactgatacattaagatagaatgtgatacagagaagaagcaacataaacactaaacaatgacacactgttggtgggactgtaaactagttcaaccactgtggaagtaggtgtggcaattcctcagggatctagaactagaaataccatttgacccagccatcccattactgggtagatacccaaaggattataaatcatgctgctataaagacacatgcacacgtatgtttattgtggcattattcacaatagcaaagacttggaaccaacccaaatgtccaacaatgatatactggattaagaaaatgtggcacatatacaccacggaatactatgcagccataaaaaatgatgaggtcatgtcctttgtagg

SEQ ID NO: 902233 - DNA, 702 bp, Homo sapiens
caaatcccacatttctaaatttcttccaaatctatctttggagttatttttcctgtattgagttcacttttctatcaccatggaaaccaattacaattagtgttgttaggatctttaaaaatacaactctattcagcaagtcttcaaatgttcagaaaagttctttctccatatggagaatggaaatcagtagcatagagcagggtaaaaatataccacccacccacagaagaaaccattcaccaaagcctaatcaacggattgcaaatggaacacggaaagagttcttttcttttattcatcttttgtagttctataatggctgcaatttcatgtgtcatacctatggggtttgtaaacaagttttctttcacctcacagcctgtgtagcagacgtggagacacaaaaaaatgatttctgttgtataatattatgtggtccacccaccctaccttcaacctcctaatatttgacactgaaaatactactttaaaactactgagttcaggacgccaagaggaagaataattctacagcagaattacatcttacatggttaataagtgaaataagttctaattccagcacataaggygaaaatcaataaaaggcaaaattacccttcagatttaccaggaaaaagctagagacctacaagcatcttaacagacctaagagtttttcttcccagaatgggaata

SEQ ID NO: 902234 - DNA, 784 bp, Homo sapiens
gagaggtagacatctatatacaagaaatccagagaacacctgcaagaaactgtgtaaaatgaaaatcaccaagactcaagacacacagtcactagactatatgaagtcaatgtcaaagaaaaaaattttaaaggcatgcagagaaaaaggacagataatttacaaagggaatcttatcaggttaaatgcagacttgtcagcagaaaccttacaagccaggagagattgaggacctattttacacattcttaaataaaaggaattccaaccatgaatttcatattccaccaaactaagcattataaatgaaaaagaaataaaatatttttcagacaagcaagcactataggaatttgttaccagtagaccagccttacaagagagttttaagagagttctaaacatgagaataaaagaacaatacccactaccacaaaaacacacttatgcacatagcctacatatcctataaaacaaccacacaatagaaactgcaaagtaaccagcaaacaacttcatgataggatcaaaacctcttatattagtcttaaccttgaatgtaaacagtctaaaagctccacataaaagtcacagagtggaaaattggattaaaaaacaagacccattcatctgctgtcttcaacagacccatctcacacataatgatacccataggttcaaagtaaagggttggagaaagatctaccatgcaaatggcaaacaaaaaagagcaggggttgctattcttatatcaaakgggaaagactttaaaccaacaatagta

SEQ ID NO: 902235 - DNA, 625 bp, Homo sapiens
ctgctataaagacacatgcacacgtatgtttattgcagcactattcacaatagcgaagacttggaaccaacccaaatgtccaacaatgatagactggattaagaaaatgtggcacatatacaccatggaatactatgcagccataaaaaaggatgagttcatgtcctttgtagggacatggatgaaattggaaatcatcattctcagtaaactatcgcaagaacaaaaaaccaaacaccgcatattctcactcataggtgggaattgaacaatgagatcacatggacacaggaaggggaatatcacactctggggactgtggtggggaagggggagggatagcattgggagatatacctaatgctagatgacgagttagtgggtgcagcgcaccagcatggcacatgtatacatatgtaactaacctgcacaatgtgcacatgtaccctaaaacgtaaagtataataataaataaataaataaataaataaataaataaataaawaatataaataaataaaaaattaaaaaaaggaaaaatattttttctacatttgaaaactcaaacgccaataaatagctgtagaggttaaaacaaacaaacaaacaacaacaaaaaaaaggt

SEQ ID NO: 902236 - DNA, 641 bp, Homo sapiens
acctacctgagaaaactaattttcagtaagttatctgattttaacaaagtctattctaactccattttctaccgggtttattaaagccagtgtgagccgtgaaactaagcaaaggtcgagggaactgagctgaactcattaccattcatctcacagctttgcctttacctcaggatgcaattcactgggatagtgtgtctcatgtatttataaacaaagtggatcttttccatggtattttatgaacattactactgatacaacatttaaagtggcacgtgcatatttataaatatgttacaacattaaaaagatccaaaatgtggcttcagttttgagcctaggtcctaaaagcaaaacctagtcattttcatatgatattgaaattaccaaaatttattctttgcattgtattatgaattagccacacagcattccttaatttatataaagcaataaaatggcacctagatctacatccctttgcttttatttcatccttgaaaaatgaggagatccagatataatactttttaaatgtaagtgaatgttgctagcasgaagtatttagaagtaaatgaaagtttttatttaatgtatgtgaatgaatattccatcattgatttgtttgtttcattgtg

SEQ ID NO: 902237 - DNA, 620 bp, Homo sapiens
ctggataatattaacattggggtaaatgttataacttttccttttcggtgagattaacaacattgtgtagactgacttcatgagaagctctgtagaaagttggaaagagaaggtgaactgagatgtaaataaaatattttacatgtactatgaattacatatatatttatttattatatggtctcattattcttcatactaactgatatggtttgactgtgtccccgcccagctctcaattgaattgtatctcccagaattcccgtgtgttgtgggagggacccaggggggaggtaattgaattttgggggccggtctttcccatgctattcttgtgatagtgaataagtcccttgagatctgatgggtttatcaggggtttccacttttgcctcttcctcatttttctcttgctgccaccatgtaagaagtgccttttgcctctcgccatgattctgaggcctccccagccatgtggaactgtaagtccaattaaatctcttttgcttyccagtctcaggtaggtctttgtcagcagcatgaatgcggactaatacacttacactgcatgttcaggaacggtcagcatgtacatggagtgaggatatttatctatttct

SEQ ID NO: 902238 - DNA, 662 bp, Homo sapiens
ccatccctgacatcttaatcaatgcttcgaacaagtcttcmtgtacatcattcctgtcatattgctctgcctaaaattacctgtatttctgtgtacttggagaagccattgattttctagcacgcacagaatacaatgagaatcatgatatccatccatgcaagatattataatccaaacaacttgctcttgggtcacattagtttaatgatcactataaatatttattccttcagcggactttattcttaggtcttttccaccacacgctgttattggattcagtcactgagatctgcttttcaatttatttcaggttgttaactatcccttcctacttcgtgtcaaccagaagtatgtatataacctttaacttggatatgtagattagcatttaaatagaatatggtcaatggcagatcccagtgacatttttaaagtaatgcctatcaaatttttttatccaaaaccagcatcattttgataagaccatttgttcagtctacaattacctaattaaaaatatatttccccaatatctttccatttttttgctgatatataacctataacctataatgatattatttatagacaattctttcttctcagattcactgaaccataaaccttttgatccatttagggtaagggtttgcact

SEQ ID NO: 902239 - DNA, 638 bp, Homo sapiens
cagctacaagctctgcttttgagctgaagtagagggcgtctggaaaattttaccttttgagccagaataagaagctttaccattactagacccaccagtaaaaacattctcagcaccttcaattggtttgaatttagttattttagggagaatccaattagttaatttcaaaaattgaaacagtttcattttaggaaaatgattattgagaatacccacaaagtcagctaaatgggtttgccaagtaagactatttataaaggcttgctgtatttgtgccttcatgagagggacaatattttttccaggatcatatccatgtaatttaacaatctgagttcacccatttcctatcatagtagcaatttgatccaaataaggagtcaaagtccctgaattagtatgtggaagagaaagacactgtacaagatcttgctcttgaacaataacaccagtaggtgaatgctgagttgaaaaaatttgcaaatctagagtcttctctggatctattctattgatttgagctttatggacttgctttttgatkacttgcagctctgcctcagcttcttttgttaactgctgagggctagtgagactaggatctcctctaaggatagaaaatagattactcaggt

SEQ ID NO: 902240 - DNA, 557 bp, Homo sapiens
cactgctggggccaagaactgtatcaatgtatccagttaggaaagggaaagaaaattctttcaaacaaaggtgatttaatacacaaagttggttattgatgtgttggaaggtgaaaaaattacaaagggcaaactgaggtcacccaaaacattaagaacattaagctcctgagggaggacaaaaaaaaaaaagtggtacagttaccagaactaaaacctcagaggaaagggtatagcccagtggctgctcagaaggcaaagctcatacttacactgccaagagagtgtggcccagctgtggctgatccctgtgagaataaggcaaggctggtgccaagagggcctaaaacagctgacccaaccatgtgacatggagtgacactagtgggaattggaaagtaagtcccttctcccctccactgctttcaaatctctctagtacctctcattggcagaaacattagaaaagccagatgtcaaggtagactaggaaatcagattyggagaatcacagcactggcagcatagaacaaattataaaaggataaactgtgaga

SEQ ID NO: 902241 - DNA, 555 bp, Homo sapiens
cattcagccatcttgactccacccccctcaaaaggtgttcttaaaccacaagcaatagcatgagtgatctgtgccttaaggacatgctcctgctgcagataactagccaaagcccatccctttattttggcccatcctttgtttcccataaagaatacttttagttaatctataatctatagaaacaatgcttatcactggatcactgtcttgctgtcaataaatacatgggtaaatctctgttcaaggttctcagctctgaaggctgtgagacccctgatttcccactccacacctctatatttctgtgtgtgtgtctttaatttctctagtgccactgggttagggtctccctgaccgagctggtctcggcaagcggtgcccaatatgggggcttgaacctgggtcaaagggtcaccagaaagatggttggagaatgtggaactaagctggaggacacccaagttctcttaagcaatccccgtggtgagtaagaaggggagctcagaagcatsagggtaacaatgggacaagtgtgagctctggttcattcca

SEQ ID NO: 902242 - DNA, 640 bp, Homo sapiens
gagaaaataagattggaaaaattacttagtttaagatttgattcattttcagaggtttgaaaaaatgtattttttatgccgcttgaagtcgctaagagataagcagcatagcatattcatcaaggaacttargaacaattatttttaaaaataaatagtggaaatataatattttaattgttattgaaatataccttctaatcttagaaacctttttctttatctaggcacttcatttgtccttttaagaaactataacattattagttgtatcaatttataatttgccgtgcatctgccttacttaccatcttttcataattatctattaaaagttcaaaacataaccgtattgaaatattattataatagttaatttaagaaccataataaccaggttaaatttaaaaatttgatgctcctagcatttctgcttacaaggcatgtatgctaaagagattgttgagccctgattatgtttaatttgttaaatctagtacttcttttaacttacatgtttagttttctacagcattgttactgtgaaccagagttcttagttttgagcaatgtaaatcatcatacacctcttccaagtaaaggagtagtttttacctaccatacaggttacaggaaattg

SEQ ID NO: 902243 - DNA, 660 bp, Homo sapiens
atccccagcttggtactctacacacctatagtggtattggtatttaaggtgtaraacaaagttccctttactttgtcctttgcttttctcaagcagaaaaaggtttgccacacaactaccacagctggtaatgtgctgagtctcacctaaattcagcaagtctcaggggttcactaaggctcttgatgtagtacttgagtatcactgctggttactcagggcccaaggactcatcagttagcagatgctaaatgctgacaggactggttctttttcctcatggcagcacattcccatttctagtcatacccaaggtgtgtccagaaatgtcatctgagagctagggcctggaatgggtacctcactactctgaccagtgccctatcttgctatggctgagctagtatccaatatgcaatacaaagtcctcctcactcctcaagcagaaggaagaagtctctttcggagctgtgaaacttgcagccttgggttaggggaggattgatgccagtattcccttggcttccccagctggtgtctcagaatgtcatgtgcccctccagtccactgtctctgggcctagttcttccccaggacttgcctaatagttgcactcgttattacctagactgtctttcaaggttacatagagacctagag

SEQ ID NO: 902244 - DNA, 657 bp, Homo sapiens
atcacatttttaagatctttattcttatatctttcctatgtgttgaatcaagactgttcttgccctgatcagataaaaatcaataatattgagatcaaagtcttcaaacatcacatgctaatttgaagttgtatgcaagcctaaagctagtgtgtaatacctttgttcttttcctcttaggcatttatgtccatgttccagatcctcacccaggaaggatgggtggacgtaatggaccaaactctaaatgctgtgggacatatgtgggcacccgtggttgccatctatttcattctctatcatctttttgccactctggtgagttcagcatttttttttcaattatatcttggaatttataatgggatgaacatcaacagatatttggcctattgtcaatttcaaaatgggagccaaaggactaatgcagactaatctggttggatgagatccctccttccattctaagtttctacacatcaaagaactgcttgatttgttaagttagatattttctccatcaggtaccagtgtttgtaagagggaaaacaagacagaacaaaatgaaaatctcacatttacataccaatttaagtatccccaagcattcacacctagatgatctcaggatcaaacyggaactccattattattttt

SEQ ID NO: 902245 - DNA, 682 bp, Homo sapiens
actgcatttccaaaatttaatttgttttctctcacccatcaattcaaatctgtacctcctcctgcattcccattgaaagttgcagcccatcattcgggacatccaaagtagaaatctgggagtcattcagacgtttattttctgtcatcttccacatgcaaataatctccacaccagtgaatttatctcctaattttatttaatgcattcatttttactccattcctactacgattactctagcccagactctccattgctatctcccagatgatcccagtagcctcttacatgatcaatagcaacattgtcgtatttgtcctctaaaatgcagtcagggcaatcttgagcacgtgaaatcttgaaatctcacctgttatgcccctccttatagtcactctaggattcccatccctcacataaaaattccaagtttcttataaaaaatcagacgattcatgaaaattcaatctttctcgttcatatcttgcctctcttggttatatattttatgatctctaataatgtattcagtttctattgtcgtctaccaatgaacatcaagttatttgcctaaaacaacaaacactatttctgcgkgtcaggagtttgggcaggggtgaactgtgtcctctgctcagagtaacacaaggctagcatcaaggtgttgactagattcctc

SEQ ID NO: 902246 - DNA, 622 bp, Homo sapiens
ctgtttttgtgttagtttgctgagaatgatggtttctagcatcatccatgtccccacaaaggacatgaactgatccttttttatggctgcgtagtattccatggtgtataggtgccacattttctttatccagtccattcttttattttatttagaaacagtgatctcacttgtgaagaagtatcattgaaaaacttggaagttggagttatatgtgacttctggacctgatagttttcaaagaaggaaacccaatgtcccatagctactgtctgcacaattccacctgtcaggtccctatccactcagcaggtagctcagtcaccaactgcagaagtaacttaagagtagctcaataagtctgagttctttcactttctgctttgacaagttgatcaattacagcaataactacagacatttgaggtgacttgtttactgccataatgtggaaccaatctggaataattttaagacaatacaagctatgttaatgcatgcatgactcatgtcttccaaattacaagtttgcaaaactmttttgagactaagatgacatatgccaaatgtaatttaatatttatactcacctttattgttgttgttagtctgttttcagagt

SEQ ID NO: 902247 - DNA, 647 bp, Homo sapiens
ttattaccaggtatgtggtgctgttgggggtggggtggaaaatgattttcttaatgggtcttctacagatttagggacttgggagatcaaggtggggaaggggaggaagaaaatctgaagacatggaatattggaaggggtttgctggtgctgcttaaaggtaatacagaacagcctcacagaaaaatataatttataaacacacattatacatgattaattatgttaattcaggattaaaggagaggaggggtgtgtttttccagtgtgtatttatctgcaatcaggtcacctagtgcttgcaataagtttggagaagtcatttaactttagcagctccatgctatttcccaccctcatcccttaaccccacaaaaacagaacttttcctgctaaagaactagcagggatagattcagagccagagaactaaattttcaaaagtcaagaagacccatatctatagatgtgatcaggaagtatcacgccctccgaaagtttcactttgtagaccatgagtgcttaatttaaataaatcacccatttatgttccttcctgatacataaattctaccaagagactgactatgcaatacacactttggagtcagagagaargatttttgtcagaattcctccaccattca

SEQ ID NO: 902248 - DNA, 624 bp, Homo sapiens
aaaatgcaacatacaaagtgactaaaaagaaaaaagagctagcatatttgtgaagaaatctaatatgtattagactctccataaaataaaagacattgaaacttcttattgtgtaaatgtcaaggttctgargtaaacattaatttttctgtgagtcttacaggttagaaaattaatatacttttcattttctcatatcaactaaacatcaaagttgaatttggattcaaactgccatttagcaactggttgagaaaaaatgatttttttcgaagttaaaaatgaaggaagattctttgtagagctaactgaatggaaatggcaccataaatttgattccagctctcttgaaaagaaattccacatttatgtgcttctgtaattagttccaatcagcacactataaatatgtaaggattttacccatctattacttgcatctttggtttaaagctcttcagttgaaatggcaaacacaaattctgagcaggtaatacatcaatgtggatttgtctaagacttaaaagctacagacaattcttcctttgttcttgagttttagtcttatttatccttctattgaatacagtaatcatttctgtctaaaataagagatagtaaaag

SEQ ID NO: 902249 - DNA, 625 bp, Homo sapiens
atatttttggtcataaaattggtaaaaacaaagaatgaagaatagatatacattcttcaaggactgcaaccctgcctttttggctgacaaatgtgtcctcagggtctaatgcagtaactaatgcataaataaatgtgcatttaatgggtgggtctgcttctgttggatttgttttcttattatacacatgcaattattcagacttataattgttatatattctaaaccactagacaatgaacactttgatagtataaatgtttccttaatcaacagaacatgtttacttctttcttcgcatttttgctcacaatgtataaatattttaaatgaatatccccatcacactcccttctgcctggttaacacttagtcccttgccgtagaacaaattcttagtcctctgcaaataatttcaaaattaatctttttcctacagttctcatgttagttttgcaattgtgtcctatcattacttcttttgtatttaaaattctatatttatattttccttgtgattatgtgatttcttggtatacaaataaattattgttattcaaataccatgacttytgaaaattagtgttgtttgaaagtttctttggttctatcctttattttattt

SEQ ID NO: 902250 - DNA, 593 bp, Homo sapiens
cctccaaccccaccacagaggaaactgggggttagaggtcaggatagaagaggccaagttcatgtcctcagtgcttagaggccagggccaacaggaagaggctctgctgtataattggcaatagggccagaatggaggaacaaatctccattttctggaaggaaaactgaggcgtggagggctggttccacctgcctcagttttcctaaggccacctggggaccaggatcctcctgccactcctgccttccccctttcctggagggctccaactgccttcagccgccactgcagacaccgtcccccatagggggcccctgagatgtctaacaccccctgtgcctcttcctttctcttctctctcccctaagaagggatgggcttcctgaaggaatgtggtgacctctgaccctggtggtggccactgctggctctgcccaatgcccacacctgggggaggctgcttgtctctgtagtggacccagkgggtgctctgaggcaagtggtgtttcttctctgagtctcagtttctccatttgcacagtaagccaaagggtccctctgcagcatttgttctgtgaagccatccagct

SEQ ID NO: 902251 - DNA, 446 bp, Homo sapiens
tcctgccaggcatgattctggccacaaggatgcatcaactgccactggagctgtgggtgtgttgtcactgtgaagcacattgcagcagcagctgagaggagagaccaaccagcaccctggggagggggctgcatgcagaggttgggaagtcacactttggcttcaagccaagcagaagatctggcccaagaaaacaggctcatacctcctggacagggtggccaagagacagagcttcagctcaggctgggacgccagttgggcaataaaattaatgacaataattattattatataacaatgttgatgacattactggccaactttacctgccagacactatgcttggtgctttatgtagatcagttcattgccctcatgtagcaatcctaggaggtgggtctattattatctstattttattttattttattttatatttttta

SEQ ID NO: 902252 - DNA, 649 bp, Homo sapiens
ggcctcctgatttcctcaacttagtccttccattggccaaggaggaattgrgagtgagaggattcaggcctcttaagagttattcatgacctgaagtgagggtgctcatgagaaagttctggtcacagcaaagaggctgacaatagaaaccagtccctgcaactgccactttgcactagaaatagcccctctctccctcaggcagcaatgatatagggagcagtgtatccataccagggtcatctctgcaagcgattctcctagtctaggctcaatttcctcattttaaaataagtgactacactaaattatatccatagtcaaaaatcaaagattccacatattaccctttagttcataaaattttcttttttctttcattttttttttaggaaaattataccattagcaagactggcatcagcaagtagttcgcagtgttggttgttcttggtttcgcaggattttataggaggtatgacatttatttaaaatggatttgtttctttgttactcctattccatgctggctagacagctttccttggggtctctcatctatttcagtgccattccattcatcactcacaaatcattaatttgcctgtgttgtgttacctcctgagattttctgtttctgagtcaatag

SEQ ID NO: 902253 - DNA, 575 bp, Homo sapiens
gttgaggagcagtcaatataacattaggcaaaccatgagggagtgatgtcttagaaacgaagtgaagaaagtttttccagaaagaaggaatgaagcactgtgacaaacactacagagaagttatataagatgagaactgagaattgaaaatgaaattgggcaatgtaaagatcgtcatgattttgatgggatctatttctgtgatctgggctcagcttatgagcccagggaaaacttcttgtttctcattgtgtatgattcctggtaagcattatttttcatctttagctactgggttataaagaataactttcttttacatcagttaaaaggattagagttgtgggtacccttggtagactagtaatttgatgccctttcaaaatgatattattgaaatagttaagatgaggaggaacttattttaatgtaccatataaattggcccccagrcagctgctcatctagctcactccttaacagagctctgatccaaatggccactcatagtgacagatggttgaagtagtatgagtgcatgggaggtggaaggagcaatgggccaataatcaaga

SEQ ID NO: 902254 - DNA, 528 bp, Homo sapiens
ctgcaggtacatccttctcgggtcttctgtattacgagtcctttgaggccaagaccaagtgttgtctctttgtcatatttcccatgacatccaggagagagttgcacagggttctcggctaacaggcaaacggagagaaagctggcattggacatgtaaagaattaaatggagtagctagcattcatcacaaatgatgggcgcccacctgccttgtgggagggaactcggggtgcttttcctatttgggattctaggagcttgtgaattggggctcattttgatcatctaaagggagcatgatgatgccactttcagaaggaagtgggtgaagagctgtggctttaggtacagactgcccgggcaggcttgctgtctatccaacacactgaatgtttgtgtcgcctcaaaatccatgttaaaatccttaccacgaatgtgaggaaattaggaggtggggcctgtggggggtgactaggtcatgagggtrcagcccttaagaaggggattagtgcccttataaaagagt

SEQ ID NO: 902255 - DNA, 530 bp, Homo sapiens
gttttcagctcctttaaggagttctctgcattgattattctagtttgccattcatctaatttttttttaggtttttaacttctttrccatgggtttgaacttcctcctttagctcagagtagtttgatcgtctgaagtcttcttctctcaaatcatcatggtcattctccatccagctttgctccatttctggtgaggagctgtgttcctttggaggaggagaggtgctctgatttttagtttccagtttttctgctctgttttttccccatctttgtggttttatctacctttggtctttgatgatggtgaagtacagatggggttttggtgtggatgtcctttgtgtttgttagttttccttctaacagtcaggaccctcagctgcaggtctgttggagtttgctggaggtctacgccagaccctgtttgcctgggtatcagcagcagaggctgcacaacagcagatattggtgaacagcagatgttgctgcctgatcgttcctctggaagttttgtctcagaggagt

SEQ ID NO: 902256 - DNA, 703 bp, Homo sapiens
tggaaccaacccaaatgcccgtcaatgataggctggataaagaaactgtggcacatatataccgtggaatactattcagccataaaaaaggatgaattcatgtcctttgcagggacatggataaagctggaaaccatcattctcagcaaactaacacaagtacagaaaaccaaacaccacatgttctcataagtgggagttgaacaatgagaacacatggacacagggagggaaataccacacactggggcctgtccaggagtcgggggctaggggagggatagcattaggagaaatacctgatgtagatgacgggttgatgggtgcagcaaaccaccatggcatgtgtatacctatgtaacaaacctgtatattctgcacatgtatcccagaactataattaaaattttttaaaaaatttaaataaatgaagtggctgaaatgtaaaaaaaaaatgtctccaagaaacaggtcagggtttcaacaaaagaatctttagtctgtaaatatacttgtatgtaaatccaagctaatactacctgtggtaagtatatcacagtatgaaagtgctatgtgatttagaagtgataattgtaccaactgtgacccatagctttgattttgatcataacttgtaatatactgacatagtaaataaattctaacataagtagtaycaatttccttcatagtcttaatggca

SEQ ID NO: 902257 - DNA, 539 bp, Homo sapiens
catgtccagctaatttttttttatttttttttatttttagtagagacagggtttcattgcgttggccaggctagtctcgaactcctgacctcaggtgatccacccgctttggcctcccaaagtgctgggattacaggtgtcagccaccatgcctagcccctttctcttaaaaaataaaaggaagaagaagtgttccactgaaaaagtgaccagagccaagaggctcagaaactgtaactgaacccaaaaaaccctccaagcctctgcatcgcagtggtgcctgaggcaggtccagcgctcacttgggatacagagcaaagaaaagtcaaggaagcaaggggatgggtcagcagtgagggagggctcactgatgtgttgcctttgcttcacacctgactgtcctgagcccacagatgggaagtgagtccccacagggaatgcagcaacttcatggaaatgagcccgcagatgggaaatgagtccctacagggaatgsagcaagttcatggaaatgtctaaactgaaacccaggtccccta

SEQ ID NO: 902258 - DNA, 539 bp, Homo sapiens
aagaggcagcacagtacacggctgatgacaacatttttgctgagcatctatcataamcttccaacctccttgagctccaaggaacatagcttgcaaatgctgctgtgggcagcaccccactacctgccactgagaaactgaggtcccatctcttaagtctcactcccaccctctgctgggggcagtggggagccaacctgtcctccccttgcggggctctgcacacattgcacacgtctccctctggggaaaggggtgccaaggaacttctgggccagctgagccaaaatacagacttggagtgtgaactggccaagtcactgcctcctccctgagggtccctccctttggcacccgccaccttatctccagagaggccaccgtggcacagagccccaggctccacaggtggctactgaccgtcacccacctctgggccaagtccactctctttttgttttcttttcttttctttttttttttttttttttttttttttgagacagagtcttgctctgccccccaggctggagtgcagt

SEQ ID NO: 902259 - DNA, 595 bp, Homo sapiens
agatacacctaatgctaaatgacgagttgatgggtgcagcacaccagcatggcacatgtatacatatgttacaaacctgcacgttgtgcacatgtaccctaaaacttaaastataataataataaaattaagaaaaaaatacatgtgtaccacatgcaaaaaacatgttttgtttcttaaatgttacttcatagtataatgctgtttcgtgactcgtttattttcttggttttttgggacatctttctatgctaataaagataagtgctacttttagtagctgtacactgtcttttaaaaaaatgaatagcctttattgtgaccgggtcgtgaccatgaatatgccataatttattttaaaaattgccagtgttaaatatccaaatgacacataggtcatttaaattttttcagtgttttcagttttatagtaaacaggcttatatgtgtcttctggctgcttatttctgttggataaaatttggtaatgaaaatcctggtttaaaaggcatgaatattttttaagactttgaaaaacatactgctaatcgactcctttacattttatttcaaactgtggggtatatgagtgctt

SEQ ID NO: 902260 - DNA, 563 bp, Homo sapiens
ataccatgcaggggataaataaatatttgttgctattagaataataaaacttwgcaccctactgagatttttcctttttccagaacccttgtgcaccctgaccagtgaacttcagctgatgataaaccaacgcctagctcacagtatagagtaggcagttaataaacatttactgtatacattgatgtctacctagtgatgtctctcccataggcttataacattatttaactttggtacatgttcttcaactagaaggtaactatggaagacagaaacttatctgccaattctgtatcccccaaagcttatagcatgagattagaggctcaagaaacacttgctaaaaaaatagcaaagagttggctgtgtctatgggacagaatgaccagagccccaagtgtgtctctagtacagcctccaattgagctcatcctataggaaacaatgcaaaacctaacaaccaagtccagtggaggtaattcaagctccaggcaaccagaagcaatttctcccaactctctgcaatacccacctctgctctccgctctaccaggccagga

SEQ ID NO: 902261 - DNA, 579 bp, Homo sapiens
agtgtcatacatcctggaacgggggagccacatggcactgagagcgcagatargagatcagggaaagcttcccgggtgaaggcagcagtgccttatagtgctatgtctgccagctccatataatcacacgtggagaccaatctcagtaccatcactctcctgctgggagatcttgggctagggacttcaaccctcagcctcagcttcccagtctattaagcggggatcatttgatctccctcttaaaattattttaaaaatttaatgagacaatgagtagaaaatgttgtagcgcattgcccagcacatagtaaatgctcactaaatgccacatgacttccttaaatatctttcatccaaaaactatctcttacacacttgaaattgtatgcaaatattcctgcccgacctgagccaattctatttgaaaaaaagcaaagagaagttaagtctgtttatacaacacacaacagatctaggacaatactgaatagaaacactgtgcttctgatgtgatagtttgtccttaagtacaattgggtcttgaagaaaaatcctggggttgaggaagacttgatt

SEQ ID NO: 902262 - DNA, 638 bp, Homo sapiens
cacctcaagtatgtaaagaaacaacaataaactaagcttaaagttattagaaggaagaaaatacaaagataagtgctgaatgaaagagagsctagaaaaaaatggaaaatattcacaaaactaagaattgattttttaaaagataaaattgacaaacctgtagctagattacaaaaaaaagagaaatctcaaataataaaatcaaaacgaaagaggacagacattacaactgatattgtagaaatacaaacgatcattagagactgctatgaacagctatatgccaaaaaataagaaagaaaaaaatgaataaatgcttaaaaatatacaaacaactgagaatgaatcatgaaaaaatagaatatatgaacaaataccaagtaagtagattgatgaagtaaaaagtctctcataaaaggaaagcctagggcctgtgttattactgctccattgtaccaaatatttaaagaattaataccaataatctcaaatttaaccaaaaatataaagaggagcaaacactactaaactaattttacaaggacaacattaccctgataccaaagtcagacaataacactaaaaaatacaaaattgcaggccaacatccccatgaacatagatgcaaagcatttacc

SEQ ID NO: 902263 - DNA, 578 bp, Homo sapiens
aagtgcatacaaattagaaaggcagatgttaaattgtctgtttgcagatggcatgatcttatgtacagaaaaccttaaagtctccaccaaaagacagaaatcatgaacaaattcaggaaagtttcaagatacaaaatcaacatacaaaaatcaattgtgcttctatatgttaacaatgagctagttgaaaacaaaatcaacaaaataatcccatttaaaagagcatcaaaaataataaataggaataaagtttaacaagatgatgaaaaatctatacactgaaaagtacaaaataatgatgaaagaaatcagagaagatacaaataagtggaaagataccccatttccattgcttggaagaatgaatattttttgaaatgcccacactaccaaaagcgatctacagattcagcacaatctcaatcaaaattctaatagtatttgtaacagrtacagaaaaaatgttaaaattcacatggaaccacaaaagacccataatagctaaagcaatcttaagaaacaagaacaaagctggcataatatctgatctcaaattatgtttcaaaggtatagtaatg

SEQ ID NO: 902264 - DNA, 604 bp, Homo sapiens
tcgcctggataatctgcactcraactccacccaagccaggttaatttccactgtgtggtgatttgaaaggacctatgtggcgtgtgcggtggcacatatgatctgcactgttaatgcctttttatgagtctatccctcttactggactcaagctgcataaggcaagagcctgctcgcatctcagtgtctccaaccacagcctaacacctcaccccacgcaatcaacgtcaatgttatgcttatggacttcaagcaaaagccttctcttgagaatgtttaaaagactgcgccactgcactccagcctgggcaacagagcgagactctgtctcaaaaaacaaaaaaacaacaaaaataaacaaacaaaaaaaccaaggccgggtgcagtggctcatgcctgttatcacagcactttgggaggcagaggtgggcagatcacctgaggccaggagttggagaccagcttggccaacatggtaaaaccccatctctactaaaaatacaaaaattagccaggtatggtgttgtgcacctgtaatcccagctacttgggagggtgaggtgggagaatggcttgaacccttgaactggggaggtggaggttg

SEQ ID NO: 902265 - DNA, 666 bp, Homo sapiens
ttgctagtgtcaaagggtggtgctgtaagttataatgctttaaaaccaaattggctcctaagaaatatgtcattagattatcaagttgttgataaaatactggtggtaacatttattaagctcggaacataaacttatgaatcttatttttacagctttttccttccttccatttattgtgtaggcagtctcttcttgccatcatattttaagtaacaaattggaatacactatttattgactcagatgttctcagtgagtgctacagctattcccacaaaagcacgttttccagagaatctatgttaattctttatacacctcagatatttagatagtccagcaaaataaccacatcaaacgatcccatgactgatggatgaatttaaattataagattgctttcataactactgaattcttctatctggatatgaaaatagatattttctataaatcagagttagtatacatttcttagccaaatggctttccatttgttctgtgtcatctacaaataacatgttatcaaaaatctcactctactgaaatgaaagttttatgtctttagagagaatttttwaaaaaatatcagtcaaagtacaaactccatgttaaaataaaatgttgttgaacaacaaatatttcttattataatagtaattt

SEQ ID NO: 902266 - DNA, 618 bp, Homo sapiens
acctcttggaactcagttttcccatttgtaaagtgatatcartacttccggtgtgggctcaggtttgggccctgtgaattgtaaagctctatgcacatgggaggatgtatgattataagttgtgttgctattacttgtattgctaatatcttgctattattgaaatatgcccaaaccttaacatttcagtgactaaagagcaaaaccagtgttcactctgacatagtttttttaaatttttcattcattcactcattttaagtttttattgtgtaaactttcatcaaacatgtacaaaaatagactgccacaaggaatgcccatatatatccatccactgatttcaaattattgccaactcatggcccattttgtttcatctacacccctacccacttacacctcctaaaatattttcaagcaaattccgagtcatttcaactataagaatctcggtgtatatttctgaaagataaagactcctaaaaaattaaatcagtactattattgtaccttgcccttctctgccaaaaaaacttaatttctttcttttcagtttatttagtaagctaaaatttagtaacagggaggccgaggctggtggatcaactgaggtca

SEQ ID NO: 902267 - DNA, 671 bp, Homo sapiens
tgtgccttcttgaaattatcttttawtaagtgtttttgaattgtgggactgagagccatatgccattgcatgagagatcttatgggtcaaaggaaaggaactagtatctgttgagtacttgttaagtaccctgtgcattatgtccattatctgcattatcctatttaatcctcaaatgatgcagtgaaatgggcatcattattcccacctcacagatgagaacatggaaggttggggagaggttaaatgccttgtctaggttcaggtgttacataagtagttgagactggaatccaaatctttctagttcaaaagcttttaatttcataataatgacttgtagggaatttcagtttgcttgtttcttccagaaatatttactgagcatgtaaggtaaacacatttttctttaaataatcggaagtgtgtattatgtatgcaactcaggtagagctagtgagatgatgaaatttccagtggaaatttccatgggagatgcactcacagctgctccccacttcctcttttatcagggtcttcctgctaactcctggctcctggaggaaaatgttgctccttctcataagtggttttgtggttcccttgtatagcttgctaccatctttttttagcaagagccagagacagctgtcactaccatgcaattactt

SEQ ID NO: 902268 - DNA, 614 bp, Homo sapiens
actgagagccatatgccattgyatgagagatcttatgggtcaaaggaaaggaactagtatctgttgagtacttgttaagtaccctgtgcattatgtccattatctgcattatcctatttaatcctcaaatgatgcagtgaaatgggcatcattattcccacctcacagatgagaacatggaaggttggggagaggttaaatgccttgtctaggttcaggtgttacataagtagttgagactggaatccaaatctttctagttcaaaagcttttaatttcataataatgacttgtagggaatttcagtttgcttgtttcttccagaaatatttactgagcatgtaaggtaaacacatttttctttaaataatcggaagtgtgtattatgtatgcaactcaggtagagctagtgagatgatgaaatttccagtggaaatttccatgggagatgcactcacagctgctccccacttcctcttttatcagggtcttcctgctaactcctggctcctggaggaaaatgttgctccttctcataagtggttttgtggttcccttgtatagcttgctaccatctttttttagcaagagccagagacagctgtcactaccat

SEQ ID NO: 902269 - DNA, 581 bp, Homo sapiens
tttctgtttataaataagattgccaggctagtgggtttcaaggttactcgattgctaatataaaatatttatgcaaaattttactggtattcttagacaaatggattgcaataaatacaaataatataaactctatcaattgtcaaaacatacgcctaaaatattcatgaaaatattcgtcatgaaaatcggatcactacagtctgtataattacagagataattcatataacaaaactaatccgtttgatgattattttattcatttaagaaacagcattttgtcaaagtggtgatatagatatgtgatctttttttgcaattaacatgttaaagttctttcagactaacacttcatgttcttacacgttttgtttaaaaaaaataaaaaggtggtttgctgacaacttatatcctgatgttcattgatccaaaactagcccttaaatgtataatgcactgcttgtacaaactctgataaaaataatttaataattgaaaaatctctgatcatctaaaaaaggtctattcacacagatgatagggctayaatattcatattccacatattttcaagaaac

SEQ ID NO: 902270 - DNA, 615 bp, Homo sapiens
ataagaagacttctaaaaatatggataaaagtgaaaataaaaacacttgccaacacactaccaagtaacagttattatcatattgtaatttattatgatagcattttctgcatgaatatatatacatttcttcctttcaagaatagatttttactcatgaatcccttttcacttaaaacatcatgactttttaatgtcattaatattatcttataatctgcattagaataactatatatcattctatgaatgcaccattaattgactccagttgttcatttagacgtttagagacttttaatgagtattccttatcattgtgtgtatgtgttatttctctgtttaaaatggggggtttgcttctgaatttctttgggaacttaatttaatagtatattactagtagggtttcaactttttaatttactcatatattacaatttcaaatttcaagaaacaataggagttaggttttggttgtgtgagcatmataaaagaaggtacaccacgaactcctcacattcttactaacttatagtcctttgcatttattttgcatatgtttttaaacagaaaagaaaatgagtttctttcttattgtcaagtgaatatatt

SEQ ID NO: 902271 - DNA, 451 bp, Homo sapiens
atgcccttgaattatacctttgaccatggttggacatagaatatttctgaaattgagccagaatagcagaaggaggaagaggaaggagaggaaagtctaagcaaggatgttctgaaaatgggggataaagagaaggatgagcagacaaaggaaaagaaatttcaggagtctgtgttcaattcagaaattattttagacaattttttgtttctcttacaaaggaatgactttatcagaacctcttttagaggtttctaagtaccactgaaaatagctctaccacttgtgttttgttttgttattttagagcgaactttttytaattgagcatgcagataaactagtttatgtatttcaaaggtacaccattctggccactgtaatttggagtcattgcaagttatgtgtgaccaattttctaaacatttgcatgaagaggtgccgtaattat

SEQ ID NO: 902272 - DNA, 578 bp, Homo sapiens
ttcatctatgttgtagcatatatcagtattttatttctatttattgctgaataatattttggggctataccacattttatttatcaattaattgatgaacagttcaatcatttccaatttttgaccatcatgaataatgtatgaaaatctgtgtacaaggtttcacatgaacctctatgtttatttgctgagtacatatctatgaccataattactgggttatatgacactctatgtttaatcttttgagaaactaccagactgtttcacaaagtgactgcaccattttacattcccatcagcaatatgtgaagatcctaattttccatgtccttggcaacagttattagctgtctttttgttttcttataatcctctaaataggtacgcagtggtatctcattgaggtttggctttgcagtcttctgatggctaataatactgaatatccttttatgtaattattgactattcatttttctgttttggagaaatatctattcagatcctttgctcttgttatatctctcaatctcttaarcaattcatttgtctcctgtgtttcttgttaggacccc

SEQ ID NO: 902273 - DNA, 598 bp, Homo sapiens
tcctgcctcttgattaaaactcaagtaaattccatagcttttccaatcactcgtctttttttttttaccgtcttatttacatttttaaacctcacttccgccccagcattgcgtattctttgtgccataytttcctgccttttaataaataattcactgattttatttatctcctatcttccttcactggtaagttccttgagggtaaggaccttttctttttctgtgtagtgtatgtatgtgtgtatgtgtgtgtttgtactaatttattctttgaacctgaaacagtggctagtacactggaggcactcaagaaatatttgttgaatggaaaagtgaattagtgtattagtctgttcttgcttgctataaagaaatacctgagactgtgtaatttacaaagaaaatagatttaattggttcacagtttcacaggctgtacaggaagattggtgggggaggcttcatgaagcttttacttacagcaaaaggcaaagcgggagagggagtcttaccatggccagcgcaggaggaaaagagaaagtgggcaggggcttcacacttttaaacaaccagatctccagagaacagcactaga

SEQ ID NO: 902274 - DNA, 605 bp, Homo sapiens
acttaaatgtcccagtctaacagctttgaagagagtagtggttctcccagcacacagctggagttctgagaatgggcagacagcctcctcaagtggctccctgacccccaagcagcctaactgggaggcaccccccagtatgggcagactgacacctcacatggctgggtactcctctgagacaaaacttccagaggaatgatcaggcagcagcatttgcagatcaccaatatccactgttctacagccacggctgttctgcagccaccgctgctctgcagccaccactgctgatacccaggcaaacaggatctggagtgcacctctagcaaactccaacagacctgcagctgagggtcctgtctgttagaaggaaaactaacaaacagaaaggacatccacaccaaaaatccatctgtacgccaccatcatcaaagacaaaagtagataaaaccacaaagatggggaaaaaacagagcagaaaaactggaaactctaaaaagtagagcaccgctcttcctccaaaggaacrcatctactcaccagcaacggaacaaagctggatggagaatgactttaacgagttgagagaagaaggcttcaga

SEQ ID NO: 902275 - DNA, 644 bp, Homo sapiens
cacattcctaaaggagaggataatttcattcatttaaaacaacaacaacaacaacaaaaacatttctttgttcttcctagaaattactattagcattttttgctttgccaagacagattttaaggtaggagtaaatcttaaggtctttttgcacatatatttctaagaaagttaagagagaaaatgaaatcagtaaacaaaatgtagggtttccctcaaagtcacatgggcatcattcatatccattaactactgctgcattaaaactcattctactataaagacacatgcacatgtatgtttactgcagcactgttcacaatagcaaagatttggaaccaatccaaatgcccatcaatgacagactggataaagaaaacgtggcagatatacgccatagaatactatgcagccataagaaaggatgagttcatgtcttttgcagggacatggatgaagatggaaaccatcattctcagcaaactaacacaggaacagaaaatcaaacaccgcatgttctcgccyataagtgggagttgaacaatgagaacacatggacacagagagaggaacatcacacactggggcctgttgggggggttgggaggataggggagggatagcattagaagaaatacctgatg

SEQ ID NO: 902276 - DNA, 445 bp, Homo sapiens
gccagatttcttgagaactcactcactattgtgaggacagcaccaagtggatggtgctaaaccatttatgagaaattcacccccatgatccaatcacctcccagcaggccccacctccaatactgagaattacaattcaacatgagatttgggtaggggcaaatatccaaactatatctctattctgcaattctggagcacacagaattagggtttaaaaggtatattgtgcctcagcagaagaaagaagctgtgacaattggagctgtttgaaacctgttccacggggaggtgtgtggcacgtcattgaaagggatgaagagggccttctgtgatctttttatggatgtcatagaggagagtcacaaggacagagastaaaacaattatctatctttcctgccaactctaaggaagtctgggataataatctttctttctgata

SEQ ID NO: 902277 - DNA, 602 bp, Homo sapiens
ggtaaattctggtattattccttctgttcttaaaatacactttgtagtttgttttagatagattatatttcaattgctttacatctatttgttcactgcattattagacacttgagtaaaagtactaagcctttacagtacttagcataggagaggttcaataaatgtgaaaacataccaattaattaatacaatatttttattcttaatactttgtttaattctgtaaggcaggggaataaaagcacatagtctgatcatttaaaaatataccccaaataattgataaataaaagattttattctataactagaaacaagtatgtactcttagttctaactaaatgattttttaagaatattattttccttgtaaagattgaatttgtaatttataccttataagatattatcaatggtctaaatgggttttgaatttataagtgttcctttaaatattagatgtattacatcagatgccttctattacctttttgaactaccatgtggcttctgtcacaaakaaaaacattgtagacataaatcaaaatgttacattatgttatttacatgagactttatatatacactacttcatacta

SEQ ID NO: 902278 - DNA, 656 bp, Homo sapiens
caatttaacgtgttatcacaatgtgattttactttgcatttaacaaattactagtgtaagcttgaacatcttttactacatttatatttggatgtcttcatttgggaagtgcctatgccagttttctgcccacttttttagagtttttttttctctcagtgagttttttatacgctttacacttgagccctttaacaattattcatgctgcaaatatcttctctactctgtggtttacccttttactctgttaatagtaataaaccatttgttcctcttttgatgagtagaagttgctcattttaaaggagtcaaatttatcaatctttccctttatattagagctttatgtgacttggttaaaatatttccttacctcacggacatgaagatgttcgcctaaattatcttcttaaagatgaagaaataatttaagatttgggtgattatcttcctcctgccaaacacctgactgttctagcagtctgggaccaagctgaggttttctcagatgatctgcttgctagacaatccctgggtacagtcrttctggagtctcagcctggaggagggggtgtttcatcaggatagccacttttggtaggccctggactgcaactcttatcccttcagctctgaaactgccaaaagtgcac

SEQ ID NO: 902279 - DNA, 681 bp, Homo sapiens
taccgtgttatgcaacaagaatgctcccagcggatacggcyccttgatcttggacttcccagcttccaggactgtgagccaaataaatttatgttcattataaattacccagtctcaggtattctgttataacaaaacaaagtgggccaggtgtggtggctcatgcctttaatcccagccctttgggaggccaagctgagaggatcacttgagcccaggagttcaagaccggcctgggcaatgtagtgagaccctgtctctgaaaaaatccaaacaaaaccaaaacggactgagacactctgcgtttctatttattttcaccacagttcctttcagaatctgaaatttttatagttatatgtttataacatttcgcctacagtacccaacacagagagagagagagagagagacacacacacacacacacccctacctagaatgtaaactccagaaaagcaaagaccctgtctgtctaattcatagctgtcatctttgtgtggtggcctgtatatcctaaatgttgaatgagttcagttaaggaataccaggggatgccaagacagccaactgagagtttcctggttgtactatttgtaacaatctccttttcgttaaaacctactaagtgatcttttgatttagtaaaaaaaaaaaaaaaaaaaaaaaaatgctgggttt

SEQ ID NO: 902280 - DNA, 672 bp, Homo sapiens
ctgagaacgccatcatacgaatactgtctataaccaaggaactcatacagagtcttcacccatgaaagtatccasagccaaatcaggtacaataaacagtaaacattaaagttatatcctcaagggaaaaaaaatggaaataaagaaacacagttgaatcacaaataaattcaaaaataattaaaatagcctatccaaatgagaataaaccagaaaattaatttgaaaaatataataaaacaaggttttgtaacaccccccaaaaatcacaccagctcacgagcaatggatccaaatcaaaatggagtctttgtaataccacataaagaatttaaaaagttgattattaagttattcaaagagatgcaagagaaatatcaaaaccaacatttacaaagtttaaaaacaatttaggatatgaataaaaaattttctaaagagataaatatattaaaggaaaactaatcctaactcttgacagtggaaggcacatttagaaagttacaaaatgcatggaaagtttgagcaacacactagacaaagtagaagaaagaatatctcagctcaaagacaaggcttttgaattaacctactcaaataaaaataaaaaagaattaattagaataaatgaacaaagcctccaagaaacatgggattatgttacatggccaa

SEQ ID NO: 902281 - DNA, 678 bp, Homo sapiens
ttggccatgtaacataatcccatgtttcttggaggctttgttcatttattctaattaattcttttttatttttatttgagtaggttaattcaaaagccttgtctttgagctgagatattctttcttctactttgtctagtgtgttgctcaaactttccatgcattttgtaactttctaaatgtgccttccactgtcaagagttaggattagttttcctttaatatatttatctctttagaaaattttttattcatatcctaaattgtttttaaactttgtaaatgttggttttgatatttctcttgcatctctttgaataacttaataatcaactttttaaattctttatgtggtattacaaagactccattttgatttggatccattgctcgtgagctggtgtgatttttggggggtgttacaaaaccttgttttattatatttttcaaattaattttctggtttattctcatttggataggctattttaattatttttgaatttatttgtgattcaactgtgtttctttatttccattttttttcccttgaggatataactttaatgtttactgtttattgtacctgatttggctstggatactttcatgggtgaagactctgtatgagttccttggttatagacagtattcgtatgatggcgttctcagatgata

SEQ ID NO: 902282 - DNA, 594 bp, Homo sapiens
aactgctttggtagaagtgggaggtcagagattatcatgagatcataaccctctctctgtccctacaagaattacagaaatcttgggaaaagggaaatggaaggtaaatagagakttaagccaatcatatctagttctttagaagaagctagtctccagctgacatcttaaagagatacagacataaatttagatataaatatagatagatatagatatagatagatatggtatctttgtttgagccgctataacaaaataccacacactgggtaatttataaacaatagaaatttctttgttacagtttggtggctgggaagtttaacattgaagcacctgcttgtgaggggccagtctctctgcttccaagatggtgcctcgttgctgcatcctccagagggtgcagatactgtgtcctcacatggccaaacatacaagggcaaaaaaggggtgaactccctttgtcaacccctttaaaaaggcacctaatcccattcatgaggggggaaccctcatgactcaatcacctattaatgccaccataatgaagattaagttttaatatgaattttggaggaaacacacattcat

SEQ ID NO: 902283 - DNA, 657 bp, Homo sapiens
aagctgcaaatataccatcctgccctaaaagctcacagtctaagagaaacagacattcacaacaaataagcaagctggctcaggaaaatggcagataggagtcaggattcacttgcagctcacactcagacagagaagcatgtggagactaacatcatgaacttttgctccaagaactactgcaggaacataccaggaaagctaagataatccacagaccctttgaaagactcagtttgccactgcagggtccatgagacagctgaaaaactgtaagtgccctaggtgtgaaggggaaacacgtgcccccaaacacacattctcactggggaacctgaaggttcagatcacaagagaaagatctgaccatacttagagcagagacaaattcagattgctgagcaaaatacaagggtagaggaagcagtgggaaaagccctgtgagcactttcagcccccagggaagccattccattcctgactttgtttcacaggagtccttggggagagctgccagtggaattggggaaagaccacaggaagaaggaaacttccagstgaactctgtaacaatttcacccaaatgtgaagcttgctcacagtaactggaggagggagtgaacagggtgtgcaaaaagcacataagctgcagcaggc

SEQ ID NO: 902284 - DNA, 480 bp, Homo sapiens
catgagatctgttggtattataagggggartttccctacacaaactcctctcctctttgcctgctgccatccatataaaatgtgacttgccctcccttgccttccaccatgattgtgaggattcccccatctatgtgaaactataggtccaattaaacctctttctcttgcaaattacccagtctcggtatgtctttatcagcagaataaaaatgaactaatacagtaaattggtaccagtacagtgggatgctgctgaaaaaaataccccaaaatgtggaagcggctttggaactggttaataggcagaggttagaacagtttggagggatcagaagaagacaggaaaatgtgggaaagtttgtaattccctagagacttgttcaatggctttgaccaaaatgttgataatgatatggacaatgaaattgagactgaggtggtctcagtggagatgaggaactcctcaggaactggagc

SEQ ID NO: 902285 - DNA, 593 bp, Homo sapiens
tcttccaactgaatctgttaaccaactcccatgtgcctgtctgtaaagtgtgtataaacagtacatayatagcattattttggagtccagttataccagtttgaccccacagatactagtgcgtttataaatcatcatcatccacaacagccactgtatctacgttagtgaggctagatagtgtatagtaacttggaattgagttacattttgtattttaggaggtggatcttactaatcccaagacgtttagaaacctggctaagccaatgggagcacaaacagatgaacgattagctcagtataagaagcggtataaagactgggaggatcctaatggtaaggaactttttctgtcattggactttgtacccaagtttcaaaagtaagtcattatgtagcggtctgacattcctacatcctccttcaaattgcttatatatcatatctatatgtattatatgtccacacatatatgcagattattatagcagaggaatcaggtttgcatgccaacttatggccatgcttagaaggcattttaaatagcttatcagagtattggtggaaaactaagtattcctgctttgcat

SEQ ID NO: 902286 - DNA, 607 bp, Homo sapiens
agccctgcgtcggcctgcacttatagtacaaaccagtgctttagtcagtcctgccttgcccccacccaaggctcttgatggcaccttcctctcttctgctcttyccttccccacaaatcctctttcctgtgttcacagtgtgcccaagtccatccctcaggtgcctacaagaattcagacgttagtaagttcaagaccatgcctttagaacaggctgttgtaggaccaaatacaaattagaagcttaatgctttctctttagagtgtgggaagaatttttgctcttctcccttttcttaaagcatttaatttgaaaacttttatatttaaatattttctctgcttctttgaaaaatatataaatcatttttatcagttaactaggtcatttgtctttttcgactgaaaattgtctttatctaggatctggaaactattgtcttgaaatgtaaatcgcaagagtctatacaccctatgccacagtttttgtaggaaagtagggggctgccttcagcaggtacctggctcaacatttcaaaactacgtcttaccatgaagatgtgggaagtttttttgttgctgttgaatgttaccaattagaaaaccc

SEQ ID NO: 902287 - DNA, 472 bp, Homo sapiens
ctgtttctaggcaaccttgaatttccggctccctgagctccattttgcacatgcatctttctctcctctgttattacgtgtttgttgatctgactgatccttttggacaggtgtcataactaagccctttcctatagagttctcacttatgcaacactgcaagtatagcctttgttgacttgtatcggagttgccatctatacatgttaatgtatttgatacaaaatcatgcaccatgatataatgtgaaatacatagttattctgtgccctagatttctggctcagagcttctaacattctgtaacttcctgaatgataggagtgataggagcatcttttgstttatatacatacattttgttataatatttgattgtagtccttagatcctaacacagagcttctaagaatgtctttttgtatattaacaaagtgactggtggctgaaagcccctaggtaaccagagaaa

SEQ ID NO: 902288 - DNA, 677 bp, Homo sapiens
tgtgacatcaaatatgtatgttttatatctctcattaatttgaaaataatttgaatttcactaagtttcaggtcttgaaaactcrccagttagtcaaaacaaactcaccaatagcctaatccccatttatccctttttttcatatagtcaatgtttatttagatttcactgtttaccattttctttgcttacatgtcttccctcctgcccccaccatgagatttattgagcatacatatacttgacaaattaaatttgcatatatttatggtatataacatgatgttttgatgtatgcatacattgtgcaatgattactacaatcaagctaattaacgtggctcacgcctgtaatcccagcactttgggaggccaagttgggtggattacctgaggtcaggagttcaagaccagcctggccaacatggtgaaaccccttctctactaaaaaaaaaaaaaaattagccaggtgtagtggtgggtacctgtaatctcagttactcatgaggctgagacgagagaattgcttgaacctgcaagacagaggttgcagtgagctgaaattgcaccattgcacaccagcctgggcaacacagtgagactctgtctcaaaaataataataataataccaacacatttatcacctcatgtagttaccttttgtgtgtgtgtgtgt

SEQ ID NO: 902289 - DNA, 590 bp, Homo sapiens
agcccctctaactgtgcagtcatgcctcacaactttggattactgtggaggacaatgattctcacagtgtgataccagccctgtggacagattccatcctccactgatttgctgaaacactaaggcattttatcagcaaatctgaagagcctgtatctctgagtaaggggatttggcagctgtggctaactgtaggcgagtgtcatcaaggacttctagtgaaatttaacttatgaaagaagtgcaaaaacaccatttaagataaaactatttccagcccattggagcaaattgatgtactgaatgatcacatagcagagacatccactcatatgccctttatgcttgatgagacagtgtgaggatgccagcaagtaccctcagaaagtcagaggcacttagcctgctggggaagtagtaaaattccactggagcctcctgcatcttgttgctaggtccatgaacctaatcaatcatattttagaattctccaaggagatcagttagaatgcaacagccaggggaccctctgctgaattaacaccctattagagatrccagtggaaatgaataaaaatcagtttagtagc

SEQ ID NO: 902290 - DNA, 600 bp, Homo sapiens
tgccatgacatttgtagactgtctttgggacattaggagcgtcttttagcatattaatgtattataattagtgcataatgagcagtgaggatgaycagaagtcactttcatcgccatcttagttttggccggcttctgtactgcatccttgtttatcagcaaggcctttgtgaccggtatcttgtcccagcctcctatctcctcctgtggccaggaatgcctaacctcctgggagtgcagcccagtaggtctcagcctcattttatccagcccctattcaagatggagtcactttggttcaaatgcctctgacagatatagacgttgatatagataaatacaatccttatgaaatacctgaagacaatgtataaatgattgcagatcaaacagaaatacagaaaatgtggcattgacatctagttcccaaggggactgagaaaaagaaaaacagcctcttctctatgtcttaatgtacaattacaaaaaattccatacagcttgcatcaattaagctccttctatgtacctggcaccatgctaagagattaatgaacatagttcctgccttaaaggcttcccaatctagctgagaagaaa

SEQ ID NO: 902291 - DNA, 550 bp, Homo sapiens
aagtaccacttcacacccattaggatggctattatcaaaaacaaatattggtgaggatgtakagaaattggaacccttatacattgctgctgggaatgtaaaatgatgcccctactgtgaaaaaccatttagtggctcctcaaaaagttaaacatagattgaccatatgatccatcaattccatggctatgtgaaaacccaaaagaattgaaagcagagatttaaacaaatacttgtgatacagaatattttcttgacctctttgtgggactcgctacaggagtgccttgtttacttagcccaccccgttcaacccctcgcaggagggagcatgcgagtgaacatttgcaggaactggccgctttggcaccagcaggagcgaactctgtgtgggccctgcggcagcatccatatagggtgtctgtgaccccaaggccccagagggcgtattataatgctgtcttagctctgccatctgcagacagcagtgtgttatcagctcagtgggctgtttgcctcatcacatggggcagctgccctccactagtga

SEQ ID NO: 902292 - DNA, 565 bp, Homo sapiens
taggttttcagtgtcataaacactgtgcaaggaayttcctttatttttccctttgagacagggtcttgctctgttgcccaggctggagtgcagtggcacaatcacagctcactgcagctttgatttccggggctcaagcaatcctctgcacctcagccttccatatagctggtactacaggtgtgcaccaccacacccggctgatttttttactttttgtagagacagtctccttacgctgtccaggctggtcttgaactcctaggctcaagagatcctcctgcctcagcttcccaagtgctggaattacaggtgtgagccatgatgcccagccaaggaacattcttttaactaagcatttgaacatacccatgattttgtccttcaattagaatcccagaagtggaaacatcagctcaaagagtaggaatatctgaaggcttttgatgtaaacggactcctcaaaagttgtactgctttaaactccaataactagtgatccattttctccatgctcactaatgctgctaatcaacactgaggattaacttgttcttggattctc

SEQ ID NO: 902293 - DNA, 508 bp, Homo sapiens
aaaatacaaataaattggtaaatttgaaaaaatacaaataaattggtaaataatgaaaaaagatgttaggaatacaaagaaaaggaattatgaaaccaatatttgggtaaataaagcaacttttagttcagtaagtgactacaatgtgcctggcacggagtaggataaataaataataatatttagtccacagactactaaaatatattataatcctggtgagaaaaatatacatatacataaacatacatggatacatatgcatgtacatgcaggtacacacatgtacacataaactgtgtctattatgatgtgtgaatatacaaaaattttgtggggaacttaaggaaagagacgagagaatgcataaaaatggaraagaaataaaactaaagtaattcaaagtaagttataaattgctgatgtccctgaaataatagataagtattgatactggttatgactgtccaaaggaaaaatatgcaattataaaaaaaattacattaag

SEQ ID NO: 902294 - DNA, 625 bp, Homo sapiens
tcttattgttataaactatatgacttgataactgtaaaaggcactaaaartaaatcttacatagatttcatctatccccataattagcagtactttctccctccagtgaattcagttttgaggggaaattgttttcttaactttaatagacactaactagcatgtcagaccttgcttggcttatcttcattcttttttttttttttttttttgagacagagtcttgctctgttgcccaggctggagtgcagtggcgtgatcttggctcactgcaagctccgcctcccgggttcatgccattctcctgcctcagcctcctgagtagctgggaccacacgcgcccgccaccacgcccggctaattttttgtgtttttagtagagatggggtttcaccgtgttagccaggatggtctcaatctcctgacctcgtgatccacccacctcggcctcccaaagtgctgggattacaggcgtgagccaccgtgcctggccggcttatcttgattctgtccctagctcttgtcactgcccagttgggtgactatagatatgtcacttcaccttgtgggcctttgttttcccataagtaaagtgagtagccagctgaattatttcatccaagcc

SEQ ID NO: 902295 - DNA, 653 bp, Homo sapiens
gtccaggaggaagtcaatttcctggtcctcaatggttaaacatagccggggctcagtgagggtgatgacaagagctggtgcttaccctgggcaccataagttctgttgttggatcatctggttgggagcttctggcccagagaaccatcgtactctggggcagtgtgccttccagtgattgcctcggcagagtggacatggatgcggaggtggcttgtttctcattggacaatcttttttaaagtgtccttgtaaaccacactgataacaagccctaccaggtgattggcctgctccattttctgtcctctctgaaccaccaaggtttgtttgtctgagggtcatgactaaggctgtggcctttctctgatctcacttttccttttgggcctgttcttcttggcccctattatagaacactgaagttgccaggtttaataatgcctccagattttgttcagggcccagggctcgcttttggagctttcttctgatttctgcagctgattgggtaataagcttaycttttagaatcaattgaccctctagtgagtcaggtgacagggaagtatattttcttaaggcctcccgtagccaatcgaggaaggcagaaggattttcttcctttccctgagtcatggtggacatcattg

SEQ ID NO: 902296 - DNA, 648 bp, Homo sapiens
cctgcgaaccttaaaaaactgcaaatattgtaaaaacagctcttgaaagaactgttctgacagttrccaggagggaaatgaaacaatgatccagaacaagaggcatgaaaaccagaacaatctcagacctttaaactgaaagttttacaacagttaaagatgaatgtaacttcaatctgggccagaccaaaagtacacatatacctctcctctcctcaccccatagaactccaatcctgcttcagttagggaagttacctgattttcaagtcattcctgatgtgcacgagctggataaatactttaatctcaattcgattcacttaaactacttttttcctttgacagtatccatatggaaaatggagtcatgacccagtttagcatgtcagaacctggaaagggtgagagagggcagcatggtgtgaggcatctgagtttgagtggtatatggagggcatctttgcagagctagggatctaatttgtgattaaggctcctgaaggctgcaaagaaaagggacttttactaattttgtgttgctgtagcccctagcatctaaacagtgcctggtacatagtagacagacacaaagtaagtgttgtttaatgaattaattaataagtaaagcatctgagagatagtttc

SEQ ID NO: 902297 - DNA, 620 bp, Homo sapiens
acttgcctctctcttgtctttttctacctggcctcggttaattccttctctgccaattgtcatcacatacactgaaagaatcatagtgtggtggctaaaagtataactctagagctmacttctcctctccacccctcaccagctctgtggccttggacaagctgcttaacattttgtccttcaaatgcctaatttgtaaaacgatagtaataactcctacctcctaaagttgttttagagaatgagtcatgtaattcatgtatgtactgtgctaaaaaatctagtggctagcatacaaaaaatgctcaattcatgctaacaaatggcagctatcattatacacatgcacacatcctttgtagctaccttcatacttcccctcttctcttccaattttggttatttttccacctccctcaaatcaatccaaatcatatctgacaaatgtcttattattgcaagtgataagaaatatgactatttcagtgaaaaggaaattgatttgcttttttttaaaaaaaaaaaaatttgtgttttgagagtcttgttctgccgctcgggctggagttcagtagcgcgattatggctcactgtagccttgaactccctgcctcaagcaa

SEQ ID NO: 902298 - DNA, 620 bp, Homo sapiens
acttgcctctctcttgtctttttctacctggcctcggttaattccttctctgccaattgtcatcacatacactgaaagaatcatagtgtggtggctaaaagtataactctagagctcacttctyctctccacccctcaccagctctgtggccttggacaagctgcttaacattttgtccttcaaatgcctaatttgtaaaacgatagtaataactcctacctcctaaagttgttttagagaatgagtcatgtaattcatgtatgtactgtgctaaaaaatctagtggctagcatacaaaaaatgctcaattcatgctaacaaatggcagctatcattatacacatgcacacatcctttgtagctaccttcatacttcccctcttctcttccaattttggttatttttccacctccctcaaatcaatccaaatcatatctgacaaatgtcttattattgcaagtgataagaaatatgactatttcagtgaaaaggaaattgatttgcttttttttaaaaaaaaaaaaatttgtgttttgagagtcttgttctgccgctcgggctggagttcagtagcgcgattatggctcactgtagccttgaactccctgcctcaagcaa

SEQ ID NO: 902299 - DNA, 671 bp, Homo sapiens
gggggaaataaacatgtcttcacatagtggcaggagaggggagaagaggacgtgaacaygctttttaaaaagcgggattagggggatgggtctaagccattgaaaccacccccatgattcaatcacctccaaccaggctcctcctccaacaatgaaaattacaattttacataagatttgggtggggacacagaaccaaacaatataactgttcaatgtctttttgtttcaacttgaacagctaactttatatcttgtgtaagaaagatctcgtggtgatgaactttcccattggttgtctgggaaagccttatctctccttcattataaaaggataatgttgctagctacagaagttttggctgtcatttttcttttctgtcagtgctttgaatatattacctcactcccgactgccaaggtttctgctgagaaatccaatgataatccatagacattcccttttatatgattcgttttcttctcttgataatttttataattatttatttttgacttttgaaaatttaattatgttgtatttcagtgtggttctctttagatccaaattcctggagattttttggcttcataaatctgaatgtccattttccttcttagatttgaaatgttatttcaaattatttctttaaataagctttctgcccttt

SEQ ID NO: 902300 - DNA, 590 bp, Homo sapiens
gctttggtagaagtgggaggtcagagattatcatgagatcataaccctctctctgtccctacaagaattacagaaatcttgggaaaagggaaatggaaggtaaatagagakttaagccaatcatatctagttctttagaagaagctagtctccagctgacatcttaaagagatacagacataaatttagatataaatatagatagatatagatatagatagatatggtatctttgtttgagccgctataacaaaataccacacactgggtaatttataaacaatagaaatttctttgttacagtttggtggctgggaagtttaacattgaagcacctgcttgtgaggggccagtctctctgcttccaagatggtgcctcgttgctgcatcctccagagggtgcagatactgtgtcctcacatggccaaacatacaagggcaaaaaaggggtgaactccctttgtcaacccctttaaaaaggcacctaatcccattcatgaggggggaaccctcatgactcaatcacctattaatgccaccataatgaagattaagttttaatatgaattttggaggaaacacacattcat

SEQ ID NO: 902301 - DNA, 589 bp, Homo sapiens
aactctccactctttgaaactaacaaacaaacaaaaaaaaaacaaaaaaataaaaaagatagttctcatgagctttggtcatttaaaagtgtgtagcgacagggcacggtgactcacrcctgtaatcccagcactttgggaggctgaggctggcggattgcttgaggtcaggagttcgagaccagtcaggccaacatggtgaaaccccacttctactaaaaatacaaaaaaatttgccaggcatgttgacgtgtgactgtaatcccagctactcaggagactgaggcaggggaattgcttgaaccggggaggtggaagttgcagtgagccgagattgtaccactgcactccagcctgggcgacagagcaagactcagtctcaaaaaaaaaaaaaaaaaaggtgtgtagcacgccgcccccaacatcgctctcttgctcccgcttttgccatgtctagtgactgctcctattttgccttcgaccatgagaaaaactccttgaggcctccccagaagcccagcaatgctggcgccatgcttgtacagcctgcagaatcatgagccaattaaacctctttctttataaatta

SEQ ID NO: 902302 - DNA, 645 bp, Homo sapiens
ttgttcatttctttttattctttttcacacataggctcaaaataaagggatggaggaagacctaccaagsaaacggaaaacaaaaaaaaggcaggagttgcagtcctagtcttggataaaacagactttaaaccaacaaagattaaaagagacaaagaagaccattacataatggtaaagggatcaattcaacaagaagagctaactatcctaaatatatatgcacccaatacaggagcacccagattcataaagcaagttcttagagacctgcaaagagacttagactcccacacaataataatgggagactataacaccccactatcaacattagacagatcaacgagacagaaagttaacaaggatatccagtaattgaactcagctctgcaccaagcggacctaatagatatctacagaactctccaccacaaatcaacagaatacacattcttctcagcaccacaccacacctgttcccaaattgaccacatatttggaagtaaagcactcctcagcaaatgtaaaagaacagaaattgtaacaaactgtctctcagaccacagtgcaatcaaactagaactcaggattaagaaactcactcaaaactgctcaactacatggaaactgaaaaacctgctc

SEQ ID NO: 902303 - DNA, 668 bp, Homo sapiens
tccaaatgatgagaacacatggacacattgrgggaaaaacatatactagggcctatcagacggggtagggtaggaggagggaaaggatcaggaaaaataactaatgtgtactaagcttaatacatgagtgacaaaatcatttgtacaacaaacctccatgacacaagttttcctatgtaacaaacatgcacaggtatccttgaacgtaaaataaaaattcagtaaatattttttaaaaaaagataaacaggcagaggctatatttttaaatgattttattttattgtggtacaatttataatttcacaaattaatgacaaaataataaattataataaaagtcattcgttttaactttaaaaaatcctattccaacacacacaaaaattgacaagtgggacctaattaaactaaagcgattcttcacagcaaaataaaccagcagagtaaacaacctgcagaacgggagaaaatactcacaaaaaaatgcacctgatgaagatctaatatctaaaatttttaagtacttaaaacagattaacaagcaaaaaacaaataagcccattacaaagtgggcaaaggacatgaacagacacttctcaaaagaagacatacaagtggccaagaagcctgaaaaaatgcttcacatcattcatcatcatagaaat

SEQ ID NO: 902304 - DNA, 565 bp, Homo sapiens
cataaaataatgctaacatttctaaatttaatccaacaccgaagggttgtttttgtccttctcctttcacatttatatcttctttaaaagaacawattttaataaaattgatcctatgtctactgagtttacctggagagcaagcataagtcattcacctcctattttgaaactacttgaattgagatgctttctcatatcccaggtagcttctccttcttttaggtctatgtctattttgtctattagtctatttataatagactatctaaccaaatatatcatttatcagggaagatacctagccagtttttatgaaaagcaatttgaaagctactgtaacaactgtgatggcagcagcagactgcctggagcacccactgccatgatgccagccactgcagggagagcacagggagaaggtgggtagcccacctctgtagcccaccaccctgagggctgccaggatggggctggcctgtgacacctgctggtgggggagtagtgcagttaaacagaggggggtcctgaggcaaagctggacctggggcagtgccgcacttgc

SEQ ID NO: 902305 - DNA, 640 bp, Homo sapiens
acttaaaaactagacagaagaattctcagaaacttctttgtgwtttttgcattcaactcacagagttcaaactttcttttgattgagcagtttggaaacagtctatttgtagaatatggaaagggacatttctgagtggtttgaggccaatgatgcaaaaggaaatatcgtcaaataaaaaccagacagaagctttctgagaaacttcattggaatatgtgcattcatctcacagagttgaacctttcttttgattgaacagttttgaaacactctttttgaggaatatgcaaggggatatttggagtgctttgaggcctatgtggaaaaggaaatatcttcgtttaaaaagtagacagggagttggagccaagagggctgtgtaggaacaactctagtctaagctcccatcatgagtgatgcagaagatgggtgatttctgaatttccatctgaggtatcacgttcatctcactagggagtgccagacagtgggtacaggacagtggttgcagcttaacttggtgagctgaagcagggcaaggcattgcctcattcgggaagcacaaggggtcaaggtgttccctttcctagtcaaagaaagggttgacagactgcacctgagaattgggtcactgccc

SEQ ID NO: 902306 - DNA, 665 bp, Homo sapiens
caaatttccacttgcagattctccaaatgtgtgtttcaaactgctcaatctaaagtaagtttcaactctttgaggtgaatgcacaaatcacatagaagtttctcagaatgcttctgtctagtttttatgtgaagatatttcctttttcactagaggccacaaatcgctccaaatatccacttgcagagtctacaaaaagagtgtttcaaaactcttcaatgaaaagaaagtttcaactctgtgagttgaatgcataactcacaaagaagtttttcagaatgcttctgtgtggtttttatgagaagatatttccgtttccagaacaggcctcaaattgctccaaatatccccttgcagattctacaaaaagagtgtttcaaagctgctcaatgagaagaatggttcaactctgtgagatgaatgcttctttgtagtttttatgtgaagcaatttccttttccaccttaagcctcaaagcgttccaaatatccactttcagattctacataaatagtgtttggaaactgacgaatcaaaagaaatgttcaactctgtgagatgaatgcacatatcccaaagaagtttctcagwatgcttctgtctagtttctatttgaagatatttccttttccaccataggcttcaaatcacgccatatatccact

SEQ ID NO: 902307 - DNA, 665 bp, Homo sapiens
caaatttccacttgcagattctccaaatgtgtgtttcaaactgctcaatctaaagtaagtttcaactctttgaggtgaatgcacaaatcacatagaagtttctcagaatgcttctgtctagtttttatgtgaagatatttcctttttcactagaggccacaaatcgctccaaatatccacttgcagagtctacaaaaagagtgtttcaaaactcttcaatgaaaagaaagtttcaactctgtgagttgaatgcataactcacaaagaagtttttcagaatgcttctgtgtggtttttatgagaagatatttccgtttccagaacaggcctcaaattgctccaaatatccccttgcagattctacaaaaagagtgtttcaaagctgctcaatgagaagaatggttcaactctgtgagatgaatgcttctttgtagtttttatgtgaagcaatttccttttccaccttaagcctcaaagcgttccaaatatccactttcagattctacataaatagtgtttggaaactgacgaatcaaaagaaatgttcaactctgtgagatgaatgcacatatcccaaagaagtttctcagawtgcttctgtctagtttctatttgaagatatttccttttccaccataggcttcaaatcacgccatatatccact

SEQ ID NO: 902308 - DNA, 646 bp, Homo sapiens
tttgccctccacatacatttctccatgttattttgttgtctactagaaagaaaggaaggaagataggaaaggaaggaaggaggaagtgggagacagggaagcaagcagtcagggaagttttctaaggacatgtgcctcgagaaccctgaccacttccacataatgaaaggttaagaattaataagcatttgtgcatttgagcatgtaatataccaggaactgagttcttagatatagtagatgcagtgtttgttgaaaaagacaagatttctgtccatgagtttaccagcttatttctagttggtcctctcagccaaatgaaatatatgaggtgtctagctgctctcaattttgaatatattttttaaggtttcccttgttcaatcttgatttcctatacagtgctctaagaagtgaataccctgtttttgtactagaatattttttcctgacctccagaaaaaaatcatcgtgtaagttctaaactaaatttgctctcggtttctgttattctttgtctaagtcctaagaaaactttccttagtctctcagattcatactctagtttctcttttttaaatattgaaaccttgaccaaagccacttaacttctgccaaaaaatttaracattcattgtttaacaat

SEQ ID NO: 902309 - DNA, 642 bp, Homo sapiens
tccttgagtcatgatttcagtttacgcattgcacattatgggcaactatctcatctttgagaaaaaaataaacataaatgattataaattgkcacatataatacaaaagtgatattatggtcactatgaggctttttttgagaattgagtaaagtcatgaatataaaacatcaaaaacagtgtctgtcatataagggacattcaaaatatggtgtcattattcagtaggtgctctcagattgccaaacttttatttgctaaggaattatgattaattcattcaatagagcttgaaggttatatttgaaattagtatttatttctcaatctaagcctatctcaagatgatcccagctccagcttcttgatcatttttgtatttcccttatgtgcaagaggcacagaatctggttttaccaatcccatagtgtccagtgtaatgctaagatacaggaatttaagcaagtgttccatcagctcaaaagataattttctttttaagagatgatctccaggtaattttatttttaacatgtgcttgtattgagcaaatatttattgggcaaatattatatgccagcaattcagcagcaaacaacatatcaattctctgctgtcactgagccttactttgcagtgggg

SEQ ID NO: 902310 - DNA, 642 bp, Homo sapiens
tccttgagtcatgatttcagtttacgcattgcacattatgggcaactatctcatctttgagaaaaaaataaacataaatgattataaattggcacatataatacaaaagtgatattrtggtcactatgaggctttttttgagaattgagtaaagtcatgaatataaaacatcaaaaacagtgtctgtcatataagggacattcaaaatatggtgtcattattcagtaggtgctctcagattgccaaacttttatttgctaaggaattatgattaattcattcaatagagcttgaaggttatatttgaaattagtatttatttctcaatctaagcctatctcaagatgatcccagctccagcttcttgatcatttttgtatttcccttatgtgcaagaggcacagaatctggttttaccaatcccatagtgtccagtgtaatgctaagatacaggaatttaagcaagtgttccatcagctcaaaagataattttctttttaagagatgatctccaggtaattttatttttaacatgtgcttgtattgagcaaatatttattgggcaaatattatatgccagcaattcagcagcaaacaacatatcaattctctgctgtcactgagccttactttgcagtgggg

SEQ ID NO: 902311 - DNA, 628 bp, Homo sapiens
caattataatcaagtgccaaacaaggaaatgccagtattattattttacctacaaaatgagcaaagatgtttagaagtacaatagaattcagccctgctgagggtaacaaaaggagggtacwtttccggtgaggctttgtgcagaaggcaaattaataaagggagcattcagtaattacacctctaggaatcagccgtacgaaaatgcaggatgcatttataaatacatacatacacaaagatttatgtatgaagatattcagcccagccttatcttttaaattatcatctaaatatcaatagcagaatgggcgagatatctacacaccaggattcatgccaccatgccaccatgaatcactgggaaaaaacggtgatatataagcatttagggatgtaacatgttcatcgaggaaaggaggctacaaaagtaatgtctattttgagttttaaatttttcatgtaacgatttagaaactcatctaatttgataacgtgacttaggcaaatcattcaaatctttttgcgtttcctctgcaatggcgattgtggaggttaaatgggataactggcgttgaaacgttccaggcccatgagcaggactcaatgttccttcccttccccttta

SEQ ID NO: 902312 - DNA, 600 bp, Homo sapiens
catcacagggctctgtgcagacaacccccagcaccagcccagagcacagtagttctgctgggtggctagatccagaaaagaaataacagtcactgcagtttggctctcaggaagccacatccctaggggaagggggagagcaccacatcaagggagtaccccatgagacaaaagaatatgaacatcaggccttgagtcccagatcttccctctgatatagtctacccaaatgagaagaaaccagaaaaataattctggtaatatgatgaaataagttgctttaccacccccagaagatcacactagctcaccagcaatggatccaaatcaaggagaagtctctgaattgccaggaaaagaattcagaaggttgattattaagctaataaagaagccaccagagaaaggtaaagtccaatttaatgaaataaaaaaaagatagaagatataaaggtaaaaatcttcagtgaaatagagagcataaataaaaaataaycacagcttctgggaatgaggaacatacttagaaaaatgcaaactacactggaaagtttcagcaattgaatcaaacaagtagaagtaagaacttcagaaattgaa

SEQ ID NO: 902313 - DNA, 548 bp, Homo sapiens
gctggaagcagtggctcacttctgtaattccagcacttagggaggctaaggtgggagtattgcttgagcccaggagtttgagaccagcctaggcaacatagtgagaccttgtctctattaaaaaattgtaaaaaaaatttttttaaatggttattttgtaaattttatgttcaaactctttttttattttagcttgttgcttatcttttattgatttttggacgttatatatcttgaatttaatctattttcctgccttcaatattgctatttttgccccaatttcttctatctcgatttgcttattgtgtgttttggtaaatggttctattgtatcacatatcttttcatttatgcttttaccttcactcttatatgtatataaagaccatacttgctctaaattatttaaagatacttttatgatttttttaggttgctttttaaatatttttacctatgattcrcttcagcttcattttgatgtagggaacttaattcttgcagttaatggtagataagctaccatttggcgaattacatcattg

SEQ ID NO: 902314 - DNA, 606 bp, Homo sapiens
gctggtgcagttttgagggcctgggagttgcttaggggttgaatgattactggcttttgagggtaagcttgtgatttatttggatagaattcccttaataatttagtagatttcctgtttatttgcttcccatcagttgcatgtgtaagtaactactgccaaagatcttgtttccatatagtttccaaaccgaactctgtgctctatgcaaccctcctctcaatagtgaccttgaagttgtctaaaacaacaggctttggggataatcctgggtaatcttaccattcctaccaggctagaacatgtcatctgctagggatcccgtaatgaaagatttttgagcagagatttgggaccaaagttttatatcttgctaattccaggacttcaagtcattacttaaaactgcttcagtttggagtttaggagaaattggtttttgtttgtttgtttgtttgtttttagccctgtaagggttactaaactctcagtctactaaaattgaagactacaagcagaaaatgttcctcctggaraagctgtattcccttccaagggcttgcagcccatcccattgtaaactggcggtcatctgtctcttgtggg

SEQ ID NO: 902315 - DNA, 595 bp, Homo sapiens
ccactggtaaacattttggaaaccagatggtgcatgcattagatagaagagacagtttargctcattttattattttattttattaaaacaattttagctattttaaatggaaaattttaaactgacaaaaagtaggtacaatagaataatgaacccctgaacttgttggaaccaaagttttaggcgaagactataatggggaaataggaaaacagtgaagatcagagaagtgggaggcgacaggttagacccagggaagcagaagaatatcagcagtgaaattctgtcttcaaagagcacatgaagaagacatctgaggctgggctctggatggctcatagtgagatgggccaaccactgataatagcaatgacataggagaggagatgacagtcttttaaacactttacacttattctcccaacaccactgtatgtgataagtactggtagtaaccctgttttggaggcatgttaacagagtcccagaaggctagtaagtggcagagaggggacttgaaccccggcaggtggcttctagagcctgcatgcttatccactaaactgcttctttaccttagaggtatatcagacc

SEQ ID NO: 902316 - DNA, 567 bp, Homo sapiens
cacctatctatcttcgtacaccatcagaaaatataattagagaaggaagtgtaatttaaatgataacttctaacacactgtaaatatgaagtttttttttycagggacattccaatatcatttgtcaacagacatcaaattaaactgggaaaaaaagaacatgactagtttatgtctccagtcaagatatttgaagttgtttattgaactggaattcaatctccataattctgtggcttcctctttttatccataataattcatctctataattaaagcctaatgaaccaaacaatttctctcttcataatcaagttcagctgtgtgaggggccaacattaaaatagaatctttccagtaaacagatccagtgctcctagctaaaaaaaaaaaaaaaaggaaaagaaaaagaaaaaaacgcacactttctttttctcttgaaatttctcatttattcccattaattagatttatttccttaaggatgctggaatgtcataaagagtatcaatagagactcctaataacctccagaactaaagaaaagcttcatttttattaaattaa

SEQ ID NO: 902317 - DNA, 756 bp, Homo sapiens
ctgtcagtatagagagaacacatccagcaaaggaaccagtctgtaragaggcccagaggcccgaacagcaaggaaatgcagtgcgaaaatgcaagtacatctatctgagacagaaatgccaagggttattgctggagaagtggcaggccctgtgctttacttaacacacatggaatcatttactgtctgctttctctgttagcttgaagtcaggaactgtgtccttgtggttcatccctacacccccccagtgccagacatagctggatgctcaataaatatctgttggctgacatttgagcactaggcttaattattgagaagagaaggttatgggttttttaacatggggagcttttccagaggcctctaccacagtcggcttcacatgcctttcaggaatccaagggttacacaggaacccttacctccagctttgtgcactctaccaaaaacacatccacactcatgtaggactttcacaagttcatgaaaggcaagcgtagtatattgactgcagccaagggaatgattttccagccctccctgaatccatatcctatgcaaagagactacacagctcctcccaggaggacacagaattaatatcctaccccttgaatgtggcccgccttatgacttgctttggccaattgcttgcagcagaggtgatactgtaccatggccattgtaggagagaagatttattttctcatccattgctaggattgtggttgagaagccttataacaagaa

SEQ ID NO: 902318 - DNA, 549 bp, Homo sapiens
ccagctgttaaaggctttattgtaaagaaatagagagttcacaggaatgttgggaaagctataggcttagcctcaaaatgtggtcaagaactagaagaagctagatagttggaaaatacaactaatgtcacactgcagggacaatctgtttcacggtcagagcgccagacaactaccgcaggattgtcaatgccaacagcgttgcatgcggccactgaattctcgaagctgtcattgctgctgggctctcaatatggacaccatgaaatggtatctctaacatcttttgtttttttaattttacattccaggatacatgtgcaggatgtgcatgtttgttacataggtagatacgtgccatggtggtttgctgtacctatcaacccatcacctagatattaagcccagtattcattagctatttttcccaatgctcttcctcctcccaccccactccctgacaggcytgagtgtgtgttggtccccaccctgtgttcatgtgttctcattgttcagttcccacttacaagtgagaacatgtggtgttta

SEQ ID NO: 902319 - DNA, 605 bp, Homo sapiens
cccatgatcctttgcagtcaatagcctttaccactggttacaagtgaccccccacaccccgagcctgccttctgtcactatagattaattttacctttctaagaattttatataaattaaatcatcctaattaaaggtacctaattatttgtggttatcattccctcagtgtaatggttctgagactcacctgtgttggtgcatttattagttgttccttctgttatactgctgaatagtattccattgtatggctatatcagaatttgtttatcagttcactgcttgggggacacttgggttgtttcaagttgttggctgttatgattaatgctattcagaacattaatgctcaagtgtttatgtggaaagatgttttttcttcttttgagtaaatacttaggagaagaattgctaggttataacaataagcatatttttaactttataagaaacagccaaattattttgcraagtgattgtacaatttacaatcccacccacaatgcatgagagttccggtttctccacatcctcataaactcttgatagtgttggtcattctaacattattagttttattgagtgtgtagagctatctcact

SEQ ID NO: 902320 - DNA, 556 bp, Homo sapiens
atgtattgtgagagggacctggtgggagataattaaatcatgggggtggtttccctcatactgttctygtgttagtgaataggtctcacgagatctgatggttttataagggctttccctttgtacttggctctcattctctctttgcctgctgccaccatgtaaggcatgcctttcaccttccgccatgactgtgaggcctccccagccatgtggaactgtgagtccatcaaacctctttcctttataaattacccagtctcaggtatgtctttattagcagtgtgagaacatactaatacaaggttcttcagcttccttgaaacccgattgggttgctagacattttggctttaatttctagggaaggtataagaagcctatagcattttgtgtgttggtctctgaacctgagcctggcacagatgtgagggtttctaccattaacacccgccccccttaggctcactggcttttctctagggctctgcttctgaccctggggagggagagtcaggcaagacctttcaaggcttccaaaagtgaccaacacact

SEQ ID NO: 902321 - DNA, 556 bp, Homo sapiens
atgtattgtgagagggacctggtgggagataattaaatcatgggggtggtttccctcatactgttctcgtgttagtgaataggtctcacgagatctgatggttttataagggctttccctttgtacttggctctcattctctctttgcctgctgccaccatgtaaggcatgcctttcaccttccgccatgactgtgaggcctccccagccatgtggaactgtgagtccatcaaacctctttcctttataaattacccagtctcaggtatgtctttattagcagtgtgagaacatactaatacaaggttcttcagcttccttgaaacccgattgggttgctagacattttggctttaatttctagggaaggtataagaagcctatagcattttgtgtgttggtctctgaacctgagcctggcacagatgtgagggtttctaccattaacacccgccccycttaggctcactggcttttctctagggctctgcttctgaccctggggagggagagtcaggcaagacctttcaaggcttccaaaagtgaccaacacact

SEQ ID NO: 902322 - DNA, 685 bp, Homo sapiens
agaacaatactaggctcaatgttgataagctcagttgctacattgctacaccaatgcaaaaccaaaagtgatggtagtattatcattttaattggtttttgctcattttaattgtatacatcaggaaatatggttttataaatcagtacacctattcttgagcctttgccatttcttaattttgcaaattagttttccattttaggttcaaaaatatagagttcactgtgtcatgggacttagaaggaatttgttttcttcctgcaatttccattgagttaacaaacagatcttggattcacttctgcagttctctagagttcctgcaagtgtctcctttcctattaacttgttcgtcctcagaggggtcatctttgagtcacagcttttggcatctgaattctagattctgctttttctaaatggaagtagttgatgagactcggagacctttgtacaaagcctctcatttcttggacttggagcctccatatttcagtaaagtgcttttacaaaactggaagtatcacttttctttttagcatctgtatgaggcattccttttaccactcaaagactctgtttatagctttcatttgatggtttattgtaattttaacttaygttgatcagtagttttcttgatacagaccacatcacaattgtaaatacaaagcaaccacac

SEQ ID NO: 902323 - DNA, 560 bp, Homo sapiens
catatctggctcttcataacatggagagctagtggtccttcctggatctgcgtgtcctcagtctaacccctgcagatctcccttcatgtgggkagggccttctagatggcacctgggctatgccgacttaaccctgcatttcaggctgatcccacacagcctccaaataggcactattgctctaaggtgtctgggagagaaaaggttggccccggttttggaaactttggggttttgcgtgtgtctaaaaagattatcttcagtagttttgctctcccagtgagaaaaggagaggctgatcatgtgctgccagacactgggcaaagggtgatgtttgtaatgaccatccagtgactcctgctgccgctgtccttcctgcctggatgtttttggagcttccgtctactcattcagcatccagggaggctgtgatgaagtaaggaccatctgttagggaccagatagcaaggacatttgcagcgcattgaaggttggcctggatgaccagcaagggtttttcctgccctgcatgcctggactcccacctccccacccctggt

SEQ ID NO: 902324 - DNA, 656 bp, Homo sapiens
gctttcgttaattcgtcttgcctttttattagaagtaacaataaaattaattatttagaaaggtggcaagtgcatcctttattcccaggtaattcatgatgtcttgcaatttgattttagacttcaagccacaagctgattgtttattatatacacctatgaagttactgagtatttcctgctacttgtagagtacaatttcttcacaggcatttttatttgccatgtttatcttttcagacaacacaaaccatggcttcctgggttcattttaagtgcaaaataaagtaacaatttttttctggctttcttagaatcccttccttttctgccccattttcctgtatttccataaccggatcctgttgcatctatctgtgcattcctcattatgctgtggcaaatacagctgcttcacttgtcccatacgcactattatttttcctttgcttgtgctatttcctttgtctataatactttctcttttctccttttcaaattcaaatcttacccatcttttaggactcagattaaggctgtgcagctttctcactgacttctactctgttttatcccaatagctttcagtcagcactcaaaactgaagcagttcattgtgctttgacttatattaackgtttttaatttttttcttt

SEQ ID NO: 902325 - DNA, 383 bp, Homo sapiens
agaaactatcatcagagtgaacaggaaacctacagaatgggagaaaatttttgcaatctatccatctgacaaaaggctaatatccagaatctacaaggaacttaaacacatttacaagaaaaagataaacaaccccatcaaacagtaggcaaaggatatgaacagacacttctcaaaacaagacatttatgcgtctaacaaacatgaaaaatagctcatcatcagtgatcattacagaaatgcaattcaagaccacaacgagataccatctcakgccagttcgaatggtgatcattagagagtcaggaaacaaccgatgctggagaggatgtgcagaaataggaacacttttacactgttggtgggagtgaaaattagttcaa

SEQ ID NO: 902326 - DNA, 383 bp, Homo sapiens
agaaactatcatcagagtgaacaggaaacctacagaatgggagaaaatttttgcaatctatccatctgacaaaaggctaatatccagaatctacaaggaacttaaacacatttacaagaaaaagataaacaaccccatcaaacagtaggcaaaggatatgaacagacacttctcaaaacaagacatttatgcgtctaacaaacatgaaaaatagctcatcatcagtgatcattacagaaatgcaattcaagaccacaacgagataccatctcaggccagttcgaatggtgatcattagagagtcaggaaacaaccgatgctggagaggatgtgcagaaataggaacrcttttacactgttggtgggagtgaaaattagttcaa

SEQ ID NO: 902327 - DNA, 631 bp, Homo sapiens
ttagcaaattagtggactctgaggaggaagtcagaagcacatgtaaagcaacctggagcttgcaattggcatctgaaaggaggggacagtcttgggaactgagccttcaacttgtagaatctgacactatttccaggtagacagtgtcagaattgaactgaattagaggacacctagctgatgtctgcacagaattgctttcttgcttgtttggtgtctggggacaaacaaacaccacacatttggtcacataattctgtgtttgttggtgtgacagaagaggaaggtcagtttgtgttttttccactcagggaaggtgaagctccttctcagctccagcccattgcagttgtggaaaaactacctcagttgccagatcttcccatttctaagagaagcccacattttctactgatatttggaattgccttgtttttagatattgacaataaattttttaaatttacaaccaaagctcagaaaattacccagttccaagctatattaggccacagccctctggtatttgcctgcaaaatagatcttaggagagaaggatacaaaattgaagctagtamcagaagaggttcaggaggagtaaggtgtgaactgggtgtactgccttggcaag

SEQ ID NO: 902328 - DNA, 542 bp, Homo sapiens
aactgttagaagaactaaaaagacccagttggcttattacaaaattaccaataaaatcaatgtatttcctgtataagacaacaatcatcagaaaaataagttttaaaacctcatttacaataggrgcattttaaaaaagaataaaatacctaaaacttaataaaccaggccaggcacactggctcacacctgtaatcccaacactttgggaggctgaggtgggaggattgcttgagcccaggagttcaagaccagcctgggcaacattgtggagccctgtctctacaaaaaacaaaattaaaaaatttagccagacatggtggtaggtgcctggagtcctagctactcaggaggctgacatgcaaggatggtctgagcccaggaggttgaggctacagtgaccagtgatggtgtcactgcactctggcctggatgacaagagtgagaacctgtttcaaataaaacaaaacaaaaacccacacatacacagaagaaaaaaataaatctaataaggctcattgaagagttctataaaaaaatat

SEQ ID NO: 902329 - DNA, 702 bp, Homo sapiens
gaatagtacttcattgtgtgtatgtaccacatttttttttacctagtcgtctgttttttgttytgttgtgttttggtttttttggaaggagtctcgctctgttgcccaggctggagtgcagtggtgcaattacccagtcttctgttgatggacacttaggtttcttccaaatcttggctatcctgaatagtgctgcaacaaacatggaactgcagatactaattttccttctttggggtatatacctagcagtggatcatatagtagtactattttcaattttttgagtaacctctgtaccattttccatagtggctgacctaatttacattcctactgacagtgaacaagggttcccttttctccacatctttgccagcattcattattgcttgtctcttggataaaagccatttgataatatctcgctgaagttttgatttgcatttctctgatgtcagtgatgtttagcaccttttcatatgcctgtttgccatttgtatgtcttgtgagaaatgtctatttttgcccattttaaaattgtgttactagatttttttcctatagagttatttgagctccttatacattctgcttattaatcccttgacagatggatagtttgcacatattttctcccattctgtgggttgtctcttcactttgttgattgtttcctcccttgtacaaagctttttaact

SEQ ID NO: 902330 - DNA, 650 bp, Homo sapiens
gggggaaactatgagttaagctggcastctgtccttcccgtcccaccctacagaaaccgaaggccagactccagcagagattgaatctttttttttttgtctctcttcccacttgtctaaatgaattattatgttagcccagagagacaactgagatgggaactctcaggaaaaaagagggcatcatctttatggacatggaggggttacggttgagactagggcttctatccaatactcacagaccatctacctggatgtggtagaggggttcaggaaaaattcccagccagggactggattattaagagttcagaataaccgaaggggagcagagtcttcgccctgtttgtcagtcccctccatttaggtgtgctggccaagcctttcctccattttagggctgatctggatagtaatgctgagcctctgaaaggttccagtcggaggctggagccctagtgctgtccttgtggagctgaatcccatctcatggagcaaaccctattagagattttgtccccttcctcgagaggaatacacagataacccttttctaaggttttcaaaagaagaaaatagaaaaacacttttacccacattacaaatgaataaaaaggaagtaacatagagctccactcctgcagcgg

SEQ ID NO: 902331 - DNA, 575 bp, Homo sapiens
tcaagctaaggctttattagacacgatgggatagtatgtgccacactaacagttcccaccagttttctgtgtttaacacaaaaaccgatattcatggtaagtccattgtagatatggatgactctcagggcagttctccatgggggtggttcactcatcctgtgggcttgatcttgtattacctccagctggcccgttctttcataattaccagaaagaatgaccactgcaggggaggagggcatcaacttttaaatgcttctgctgtaaagtgatatgtgtcccttctacctgctgattctgttgaacatgtcgtcatgcttaatgtcaagggagatgagaagtgtaatctttctgaatatctaggaaggggagaaaaactgaagatatttctgagcatcactaatgcttacatttgtcttaatatttagcagcatggcaagtagatccatgtgtctgagctagaatgccatgaatggaatacaggtatgctacagatactcactgcaactgttttttagtttttaatgtggctgctrgaattgatgaaataacatacatggctgacattgttt

SEQ ID NO: 902332 - DNA, 633 bp, Homo sapiens
cctaatctaccatttacagtgagtatagagatagacatggcaaggtccctgatctctaagagtttaaatttagggggaaagggcttaaaaataagtaacataatgggcaaaactaaagtgcttaataattacatttcaagggagaaagggaaataactgaagattcaatggaaatggcaggtggcttgtgatctgagcaccaaagaataaacataatcccagtagggtatagacaaaagatggcagcttcggaataaacaggggcatggacgccaggcagtgatggtacattcacagagatatcaatatgtagagaaagggtggtgtctggatcagcacagcagttcttccctcaatgcctttgtcaatgattagtatttgggaagtattttttcaagggcaaatttgttcggcaaggttttaggatgtattatttttgtagggagggatttttatggactaatgtcttttattgagaaaaacagtctctaggtagactgaaatccattagtctgaagggagaaatgtcaacagaggcacaaactaaagatctaattactgatgcacacgaattggttcactgaatttaggkgctctgtgtgtgtgtgtatgtgtatgtatgtgtgtgtgtaa

SEQ ID NO: 902333 - DNA, 632 bp, Homo sapiens
attgcaaaacatttcacttgaactgaaagggaaatatttaaaattaaagagagaaagagaggtgaatatacttgcttggttgaaattgcaagtgggtttgtgttgtaaatattaaaatattacatagtttcattcagggaacttggtaactctttgattgcttttggagatctaaatcttcatacatatcataatgaaatagcattctttgaaatatgaatgatgataaagattctttgatttcagacatctattcagcctcttttcaggtctctctgtggagaagcaattattcttgttagcagagatgtcagaggatctatttcagttttactgttacctttttaacactcgactcagccaatgctgggcagatctttgtctgtcaattattcaaagagacatgttgctttttgccatgcctttttgtaaaagtagtaaaaccagtatctcagaacagagaccaaccacttcaagtctctgaaaccttcttgcctttagtgagactaagaacaggtcacagagtagctttatcacttgtatatcatccttaygtttacaactaaaacacactggtaattttgccagaatattaatgagttcctggtggatgtagcacctgtgccccaagt

SEQ ID NO: 902334 - DNA, 659 bp, Homo sapiens
gcatagctggcatgtatctgcaatgyaggtatcttcagaagaactctgtatttttaatgctctacttcaatggttattaaaatgtggtctccattgttctactctatccctatcatggactagaagcatcagcaacaactggaagcctataagaaacacaaattattggactcagtacagttgtgttaaattaactgcccttaaactttgttttatccatggaatatttagaaacctattctttaatttccaagtgtttagagatttttctgttacctttctagtatagattgctagtttgattccactacataagagaacattatgattttattttaaatttgttaagggttttttttaatggcccaagatgtagtctatcttggtgaatgttccatgtgtgctagaaaaaaatgtgtgttctaatgttactgtgtgatatgtactttaaatgccaattagatgccattagttgatggtgatattttctttatctttgtttattttctgtctagtagcattactcattattgagaaaatgtattcaagtccccagctataattgtacatgtatctatcttctatttaagctctgtcattttggcttcatgaattttaaagctttgttgtttggaacataaacatttaggattgctcta

SEQ ID NO: 902335 - DNA, 572 bp, Homo sapiens
aaatacagagaacaccactaagatacaccacaagaagatcaaccccaagacatrtaatcatcagactctccaaagtcaaaatgaagaaaaaaatgtgaggggcagccagagagaaaggccaggttgcctaacagtggacctctcagcagaaaccctacaagccagaggagactgggggccaatattcaacactcttaaataaaagaatttacaacccagaatttcatatccagccaaactaagcttcatgagcaaaggagaaataaaattctttccagacaagcaaatgctgagggatttcatcactaccaggtctgccttgcaagagctcctgaaggaagcagtaaatatggaaaggaaaatctggtaccagccactataaaaacacaccaaaatataaagaccaatgacgctgtgaagaaactgcatcaactaatatgcaaaataaccagatagtgtcatgatgacagaaacaaattcacatgcaacaatactaatcttaaatgtaaatgggccaaaggccccaattaaaagacacatactggcaaattggataaagactcaagacccat

SEQ ID NO: 902336 - DNA, 567 bp, Homo sapiens
aaagaaatcaagcacacagcaggccctcaataatgtctgctcctcctttactgtatctcccagaaagggagggcttagctgctgagamgacttgcttagcacagctgcccctgccaggtagtgactttatgccaccccaccattcatttcatccttccagtcatgtacactcactcactggtttctttcaaatcagtagtcacaaaatctgatgtctgcagtggccgatgagtaatgtaaatgagcaaggcaggccaggtgtaagacaatagggaatggtggaaactgtaaaaaagttgaacacgtctcatcttaaaggaaaagaagaaatattaggctacttttgccagatagtgtcatctttccagagaaagcccaaatctgaatttttacacaatatcttaaatgttggccactaatttaaaatttaaagcctgtgcaatgctaacaaaatacacctataggccagatctaatctcaggagtttccagagtgtgatctcaggttcaaattttatataaatatccatgtctctcatgcttcagaagagggagcttctacttaggg

SEQ ID NO: 902337 - DNA, 663 bp, Homo sapiens
gtattatttatatgtacatatatatrctatacatatatcaagaaaggccatctaactttagatatataaatttatgatatcaatattatagtatttcacggcatatgaggccatagtaggcaaacaaattttattgaatgaatgaattccctctaaactccttataaatcaatttcccagtgtgttccccttacttgtgaaaacttgaccccaaaatgtcatccgaacttttctcagacattttttgttaccagtttaacactcttcagataatctgagaaagctgtcagtaataaccctcagaaagataattccagcttcaagactttcacacaaaactatcctgggacacaaccaacgagatcgactttctagcaagaaaattttttggatgacgattatttaatcaagaggttaaaaaggcgcatgctgttttgtgtttgcacaaaagctataaggtttcagccctcacccacgctcacatacagtagcactgtggcatacttctccacatatgtaatgtgaactcaatctctctgcttagtctgctggtaaaatgataggggctatcaaagggattaatcatattccttcattctataccctttaatcctaaaataagcagttctaaatgcattccaaaacagcatatgtgctttctca

SEQ ID NO: 902338 - DNA, 618 bp, Homo sapiens
gaagtgagagcattgtgggtttgtaaaccacagaaataacttcagatttttttcttttctaagaaatcacagtaagattaacagaaggggtatggcatggcctgacatgttttaaagggatcaatctaggagacaagaaaatagacaccctccccttttttttcaaattctactaacaaaactgaggtttcaagaagagcacccccccttttttttcaaattctactagcaaaactgaggtttcaagacgagtacctgaggaagttgtacacaggtttgcccttgtctctattaaattctcattattaacgatggcgtacatcatgctgaaaacatcatctccaaagattttaataaactagaaggttttaaaatgattctaaatctgcactgatgattgtatcattcagaaatagaaaaatttgcattgtggcttgctggagctggtatccagtaagtatgaactctttcccagaaatttctctctgggtcagtaaatttgtcagatattggttctcttggtcacataaaaatggacacaaaatgrccagtctaattaaaccagatgattcacggtgacatgccattccaaaaaaatatttatgtggcatttttagt

SEQ ID NO: 902339 - DNA, 646 bp, Homo sapiens
agagtcacctttataccagttcccaacaagttcctmatctccatctgagaccacctcagcctggacttcattgtccatatgactatcagcattttgatcaaagccattcaacaagcctctaggaagttccaaactttcccacattttcctgtcttcttctgagccctccaaacttttcctacctctgcctgttacccagttccaaagttgcttccacatttcaggtatccttatagcagcaccccactcccagtaccaatttactgtattagtccattctcatgctgctataaagaactacctgagactgggtaatttataaaggaaagaggtttaattaactcacagttctgcttggctgggtaggcctcaggaaatttacaatcatgacagaaggggaagcaaacatgcttcacaaggcagcaggagagagaagtgctgagcaaagggtgaaaagcctcttataaaaccgtcagatcatgtgaaaactcactcactatcatgagaacagcaacatgggggtaaccacccccatgattcaattacctcccactgggtccctcccacaacatgtggggattatgggaactacaattcaagatgagatttgggtggggacacagccaaaccatattaatatctaacc

SEQ ID NO: 902340 - DNA, 658 bp, Homo sapiens
taacaataatagtgtcagagggaggtggaaagcaggaactccctaggtaaatggtattatygccaagtaattgggaagtgactgtatatcaaggagagtatatgctactgatttactggacaccagcacatgaagtcttatcatggtcatattttgcccatttttagctgcaatcacacaacgtttacatggaacattccttccttttcttttaccttcaatgtctatgttatcatcaccaattcctcttaagtgatttggtgggttagactgatgtgtttgaggaaagtacagtcgaatctttaattataatgtaaactgcctgtgttcatcttttccaggtcagtagtaggtctggactgaacctgtgtctcctgcacctcagctgtccccaggtctgcactgttggagcaactaagcggtggcaagtcaccaccagactcactggcatctgggccacacattgctgtgactttggttcagagagaccaaggggagcaggtatcttgctcttgatttgggagaagcttcacagaagggccttcatgggattttaagaaggcaagtatgacctgattaagaaagtattaagataaaaagaggaaaatagggctgggcatggtggttcatgcctataatctcagcactttgggaggct

SEQ ID NO: 902341 - DNA, 674 bp, Homo sapiens
ggaattgatttgagccaaaaatgtccaaacctgtctgacctgaagttagaaatacaactattctattcctataaggaagcaayatgcaaaagcaaagctccaaaacagcccctgtatcttttctgaattacacatttttggctatattatgatcacttacaattcaccatgggctcaacatggctagaaattccttgtatgagatctgcttttcagttcaaggaacttaaaatgatgctatgtgactataaaataatgagcctgatttttgcacatagcttctccagttacttctattgtagtactttacaaattacatcttgtcctttcatctcaggtcaatttggaacacacacaaaaaataagtgaagcctgtcttacactaccaaacttccactaaaatttatgttagttttaatataacaaacacattgaccaaagcatcttggattttcaagggcatgtcaaagcaaaatagtagcagcttctgaagttataacaaaacaaattctacagccaactgttgtaccatatgtttccaatggcttttattctacataaagccaattcatcctttgaacaaaacacaacatcacagaggctagtcactgacggcacatttctgatcatttgtcaatttcctgctacagcaagttctggagtctgaacaggaa

SEQ ID NO: 902342 - DNA, 566 bp, Homo sapiens
tgttcaacccctcgttcaacatgggacaggagttttacgtcttttagtctccctgtacccattgtcaggcacctgtcggctctgatctggagcatctgacctgagaatcattaggttctattgaaacatgaagttgttaaaagaaaagccccagaaagaaacaaccaagcatgttttttgactctatgtgaatttaaaatttttaaattttattttagtttcaggggtacatgtgtgggtttgttataaaggcaaattgtgtgttgtgggtgtttgaagtacagattgttttgtcactcaggtaataagcatggtacccaacaggtagtttttccatcttcaccctcctcccaccctccaaccctcaagtaggccctggtgtctgtggccttctttgtgtccacaagtactcaacatttagctcccacttataagtgagaacatgagaacatgcrgtacttggttttctgttcctgtgttagtttgcttaggataatgacctccagctccatccttaatgtgaattttaaaatccctttattctggagagaagctacactgtactg

SEQ ID NO: 902343 - DNA, 407 bp, Homo sapiens
tcttgctctgttggccaggctggagtgcagtggcatggtctcagctcactgcaacctccacctcccaggctcaagcgattctcctgcctcagcctcctgagtagctgggattrcaggcacctgccaccgcacttggctaatttttgtatttttattagacacagggtttcaccacattggccaggctggtctcgaacttctgacctcaggtgatcctcccgcctcggcctcccaaagtgctgggattacaggtgtgagccactgctcctggcctccagcactttcttatggcactgccctgtgggtccctgtcctgcgcattcagccattcatttcctgagctcctgctctgggcagggcactgtgcaaattgccaagatacagagaggaacaaagagtccctgtct

SEQ ID NO: 902344 - DNA, 581 bp, Homo sapiens
ctgaagaaactgaaagtcactggggtgggacaggttgacaccatagatgtgggcaagccatcagaatatgggggacagagagagaaggaaagagagagaagcaggcaggaggaggaaaatagcttttggcctcatgagacctttcgagaccaaatcacagggccccacaaggctgctttttaatagacatgttgatcacagttcttagacattcaataaatgcttttatgcattgactaaaacaacaacaaaaaagagaattaggtgtgtgtgaaatcaggtaacatttaacccagaaagtgggttgtttagattcagtgacctggaatttgaatgaaaaatgtgaagaacgtgttccttgctgagcaaaccctggatagctcagctgacttcacatattctcaaacacaagcccatctgtaggtctgggtggagcccaggggactgcatttccaacaagcttgcaggtgctgctgatgctactggtcycagatggcaccaaaatgggaggcttgagataaacagaggtggctgtctgtgtttatctccaccatgactccttatttgaggtttacttcagg

SEQ ID NO: 902345 - DNA, 672 bp, Homo sapiens
ccaaagtttactggggcacacatcaaattcattcaagtttttaggaaaaaagagaacmatacaaaataaagaaaaataaagcactcagcctagtccccaagggctaacgtcctttagaataaaaaacctaggtacccaagataacaatgtgtcgtcccctttgcacccactgcattccctacctaactccctgtatcccacacaatgggacacagaaatgcttcatgttttctgatgtgaggcccatttaacttttttagcatactagatgaagcaaagaataagataacttttccacttagaaagttgagaaacaaaaattccaatgccaaattccatgtgacctgagctatatccctaacttccatgcatgttaccttccaggtaattcatagatccgtgctttttaaatcaaagggcccacacactaccaacactggtgctaagaaaagcctttgacagaaagataactgcttcactttacctcttaaattgccctgcaaagatatatatatatacaaacaaaaagctgacataattcaatctctccttggggaaatttaacattttgctaagacaaggataaaaatatttgcttcatttttctatcaatttacctagattaagcatttaaccacgccattgattacagctgtatcactcaaaatggga

SEQ ID NO: 902346 - DNA, 586 bp, Homo sapiens
gtgttgcaatatgtctcccttcaagtctcttcatgtttgcattatatatttarggcctgggttgggggcatatatatttataattataatatcctcttgatattacaattttaccactatataatgaccgtatttgtctctttttactgttttctatctaaagcctatttcgtctaaaaataagtatactacctgtattccctttttgtttctttgcatggaatatctttctattccttcactttcagtcagagtgcccttaatgtggtgtaagtctcttgcagacagcatatagctgagtcttgtttttatatattcgaccaatctggttttttttttttttgctgttagagaatttagtgcattcataatcaacctaattattgacaaataagaacatactagtacaattttgttaattattttctggctgttttgtacatcttttgtttctttctttctctgtttctttgttatttgatgactttctgtagtgatattctttggatcttttctttttggatcttttctttttatcttctgtgtatctattatagactttcactttctggttacctagaagctt

SEQ ID NO: 902347 - DNA, 618 bp, Homo sapiens
atttgacttcctctctttctatatgaataccctttattctttctcttgcctgtttgccctggccaggacttccattgctatgttaaatagsagtggggagagagggcatccttgtcttgtgctggttttcatagggaatgcttccagtttttgcccattcagtatgatattggctgtgggtttgtcataaatagctcttattattttgagatacgttccatcgatacctagtttattgagagtttttagcatgaaggagtgttgaattttgtcaaaggccttttctgcatctattgagataattatgtggattttgttattggttctgtttatgtgatggattatgtttattgatttgtgaatgttgaaccagccttgcatctcaggtatgaaaccgacttgatcatggcagataagctttttgatgtgctgctgaattcagtttgccagtattttgctgaggattttcgcatcgatgttcatcagggatattggcctgaagttttccttttttgttgtgtttctgccaggttttggtaccagtatgatgttggcctcacaaaaatgagtttgggaggattccctctttttctattgtttggaatagtttcagaagga

SEQ ID NO: 902348 - DNA, 618 bp, Homo sapiens
atttgacttcctctctttctatatgaataccctttattctttctcttgcctgtttgccctggccaggacttccattgctatgttaaataggagtggggagagagggcatccttgtcttgtgctggttttcatagggaatgcttccagtttttgcccattcagtatgatattggctgtgggtttgtcataaatagctcttattattttgagatacgttccatcgatacctagtttattgagagtttttagcatgaaggagtgttgaattttgtcaaaggccttttctgcatctattgagataattatgtggattttgttattggttctgtttatgtgatggattatgtttattgatttgtgaatgttgaaccagccttgcatctcaggtatgaaaccgacttgatcatggcagataagctttttgatgtgctgctgaattcagtttgccagtattttgctgaggattttcgcatcgatgttcatcagggatattggcctgaagttttccttttttgttgtgtttctgccaggttttggtaccagtatgatgttggcctcacaaaaatgartttgggaggattccctctttttctattgtttggaatagtttcagaagga

SEQ ID NO: 902349 - DNA, 598 bp, Homo sapiens
ttgttcttcttttttgaaattatatttaattagtacataatggttgagtgcatatgtrtgtgtcttttaaattttattttattattgtatttttatttaagttccaggatacatgcgcagaacatgcaggtttgttacataggtatatgtccaccatggtggtttgctgcacctatcaacccatcacctagacccacatacagtagctatttgtcctgatgctttctctcccctcgccacccaccccagaggggtccccatgcgtgttgtttccctccctgtgtccacgtgttctccttgttcaactcccacatatgactgagaacatgtggtgtttggttttctgttcccatgttagtttgctgaggatgatggcttccagctccatccatgtccctgcaaaggacatgatctcattctgttttgtggctgcatagtattccatggtgtatgtgtaccacattttctttatccagtctgtcattgatgctcatttgggttggttccatgtctttgctattgtgaatagtgcatcagtaaacatacatgtgcatgaatctttaaaacagaatgatttatattcctttgggtttaacat

SEQ ID NO: 902350 - DNA, 598 bp, Homo sapiens
ttgttcttcttttttgaaattatatttaattagtacataatggttgagtgcatatgtatgtgtcttttaaattttattttattattgtatttttatttaagttccaggatacatgcgcagaacatgcaggtttgttacataggtatatgtccaccatggtggtttgctgcacctatcaacccatcacctagacccacatacagtagctatttgtcctgatgctttctctcccctcgccacccaccccagaggggtccccatgcgtgttgtttccctccctgtgtccacgtgttctccttgttcaactcccacatatgactgagaacatgtggtgtttggttttctgttcccatgttagtttgctgaggatgatggcttccagctccatccatgtccctgcaaaggacatgatctcattctgttttgtggctgcatagtattccatggtgtatgtgtaccacattttctttatccagtctgtcattgatgctcatttgggttggttccatgtctttgctattgtgaatagtgcrtcagtaaacatacatgtgcatgaatctttaaaacagaatgatttatattcctttgggtttaacat

SEQ ID NO: 902351 - DNA, 499 bp, Homo sapiens
cttgcttctttcccttatttttttccaaaatatttatattggcctaaccctatttaccaatcatatttttcmaaaagtttcctaaagaagctgatttttcattgtttctattattgcttatacaacaccacttaacttagttatgaaatcattgcctactatctttactcctctagagtttgaaagataattaaatagtgaatagagctatagtccctacccacatggtgcttattgtttaattgaaaatatagatgatataaataatcacacgatatcagttaactattggccgaaaataatgctgcattgcaaataatcacaaaagtatagtggcacataaaactcaaggattgttactcgttcttctgaggtggtcagagaagtagctttgctgatttcattggactcattcacgtggtaaggaggtggttgggtgtaagatgattcaaggtggctttgtttaggacaactagggtaacttgactttttgttgttt

SEQ ID NO: 902352 - DNA, 499 bp, Homo sapiens
cttgcttctttcccttatttttttccaaaatatttatattggcctaaccctatttaccaatcatatttttcamaaagtttcctaaagaagctgatttttcattgtttctattattgcttatacaacaccacttaacttagttatgaaatcattgcctactatctttactcctctagagtttgaaagataattaaatagtgaatagagctatagtccctacccacatggtgcttattgtttaattgaaaatatagatgatataaataatcacacgatatcagttaactattggccgaaaataatgctgcattgcaaataatcacaaaagtatagtggcacataaaactcaaggattgttactcgttcttctgaggtggtcagagaagtagctttgctgatttcattggactcattcacgtggtaaggaggtggttgggtgtaagatgattcaaggtggctttgtttaggacaactagggtaacttgactttttgttgttt

SEQ ID NO: 902353 - DNA, 628 bp, Homo sapiens
accaaaatatagagcttatttggtgaatcttcatcctcattacgttttctggacaaccgcacacrgataccgtgtgggtcataccttattcctttggcccagacctctttgttgcacctggtatcaatgtgcacatctggagttcccatctccttcatggcaaattgcagaatctctttgagttcccgaggggcacgcttcttaagcccactccatggatgcacttgtgaatattgatggtgtattctcgggtcaccacctcgttgatggcagaatggccctttttcttctcatcacccttctttgcaggagccattctctcgggtcaaagttggaaagctgtccatttcttattatagttttaattaccttttccttgagtattttgaagctatttaactatatgtatacaaagttaaatgtttaaacgaccttgattaattgaacttctcatcttcatatagtgattttttaaaaaataaatcacaaataaagcttttcttttgtcttaaattaaaacagctgatattaaaacagctatccaggttgtctgattattaaaacagctatccaggttgtcttttgttgatattttttgcctatatagtactgaaatattttaccagtt

SEQ ID NO: 902354 - DNA, 634 bp, Homo sapiens
ctttattgtattcattcacagcatccgcatggcatccaatcttaaactgtaatcttcacacattttaaagcccaaggtgcatattgttactttcttaatgcagaaacaaaattgtcttaagagaaattattgctctgcaggccttttattaaagatggtggatggttgcagcaacacgaatggaactggagtacattaccctaagtgaaataactcagaaacagaaagtcaaataccgcatgttcttccttctaagtaggagctaaacaatgtgtacacatgtacatatagagtagaataacagacattaggaactcaggagggtgggatggtagaaggagggtgaggaaaaaaaaaagagagagaaaaaaattacctgttgggtacaatgttcattatttgtgtgatgggtacactaaaagcccagacttcaccagtgtgaaatatatctatgcaacaaaactgcacttgtaccccctcaatgtgtttttggtggtggtgtttttttttttggtttttgtttgtttgtttttttttagatggartcttgctctgtcacccaggctggagtgcagtggcacactctgggctcactgcaacctccgcctctcagattcaagtgattctcctgcct

SEQ ID NO: 902355 - DNA, 582 bp, Homo sapiens
atgttgttactatcagatgacaaattcactttcccctcagaacattactaattgcacacaatttaccttttgaacaacctgtagcaaaaataaaatatgtacctgtgtaagtttttaataagaaattattagtttttttaattgagggggctttcctttaatactgaaaaatacattatattttataaaatgcattaattttgaggggtcagttgtgtggaggaagaagattaatcctattatcggtaaaagaagttcacattttcagcatttcagtgaattataaaatttatttacatgtaccactggataaaaatttgtgtacatctaaatgtctggatgaattttgcccttttcttttgaaattcccttgggatgtgaagtgccaaattctgacataaagcttccatagatgggacagcaaaacaagtatttacattttttcttaaaagaatacattaaaatttgctgtattatgtatcaaaartagagtaccatgttattgtttgtacaatgattttcaagacaacaaaatccaacaatatttttctgtggcacttaaaatattaatctataatgttt

SEQ ID NO: 902356 - DNA, 636 bp, Homo sapiens
agataaaatgaaaagctctgcctttgactctatccagaaagatcatcttcagagaccactcctttcactcattatttccttccaaataagtttctaatattattgatatatacatgaaaaagtatttcaagtattaagcaaaagagggaaaacaaggccaataaagaaataggtgtgcacatgcccaggtgaggaggagagtgacctgtgtatctcagaaccctgctcaaacaaacaaaacagaagcagaaatgtttctcaaagaattcatgtcttctaactataactcattttgcaatcatcattttaacccagtaaacaggtaaacacccactaaaatgataaatatgaagattatgtaaaaaaataaaatatggaaaagagtctataaaatgcaaattaaaaaatggaatgtatttatactattattgcaactatgagaaattatttataccaatagaaaaagttcacaaaaactatattatacacaaatatgatgacagtagttattttgggggcagagtgagttaagggcaaatttttttctttttctttccctgttatttctaatattttacaataagcatatattgcttmttaatttaaatttaaattgtgtttttttattttaaagat

SEQ ID NO: 902357 - DNA, 611 bp, Homo sapiens
cttaaaaggcatttgaaacagactagaaaacaaaaccaaaaaaatgatatttacttccctttttgtcaattttgcccccggaaaacataagtctatattrgaatccctaagcagagtaatatgaagtgaaaagattgtgtctaaactaggaagacattttccagggctgaggtaaggagagctgagaaggcaaagactgcgaatcttgggaacagagcacgtgagtcttgcttacctgcagtgccaccaggaaattagcatgttcccagtgaggaatgtgggcaaaggcttttagcaaatgggaccaaacatagcctcacaaactgcctgtgctccaagagcagcatagagacacagcatagacattcctctttctagagcttttggccagccctttcacctgcccgaatgctctcccttctctcagcctatccatatcacactcctctcaagcccctcctaatccacttagcttctgtcttaacctctgcccttgtgtatgatcactccactgaacacctccccaattttattggtgtcactcattcagcacttaatcctactgcctgctagcctgtcatctaatgctgtgtattatttttcactcattt

SEQ ID NO: 902358 - DNA, 745 bp, Homo sapiens
cttccttacaccttatacaaaaattaattcaagatggaataatgacttaaattttagacctaaaccataaaaaccctaggagaaaacctaggcaataccattcaggacataggcatgggcaaggacttcatgactaaaacaccaaaaacaatgacaacaaaagccaaaatagacaaattggatcaattaaactaaagagcttctgtatggcaaaagaaactaccatcagagtgagcaggcaacctacagaatgggagaaaatttttgcaatctacccatctgacaaagggctgatatccagaatctacaaagaacttaaacaaatttacaagaaaaaaacaaacaaccccatcaaaaagtgagcaaaggatatgaacagacacttctcaaaagaagacatttatgcagccaacagacacatgaaaaaatgctcatcatcactggtcatcagagaaatgcaaatcaaaaccacaatgagatacaatctcatgccagctagaatggtgatcattaaaaagtcaggaaacaacagatgctggataggatgtggagaaataggaacacttttacactgttggtgggactgtgaattagttcaaacattgtggaaaacagtgtggcaattcctcaaggatctagaactagaaataccrtttgacccagccatcccattactgggtatatacccaaagattataaatcaggctgctataaagacacatgaacacgtatatttattgcagca

SEQ ID NO: 902359 - DNA, 560 bp, Homo sapiens
agagcttgaagactatcttgctraaataaggcaggcatacaagattagagaaaaaagaatgaaaaggaatgaacaaaacctccgacaactatgggattacgaaaaaagactgaacctatggctgactggagtacctgaaaaagacagagagaatggaaataagttggcaaacacacttcaggatatcatccagaagagcttccccaacctagcaagacaggccaacatgcaaatttggcaaatgcagagaacaccattaagatgctttatgaaaagatcaactccaagacaaataatcgtcagattctccaaggttgaaatgaaggaaatactgttaagggcagccagagagaaaggcctggtttcctacaaagggaagcccatcagactaacaacagacctctcaagagaaaccctataagccagaagagagtggtggctgatattcaacattcttaaagaaaagaatttccaacacagaattttatttctggccaaactaagcttcataaacaaaggagaaataaaattcctttcagagaaacaaatgctgagggcta

SEQ ID NO: 902360 - DNA, 660 bp, Homo sapiens
tcactcctgaagccagctagactacgaacccactgggaggaaggaacagctaaagacgccctgccctaagagctgtaacaccacaaaggtttgcagcttcactcctgagccagggagaccacgaacccaccagaaggaagaaactccgaacacatctgaacatcaaaaggaacgaacaccagacaatgccgcctttaagaacggtaacactcactgcgagggtctgtggtttcattcttgaagtcagtgagaccaagaacccaccaattctggacacaataggttacagaacactgacataaaagtgatgaaacaaaatatggaaacaacagtgtctcactgcaacatctagtatattgagatttttgaaagagaatagtgcctcaaaaccttctttacccggaactgaatttcctcctttttcagtcactgattcaatgttctctgtttttaccagactcatgaggtaatatagacacctcgaaacccagaatctttaaggagtaatactaatataatgagctttaacattaacttagtaacattaaaacctcagtttttgtatttataaattacactggagggtttcttctggtaataaaattccccggtagtgcatctattctctctcacwcttatttgaattctgaaggaagtgat

SEQ ID NO: 902361 - DNA, 615 bp, Homo sapiens
caagatgactggtgactctgaaccacagggtaggtatttgagtgtgaattaagttcctayagagcaaatgatgctgaagccaaatagctttggtaagatgcccttatttatactttaggttgccatggtctgggaaatatggactttgtatgtttataagctatataactgtccattttatcagatattgatcctagcattgtgcatggatgctcaataaaagtattcctttcctggtggtgaattatgttatgaattgcatctgcctcaaaattgtgtatttcttatatattcatcttctgtgtatgccttttcaaagtaatttatttagttgtagagtgaagtcatggattgtgaccatttaaaacacgaatacatagcaataaagaaatactgagtgaaggaattagtcaagtgattatgggtgtctaacctgtcataaaattatcaagtgcaaatacatgacctatgatgctggaaggagaaatcactatagcagggaatacagatgaaataagcatttgggatttaagacgtttatatccatgagtccatactcatcatgacccactttggaagcctggccactagattgggctaccttggaaagggata

SEQ ID NO: 902362 - DNA, 632 bp, Homo sapiens
ttatgttagtatttccaacaaagaagtgatttaaaaaactagtattatgtgaatattcttaactgacagttgaacaacagtttgaactgcaaaggtccacctgatttttttctrcctctgctacctctgaaacagcaagatcagcccttgctcttccttctgctcctactcaacatgaaggcacaaagacgaagactttataatgatccatttttacttaataagcagtaagtatattttctctttcttatgattttcttaacaacattttcttttgtctagcttattttactgtaagaatatagtacataatacacataacatacaaaacatgtgtgaattggctgtttatcggtaatgcttcctgtcaaacagtaggctgttagtaattaagttataaaggagtcaaatgctatacacaaatttttgactgatcaggggttcatacctctattgcttgtgttgtccaagagttaactgtataatgagatattacacaattggcaaggaaatattgaatagtcccataaaaaatgatcaaagaaagtgaagaggaagttcataaaacataaactaaagttgacaatataaatgtaaaacgctgaaaagctgaacctccacagtaacaccct

SEQ ID NO: 902363 - DNA, 606 bp, Homo sapiens
ttagggctcatttgtcctttatgtacactacatacacagataagtaaaacaaaatgcacagaaatagatgattcatcttgccccgctgtaggcagggtggcatagagctctctgcactttcccctcttccctcctcccctgaaccagcgcacaaacacaatgagtattactcaacaggtgatttggccattccccaccaaagcaacattttctatgaattgtaacaaaaagatacttacaaaatgtgtttttattacctttaattttaacatatatcaggcacttcagaacatctaaaaaaacagacatttcaaaaaagcttagcattgtcaactatatataaggtagtgaggaataaaatgcatacaaaactatggatagaatatgaaagtgtcttctaaatatgaccagtctgtcatagaaccttcttctcttccttctcaggtcttccagctccatgtcatctaacccactgaacaaacgtggatgtatcrcttccaggggctgtctaataactccatttccaaaaatcatctccagaagacatttattttgtacgacttcctttaaacaaatgagaatttacaagatgtgactttctaactc

SEQ ID NO: 902364 - DNA, 604 bp, Homo sapiens
cagtaatgggatggctgggtcaaatgatatttctagttctagatccctgaggaatcgccacactgacttccacaatggttgaactagtttacagtcccaccaacagtgtaaaagtgttcctatttctccacatcctctccagcacctgttgcttcctgactctttaatgattgccattctaactggtgtgagatggtatctcattgtggttttgatttgcatttctctgatggccagtgacgatgagcattttttcatgtgtcttttggctgcataaatgtcttcttttgagaagtgtctgttcatatcctttgcccactttttgatggggttgtttgtttttttcttgtaaatttgtttgagttcattgtagattctggatatacatatattttatatatattttcaccaatcttaaaacccacaccagattctgtagcctggtctggctcagatgacctcttttgccwtaaaaatggagatgtgtgactcagttaatgatagagtcaacagaccctgctgcatctctggcttgggtggataatgatgacagagtaaacaaagttcatagcgttttctattgcttgaaaatcttcactgtttg

SEQ ID NO: 902365 - DNA, 670 bp, Homo sapiens
aaatcacagaggaagagcaatctgagcagggacagtgggtgaggagcttgctacatgtgtttggggtgcctgtgatacgttttacgggagatattcagaagggtagttgagaacgcaggagaaaagttagtgctaggcctgagactggaaagcaatcatcaaagtcactcactacagtcatgcaggagtcaggatgaactatccacacagtctatgcataataccacacctggtgtttaaggacttataaaggtcataaaaagctgtttgtttgtcctcaaatataaggggagcagaaggtacacacccagaacattattatgagcaggtataaacaaatatacaaaagataaaatatgtattaactgcatcagtaagtaagaagcagcctattggggttgtttggagtctgtttccccatggaatcaccacattaataacaatattactacaggctaattctcttggagttatatttgtctttttctgaaatttgacaaagtgctgaatctggcagtgcttgtccaagtaaaaccaactccatacagctttgcaccagctctgtcactaagcccccaaaatgatttagagataaaatacccttggaaatctgtgcactacgacttctsataaagtgtcatactttggaaaatggacgacagcatatcag

SEQ ID NO: 902366 - DNA, 598 bp, Homo sapiens
aaacacaaaatcactgcacctgcaagtttgtgtctggtgtgggtcttgcctctgcttccaagatggctcctatctctgctttttaagatggctcctcacatgacgaaaggccataaggcaaaaatarcctccagtttttttttataaggcaaaaatctaattattaatacttcctaaaagtctcatctcttaacgctgttgaaatgggtattcaatttcaacataaattttggaggggacacaaacattcaaaccatagcaatgcccaagcaaacaacaatgcataacctaaatctgtaatagcaatcattatattaaatattaaggcagtatactataattaaaaatcagagataatcaaaatagataaaataagcaagacctaacttcaaggaaactattttaaatataaagacagatatagattaaaagtaacaagacaaaaaatagatgtatcattcaaagagtaagcataagaaagcccaagatgctatgtaaatatcagatgagaggcacttcaatacagagtattgctgaagataatgagaataacttcaaaatattaaagggtaagttgtatcaataaaacaaaacatta

SEQ ID NO: 902367 - DNA, 648 bp, Homo sapiens
agtaggtgtatggaaatgcgtgaatgcccaagcagaagtttgctgcaggggtgggcctccagatttcagaatggtagatccaccaacagcttgcactgtgtgtggcaaagccacagacactcaatgccagcctatgaaatcaggcaggtgggaggctataacctgcaaagccacaggtgtggaggtgcccaagaccatgggaacccacctcttgcatcagtgtgacctgaatgtgagacatggagtcaaaggagatcattttggagctttaagatttgattgccttgctggattttagacttgtatagggcctgtagctgcttcgttttggccaatttctcccatttggaatggctctattactcaatgcctgaaccccagttgtatctaggaagtaactaaattgcttttgattttccaggctcataggtggaagagacttgtgtagtctcagctgagactttggactgtggacttatcagttaatgctaaaatgaattaagactttgcaagattgttgagaaggcatgatagattttgaaatttgaggacatgagattttggaggggccagaggcagaataatatggtttggctctgtcccygcccaaatctcatcttgaattcctacatgttgtgagagggaccc

SEQ ID NO: 902368 - DNA, 540 bp, Homo sapiens
attggatgatgggggtggtttcccccatgctgttctcatgatagtgagtgagttctcaggagatctgatggttttataagggcgtcttcccccttcacttggcacttctccttcctcccacctgtgaagaaggtgccttgcttccccctcacattccaccatgattgtaagtttcccaagtctgccccagccatgctgaactgtgcatcaattaaacatctttcctttataaatcacccagtctcaggcagttctttaaagcaatatgaaaatggaccaatacactagatctttctgtgatgaatttcccaggagctctttgagcttcttgtatttggatgtctagatctctagcagggccagggacactttcctcaattatttcctcaaataagtttttcaaacattaagatttctcttcttcctcaggaacaccaattattcttargtttggccatttaaaataatcacaggcgggatgtgctggcccatgcctatattcctagcactttgggaggccgaagcaggcagatcacctga

SEQ ID NO: 902369 - DNA, 589 bp, Homo sapiens
cttcatcaaaaatgggcagatctggcaagcagaatttcaatkagttcataattaaactcaacaacaccatcaatcaactagacattatagacagtaatctataatgaacatctatagattacttcatccaacaatagcagaatacacattcttctcaagcttgcatgaatcattcatgaaggtagactacatgctgggccataaaacaaactttaccaaaattaaaagagtagaaatcaagcaatacctatattcagactacaaataaattaaactagaaatcaataacagaaagctaactgaaaaattgcaaaatatgtggaggttaaacaaagaacacacttttaaataagacataagtcaaagaaatgtcaagagaagtttaaaatatttactaagtgaaaatatgacacaacttagtaaaatttgtaggatccagcaaaaatcatgcttagaagaaaagatctaaagtcaataatataaattcctaccatagtaaactagaaaaaagaagagcaaattaaacacaaagtaagtataagaaaaataagaaaaaacagagaagaaataaaattgaaaacaggaaatt

SEQ ID NO: 902370 - DNA, 589 bp, Homo sapiens
cttcatcaaaaatgggcagatctggcaagcagaatttcaatgagttcataattaaactcaacaacaccatcaatcaactagacattatagacagtaatctataatgaacatctatagattacttcatccaacaatagcagaatacacattcttctcaagcttgcatgaatcattcatgaaggtagactacatgctgggccataaaacaaactttaccaaaattaaaagagtagaaatcaagcaatacctatattcagactacaaataaattaaactagaaatcaataacagaaagctaactgaaaaattgcaaaatatgtggaggttaaacaaagaacacacttttaaataagacataagtcaaagaaatgtcaagagaagtttaaaatatttactaagtgaaaatatgacacaacttagtaaaatttgtaggatccagcaaaaatcatgcttagaagaaaagatctaaagtcaataatataaattcctaccatagtaaactasaaaaaagaagagcaaattaaacacaaagtaagtataagaaaaataagaaaaaacagagaagaaataaaattgaaaacaggaaatt

SEQ ID NO: 902371 - DNA, 625 bp, Homo sapiens
gcgatcttgtctcactgcaacytctgcctcccgggttcaagcgattctcccacctcagtctcccgagaagctgggattacaggtgcgcaccaccacacctggctaatttttgtatttttagtagaaacgggttttcaccatgttggccaggctggtcgcaatctcctgacctcgtagttacacaaatttttgttaggtattctgtcacttgcaactgaaagaatcccaacaggtacagagagttttacggtttgaaaaaaaaaatctgacaggagaaggaactgacaggagaagtttcacttttaggacctttttatttctctcaaggattaggacatcatctgcaaggttcctgtggcaagaaaacaatgagaacagaagttctgccattgtctgatatacatgtgctaggggaagtggatgtgaagagatttgaaccgttcatatttcttagtataatatatatcccttagactttagaagtagcattactgctctcacacgatattccagcttctcatcaccatacctaacttatccgatattcaaataatcaagctggagggggattctacttttccttcatgttgtttttctcagcaattagtttagtgaaggccagaga

SEQ ID NO: 902372 - DNA, 632 bp, Homo sapiens
gagaaacctcttagaataggataacccttaaaaaaaaaaaagaatgaaaagwctaaacctaatctaaaatgtaaattaagaaaaatatttattactgctttaagcaacatgatgtccaacgttttcttttatctcatatcctagaaatatatctccttagactcagtcacttttttcaagaagtttcatacatatatatcacgatttcaccattccaaacctgattacgttgttatgttaccctctggcaaggtctacaggaagtgaaacctcataaccttttggcaaactttcctctctcttcttaactggaaatgaaagactgaaaatttttgttgaatgagatccaacctgaggatatgtcgacaaaagagaaacacatttcaaacactttcttctctctttttctctgaaaatatagaggacagttctccatggggacttttcctttcagagtaacaatacttgaaagttgaggcttcatccacttttaccacctgtttaaaacgcccaagctttccttggcctattgcagcaagtggtctgtaaatttgagcaaactcggatttcttacattcctcccacctgccacattttcttaactgaaagcaaaacgtgttgcaattgtatgt

SEQ ID NO: 902373 - DNA, 450 bp, Homo sapiens
gatctcttggcagaaactctacaagccagaaaagagtgggggccaatattcaacattcttaaagaaaagaactttcaacccagaatttcttatccagccaaactaagcttcataartaaaggagaaataaaatactttacacacaagctgagagattttgtcaccaccaggcctgccctaaaagagctcctgaaggaagcactaaacatggaaagaaaaaaccagtacaagccactgcaaaaacatgccaaattgtaaagaccatagaggctaggaagaaactgcatcaactaacgagcaaaataaccagctaacatcataatgacaggatcaaattcacacataacaatattaaccttaaatataaatgggctaaatcctccaattaaaagacacagactggcaaattggataaagagtcaagacccatcagtgtgctgtatttaggag

SEQ ID NO: 902374 - DNA, 611 bp, Homo sapiens
acctctctcttggtgcttcggtgaggcgggcagcttctcctcatcttccgacaccctcagctccagctctgcttccccctcagctgggcacggcaaacgcagctctctgtcagcatccgacgggctgtcagaccagtgctgatctggcagagggaaggggcagaagtgggtgcacaccctaagtgaggccaactccttttccacctgagagcagccgcgccacttgctcatttgcaacacagctgctcaggtgcaggcctggaggcccttcttacgcagggacagacctgcctaccagaccacccccgctcctgaggggcccggccaagagcaccctcctgcctttgcaacgcggggccgcatcaaagcctgtggggctctgtttcttttaaaatacagcaacagtcacacatgatgggctgcgacagacaaagacagggtgtgcctgtggagggcaggcctggcctcacgggcccacttctatgcacctcctcctctcagtagccctgactgccaccccaactccacagctgargcctgcgccccctcgcaagcttgggttcttctcattcttcccagcctcgtccctgaccccctcagccccccacaac

SEQ ID NO: 902375 - DNA, 610 bp, Homo sapiens
acctctctcttggtgcttcggtgaggcgggcagcttctcctcatcttccgacaccctcagctccagctctgcttccccctcagctgggcacggcaaacgcagctctctgtcagcatccgacgggctgtcagaccagtgctgatctggcagagggaaggggcagaagtgggtgcacaccctaagtgaggccaactccttttccacctgagagcagccgcgccacttgctcatttgcaacacagctgctcaggtgcaggcctggaggcccttcttacgcagggacagacctgcctaccagaccacccccgctcctgaggggcccggccaagagcaccctcctgcctttgcaacgcggggccgcatcaaagcctgtggggctctgtttcttttaaaatacagcaacagtcacacatgatgggctgcgacagacaaagacagggtgtgcctgtggagggcaggcctggcctcacgggcccacttctatgcacctcctcctctcagtagccctgactgccaccccaactccacagctgargcctgcgccccctcgcaagcttgggttcttctcattcttcccagcctcgtccctgaccccctcagccccccacaa

SEQ ID NO: 902376 - DNA, 646 bp, Homo sapiens
catttcaccatcttgctccacccctctcaaatttatataaaaatttaaaagtcatttcaaaatgattctaaaacaatgtggaagaaataacaggcaataattattattcaccatactgagattatcatatcaagaattttattgaaattattatattaactttacttctaaaaaattgtaatttttaaaaactatacttatggttaaagacattatttacaaagcaaaaagtaaaataagttcagagaaaatttctcatcaaaaaatattaagagaaggatatcctgtaattaagtataataataatggcaaacatttatatagcatgttacatatacacaattatagtatacacacatattgatatgtaagtgattatgtgaatgtgaatgtactactagcaacttctctgaaaattatgtacagagttagagaggaataaatttaagtatagataagttactcattcaaagtcttacaggtcaaaattggtagagttgggacttaaacacaggtattttggactcagtctttgtttttagccactttgcaatggatacatatatgctaatagcatatattaccaaaacaataaaaaattagagctcaycactaacaggtaaatttgtcatatggaagaggtata

SEQ ID NO: 902377 - DNA, 638 bp, Homo sapiens
aaaaaatcttgtgaccaaaaagtagaagaaagttttatgaaaagttaccaaaaaaagttatgaaaaagaagttatgggatttaaaaaaaaaggcatgggataaaaataaaaattaaaattaaaagcaggcccctgtcagcaaagcctggagaagtggggctggggtctccaccaccacactgtccctatctccccttcccagtcacccctttacaattagggtagcaagacaagaccactgtctaacgaggaaagacaaacagaccctttgccaccttgaccagagctgagtccttaaatttctggatgatattgttatttaagagccagaggctggtggagttggtttgtttggaggaggcctcatggcctccttactctcaccacagcaacttttccctcagtgggggctccaatcttcttattcagagaggtagctgaggcaggacagtggggctaactgtggaccaggcgaaggcatgggctgctggggtggccccccttccccggtgtatatattgtgtctgtgtaaggttttgtatattccagagggtagggccacccctgtatcatacctagcggtggtyggaggtggcacatggggaggaggttctaataattatttgtggctgggaaac

SEQ ID NO: 902378 - DNA, 564 bp, Homo sapiens
caccttggcctcccaaagtgctaggactacaggcatgaaccaacatacctggccacataatcttaaaattaaacttggactatttattgcagatattacttaatcaacaagttctgttttttttttaattatactttaagttctgggatacatgtgcagatcgtgcaggtttgttacataagtatacatgtgctatggtgctttgctgaacccttcaacctgtcatctacattaggtatttctcctaatgttatccctccccttaccccccacctcccgacaggccccggtgtgtgatgttcccctccttgtgctcatatgttctcattgttcaaattccacttatgagtgagaacatgtcgtgtttggtttcctgttcctgtgttagtttgctgagaatgatggtttccagcttcatccatgtccctgcaaasgacatgaactcattcttttttatggctgcataatgttccatggtgtatgtgtgccacattttctttatccagtctaacattgatgggcatttgggttggttccaagtctttgctattgtgaatagtgctg

SEQ ID NO: 902379 - DNA, 595 bp, Homo sapiens
gacacttgggtcttctgtagggcactttagatttctcagctgaagctaaacattgtcaggttaagtgctgactacaccaggtgtaattgcctagttcactttccctggaccaaaagtagtggtgaagaccctgaaatccggcagtttgaggtcaagtttggcattggtctgaaaaaacatacttgcctcgggagacctgtgcgtagagacagtactggcttcccaatcaaggaaggccgtggagggtgtgtgtgggtgggagctggggattttgttgattctagccccatttgagagagaaatcctgatttatatttgaaagctgtggttttagaatcaccatcagaggcaacctgaaactaataaaactgggacagagaagatgtgtaataaagaaatgaataaataagggaataaaagagtaaagaaatgaaaaatccaaaagtcttccaacttcaccttatggataaaattatctttgaccacacggatatttctcagaggttgattatacaactrcacttcttttgaaacagaaaaatatgttaagtaagtgctaaataatgactttaaaatgatattaccaccagagctt

SEQ ID NO: 902380 - DNA, 652 bp, Homo sapiens
agcaaaactaaaatgagatatcatcttaccccagttaaaatggcttatatccaaaagacaggtagtaagaaatgctggcaaggatatggagaaaagggaaccctcttatactgtttgtgggaatgtaaattagtacaaccactatggagaacactttggaggttcctcgtaaaagtaaaaatttagctaccatacgattcagcaatcccactgttgggtatatacccaaaagaaaggaaatcaatatattgaaatatctgcactcccatgtttgttgtagctctgttcacaatagccaagatttggaagcaacctacgtgtccatcaacagatgaacagataaagaaatgtggtacataaacacaatgaattactattcagccataaaaataatgtgattcagtcatttgcaacaaaacggatgtaactggatgtcattatgtttcgtgaaataagccaggcacagaaagataaacattatatgttctcactgatttgtgggatctaaaaagcaaaacaattgaacccatggagawagagagtaggaagatggttaccagaggctgggaagggtagtggtaaagtgaggaggaggtagggatggttaaggggtacaaaaaaatagaatgaatgaatgaatgagactagtatt

SEQ ID NO: 902381 - DNA, 652 bp, Homo sapiens
agcaaaactaaaatgagatatcatcttaccccagttaaaatggcttatatccaaaagacaggtagtaagaaatgctggcaaggatatggagaaaagggaaccctcttatactgtttgtgggaatgtaaattagtacaaccactatggagaacactttggaggttcctcgtaaaagtaaaaatttagctaccatacgattcagcaatcccactgttgggtatatacccaaaagaaaggaaatcaatatattgaaatatctgcactcccatgtttgttgtagctctgttcacaatagccaagatttggaagcaacctacgtgtccatcaacagatgaacagataaagaaatgtggtacataaacacaatgaattactattcagccataaaaataatgtgattcagtcatttgcaacaaaacggatgtaactggatgtcattatgtttcgtgaaataagccaggcacagaaagataaacattatatgttctcactgatttgtgggatctaaaaagcaaaacaattgaacccatggagaaagagagtaggaagatggttaccagaggctgggaagggtartggtaaagtgaggaggaggtagggatggttaaggggtacaaaaaaatagaatgaatgaatgaatgagactagtatt

SEQ ID NO: 902382 - DNA, 701 bp, Homo sapiens
attgctacagatagaatgccacatgtctccacaaagggcctccctcatcctgacaatgtaaattaacagcttatcttcatggacacaaaacaagaggagactggaaaccgtcccaccacccaccccaagacaaatgcatacttgactgcttcctctactcaatgtttactttatcttatgtaaagtgcacatttaccgaacacgagatgaatgcataattgacttttccctctacgtccgccttttcacgtgcaacaggtggattcagttaacctaacagaagcctcacaagaatgtgaccatatccttctcttttctttctttccctttttcccttctgccacatttaccctttaaatattgaagccatcaaaaccttcctcagaaaaagcacaggccccagatcctgttgtagcttatgtctgtttttcccaggtacatcgtcagccttgacaaaatacatctctaaaatgataaagactcgcctcattttttctgatacatatgaaaagagggtctatatttacattaatctctgagtgttcttggcctcattgaagacccacttccaaaaattagacaycttctcagaaattgggaggaatataattttttgcttcaattctcaccaaactgcccagaaacctcctgacatcttggaatgtcttttaagaatcccaggtatcccagtaaccattttc

SEQ ID NO: 902383 - DNA, 633 bp, Homo sapiens
aatgataaaaatgtcattaacctgctgtcttaagatgttcacacaaatatggagagtaattctacaatataaaaatatttattttaatactgagtttcagttaagtcataaacagtgttaaaactcttgggaaggtgtaggggttttttgtttgtcatttttaaaattgaaactgtgtcatacagtgtttcacgtctctgaaattgggattataatagcactattttgatgtagctctaccgatactatgtggtaatgctattttgttttactaacaagctctggaatatttagcagtcattttcactggcacaagagccttttgtatgttattcaatttaaacttttaaaccaaaaattttatggtccagtgtctttggcaaaaagatgctggagggaatgtaacatacaattaatatgtggttatatatatatataaaaagacacaaattgccatgttatggttctgccttgaaacagcacaatgaagtgtatcagtatattctgtgattatgaaacttatatgttgtgttgttttgtgtcttctgttgcctgtcctttgggccagatgtggsccagttaaatgcagttatcatctcattaaatacagatgcagataaaatatctttagtg

SEQ ID NO: 902384 - DNA, 666 bp, Homo sapiens
gctgctcccaatttctgcctccactttaaaaacactttgcacttactagtgttattccaggagagccagttaatagtttaatgaaactagttagagtttaaaggcagcaaatgggataatttaaaataatcatcccatttttattgatggttctcaaatctctctccagatctgacattttgccctagctcagacttgcacctacactttctattcagactaacgtcctccatagttttaggacatcaccatcccaacttgggcactgacagcccacaggccacatcctcctcaagtagcaactcatgaacccagagaactgactgaaatagttcagtgtttcttgagctccccaaggccttcaggcttctgtgcagagtggaagtggtagtggtagtggcacaagtatgctaattgccacagtacactctccaaggtaagtgtaaccgggcccattctacagataaactaaaggttaggtaaattaaatctcctggcccatccacatctaatcatcatcagggccaggattcaagtccagttctaacaacaaaagccatgccaatggtaacagagtgygtgtgagctgctaagtacttctgtgtattaactcatgccattaaagtccgtagatgccatagggtgacccagagccacactgggtag

SEQ ID NO: 902385 - DNA, 601 bp, Homo sapiens
gtccattcatctcacagagttaaaactttcttttgacagagcagtttggaaacactgtttttgtaaaatctgcaagagatattaggtagctcaaaaaagcctatggtgaaagaggaagtatcttgatataaaagctagaaagaagcattatgagaaactgctttctgatgtgtgtgtttgtcgaacagatttaagtccttattctgaaggaacagtttggaaacactgtttttgttaagtctgcgaaggtatatttgggagtgcattgatgcctaagctggaaaagtaaatagcttcattgaagaactagaaagaagctttctgagaaactgcattgtgatgtatgcaattatctgacagaattaaacctttcttttgattgagcagtttagaaacaccagttttgtagggtctgcaatgggatacttgggagcgctttgaagcctaaggtaaaaaaggaattatcttcaaataaaaactagaaagaactttttgagaaacttctttgacacgtgtgcrttcaactcacagagttaaacctgttttttgattgagcagtttggaaacagtttttttgtaggatatggaagggatatttggg

SEQ ID NO: 902386 - DNA, 623 bp, Homo sapiens
agataataatgcagctggaaggagctatttggatcgaatgagccaaatccctggtttgcagattatggaacaaaaccctagaagacaaagggatcatcagtttaaaatacaaaaccctaatgtcatagaaaattctatcaaagcaaagtttaagtgtttgaacattgacttcatcaaagattaaataaaaatggtcctgagttgttattactctctaaaaaagtgttgtttattaaaatgtttggcatatattgttgttgttcattgttttactcatttggagaggttctaataagaatagcaggaaactaactgaattatttaaaagctaggctcaatgtattcaaggaaaccaaaagtttaacgtactttgagcagcacttgatgaaaatgatcatcaacatgatgagttgtattttaggcatgcacagtatttgctaaatgaatgaataataaatataaaaagtacttggctggagacaaagtattgtaccttagaatactgacaytgaacaacacaaatttggtaaatccttactttttttaaaattatactttaagttctgggatacatgtgcaaaacgtgcaggtttgttacataggtatacacgtgccatggtggt

SEQ ID NO: 902387 - DNA, 543 bp, Homo sapiens
agaacaaagctcaaggcatcacgctccctgacttcaaactatactacaaggctacagtaatcaaaacagcaaggtactggtaccaaaatagatatatagaccaatgaaacagaacagagtcctcagaaataacaccacatatctacaaccttctgatcttcaacaaacctgacaaaaacaagcaatggcgaaagggttccttatttaattaatggtgctgggactgactagccatatacagaaaacagaaactggaccccttccttacactgtatacaaaaattaactcaagatggattaaagacttaaatgtaaaacctaaaaccataaaaaccctagaaaaaaacccaggcaatgccattcagggcataggcatgggcaaagacttcatgactaaaataccaaaagcaatggcaacaaaagccaaaattgacaamtgggatctaattaaactaaagagcttctgcacagcaaaagaaactatcattagagcgaacaggaaacctacagaatgggagaaaatgtttgcaatctatccatcta

SEQ ID NO: 902388 - DNA, 610 bp, Homo sapiens
gcttttttcataaataaattccattttatacaaaatcgatttattaacaaatgagtttgctactagcacatacaggcatttttgtgcaaactggataaaagggagcttctttcttcaggatgaagcagcaatgagccagggaatatggcttgatgggaagaatatctctgtaatctaagaacaatcttaatgcccttgtcagacccttctcaatgaaaaccactgaatgttgaagaatattgttaaatcatgcagagatttagagaaaagatggtcaactgttaataaagccagtgtctaaattaagattaataattttaaattgacattttctaaaactaccacttcttgattttcttctttaaataaacagattatttcaagatagaaacaagataaacataagaagctgcatatgtagagtgtgtgtatgtgtgtgtgtgtgtgtgtgtggtttgggctagagggggggagagtaatacacttattaccatctatgtktccactgatatttggacattgttgttttaaaaaatagctttagggctgggtgcagtggtttttgcctgtaatctcaacactttgggaggctgaggcgggtggatcatga

SEQ ID NO: 902389 - DNA, 541 bp, Homo sapiens
aaggcttatggcttacaccctctggagcagtggcctgagatttatctgggggcccttttcaccactgctagaactagagaagctgaaacacagggagcagtatctctgtgttgcacagtgcagtggtgcactggtcctggcccacaaaaccttcctctcttctaggcctctgggcctgtaaagggagggctgccatgaaggtctctgagatgtcctggagacattttccccattgtcttggctattaacatttggctcctctctacttaagcaaatttctgcagcagtcttgaattcctcctcaaaaaatgggcttttttctatcttatggtcaggctgcaaattttctgaacctttacactctgcttcccttttaaatttaatttccagtttcagaccatctctttgctcacacatagaaccatatgctattggaagcagccaagccacttcytgaatgctttgctgcttagaaatttcttccaccagataccctaaatcatccctctcaacctcaaagttctacagatccctagagcag

SEQ ID NO: 902390 - DNA, 577 bp, Homo sapiens
tattgaatctgcaccttccacctaaagaactaatggctgctccaaaccaagttttcgctggggtgctggggagagcacagggttcccascatcagaggtatggtcaggcaggcatactctagacataggtcagataagagccacacacctgccagtacaaccaagttttccatgtgagagacctcctatgtcataggttgaataactaggcattaggccaccagtcaggtaaaagaagtatccatagaaggcacactataaacacccacatccagcaatccttcattttcaaaaaggcaaggttactatcagctcttgatactggaaccccaatttagctggggtctctcaaaacaggactaaattgaaagcttaaatgaacacaaccccagaaaaacatatcttaccaaaagtggttcactaaaaaataaaaatcttgattggacctataacctatatttaattaaagaaattaataattaaaacattatcttaaaaacatcaggccaggatggtttactattaagtaatactgtatatccaatgaacgaataatttcaatctttagtaaactctt

SEQ ID NO: 902391 - DNA, 625 bp, Homo sapiens
aaatcaaaagtagaaataaaacatttagtaagtttctaatataagacaggtatgtttctagggaattttcatattaaaatatataaatgaattttttcataatcatctaaggtacaaaatatctgcatcttagagatttaaaagaaaaatttaaatctcagaaaatgtaattttctgttcaaacagctgctaaaagtccatgcctgtctgattgtaaaactcattttttttttctgctctgtcatgttacctcccagctggagatcaagtactggctgtgcttgaacttgaacttatttatgatgagtttttcttaactttaaaaggtctataatacttgcttactccagtgaggtgatataagaataaaatgaagtatagtacctgaaagaacaagttaggcctgtagaataatgatattaacttaatatcattaccataaaaataaagttgccaatttctcaaaccccataaagtcccctgatcttctgttttatactgtgacaccatcccttgtataccattccatctcagcttgttcattcagcaaagattttaaccacctactatattctaaggaattgcctcartgctataggcctaccttcggagaattcaaacccac

SEQ ID NO: 902392 - DNA, 552 bp, Homo sapiens
gcagaaggaaaatgtggggttgaagcccccacacagagtccccactggagtgctgcctagtggagctatgagaagaggccactgttctccagaattgtagattccactgacagcttgcaccatgtgtctggaaaagctgcagtcacacaatgccagcctgtgaaagcagtctggagtggggctgtaccctgcaaagtcacagttgtgtgtgggagcccaagaccatgggagcccaccaccgagggagcccacctgttgcatcagcgttccctggatgtgaaacatagaaacatagagttgaaggagatcatttaaaaactttaaagttcaattacttccctataggattttggacttgcatgggccctgtggctcctttgttttggtaaatttctccaattaataatgggtgtatttacccaatgcctrtgcacccactgtatctaggaaataactaactaacttactttttgattttataggataataggtggaaggaactgtcttgtctcagatgagaatttggacttggacttttgggttaatgctgga

SEQ ID NO: 902393 - DNA, 577 bp, Homo sapiens
tttgctccttagaaatttcttccatcagataccctaaatcatctctctcaagttcaaagtttcacaaatctctagggcaggggcaaaatgcctccagtctctttgctaaaccaacacaagagtcacctttgctccagttcccgacatgtttctcatctctatcggagaccaccttagcctggactttattgttaatatcattatcagcatttttgtcaaaaccattcaacaagtctctaagaggttccaaactttcccacatttttctgtcttcttctgagccctccacactgttctgacctttgcctgttacccagttccaaagtcgcttccacatttttgggtatctttttagcagcaccttacttctggtaccaatttactctattagtccattttcatgctgctgatcaagacatacttgatactaggaaatttacaaaagaaagagatttattggacttatacttccacacagstggggaggcctcacaatcatggcggaaggtgaaagacctgtctcatatggcagcaaagaagagaacagagatagtgcagggaaactcccctttttaaa

SEQ ID NO: 902394 - DNA, 577 bp, Homo sapiens
tttgctccttagaaatttcttccatcagataccctaaatcatctctctcaagttcaaagtttcacaaatctctagggcaggggcaaaatgcctccagtctctttgctaaaccaacacaagagtcacctttgctccagttcccgacatgtttctcatctctatcggagaccaccttagcctggactttattgttaatatcattatcagcatttttgtcaaaaccattcaacaagtctctaagaggttccaaactttcccacatttttctgtcttcttctgagccctccacactgttctgacctttgcctgttacccagttccaaagtcgcttccacatttttgggtatctttttagcagcaccttacttctggtaccaatttactctattagtccattttcatgctgctgatcaagacatacttgatactaggaaatttacaaaagaaagagatttattggacttatacttccacacagctggggaggcctcacaatcatggyggaaggtgaaagacctgtctcatatggcagcaaagaagagaacagagatagtgcagggaaactcccctttttaaa

SEQ ID NO: 902395 - DNA, 684 bp, Homo sapiens
gctccttctccaggatcatgccccctacccagcttctctgctggggtcactttatcccagcaagcagtcctttagggcaggttcctcttaagataactctaatctggctcttattgtgacatctgcttatcccagggaaagccccactagactcggggctcccaggtagctctgacaggcagctccagccggccccaaccttctgctgccaggtgaggatcaggtgccagtccctagtctctgtgcccctcaaactccccagatgtagtttaggtcctccagaagctctttccctgctttgcttcagccttatggagtgaaggtttccttctgctcattgcagatggcctatgctttctaaatgtgtttctctgcaagactgaggtgaggggacaggactccttactaagtaaggtaacaagtcccaggaaatccgctctctgaaccatccttgatttacctgcttttatttatgggactgaagcaggtgatggggtgagggtcacagatggaattttcctgtgcaaaccctgaagatgagatgtgtctaagcactctctcagaatgtgtgggcatttcaccatcatttttctcagttttsgagcctcagcccaaattccaagacaataaaaaaaaatttcatgtaacatactgttatagttctcacaaccagcctgcccaccc

SEQ ID NO: 902396 - DNA, 649 bp, Homo sapiens
ctaaattatctctctcaagttccaagttccacatatctctagggcaggggaaaatgctgccaatctctttgctaaagcatagcaagagtgacctttattccagttcccaataagttcctaatctccttctgataccacctcagcctgagttcattgtccatatcactatcagaattgtggtcaaaaccattcaacagtcagtaggaatttcaaaactttcccacatcttcctgttttctcccaagccctccatactgttccaacctctgcctgttactcagttccagagttgcttccacattttcaggtatctttatagcagtaccctactcttctagcatcaattttctgtattagtccattttcacactgctataaagaactacctgagactgggtaatttataaagtaaagaggtttaattgactcacagttccatattgctgaggaggcctcaggaaacttacaatcatggtggaaggggaagaggaggcaaggaacatcttacatggtggcaggagaagagagagagagcttgaagggggaastgccacacacttttaaaccatcagatctcgtgagaagttgctcactatcacaagaacagcttggaggaaagcaccaccatgattcaatcaccgcccaccag

SEQ ID NO: 902397 - DNA, 564 bp, Homo sapiens
ttctttgtgggcttataagttgctttttgcgtgcactcgtggattcctttcccctccaaagggcaagaattcacacgtagacgacactgcckgttccagagggcacgggaatggggttttcaaggtgcaagccagagaaaaggaagctgtttggatatttagctaagttatgggtgtttgccagtgctttttgcattaccccaaagaaggaatcaatgactataattccactaactatatagaaagataccattatagcagatgtaacacccctgagaccccgattatcacagcatagctcaaggaaaataaatgatgtatattatcgatgtagattattgatgtatataaccatcagtttacatacatattctgtatacacagtgattaaaggttttggagccctaataaatttcagtatagatctcaaaatgccaacgcctgtattaaggttcaaatgcatggatagggtggtcatcctttccgatcatctgctaaaaatgtttttgaaacaaatttcccattaaggtcattcgtacctgctgttgtctatctattaacaaa

SEQ ID NO: 902398 - DNA, 591 bp, Homo sapiens
ttgttgttagttgttgttatttgttttttattttcttttgtttgacttaaggcattttctctcatgagcagtgtggtagttttaaaaagattaaaatgctaaaaaawatcagtgactccagttaaaatgcaagtcttagtaaaaagagaaagggcaactatcacccttaatttcgctgaatgacagctcaagtctggtgacaacctcatcctaaaccaatgctttccaaagcagtttccaagaacactggccccaaggggtgcacctctagggaagggtccttgtgcccaaatatgtttgcaaattgtgccaaactctctctcctgtccaccaccacagtgcttcacaaaagtacctgttcacatgatcatctctgtaaagtcccacagtaaagcaacttggtgaattttgatcaggcaagcatttttcaagcttatttgtccccaaaccccccttattttaaattgcttatatcactttgtgaacatttctacagagcaagggtactttgaggttgcggtaagcagctctgaatgtgtctgttgagtcagggctgtggggttaaatttcatttctgtacgtgtcagttgg

SEQ ID NO: 902399 - DNA, 591 bp, Homo sapiens
ttgttgttagttgttgttatttgttttttattttcttttgtttgacttaaggcattttctctcatgagcagtgtggtagttttaaaaagattaaaatgctaaaaaaaatcagtgactccagttaaaatgcaagtcttagtaaaaagagaaagggcaactatcacccttaatttcgctgaatgacagctcaagtctggtgacaacctcatcctaaaccaatgctttccaaagcagtttccaagaacactggccccaaggggtgcacctctagggaagggtccttgtgcccaaatatgtttgcaaattgtgccaaactctctctcctgtccaccaccacagtgcttcacaaaagtacctgttcacatgatcatctctgtaaagtcccacagtaaagcaacttggtgaattttgatcaggcaagcatttttcaagcttatttgtccccaaaccccccttattttaaattgcttatatcactttgtgaacatttctacagagcaagggtactttgaggttgcggtaagcagctctgaatgtrtctgttgagtcagggctgtggggttaaatttcatttctgtacgtgtcagttgg

SEQ ID NO: 902400 - DNA, 622 bp, Homo sapiens
ggttgtttcattgcaaaataagaagttgactttaggatgacaagaccttgatagccagtaagtttgggctttaaggacctcctcctttgggatatcttgggcatgtctatgtggattgggaaactagcgttttagaataaatgttctgagagaggaactacagactctggttataaaaattgaataatctcagttgtaagatggactttgaaggtgatttcattcaaatctgttattttacagatgaggaaactgatgcaaaaaaggaaggatggaaggtcatttagttaggggaaggaataattgctttttcctcaaaaccatagtattaagtgatggttctatttcagtgaatcctgccatggccctgacatttcaagctgggctctgagcctggtggtagaccactgtgcagcatatagagcagccaatgcgattaatacaaagtccatgactggggaaagagccttgttgccctggagatatctaagcccacagtcattgatctccagagcaaggcacytactccaggcatagtgggaaacaccacccttcaaccctaagtccagagttctgctagaaaagctgcttgtgactgcagtgccagtcaattggccccaag

SEQ ID NO: 902401 - DNA, 618 bp, Homo sapiens
taccactgacagaatttagttatttaatttagtacttaaatatttttattaaattttaagccagaatgtgggaaagcatataggaaaaccttaggtattctgctttctgtaataaccccaatagctttctctagcttctagaaaggcccaacttgtcacacttaaacttccaagtccagtgtgttcttgttctccagctttccaaaactgctctgggctccacgtcccagaacacagagaacttcttcaccttctatttttggtcctgaaccaatgagcgaggagacatcaaagagcctataaatcccttcctcttggtccccaatgacagatgacagtaaatcacttttgttctccccctcaagacggagtcttgccctgtcaccctggctggagtgcagtggcacgatctctgctcactgcaatgtccgccttctgggtttaagcaattcttctgcctcagcctctggagtagctggggttacaggcccacgccatcacacctggmtaatttttttttttttctgtatttttattagagacggggtttcaccatgttagccaggctggtctcaaaatcctgaccttgtgatccacccaccttggcctcccaaagtg

SEQ ID NO: 902402 - DNA, 613 bp, Homo sapiens
ctttcagacttcactttatgcaacttttcctttgcctggttctaatttatacctttttgcaataataaaattgtaattatggttatagcgagtatagcactttcctgggttctgtaagtcattctagtgaattactaaatctgaggatggtcatgggaaccctcaaatttgcagccagctgatgcgatgttcttgaggctatttacccatattttttctgtatgctggattttttatatattatgacatagtatggtaatgagcatttcttctcaactccactttcagtgattcatgttggtaccttgaaatcaaccatgcggaaagtatatcacagaaatcagcaaatgctatgaatcagagcttaatttattattttcctaataacaaaactattaataatacagattaaacataaaattttattgtattgatagtcattacattgcaaatagtacaaaaagttgaggaaatattctgtcagtttttaaaaattattatccarttcagcaaagaagttactgacatcattgacaaaagagtaaatttccaatatatgtcctcactgtttcagtttcgtatcagtcattattataaatgaaaagatcaacca

SEQ ID NO: 902403 - DNA, 471 bp, Homo sapiens
ttgagtgactgtcattcccaccgttagatatgacatgcagagaagggcaattacagggctcttcaaagatgcaagtgctgccctcacgaatctgttttgcaaggcattggtcgagggtttatcttctgtatcctcccagctgggatgagtaggtctaaagtgactaatccactccaccatcccaatctgcctaagcctttggatcctttcctttacattaaaccaagggagatcaggcattcccaattcactcacagtaggtcatctttcaatccatatttcagctaaccaagcaaataaactattagaaccttttttaactgcctgagctggaacattaaatgcagagtccytacttagtgggcccaaattaatacattcagcctgatccaactctatgttccttccaccattatcccacacccttactatccattcccatgcccgttctccagatttctgtttatataa

SEQ ID NO: 902404 - DNA, 693 bp, Homo sapiens
gtttgagttaaataaaatacataagtaaattacacacattttatagtaagaagtctccaaggcttaaatcagccaatatatatggcaatatttggaaatacatcaatgaatgcagaattatctgtttatatgatygctttgaaactgttttaaaaaatgtcacgtttatttgtttatgtattgtttaaattactaaaaatgtaaaaaggacagtgatcaaagattctttagtgttgtttggaagatagagatacaaaatacagagttatctgaacaaacatctagtgtttttagtagtgttatttttgcatgctagttcagtgacagttatactgcttgactattttttttaattatactttaaggtctaggatacatgtgcagaatgtgcaggtttgttacataggtatacatgtgccatggtggtttgctgcacccatcaacccatcatctagcttttaagcctcgtatgcattaggtatttgtcctaatgctctccctccccttgcaccacacaacccccgaagtgcccatcactgcttgactatttttgaaactcttcagttgaaaatgacttgagaagtttatatgccacacaagaaattaatctggcaatttaaatattttctcatttttaatttttgtccagtttgctcataggtagcattcctagacacaggttcaaataaagtt

SEQ ID NO: 902405 - DNA, 641 bp, Homo sapiens
ccaaaatgttgacagtgatattgacaataaaattcagatggaggtgatctcagatggagatgaggaacttgttggaagctggaacaaaggtgactcttgtcatgttttagcaaagagactggcagcattttgcccctgccctagagatttgtagaactttgaacttgagagagattatttagggtatctggcagaagaaatttctaagcagtgaagcattcaagaggtaacttgggtgctgttaaaggcattcagttttataagagaagcagagcataagtgtttggaaaatttgcagcctgactatatgatagaaaagaaaaaacattgtctggggagaaattcaagctggctgcagaaatttgcataagtagcaaggagcctaatgttaatccccaagaccatgaataaaatgtctccaggtcacgtcagagaacttcttggcagcccctcccatcacaggcccagaggtccagaaggaaaataatggttttgtgggctgggccccgggtcctcacactgtgkgcagtctagggacttggtgccctatgtcccagttgctccagctgtggctgaaaggggccagtgtacagcttaggctgtggcttcagagggtgggagcaccatgccttggcagcttc

SEQ ID NO: 902406 - DNA, 584 bp, Homo sapiens
tctagttcttttaattgtgatgcaagagtgtcaattttagatctttcctgctttctcttgtgggcatttagtgctataaatttccctctacacactgctttgaatgtgtcccagagattcttgtatgtcgtgtctttgttctcattggtttcaaagaacatctttatttctaccttcatttcattatgtacccagtagtcattcaggagcaggttgttcagtttccatgtagttgagtgtttttgagtgagtttgttaatcctgagttctagtttgattgcactgtggtctgacagacagtttgttataatttctgttcttttacatttgctgaggagtgctttacttccaactatgtggttaattttggaataagtgcagtgtggtgctgagaagaatgtatattctgttgattttgggtggagagctcagtagatgtctattaggtcctcttggtgcagagctggattcaattcctggatatcmttgttaactttgtcttgttgatccatctaatgttgacagtggggtgttaaagtctcccattattattgtgtgggagtctaagtctctttgtaggtctc

SEQ ID NO: 902407 - DNA, 656 bp, Homo sapiens
ctcatcatcaggtactaacaaacagttctgggacccacatagatccttggtccccactttaagcaacactgatctaaattcttgtagagttggccatggaaatccaagcacrctaaagattttgcagtatccagagagaaaggataacaatactcaaataagcactataaatgatgacttcaaaaggctccgtgacaaggattgacactcttcttatctatgaaatgatttttctttgtgagttgaggaaaaacacatattctaagaatgaggttaatcttcctttacccggcacgtgttactcctgcttaacatgaactttttattccctacagctccccctcctcttctgaaaccactacacaccttatacacgttatgtacagagagccatgggcatggatcaagagagagagacagaatgcttttgcctaagccaggcatcccctacaatgttaaggttggcttcaaaaatggaatggaaaacaaagttttatgttgaatgaaatattcttttcgaagattttattctctctactcttgggaaagttcctgaataaaaaatacagaggtagccgtcactcacctctataaattggcattgaacagggtaggtaaaacacaggaagcaaagctatgtaagaaggaatacttag

SEQ ID NO: 902408 - DNA, 656 bp, Homo sapiens
ctcatcatcaggtactaacaaacagttctgggacccacatagatccttggtccccactttaagcaacactgatctaaattcttgtagagttggccatggaaatccaagcacactraagattttgcagtatccagagagaaaggataacaatactcaaataagcactataaatgatgacttcaaaaggctccgtgacaaggattgacactcttcttatctatgaaatgatttttctttgtgagttgaggaaaaacacatattctaagaatgaggttaatcttcctttacccggcacgtgttactcctgcttaacatgaactttttattccctacagctccccctcctcttctgaaaccactacacaccttatacacgttatgtacagagagccatgggcatggatcaagagagagagacagaatgcttttgcctaagccaggcatcccctacaatgttaaggttggcttcaaaaatggaatggaaaacaaagttttatgttgaatgaaatattcttttcgaagattttattctctctactcttgggaaagttcctgaataaaaaatacagaggtagccgtcactcacctctataaattggcattgaacagggtaggtaaaacacaggaagcaaagctatgtaagaaggaatacttag

SEQ ID NO: 902409 - DNA, 602 bp, Homo sapiens
tttctgctctagaaaggatttatcttaattaaagttgttctttgccttggatagatctttaccacacctggtagcacactcttgagaggataaatccttcgttccattccaaatgtctttagaaagatccgttttctaatgagccagctgacaactcatccattcacatatttttgcgtacaactttcacatggatttaagactcaaagtggacgttgtcagtttattctctataagtttaatttcctagggaacatgtgttctattttattgaatgaatccttagtggataaggagaaggattttgaggcgattttaacacggattagtggaggggaggagtgaaggcttttacttaaaaattacaagtaatttgtcatggtgttagggaatttgacttgttagaccctatctcatggagaatcacatcattttattatgtttttaaaaatactaaaccaacctgcatctctaggataagtacagcttcatcattatacatgattttatatatacatatgtgtgtgatatgtattttatatatacatatgtatacatatatatatatatakagagagagagacagagctatgttgcttttt

SEQ ID NO: 902410 - DNA, 631 bp, Homo sapiens
tagctattttaaaatggacaattaaattattattgaccatagtacccttgttgtactatcaaataccagcatttcttgtaaggaagttctgtaggtgatacactctctcagcttttgtttgtctgagaaagtctgtattacctgtttattttcaaatgttgctgaatatagtattcttgtttggcaatttttttttctttcaggatttgattgtatcatcccactcatttgggctatgcaagatttctgctgaaaagtctgttgataatcttacagaggttcccttatatgtagcaatacacatatgtagcatataggtaacaattttccttattgttttcaaaactcatctttaatagcttttggcaatttatgatgtgtatcagtgtgtatatctgtggaatcatatttggtgtcctttatgcttacactatttagatttttgttcctttcccaggcttgggaatttttccatcataattttttttgaaaaagtctctctcttctttttctgggtacaacagtagtacatatcctgttatgcctgatcrtttccataagtctctgaaaccatcctcactttttatcattctttttttctttgctcttcaccttgtgtaatttccactaa

SEQ ID NO: 902411 - DNA, 432 bp, Homo sapiens
ttgaatttggaaggtagaagaaaacaaagtttacagttaagcagaactgtttcagatatagttcagtggtattggggaatttgagtctgaaacaggcagaaaggaaagaaaaatttataaggtagcagacaaaatataatgagaaccagcttggaaaatattttctgttcaaatattccactgttcttgatgtctacatttttagttgtaatatttaacattttatttgagggatttttttttccaaaattattttactttggttaaaaataatgtggaagggagagcaagtgaaatgaaaagtgagaaacatcccaccatgcactctmccataatttgttctgggattttacttttctgggacatatcccttttgtcaagggttcatttcttcttcttggctagctttaattgattttctgcatttcatga

SEQ ID NO: 902412 - DNA, 625 bp, Homo sapiens
cgtgacttgctccttcttgccttccaccatgtttgtgaggcctccccagccacatggaactgtgagtccaattaaactcctttccttygtaaattgtccagtcttgggtatgtctttatcagcagtgtgaaaatggactaacacagtaaattgttaacagtagagtggggcaccactgaaagatacctgaaaatgtagaggcaagccactttggaactgggtaacaggcagaggttggaacagtttggagggctcagaagaagataggaaaatgtgggaaagtttggaacttcttagagacttactgaatggctttgaccaaaagcttgacagcaacatggacaataaggtccaagctgaggtggttgcagatggagatgaggaacttgttcggaactggagcaaaggtgactcttgttatgttttagcaaagagactggtggcattttgcccctgtcctagagatttgtgaaactttgaacttgagagagataatttaggatatctgactgatgaaattcctaagcagcaaatcattcaagaggtgacttgggtgctgtgagaatcattcagttttaaaagggaaacagagtataaaagttcagaaaattttcagccagacaat

SEQ ID NO: 902413 - DNA, 602 bp, Homo sapiens
gagcagagagaggaatccaagtcattcaatctgatagaccttctcaacagatttccagcttcatgggtgttctactccctgtacaccattcaggaaaaagtgacagcatatccctcccttccaaacctgtcattatggacttaaaaaaaagtatctatttttttttccagagagatgtcactcacccttctcaaaactaaatttagctaaagaatttttatgtatatgtctcttgctgaaatgtaaaaatgttattgttaatatgaacagctactataaccttgttttaccatttgacaatacaaaataattagttctgacgaactatatgtgtgtgcttatatatttatagatattaaacttcatgttttgttatatgagtcctagcgctgaaaagtttaatgcagtgcctagaacagtggaatatatcttaggaattcaataaataatgtataattaacccatttaacatattgtgttagctataataaygatgatgatgacaatggcaacgaaggcaatgataatgatggcaattatgatttctattcacaaagctaacatttattgaactgatagtgactgatactgtgctaagcaca

SEQ ID NO: 902414 - DNA, 645 bp, Homo sapiens
taatttacacaaatcagtagctcttctatacaccaacagcaatcaggagaagagtcaaatcaagaactcaacaccttttacaatagtcacaaaaaaaatacttaggartatacatattcctaagaagtcaaaagacttctacaaggaacactacaaaacaatactaaaagaaagcataaatgacacacaaaaaaatggtaacaaattccttattcatggatgggtagaatcaatattgtgaaaatgaccatactgccaaaagcaatttacaaattcaatgaaatccccatcaaaatactatcatcattcttcacagaattagaaaaaacacttctaaaactcatatggaaccaaaaaagagccctcatagccaaagcaagactaagcaaaaagaacaaatctggaagcatcacactatctgatttcaaactatacaataaggctatagtcaccaaaacagcctggtactgtcctaaataggcacatagaccaatggaacagaaataaacccaaatacttacagccaactgatttttgacatagcaaacaaaaacataaagtggggagaggacacccttttcaacaaatggtgctgggataattggctagccacatgtaggagaatgaaactggatcctcatctca

SEQ ID NO: 902415 - DNA, 599 bp, Homo sapiens
gctgcagaacacattggcatgcaggagttaaacatcagtcgttgtggtagtttcgcttcaggatggcatcactctttctacgcaatargctattttcctacgttatataataattactgtacacatttatcaggtacatagtgatgttttgaaacatacaatgtatagtgattcaataggttaataagaagatctatcatcttaaacgtttatcatttctttgttgggaatattaaaatcctccttcctggtatttaaaactatgtattattgttagctatagtcatcctatagtcctataaaacactagaacgtattcctcctatctagctgtattttgtatacttttacaaacccctatccttcccagcctctggtatactctgctcttctttttacttctatgagatcttctttttttagtttccttatatgagcgagaatatgtggcgcttaactttttgtttctggcttatttcaggtaccataatgtcttcctttccatccatgttgtagcaaatgacatttcattctttaaaaaaaactgttatggctaaacagtattccattgtgtacatatacagcattttcttcatcca

SEQ ID NO: 902416 - DNA, 653 bp, Homo sapiens
gctactatgaaaaagtcaaaaaataacagatattggcgaggctgcagagaaaagggaacacytatagactgatggtgtgtatgtaaattagttcaacaactacggaaagcagtttggagatttctcaactcttgaatagaggacagataatccactaggccagcctgggaagaagtcttgtttgggaaatctaggaggccttcacttttggtgacacctacctgaattacaagtccagtatctgcaaggaaccaaccagttcccaatctaggaatgaatgtactttgcaaagtacattttgctgagtaaagataaacatcacaatctgaatatcactgacaatagccgaaacttaccagttacatcctacattcaaggcccttagtgtaaattatttcctttaatcctcaccacaatttgataaaatagattaagatgccatgcaattggaaggattgctactattaactctgtcacacagatgagaacatggagaacaaaaatagatttagtgatttgcccaatgtcacactgaaagtggagaaaggtaggttggatataggttttctgattctagaactgaaaactttcaccaatgggccatgttccctctggcatctctgcaatcatgtggcttcacaaccttgagaccc

SEQ ID NO: 902417 - DNA, 622 bp, Homo sapiens
ctttgtaggtctctaacaccttgctttatgaatctggatgctcctgtattgggtgcataartatttaggatagttagctcttcttgctgcattgatccctttaccattatgtaatgcacttctttgtcgtttttgatctttgttggcttcaagtctgttttatcagagactaggattgcaacccctgctttttttgctttccatttgcgtggtaaatagtcctccatccctttattttgagcctatgtgtgtttttgcacatgagataggtctcctgaatacagcacactgatgggtcttgactcttcatccaatttgccagtctgtgccttttaattggggcatttagcccatttacatttaagattaatattgttatgtgtgaatttgatcctgtcattatgatgctagctggttattttgcccattgcttgatacagtttcttcacagtgtcaatggtcgttacaatttggaatgttttgcagtggctggtactggtttttcctttccatgttcagtgcttccttcaggagctcttttagggcaggcctagtgttgacaaaatctctcagcatttgcttgtctgtaaaggattttatttctcccttgcttatgaagctt

SEQ ID NO: 902418 - DNA, 622 bp, Homo sapiens
ctttgtaggtctctaacaccttgctttatgaatctggatgctcctgtattgggtgcataagtatttaggatagttagctcttcttgctgcattgatccctttaccattatgtaatgcmcttctttgtcgtttttgatctttgttggcttcaagtctgttttatcagagactaggattgcaacccctgctttttttgctttccatttgcgtggtaaatagtcctccatccctttattttgagcctatgtgtgtttttgcacatgagataggtctcctgaatacagcacactgatgggtcttgactcttcatccaatttgccagtctgtgccttttaattggggcatttagcccatttacatttaagattaatattgttatgtgtgaatttgatcctgtcattatgatgctagctggttattttgcccattgcttgatacagtttcttcacagtgtcaatggtcgttacaatttggaatgttttgcagtggctggtactggtttttcctttccatgttcagtgcttccttcaggagctcttttagggcaggcctagtgttgacaaaatctctcagcatttgcttgtctgtaaaggattttatttctcccttgcttatgaagctt

SEQ ID NO: 902419 - DNA, 713 bp, Homo sapiens
  misc_feature 170: n = A,T,C or G
ataaatttgaaatattgtgagaattatgaaaatgtgatacaaagacctgaagtgagcwcatgctattggagaaatggtttcaatagagttggtagtcacagggttgccacaaatcttcaatctgtaaaacacacaatatatgtaaacctcggtaaagtaaagcacaatanaatgaagagtgcttttaaatatatgtatacacatttagatatatttgtttttagcaactgcctagaactattactaagcaggtcacacaagatacatacagtgttgtttgttactcattttcatcacagtttatgctttgatggttctatcttgaatgcatatccatattaagactaaagacgcaaacaggtaatcatgtttttcacaaatcaagaaattatcaccagttaaaaaactgggtcatcatcaaaaacaacactttaacatctttcctggatattttagaaagttcattaattaatttcagaaattaatttaaaggtaagatgtcatttattttgagaaaattaaacactaagcaaaatgaaaaaatgtctagaaacaaacattgttctgttcctgaaaatggcagaaaagataacattatccaaatgtaagggaaaaagtctgcaaaaagcaggttttttccatatctaaacttaaaagtctattctctaaatttgaaagtagaacacaaaacatatatcttatttttctctgag

SEQ ID NO: 902420 - DNA, 568 bp, Homo sapiens
tcactttatttctagagctatccaaaataacaatatctacagtttgagagagaggttgactttggaatgaaaggtaagaaaagagaagagraagaaaacaaatagataagtcccataatcttcgcaggtccacagagtgatatggaaaattctcctgagctgtagggcttttaggctgacagccctgatatgtcatccttcctgagtatacacatcctaattggaaatgtggcattttatgcatacgcacgcatgcagtcagcataaaagggcaatccatgtcttagaaaagattcatcttacagagataatatgcgtagggacgaagttgagaaaatcacaccacaaatcacctttttgtagttctatgagaaagaaaactttctaatattgtctactgagactgaagaatttttgtccccgtccccattatttacctttaatatccatcactttattagatgaacaaatatacttttgagaaatatataaaatttgttttattctaaaatggttcttgtccactgacacattgtgttatgtcttttcagtacagcatgttttactt

SEQ ID NO: 902421 - DNA, 568 bp, Homo sapiens
tcactttatttctagagctatccaaaataacaatatctacagtttgagagagaggttgactttggaatgaaaggtaagaaaagagaagaggaagaaaacaaatagataagtcccataatcttcgcaggtccacagagtgatatggaaaattctcctgagctgtagggcttttaggctgacagccctgatatgtcatccttcctgagtatacacatcctaattggaaatgtggcattttatgcatacgcacgcatgcagtcagcataaaagggcaatccatgtcttagaaaagattcatcttacagagataatatgcgtagggacgaagttgagaaaatcacaccacaaatcacctttttgtagttctatgagaaagaaaactttctaatattgtctactgagactgaagaatttttgtccccgtccccattatttacctttaatatccatcactttattagatgaacaaatatacttttgagaaatatataaaattwgttttattctaaaatggttcttgtccactgacacattgtgttatgtcttttcagtacagcatgttttactt

SEQ ID NO: 902422 - DNA, 615 bp, Homo sapiens
gtgagaaagcaagaccccatctcaacagatacatatatgtatttgtatgtgtgtggttattgaaaaaaacacttatgtatcctttggagacatattgaggcacaaagcactttgaaccctgtacactttgtctctctcctttacaattcccattacaggctgacccagggaaagctgaggggtggagagatctcataatgcggaacattcattggctgtattgcaactcttcctcatccccttcctataaagagctgaccattgtggaagcatgccaatgacctccagatctctgtggccaggatagtcatggatttagcagtgctgagctattttgatggtgtagttagcagtaggccaaaaccagacgacgtgagctcctgtggtttacagcaagagcctctgggaatctgttggaagaaagctgagtgttgggaagaaagctcaggcagggtttgcataatgttctctggaatgtgtctagacttgctggctcctttcttctagccctcctgggctcctagatcgattgtattcccattatctcaagtagcagaagatgttccatataaatgctaaaycatcacagctgtagatcatgtgcctatcattttg

SEQ ID NO: 902423 - DNA, 597 bp, Homo sapiens
ctgtggccaggatagtcatggatttagcagtgctgagctattttgatggtgtagttagcagtaggccaaaaccagacgacgtgagctcctgtggtttacagcaagagcctctgggaatctgttggaagaaagctgagtgttgggaagaaagctcaggcagggtttgcataatgttctctggaatgtgtctagacttgctggctcctttcttctagccctcctgggctcctagatcgattgtattcccattatctcaagtagcagaagatgttccatataaatgctaaaccatcacagctgtagatcatgtgcctatcattttgacccccacattctcaccacctgtttctctgttggattagcaataaatagtgtgggatcccagagttcggggccttcgcagcctccacaatcgcgatggcctcctggtcccactttacctctcaaactgtctttttctcaatcctttgattctgccrgactttgttacccccatgacctggtgttggatctgattaccccaacattcctggctgcccgatgtggggcaacaaagaccctggtgaaggaacactagagcgtgggaaagtggaggat

SEQ ID NO: 902424 - DNA, 567 bp, Homo sapiens
aggtggaggttgcggtgagccgagatcrcgccattgcactccgcctgggcaacaagagcgaaactctgtctcaaaaaaataaaatacaataaaaataaaaataaaaataaaaaaattagccaggtataatggcatgcacctgcagtctcagctactggggagactgaggcaggaggatcaatcactcaactccccgaggtcaaggctacagtgagctatgaccacaccactgcattccagcccgggcaacagagcaagaccctgtccttaaaataaaataaaagacatgtcttaccaatttacagtcacaccttattcaaggcgggagggatctcagaagttatctagtcttgaggcccaaatgcagcgcaagattagacagggcaaggtggggtgaggtcagtgagagctcacaagctttgtcatctgacaggtagctaagccttagctcccttctgctcccctccatgaaggtgatttttttttaacccaaatctatgtcttcattcctattaatttttttaaagctatatagcccatcattgtacacattaagatctttgcaat

SEQ ID NO: 902425 - DNA, 625 bp, Homo sapiens
ttattcgctataaaataatttgaaatatagctccccatattctccatattttaaaagtctttattaattcattgattttataaacatacattgattctctactcgctgacaagcattatgytgaatagtagggatgaaaagatgaaaaagattacctttctgccctaaatgagctcaccaaccagacacttaagtggataattttaatacaatgtgccaagtgcatcagctgttgggagacaattctccatgggtggctcccatttctgcactttccaagcaaaggcattaacatatatttcgttccagattagctgttcaggaatgtttttatgtcaaactgccttggaaggtagaaatagtgtctctttccagggcagaaggcaggtttgttttctcactaggataataaagatattttttctttccagggtaaagtttgagcaggtttgctggcatccttttgaaaacatggaggtttccaaagtttgagattcttccgttgtgccacaaaccccctctatgtgcatagaaggggaaagttgatattccatgctgagagaatcaaggtatgaaacagcatagtatgaatgcataagtataaacgatgcagtaatgctgacaa

SEQ ID NO: 902426 - DNA, 540 bp, Homo sapiens
ttcatgctgctaataaagacttacacaagaccagacaatttacaaaataaacaggtttaatggacttacagttccacatggctggggaggcctcacaatcatggtggaaggcaaggaggcacaagtcacgtcttatgatggtggatggcagcaggcaaaaagagagagcttgtgcaggtcaactcctctttataaaaccattagatcttgtgagacttgttcattatcaggagaacagcatgggagagacctgcctccatgattcaattacctcccatcgggtccctcccacaacacatgggaattcaagattaaatttgggtggggacacagccaaaccataccattctacccccggcccctcccaaatctcatgtcccacatttcaaaacctatcatgccttcccaacagtcctctaaagtcttaactaattttgggrttaactcaaaagtccacagtccaatgtctcatctgagacaaggcaagtcacttccacctataagccagtaaaatcaaaagcaagttaattacttccgaga

SEQ ID NO: 902427 - DNA, 585 bp, Homo sapiens
atctgattagatattcctagtatacatatttgaagttaaagttgctgtaagaaaaatctaaatatttatgaatattttctgcactgtgcatacacatttattttatctttatctttaggttccatttcaatgcactgacctagttattttgactcagtacaaaacaacaacaccaccacaccaccttatttatagtagttacattgtagagtataaatgggaaatgcctgcttctctcataaatcgtcaaataccacagggaatgtgagagagtgatatacaaaatccatctttaaaaaacaagatgacagagggttgcaaggaggctaaagagaacccctacaggttcagatttcagggatgtgtggctaaaaattattttctaaaggaggcagcacatcctgaaaagaaaaataatcaccccttttttaaagcaaccgtaacatggtccagggattaacatgagctttcttggacaygtttaccatgaagaaagagctggaaaagttagaataaatgagaaatcctttagacatgccatatttgtaggaagctgcctgttggtgagaaagtatggttaaaaag

SEQ ID NO: 902428 - DNA, 583 bp, Homo sapiens
actactattaaatattcatccactaatgttttccttaccaatgttgtaaacattcatttttcatttgggcaccagctattatttactacataagctatagagtaatagttcttttatgtcttctctcaaacttgatttcgtataatagaaaaaaaatcagtgtagaatgaaaagacataggtccaagggctaaccatgttgagtgattttgttgaggactttcttctttgctgaatctcatttttcaagtgacagcgagcgctagtggagttgagtgaaataatatcatcatgacaatttcttcccattctaaagtctacttttttgctgatggacaccctccatatatttgtttcttgaatctgtgactttgttaataacattcagcattttcattattatggttgtttttattttcatatttagtgttgtctttcctgagatggtatgaatatcactttaagtgaggatacrtattattctgtactgaatacattatataactgttttactcccaaatatatatacctatatgagaaattattggagagagggaaacccaaccaaattagacctgtactca

SEQ ID NO: 902429 - DNA, 618 bp, Homo sapiens
gtatttatgacccagacatccagactcccgtgtcactccaggattcagaatacatcaaatgttccaggggtaaatccagccttgttttttgtgttggtgaatggtcaggccagytcaagtaaccttgatgattttcatccccccttacccccagagagaatgttctgttgagctaatcctgattatcatgtcacatggagtgttctcattgtcaaaacttgaaaaccactgagatatcggtcaataggtgaatgaataattgaaccgtgcgtgatacatccacataataaaatattattcaacaataaaaaggaatgaaatttcaagccaatgaaagccatggttaaactttaaatgcatatattgctaagtgaaaaacagtctaaaaagtctacatactgtataattgcaacgatgtgatatactgaaaaagccaaacagactatagtgatagcaaaaacatcagtggttgccagtgtctagagtagggctaggggaatggttaagagaagaataggtgaagcacggataatttttagggctgtgaatataattttgtaatgatggatacatggcactatgtatttggcaaaacccatggaactgcacagcagaaaa

SEQ ID NO: 902430 - DNA, 668 bp, Homo sapiens
acaaaagttaatagttgaatgccaactatgtgtcaagcacagtctgataatgtggatagtaccaattttagtttccatataagaaaattgaagcctaagaaagaataaaaaatttacccaagrtcacacaatgattatccaatttcaagttgagagctccttcaggtacataaagtacattttaccgttatgtgttagtgtttgaatttgttcttcatgaacattttgtgggatgaagcctttgtcaatactagaagagtaatgctttatgaggtagaagtttgccaggagcaccaagattatttgcatttggatgtgtgggtgggagaactcaagaacatctgctgcccctccatgggccagtgcacagcactataaaaatgcaaaatgttcttttttttcttttttgatgaacaaccagtcccaaaggaatcacggaagggataaggcagactttaaattgaaccacaaaatcatttcaaagctaattagaagctacaaatttgggggaaaaaatttcaatgcagtgttcattaagcaaggaaagaatgaactggcaggctgtgttccatccacagacagaccatattagctagcccagcaccgctcacacttttgtttgactagcgcgggcttcattcacactcaagaagtaattaaagagtata

SEQ ID NO: 902431 - DNA, 503 bp, Homo sapiens
ttggttgtgctgagaattaactgtagcggrgaggggagaagcagagaggaggtcaatgcaataatacataagaattaatggaggcctggaccaggatgttggtgggggcagaggtgctgagaaatgatcatattctgaatgcaaaatttcccatacctgctcactgatgttgctgtttcttcaatacttgctatttcagtacaacagaataaagaagtctattccattttactcctcctcctcctccagtcgtttttgctatatcagattctccagtattgaagctaagagacataaggctcataaaaatctatcttggctactggagttatactctagtgtggtacgctctgtgggtgatagatttcaagtgctgaaattttgtattggggaattttttttttttgatcgaactatcagtctttctcaactacagttttctgttggagccaaaaagtcacggccatctggttatttatattttttcctctgctcctatcttt

SEQ ID NO: 902432 - DNA, 574 bp, Homo sapiens
ctattcacaatagcaaagacttggaccccccccaaatgtccaacaacaatagactggattaagaaaatgtggcacatatacaccatggaatactatgcagccataaaaaatgatgagttcatgtcctttgtagggacatggatgaagctggaaatcatcattctcagtaaactatcgcaagaacaaaaaaccaaacactgcatattctcactcataggtgggaactgaacaatgagaacacatggacacaggaaggggatcatcacactctggggactgttgtggggtggggggaggggggagggatagctttaggagatatacctaatgataaatgacgagttaatgggtgcagcacaccagcatggcacatgtatacatatgtaactaacctgcacattgtgcacatgtaccctaaaccttaaagtataataataataataataatataaaattaaaaaattaaaaataaataaataaacaaagtccccaccacttccaaatgccatcaacatacaaatttggagattaagtttcamacacatgaaatctggggggcacattcaaaccatgg

SEQ ID NO: 902433 - DNA, 570 bp, Homo sapiens
aatgttaattcagttccccatgcagcccattaggcaacatcttgaaaaattgagaatcttttgtctatggttccataaaacagaaaaggtggcttttgtaaagtggcttgaaccccacagctatggcacatcaagcagggtcatcaaaagttgctccattcttctggaagctgcagagaaaaggaacctggaaacctggtatgccagcaaaaaaaaaagcatatgaaattcttaccagccaagtttctgggctctttctctctctctctttctctgtgtgtgtatgtaaatggtagacatcactatttgtcttctctgcatgagtctgattgatagaaaaaaggatttgtgaaactagtcttaggctgtagcaaatctggtgtgctttgtgctaagaatttgtctttctgtgtcattctgtaataggtatcacagratacactgatggtttagggcccctataaggctgcttttaaagccagcctagcaggctggtcagttacaaactttgctgtgggaccctgacaccaatactggatgaaatttctctatcttgtgttgtgtccttaa

SEQ ID NO: 902434 - DNA, 565 bp, Homo sapiens
ataccatgaaggcagtagaagatggctaaagagaggtctagactgtaggtacaaatttaaaagtcacttgcatttggatgtttaaagtcaggatattgtgamgtcaacagaggaataaataaatgcagagaggggaaagaaaaggcccatagactgagccattgtctggtttatttacatattagtatatattttcttaaagatgtttgctatataataatgagttacctaaagtgtgacttttctaaatttatggggaattttctacattgtgttatggcactactaaaaataataaaagaaaatattgatatgagtctatgttacttgaaatattttttaaggggagatgtacctcaaaagatattccacaagaaatgatctttctctttatcccaccctcgcccctcctacaaacactggattactttaactatacaaaaattttcctgctttctcttgtgggcatttagtgctataaattttcctctacacgcagctttaaatgtgtcccagagattttggtatgttgtgtctctgttctcaatatgcagccataaaaaaa

SEQ ID NO: 902435 - DNA, 587 bp, Homo sapiens
agaatggtaccagctcctctttgtaactctggtagaatttggctgtgaatctgtctggtcctgggctttttttttggttggtaggctattaattattgcctcaatttcagaactkgttattgttctattcagagatgtgacttcttcctggtttggtcatgggagggtgtatgtgtccaggaatttatccatttcttctagattttctagtttctttgcatagaggtgtttatagtattctctgatggtagtttgaatttctgtgggatcagtggtgacattccctttatcttttttattgtgtctacttgattcttctctcttttcttctttattagactagttagtggtctatctattttgttaatttttcaaaaaaccagctcctggattcattgattttttggagtgtttttggtgtcactgtccccttcaattcttctctgatcttagttatttcttgtcttctgctagctttgtggttagtttgctcttgcttctctagctcttttaagtgtgatgttagggtgtcgatttgagatctttctagctttctgatgtagacaattagtgttgtaaatttccct

SEQ ID NO: 902436 - DNA, 513 bp, Homo sapiens
taagcccaaacagtgaagaatgcaattaatacctaactctttaatacccagacactgaagaacatctactagcattaacaccatccgggaaagcatgacctcaccaaatgaactaaataagaccccagagaccaatcctagagaaatagaaatatgtgaactttcagacagagaattcaaaatagttgtgttgaggaaactaaaaaaaatcaagatgacacagagttggaattcataattctatcagatcaatctaacagagattgaaataattacaacgaatcaagtagaaattctggagctgaaaaatgcagcaggcatattgaagaatgcattagagtcctttaatagcagaattgttcaagcagaagaaatagtcagcttgaagacaagctacttgaaaatacacagaggagaaaaaaagaataaaaaaaatgaagcatgcctacaggatctagaaaatagcctcaraatgaaaatcaagagttattgtccttaaaaaggagatagaga

SEQ ID NO: 902437 - DNA, 657 bp, Homo sapiens
cagaactatctctggaaaatccacatataattggaagctaagtgcatacttctaaatgtttcatgggataaataataagtcaaaagggaaattacaaaacattttaaaatgaatggcaatgtatatgcaatatatcaaaacttgtgaaataaagttgaagtagacatatagggaattattcagcactaaatacatgcattagaagacaagaaagatttcaaatcagtattatcaggtttaaccttgagaaaacagaaaaaaagatcaatatacctccaaataagccagaaagataaaataataaagatcagatggcacgctgataaaataggaaaaggaaaaacaaatataaaatcaagaaaaaccaaaagctgtttctttgagagatcaatataactaataaaactctatccagtctgatcagaaaggaggcagacagagaaaaattcattattgataaaaaaaactcagtaatttaggaaaaggtcagtttctcaacctgattttaaaaatccctgaaaagcctatatctaaaaacatttgatattaaaagaatgaatgccctgtctcccaaagtttatggacaaggccaagtgtgttcaattgtatcayttctattcaccaggagagtctgtctacccagtataataagcgaaa

SEQ ID NO: 902438 - DNA, 695 bp, Homo sapiens
accacaaatcaataaatgtgatttaccacataaataaactaatgacaaaaactacctgattgtctcaatagatgcagaaaaagcttttgataaaatttcaacacctctttatgttaaaaactckcaatgaattaggcattgaaggaacatacttcaaaataataagagccatctatgacaaacccaaagtcaacttcataccgtagaggcaaaagctagaagcattccccttaaaaactggcacaaaacaaggatgttctttctcaccactcctatttgacatagtattggaaatcctggctggggtaatcaggcaagagaaagaaataaagcacatccaataggaagcactaccccactacccctgtttgcagatgacatgatactatatatagaaaaccccatagtctcagctcaaaaacttcttcagctgataaacaacttctgcaaagtctcaggatagaaaattctgtgcgaaatcaccaaaattactatacaccaacaacagtcagctgagagccaaatcaggattgcaatcatattcacgattgccacaaaaataacaaaatacctagaaataaaactaaccagggaggtgaaagatctctgcaaggagaactacaaagcactgttcaacaaaatcagagatgataccaaaaaaatggaaaacatggataggaagaatcaatattgtt

SEQ ID NO: 902439 - DNA, 623 bp, Homo sapiens
ccctctgaggtagctcttactattatccaccttttatgtgtgaaaggatggccatttatagacggaaagtgatataccaactttacaaattaacagtagacagagccaagactctaacccaagtgtatcytgcccgaaagcctaggattccaaccacaaataaacctacacatttattatccctgggtacagttgacagacctaatgtggtccccatgattcctgccccctggtgttcatacctacaatagtcctccagatgagaatgcagagccccatgacattgatcacattcttgtgaaaccctgagcagagaaagtacctaagctgtgctcacattcctgccacagaatctgtgagataataactttttatgctgataaggtcctagtaatttgttatgcagcaatataaggtaaatataaaatgattatatctattacattcatgatgtgaacacttaagataattttttatttggatagataattttttataatctcctttaaaagataatttaaagagctaacatgagggaaatggaagaatagacagagcatagacagggattttagggaaatgaaactattttgtgtgatactatactggtggatacttgtcat

SEQ ID NO: 902440 - DNA, 578 bp, Homo sapiens
gtaataataatgctgactgttaagaactacaaaactcttggcacaaatgacttcaccaactcaatgcatgaagagagttcaccaaactttagcatggtttctattgtcccaagaccacgttcctaggataatccaagccccgcccccactaaaaatgcctacctgagaaagcttagtactacttttatgtttcaacttgattggggcagtaggtgcccagatatttggtcaaatattctggatatgtctgtgagggtggttttggattaggttaacatttaaatcagtagactagactgaagaatgcagatttccctccctaatgtgagtagtaggactcatccaagcagttgaagaccagaatagaacaacaacaacaaaaacctgaccctcccatgagtaagaggggagtcctcctgactgactaccttgtactatgacatcgacctattctgccttcagactgaaactgaaacaagtctttttgggtcycaggccttctggtgttcagcatggaacttacaccatcaactctcacaggtctttagcttgccatctgcagatcttggaacttctga

SEQ ID NO: 902441 - DNA, 612 bp, Homo sapiens
tgaacaacttggaattctacatgctgtttagaaaaagaaagggagacctttgactctcaagagcattctttgctctcttgaatgcaaaggggagaatcaagctgattgtttataatctcattgaattctcccagatgaagatatcatcttcatagggagggataggcatatatatccctaaggaggtagttctcttccttacaaagtatcacttaggtgattaagttacttcttccaccaaaattacagatgttagtttgcatcatgtatatatatgaagagagagagagaattatatttgttgggttaggcacacatcatgcaatgcatatggcattttattgggctagcttgtgcaagcagtgatatcacatttcagtttgtaccaagaataattaggtttttttcctcacaatttcctatcaattgttaaaattctttgtatagtggaaagcaagtgaatttatttaactgaactcctcttacatagtagaaaataggagtgactttctccctcagctctgggtaawggcaaataatgagcacgctttggggactgacctgcaggccctaaagcttgtgatgtattaatttatctttccatttcaggaa

SEQ ID NO: 902442 - DNA, 598 bp, Homo sapiens
gtagtgaggtaatccatgcacagagagttagataagttatctaagtttccacagtcagtcaatggtggagccaggatctgaaattctcaagtatgtgtggagaaaggatgttaytctaacatcagtagagtgtcttcataagcttagaaatttctgtaattacttctaatttcaggtgacatctgctgtggaaaattattcagtaaagtagctttgtggctttattcaatctgctggcaacatgatttagttaaatatgcaacctgatgctgcccttttatctaggttgtaatttacatttggtggaagttaatatgataaatagtggaagtcaaagttttcccttgaaatatagagtattttgtatgctcatggatttttgtttacatcaggacttctcaactctggcactactgacactgggctgaatagttctttcttgtgggggcactatcttctgcattataactgcagccctagcctcaacccactaaatgccagaggaccccctggttgtgacaaccaggaatgtttccagatattaccaaatgtacccttaggggtaaaattgcccccagttgagatctgttacattata

SEQ ID NO: 902443 - DNA, 604 bp, Homo sapiens
agtactgataggggttattgataatatgggaagatttgtaatgtttttggccttaaaattttcyaaataaatgtggccatgagatgtaatggacagtcaaaaagggttaaggaaagatttcagaagatacgttaagaaatataaacataaaagcaaatttagctaggtatatgagggactggagaatgggggaggtggtggtggtatgagtctaggaaataccaaagcacatgggtgtatctacaaataaaggaaatcaaacaaaatatgagccatacatataatgtctgctgtatatggcatttaatgaaactcatacacagtagaattaatctatctttctgaaaaaagtcaatttgctataaaggaatattaccgagaaaaagaaaaatgaaggaactttgactatttctttagcatgaggctattttactcttcagtctctccctccttccctccctccctccctccctcccttcgttccttccttccttccttctttcttgctctctctgtctctttctgtctttctttctttctttctcactctgtcacccaggctggagtacagtggcatgatctcagctcactgcaatctccatct

SEQ ID NO: 902444 - DNA, 654 bp, Homo sapiens
aatttttatattaattcacattgacataatattttggatgtactggattagagaaaatatattattaaaattaattttacctttttttagatttattttttaatatggcttctaaaaatttaaaattacatttatggttcacattgtattcctattggtcactgatgggatgcattataaggcatggtgagggtaaggctgggactggctgctgctgggactaaactttccttacacacacacacacacacacacatacacacacacacacactctctctctctttctgtctctttctctctctctctttcttaaccccatattattattttattattattattttcaacctccagcctccttaggaataggccactcaggactctcatcccgctaggaaaaactctgaaataaaaataatttaaccaaactcttttgcaagaaataaggatggatccatttagcacccagggagcgtttacatcttaaagaaaaaagtacctgtggggaacaaagcaacaacaatggttttgtaagaaaaataggtttctaaagtctttacccctccrgaaagagcattcaagcagggagctctggctcacaaaatcacagaggaggcagcctcatagcagtcacccagtgactcactcttgt

SEQ ID NO: 902445 - DNA, 599 bp, Homo sapiens
gcaagacaggccaacattcaaatttaggaaatacagagaacaccacaaagatacttctcaagaacagcaacygccaagacacatattcgtcagattcatcaaggttgaaatgaaggaaaaaatgttaagggcagccagagagaaaggtcaggttactaacaaagggaagttcatcagactaacagcagatctatctgcagaaaccctacaagccagaagagagtggaggccaatattcaacattcttaaagaaaagaattttcaacctagaatttcatatccagccaaagtaagcttcataagcgaaggagaaataacatcctttacaaacaaacaaatgctgagagattttgtcactaccaggcctaccttacaagagctcctgaaggaagcactaaatatggaaaggaaaaactggtagcagccatgcaaaaacataccaaactgtaaagaccattgacgctatgaagaaactgcatcaactaatggccaaaatagccagctagcgtcatgatgacaggatcaaattcacacataacaatattagacttaaaggcaaatgggctaaatgccccaattaaaagacacagactggtaaa

SEQ ID NO: 902446 - DNA, 676 bp, Homo sapiens
tatcattgccatcattacaaacacatattttctagcacagttggttccacaatagactagcataccggtgcttactgtagggaaatgtaaaagagaaggccagcgcagcggtcatttaaagagatctaagccatctaaattatcctcctaaaaacccttcaaaatcctaagaagacaagtaatattaatttacttttaaagtaaggatactttttataattagtaccttgcccttttgtttaaattgtgatagtcaaatacattttttaatgatatatgaatagttcatggataatacaggcccttatataaacaataggtatggaacatataattccattttaaacttgtcattttacatttttgcaatttaatagtaattagatcctaatctcattatcttaagactttgcagtttgtatcttggatttcaggacaatgaaaggtcacctctgagttatgtgaagctgtggccttgtttgggaacacaattcccaaatataacactgtttgaatgggaatatattatccattatactctgatgcattcaatgatctagtttccagaaatagattttggcaaatagcgaggactgaacttctattaatgataccyctgcctccctgctttaattacttccttgaatcaggtatagaaagcaattgattcatctat

SEQ ID NO: 902447 - DNA, 673 bp, Homo sapiens
taaatattgtggataatgagatttccctgtcaatatttttatataagaattttacttaaaaatgcattttataaaaagattattagaaacctgaagcacagaggctttgtttctgggcatagtaatacacttctctgtgtgtggagaatgaaggaatgatgtctttacagcagtcacagaaaaaactgtattttcaggtatattttacgatttattcgttaattctccaccttaaaggagttttccccctttggttatgttaaagaagcagctgttttgtttcatttggtggtaccatgtccagttctacagattctggagtgagaaagaggtacactagcttcctaattgctatcatgtggattattatacttgttaagtctttgggagaaacaatccagtaaagtttacatttctacagagttctcagcataaggtgataatatctaagaacaaatagccttcaggatcccatcgttgtggtataaattcacacgattatctttcaaaaatttcaagacctgtcacagaagttctaatactcaaaaatcacaaaattatatatccatatgttaaattacgtatacacacacaggayagatacatgagctaatatgtatcatttttatattccattctaagttccaaaagaatctttcaaagcacagattgc

SEQ ID NO: 902448 - DNA, 579 bp, Homo sapiens
agtccccaggctgcacacagattgggacgaccctgggcccagcccatgaaaccattttctcctaggcctctgggcctgtgatgggaggggctgctgtgaaggcctctgaaatgccctggagatattttccccattgtcttggggataaacattcggctcctcattacttatgcaaatttctgcagctggcttgatttttctcctcagaaaataggttcttcttttctatcacattgtcaggctgcaagttttacaaacttttatgctgtttcccttttgaaactgaatacctttaactgcactcaagtcacctcttgaatgttttgcggcttagaaatttcttctgccagataccctaaatcgtctctttcaaattcaaagtcccacaaatctctagggcaaggtaaaaatgctgccagtctctttgctaaaacataacaagagtcacctttgttccagttcccaacaagttcytcatttccatctgagaccacttcagcctggaccttattgtccatattactatcagacttttggtcaaagccattcaacaagtctctaggaagttccaaactttcc

SEQ ID NO: 902449 - DNA, 579 bp, Homo sapiens
agtccccaggctgcacacagattgggacgaccctgggcccagcccatgaaaccattttctcctaggcctctgggcctgtgatgggaggggctgctgtgaaggcctctgaaatgccctggagatattttccccattgtcttggggataaacattcggctcctcattacttatgcaaatttctgcagctggcttgatttttctcctcagaaaataggttcttcttttctatcacattgtcaggctgcaagttttacaaacttttatgctgtttcccttttgaaactgaatacctttaactgcactcaagtcacctcttgaatgttttgcggcttagaaatttcttctgccagataccctaaatcgtctctttcaaattcaaagtcccacaaatctctagggcaaggtaaaaatgctgccagtctctttgctaaaacataacaagagtcacctttgttccagttcccaacaagttcttcatttccatctgagaccacttcagcctggacyttattgtccatattactatcagacttttggtcaaagccattcaacaagtctctaggaagttccaaactttcc

SEQ ID NO: 902450 - DNA, 576 bp, Homo sapiens
cataccaaccctatcgggtagatactgttattaccccactataaagttcattatactaagtgacagtgtggttaagtaaattacacaacatcccactgatagtacagcacaaaaacagttcaaatttcagcagtctgccaccagacccacattctaaaactctccctgcaccatgtccaaatggtaatagaggtgggtcacaggacagatgtggggagggcttcctttgccctccagcagatatcctaagattagaagagggtgttcctggacatggggtgtatcagagcacacatgtccggcaaacgtaagagatgagggttatgcatacatgtaaagagattgctttgactaaagaacacacactgtggtggaaaatgaatctataagaactgagagaccctgaggaagggagacgtcttgttccgtccttggacccaagcaaaycttgctaggcagcatctgtgagggcctcatgtcaagcgaatacttttcttaataccgggtcacccatctcaaatgcggctatgtgccctggccaccacaatcagcggacagcagaccaggaaaaaagga

SEQ ID NO: 902451 - DNA, 255 bp, Homo sapiens
ttaagaccattagatctcatgagacttattcactrtcacaagaacagtacaggaaagacctgcccccatgattcaatcatctcccactgggtccctcccacaacacatgggaattcaagatgagatttgggtggggacacagccaaaccatatcacagacatttcatccaataaatcttttgtacatataatcctgtcttggcttctacttcttagaagacctgaacagacacagttggaaccaggagtgatcag

SEQ ID NO: 902452 - DNA, 606 bp, Homo sapiens
tgccctagagtctcacatagtgtcttatacagagtggatgctcattcaactttaacagtggacatataagatattagtttcaactactggkctccttcgaccttcagtgacctcctggaagaaaggaactgtgttttagaaaagcaaacactcctgaaaagaacaaacaagcaacccctccaaaactttaggttccacatactgggtaccatgtagcaaaataattaacccatagtacatgtcttgggctcgataagcaatgaaaaggttgatttttatgtgcataaacacctctgggttgcttttgagtgtgtatgtaagtagagagtcatagaatgtcaggtaatctattctactaaaaaaattttcttttaagtaacaaaaggacccttactgtgcttaggctataaccatctaaatgtgtgctactagtctgggtaatattttagttataatcccatatgttagaattcaatgtctgtcacttgtcagatttttttctgtagaatgcccaagaaatctttaagctgtgaacatgtagcatcagaacgtcagtgttgaatgagcctctgtgtgcaaagccctgccttatatgccatgtgtgag

SEQ ID NO: 902453 - DNA, 595 bp, Homo sapiens
gtcctacctcaaaggtttaaaaatagcccacacttwttcagacaaacactagcaagaaatctaaccgagcaatctcttgggggagggatagcttctacagtatgtagatcacctcctcatctgctcccctttcacaggacttgcacagcaacatgtgatacaaaccataacttcctaacagaagaaaaatgacttttgtctaattcaagggttataaaggtaaagaggtagttttttgtaaggaaggttataaaaaagagattttctatgagaaaggatcttgtgtgggaaattcttttcctaaagtaaaatgactggttgtttaaaaagaggtatgtttaggacaagtcggaaagtccaagcattcattgatggtctgcataagttatgagaaaatctgtgaaaggaaatttataaaagggatgttgtatgtaattaagacacaatagtctctctaaaattggttccttatgctgtgtctaattaaattcaaacactttttcgctgagtttaacttccaggttatctaaattggcttccaataaggaaaaacgtcacattgcaagaggttttcctttgcctttttggtaactga

SEQ ID NO: 902454 - DNA, 596 bp, Homo sapiens
gtatacaaatcctttctaaatctctcaaaggaatactaatgcatttacagttgcacatccaaaataaaagaactactctgtttggtttttgatagacaacttgcataacaaacagaaaacacagccacaatttctagagaaatgcttattaaaaagacatacagttctaaaaaacaaagtctactaataaaaaaataaaggaacaatttttaaaagatgcacagccaagactacagagtccttgttttaaacagagaatgcttgagttgagacatattctttcaatctctgagtcccactgtttagacatcacccgtggtagtttagggaaaggatcatcttggaccttaacaaaaaccatccagcttttcactaacaattttcttatctctagctataaatagcaatctttcctttctgaagaattgcaaggtcactttccttttttatcaaaaacaaacaaatccrgttttgctgggggtactgatctgagttgggggagctactttgaaggaggtaggtttagtactgggggaggtaccaggagatcccagcttaagataaatgcccaaactccctcagatacatgagaagca

SEQ ID NO: 902455 - DNA, 593 bp, Homo sapiens
taaaactgataatctgataatatatgtatgtgttgggtgcaatttagaacttttattattytaagaacactacaagagcagttaaagccatggcttctcaaattggcatgtccaacccccttattgtctcctattccccccagagtatcagatgcatcatataaaaactgtcatttttgtatacatgctccctgagacagggcagctgtggttctacctctttgaccagttattttatatttatttttaaatgtacatatttatttgagagctgaattgtgtatactcagtattttttattgatgaggctgaggaaggggtagggaacagtgaaggcaggattccatgaacacagtccaagagtacctgtaagactaaaggaacctagaggctatcagcaagtgagttaaaggacctttctttttggcattgatcccaacctgagaagaagtaatcataagagactgaggtatacggggaaaaggaagaagaatatcattaatgttctaagataatgtcatggggataaatacttaagagctctgttctatacctttttatttataaataatattaatagtacattaacatga

SEQ ID NO: 902456 - DNA, 620 bp, Homo sapiens
ctcaagctactgtcatattttggggacatgttgattcctttggtgccacyccagcctgctatgtaatgccaaatggtatttccagtttgtatttccttcttatccaactattagagtggacttagccttctgttgattttttttttaatttttattggaaattgagcagacggatttgaattcctaattttctttaaaaatgtgacaagtatttgttcctttgttccttattttcctcttgaccaattccttgtgtctttgcatctttttctttaaaggcatctcactgattagtctcatctctctgtgttctaggcatctctttggaagctaagttctctagaattgattctctttttgtcttgatacattattgtcctagtttcacacttgtagtgtacgtaggtatatgcacaaataatattagtgaaataattgaaaattaaaatactaaaatacaattcatacttatgatggctttaaaaaaagagattggagagacatatttgtctagtcttttattgagtactataaaccagctaccttgcaaaatgtttaagataaattatcttatttaaccttactgaatgcccccaagaagtagactaatagtcccattt

SEQ ID NO: 902457 - DNA, 583 bp, Homo sapiens
tgtatttctactggacagtgcttatctataatgtttataggactgttttcatcaaagccactgggtgacactgtttcttcactaaattgatacaaccaaagcaattttctgccaggggaaaatcacacatgcacacacacaaatcataaatgcacatacaggtacacacatgcacatgcacatacacacacttcagcaaacaatatgtgccccctgtaaccagtcatcttctcaggaggaaagaacatgagtgcccttaatgtaatattattattatgttagcaggactggctatacttgaaagctttaataatcattcacagattcctaaataacaaatgacagctctaatcaaatcaaaaacacagacattgcttagtttgtgacttctctcaaatagctttccatcttcgaaatggtaatgttcttcatgacctcctctgatattataccctatttacttatattttaatgaaattctaaggaaacactgcaaaataacaggtgaaaaaaattaccagctgtttttgctaatgaagaaatgccttamcaatctgcagattatgctttgccttgaatttgg

SEQ ID NO: 902458 - DNA, 532 bp, Homo sapiens
tgtcaaagtcggatttttcccagatgtgcaagcctgactcaacattagaaaatcaattaatgtaatttatcatgtcaacaggctacagaagaaaaatcacatgattatatcaatagatacaaaaargaatttgaaaatgcaacacccattcatgattaaatactgttagtaaactaggaatagtgggaaactttttcaacttgatatagaatatctacgaaaacctagagttaacataatacttaatggtgagagactaggagcttttccgctaagatcaggaagaagataaagatgtccactttcaccactgcttttcaagatagttctggaagtcccagatgtaataatacaagaaatgtgataagacaagaaaataaaaggcatacagattgtgaaactaaaccaaactatcatggtttgcagatgacatgatggtctatgtagaaaatctaaaagcactgacaaaaacactcatggaatttgtattagtccattttcatgctgctgataaagacatacccataactgg

SEQ ID NO: 902459 - DNA, 608 bp, Homo sapiens
ggaaacaacaccagtgtatatagaaagctatcttttyttgcctttcctatttgactttcatcacttcttgatgtttggtaattatttctctacaagtgcattttgcatggttcccaggtccctccctcaatctgtggctaatacagattaatgttgtctcagtctagcttcaaattgcatgctggtgtgattttcagattctcactcttaactaaaagaacaagtttcagaaaatttcttaacatgtttatatatttcttgatttgtggctagttcatcacaggagaggcataaaatttaatatttaagaaagggtaatttcactaagccacaaaaaaataaaacttacactctcgtaaggtagaaatacaggtttacaataaatatatatttattgattgaataagtgtgaaaatacttcagttagctaaagaatttcaaaagtctccttctaggcttatggaaagtacatgcatgacatgatacatagaagttagagaagtcctcattttgcccctttcttttctttcttctttgtggtcacagtttattgactctttaaaatgatgggattttacagaattcatactattacctttttgcctatg

SEQ ID NO: 902460 - DNA, 500 bp, Homo sapiens
aaatgaatggattggccatgttgcagctcagttcaccagcagatatagattcagaggcaaagaaatatactagctgacagcagaatcaggctttgcctttawagaccatccctctagtctcatacccatccaaatgacaaatcccccatctgctctcaacctgcctcctgagccagtcatattgcatcagaggccctataagccagcagcttcccaaattgccctggcattacagggggatgtcttgctctgtgacaccccatctaactttgggagaaaattcccatatttagtaatgccttgcccatcttttcccagcagttttgttttttttttttttaaagagtgagatctttaggaatcatgttgagctttgaaaaacaaaagaattcctcaacttgaaaaatagagataaattcagatttttcagactcctaagattcaatcttcggaagccacagccatacccccactgtggggatggcggtcactgtcacaat

SEQ ID NO: 902461 - DNA, 557 bp, Homo sapiens
tgcatatatacccagaaatgggattgctacatcatatggtagttctatttttaatgttttcaggaagccctattctgttttccataatagctatactaatttacactmacacaaaaatgtataagagttctcctttctctgtacccttgccagcattttttttttttttgtcttattgtagtagcccttctaactttgagaacttggagtttgatgttcaaggataggaagcatccagcacaggagaaagacaggctgagaggctaggccagtctctcttctcatgtagtaagatgatattactatctcactgtggttttgatttgcatttgcctgatgattaatgatgctgagcatttttatgtgtgctggcctttttattcttctgagaaatttctattcagatcatttgcccatttttagattagttgtttcagttccttatatattttggatattaacccctaattagatgtatgacttcgaagtattttttcccattctgtaggttgtcttttcactctgttgattactatttttgctgtgcagaagctttt

SEQ ID NO: 902462 - DNA, 557 bp, Homo sapiens
tgcatatatacccagaaatgggattgctacatcatatggtagttctatttttaatgttttcaggaagccctattctgttttccataatagctatactaatttacactamcacaaaaatgtataagagttctcctttctctgtacccttgccagcattttttttttttttgtcttattgtagtagcccttctaactttgagaacttggagtttgatgttcaaggataggaagcatccagcacaggagaaagacaggctgagaggctaggccagtctctcttctcatgtagtaagatgatattactatctcactgtggttttgatttgcatttgcctgatgattaatgatgctgagcatttttatgtgtgctggcctttttattcttctgagaaatttctattcagatcatttgcccatttttagattagttgtttcagttccttatatattttggatattaacccctaattagatgtatgacttcgaagtattttttcccattctgtaggttgtcttttcactctgttgattactatttttgctgtgcagaagctttt

SEQ ID NO: 902463 - DNA, 386 bp, Homo sapiens
cgataatgaacaacttagcctaactgagtggcttggtcttagtcctgtgcaagccctccattataaacacctgaaagtgtcttccttcttgtcactgggatcccatttagagtcattcactggttctgcttatcttccagttgcataatatttgcccccttccctgatgctatatgtgatgcaaagtgcatccccaaatctctctgctgcttgcagagtgtactgcttctcattgtccatcagggtctgattcaaaaatgacataacgtctccccaggagatttcaaatatttgggtgaaattccagaatttcacccaatatatctatccctatatctatyatagagatatatctctatgtctatatatatatatatatcatagag

SEQ ID NO: 902464 - DNA, 664 bp, Homo sapiens
aaacagaagatgtataattttcatctgtacatggcaaatactctaaaatcaatcacatgttcacccataaagcaattataaacaaatttttaaaaaagctgaaatcataccaaccatactctcaaaacacagagcaataaaaatagaaatcaaaactaagaagatctgtcgggccaggcacagtggctcatgcctgtaatcccagcattttgggaaggcaacgcaggaggaccacctgaggtcaggagtttgagaccagcctgaccaatatagtgaaaccccatctctactaaaaatacaaaaattagccaggcgtggtggcaggcccctgtaatcccagctactgggaaggctaaggcaggagaatcgcttgaacccaggaggcggaggttacagcgagccaagattgcaccattgcattcgaggctgggcaacaagagcgagactccatctcaaaaaaaaaaaaaaaaaagaaagacagaaaaaaagaaaaaaaagaaaaagaagatctgtcaaaaacatacaattacatggaaattaacctgctcctgaatgacttttgggcaaacaatgaaattaaggtagaaatcaakaaattctttgaaactaagaaaaacaaagaagtaacatgccagaatctctgggacatagctaaagcagtatt

SEQ ID NO: 902465 - DNA, 551 bp, Homo sapiens
cccagcactttgggaggccaaggcaggcggatcacttgaggtcagggatttgataccgkcctggccaacacagtaaaaccctgtctctactaaaagtacaaacaaaaattagccaggcatgtcggcacatttgcagtcccagctacttgggaggctgatccaggagaatcgcttgaacctgggaggccgaggttgcagtgagccaagatccagccactgcactccagcctgggcaacaagagcaaaacagccatataaactgctaaaagcaattactgggccctagcttctcagataattcaagcatttaaagtagaaggtagaaaacagatcctgccccaccagttttctttttgctcccctcacaccacaaaataatacagcagcttaaatacctcaagctctagactaacaaagcactaaggcaattgttcccctcaacctgttactgtattaaatacaatttcatatggcattactagagctccctaatgtatcccacacaagagctgcacaaggaaataaacaggcattcatttgcaattaccaaa

SEQ ID NO: 902466 - DNA, 684 bp, Homo sapiens
ttgttgactcactttgaactatttgaatctggtttatctgcttmagatgagacacagggatccatggttacgtggaattttctttatgtgattgtagtcttttaaaaaatctgagtaaaggtttttaaaatgttaaatagggacacattttgattatatctatgattaagcagaaagcagaatgagatcagatgacggccaatctgaagagcaagttatcaactgagaaagaatgtacagaaaccattttaaataaagcaatttgagttaattccatttattgatgccctagataccctgagggattgacatttgattctttcaagaacattgaagatggtaatgttccatgtcatggcctacatgaagggttaacatacatgccaaatgttttcaccctttattttgcaccttaagtggcagagcttggggtagaagaaagagaggagtcatacacattagtgaaaagactatgggcagttctgtcatgaaatccctacgctgttaaactcctggattagccttctctttagtcaaataatattttgcctaaactttcgatgggttacattaacaatttttttcttacttataaattcccaaacttaggttatctttttgtgtctgtctagcattttcctcttctggaatcaagacatcagatacagaattttgttgacatgt

SEQ ID NO: 902467 - DNA, 563 bp, Homo sapiens
gttaatcacactttcaaagaccctttttctaaataaggtgatattcacaggttccagggattaagatatggccatatcctggggggccattatcagccaaccacagtatgtatgttttatccaagcaatgagtattagcattactggtaaaggtggtgttttaccaaaaactagaataaagagaggaattgagccataaaaacggttttaggaagaggacacttggcagaaaaaaaaatagtcaatgcagaggctctgaggcgaggaactgtttgttggcttgagagaccacaaaaagcctagaaagactggagtagaattagagggaaggagagtattaggtgatgaataaaaataggtagcaggagagtctgcttgtgtatgttctccctggttgctgtatggatcttggctgttactccgaatgacatggaagacattggaggattctgaccagcagagtgaaaatgtatgactatgtttgtttgttgtagtgatgatatagtgtggatgtttatcctgygaaatttcatgttgaactgtaatccccaatcctggaggtg

SEQ ID NO: 902468 - DNA, 639 bp, Homo sapiens
cttatgtcagaaaaaaaaaaagaatggggatmtttgactacaacacaagacaaaatggcttttggtgggaaaagtacctctctgaacagaacagggcaatactgttgtcctggaaataggagagtgcatatgtaatggaagaaagaaaaaaaaaaatacctctctcaagatgaggccaccagggcttagagagcatccaaaattgtgatgtcattacagtgcagatcccagggagtttctattaatgcaaaatggctctctaagaattaaaagttgagctctccaaggtagaggtacagtatagtggtctctctcttttcccatggaggaagtcactgtggcttcctccaaaaaaataagaaataaataagaaataataataagaaataaacctcctcaaaagaaattggcttgggttctccatctgcaagccaaatgcccagagattctagggaaaacagagaaagaaagatgatgagagagagtttggaacaatacgtggtgttataatttaagggagatttgtcttccaaacaaaaatttcccaggaagattacagaattctggggcaaaatggaattctggcaaaatggaaggtggtgagatgtttctttggtcttttcaaatcttgctttttgc

SEQ ID NO: 902469 - DNA, 698 bp, Homo sapiens
agaaagcaatttgtaccatggaagttaaagttccaaagaagacagaacctcagaaaggtaagctaatgatctgaagccactttcttcctgtgagtatctggtcactctaggctcaggcaagagggtgagaatctggcagggaatgacacaatgttagggtgacaaaatcagagtcttgagaggtctgaaaacatgctggcatcttcaagacattttccaaattctgaaggcacacatggctggaagtagaaatctctgaacagaaaaagggttttcagtcttaaagatttgaacactatggattaatgttaagaagccaccaccagggaagggttcccagtgagtacagcaggatcctagtacaaagctccatagaactataccctaggataaagaaaggaaaaaaaaaaaacactagttgcaactttaaaaataatttttaaatgcagttcactcttagcactgctcagtacctgttttagtccgttttcacgctgctgataaagacatacccaagactggtacaaaagaaagagtgttattgaacttaacagttccacatggctggggaggcctcacaatcaaagggwaggtgaaaggcacatctcacatggtgggagacaagggaagagagcttgtgcagggaaactccccttttaaaaatcatcagatctcttgacgcttacacactatcatga

SEQ ID NO: 902470 - DNA, 657 bp, Homo sapiens
aaagtgtccctgctcagtcaggcctcataaagtctctctcacacaactgaatggccatgtatttttatattctctgtaaacaggccataaaatggcataatagttcaacgagtcctgtatctgagatacacatatactgagtaaaaataagtagtccattttagtcagtgggttctttgcaagaaacagagactgactcaggatatgcaaaataaaatacgtatgtataggggaaggttatagggtcagtcataaaatcaaagagattacttggtatggactacactgtgtcctcctaaaattcatattggagtcctaaccccaagtacctcataatgtgactgtatttgagacagaccttttaaagaggcaactaaggttaaaaaaaggtcatgtaggtggaccccaacctaatatgattggtgcctttataagaagagaaaattaggacacagtcatacacagaaagaagatcatgtgtaaacacgggaggaagacaatcatctccaaggcaaagagaaaggcttcagaagaaaccaaaccatgaactcagtcttctagcttccagaactgtgaggaaataaatttctgttgttaaatcattcattytgtggtattttgttatgctagccctagcaaacagatacattcctgaag

SEQ ID NO: 902471 - DNA, 586 bp, Homo sapiens
tcctttgtgtttgaaaagggcaggaattttttgatacctgagatacccttccagatgaacatagacatggttaaaaaaaaaaaaaaaaaaaaaaaaaaagtactcaatgcattctctgctatataggagracccttgaaaggtctgttgagtgaatagtaaatgttgctgcatttcttttacttttacaggtttcctttggggagtctagaatttgataaacaatccgacccattgtgttgattgtttacctaatatgatcaaaactcttttcgagacaagccagattgagattccaacaggtttggtctattaaggacaaatgattggataaacaggtttctctctctctctctctccctctttctctctctctcatacacacacacacacacacacacacacacacacacacacacatttatttatttaaaatttatttataatgctaagaataaagtgataaatgctcaggagatgtcacagtgcattatttacattaattccttccttgctggatgaaccagcaattcccatgaaagagctgaacctagaaggctcatgacaatgtggttgtgctgagagaa

SEQ ID NO: 902472 - DNA, 502 bp, Homo sapiens
tattctgccaatttggtggagaaaatgttttaatttatatttctttgattacaagtaaagttgaaatatgtatttttatatgtttcttgggatttttatattttttcttttataaattacttgcttacgtcttttgccaatttttctatttaggtgtacgtctttctggttagcacttcgtttatgttaacgatatgatatccattactcatataagttttaaacatttattttcagtttatttgttttgtaattttgccactgtttatttaatgtataaatttaaactgtcataaagtcaaatatttttcagtgttcagttctttttcatttgtgcttaggaaagcctatcttactccaataccaaatttaaaaataaaaaaaaaaaaaaaaaaagaggtggatatatgggtrtttttctttcataggggcagaggcttgtggaaattttgggtatggtagccaagcaagatgtattaataaaaataagctatgctatgct

SEQ ID NO: 902473 - DNA, 642 bp, Homo sapiens
ttgtttcaccttttaaaaacaacaagcaaataattatactctgctttataatgtggtggaatgtatacaaatactttcttccataatttttgagagcagtaactgtgtctcaccaatcttcatattctccactgcactgaccatagcattttgaatataatttggaatcaattaaatacatgaacaaacaagtaaaattttatggtgcagggaaagtattattattattttttaaaagggctctgagatataatctacttttctgggatagtaccaaataaaaatgaaatcaagaatttaaagcattctgaaaatactgagaaagaccattaaaaaaaagaaggctaagagtttgtttaaaaatatgagaaataaaaaaaagatccatataactgactatagcaaaagcatgtgttttctgaagtaagtaaggcagaaagtaaaatagacatccttttaatacctctcatatctatgcagagatggccaaggtctggtagtgattttcatgatgatgggtctrggaagcttattattttgtaaccagttttattacctgcccccagcaaaaggcatttgtttaccttctttcctcttttattcactttagacgtgaagagaagtatcactgcttcagtatta

SEQ ID NO: 902474 - DNA, 596 bp, Homo sapiens
caggcatggtgttgcacatctgtagtctcagctactcagagactgaagtgggaggctcacttgagcycaggaggcagaggttgtagtgagccgagatagtgccactgtactgcagcctggatgacagagcaagaccctgtctcaaaaatatgtatatatattgctaccttctagagttccaaggtagaaataaggagagtgtgcttgaaatttgcattgctaacacatttcctaagatgtatcaaagaaaaaaaaagtgcagttaaaatgggagtcagtgagaggtttagcagttttcatttgataaatgaattaaagaattaattgaaaaggggcagcgttaggtggaattcaggtgaatgagttaaaactatcaagaaccatgaagagtctgagattttaccttacttgcaagctgacgagttagcctgcaaaagtcatgagatcctatagcagagataaagggtttaattactcaggacccagcaggccacatgaacatcatttttgctttagctacacttcccacccaagtgccatgggggtgatgcagaaggggccccgtgtatactgcacatgcagtaggtttgcatcac

SEQ ID NO: 902475 - DNA, 638 bp, Homo sapiens
ttctggcctccaggactggaagacaataagtttctgttgttaagcccctcagtgtggggtgttttgttacagctgccctagaaaactaatacaaacacaaaggtaaaattgggaagatgtggctgagtgcgttatgttaaagagaccctggggtgctggttggctgtaagctcagtcgaaatcagcagtgctgtgtggctgctaaagacagccagatcagagttgaggctatgttaacaggagatgcactagctaagcatacgggtatgctggtcaggcctcacctggagggccatctttggtcctggagacctcaactgtagagaagtgggagatcttcagagtcctatgcccagagatgaagagacaagccagaggaggactgctgaactggggaagaggtggcaggctcatcaacttccaatgtttgaagaactgtggcatggaagagggatgaacacccagccacagcgagaagagatggaacccacagggagagaaacagacttcagagaaataaaataattatattaggcattgtcacccaaaacatcaaatgggccrtctcatgggcacctgagctctctgtctctgagaaactcaagactccacctgctgaccactcagtagagacttgt

SEQ ID NO: 902476 - DNA, 577 bp, Homo sapiens
aatgcatcttcttttaatcaaacttaataagcctgttgaaccaaagagacccacactggacattgaggaagtgaagtaaataagggacagagccctttgatactgccagtcccagcgttacatgcytgagcagcagcccaccctgctcagcaaagccattggaggaatctcactacatccacagatgagagggtcctcaccccctccaaagttatgatctctgctactagggaaagagacgtatctctaggtggatttgaaaatttataactctaaatttgtccacaagaggcttagcagtctcgcttggggtcatgccaccgaagaattattcatgatctagaagttcagcctctgctgacccagcacggaggtaggcccagacgatggatgtgggaaacaggtcattctggctgcatttgaaacctgttgaaactaaataacagcaacaacagcaatatgaacagctatgatctaaagtggaggagcccagtcacattttcaaggtagcagctgggcgtgctgctcagctctcctttgagagagagcctccagatgccacctccttggacccacc

SEQ ID NO: 902477 - DNA, 605 bp, Homo sapiens
aaaaaaatcccattttccgaggagaaattcaagccagctgcagaaatttgcataagtaatgaggaacctaatattaatcaccaagacaatggggaaaatgtttccagggcatgtcagagacccttgtrgcagtcccttccacagagggccagaggtttagaaggaaaaattggttttgtgggccaggcccagggtccctctgttttgtgccgtctaaggacttggtgccctgcatcccagtcgctccagctgtgactaaaagggaccaagtcagaggctcaagctgttgtttcaaagggtggaagccccaagccttagcagcttccatttagtgttgaacttgcaggtgcacagaagtcaagaattgaggtctgggaatctctgcttcgatttcagaaggtttatgaaaatgtctggatgcccaggcagaagtgtgctgcagggacagagccctcatggagaacctttcctagggcagtgcaaaagggaaatgtggggttggagcccccatacagagtccctaatgaggtaccacctagtggagctgtgaaaagagggccaccatcctccagaccccagaatggtagatccactgacagcttgca

SEQ ID NO: 902478 - DNA, 665 bp, Homo sapiens
cattcacttttcttagcatagtgatggtcttggaaacaaaaaaggcattacatattctgggagcatccaatgttctctgacatttctatttaaggactaagctatatgcatgaatcaactctacagatacttcatttagatggtatcagaccatctacaatgttgtaactaacctgaaaagaaattgatacacatagtataccaaaatctgatccttatccaggctcgatttgatttcaatgcacttgataatcaatatgcaatttcttgttagaaaaattcttagcaacctagatataattctgtattatctatggtccctgcctactgtactgcaatttctactcattgccaaggatgtgtttcagagaaacatgaatacctacatctggatagtaatccacattaggtactaagtgctggatgagtgcttccagggatccagagaggaggttgttgtcatggtaatacaaccctccacagctgtcctctgcagactgatagaggtttcgattgtaaccactgctgtcaaacattgctgaaaagggaggagtctgaggcatactttcctaaaaggaataaaaaagaagaaaaaataatgtcagcaatatgcagtatgaaaataaaggtaagstttaataggcactaagatttaatagtaacga

SEQ ID NO: 902479 - DNA, 698 bp, Homo sapiens
ggcccatcccaggaatactgagtaatggaatcaacactagggtcaaggcccagtgaaccttcattttaagcaagatctccaagtaattcttggttacacaaagtttgagaaccattgcctcagaatggtgcttgagagatcttctggggcaaaagaagaaaataatatagacctttcagatttttctttgtatttccttagacagttcatgtttgtgcacgtataatgtttatagcatataagtactatataatttgcaggtggtactacggaatatactagtgctatattatttataaacaaataaatagatattggggataagatgtgttgtcaaaaaatgggtaaagcctctgccttagagagacagaatggctcccagggctgccagacctgactgtcatgtgcttgactccagccatgcatctgagcagtcaatagatccattcatagcatctttggtcatttccatgcccaaggaagcccagcagtttcttgaggcctcttcatttcctattagctaaagaggaggcaagcctgagcctcttagagtttggagcctccaatggagtgatcagcatggtgcatgttagcagagctctgtggcttcatcctttgcaattcttttatttatttatttattttttkgggggatggagtcttgctgtgttgcccaggctggagtgcaatggcatgat

SEQ ID NO: 902480 - DNA, 613 bp, Homo sapiens
aagctatctgcagatttaatgctattcctatcaaactatcaatgtcactkttcacagaactggaaaaaactattctaaaattcacagggaaccaaaaaagagcctgaatagctaaagcaatcctaagcaaaaagaataaagccagaggttcaaactatagtctaaggctacagtaaccaaaacagcatgataccagtacaaaaaaagacacagactaatggaacagaatagagaacccagaaataaagccatacacctatagccgtctaaacttcaacaaagttgacaaaaaaataagcaatagggatgactccctgttcaacaaatggtgtgggatagctggctagccatatacagagaatgaaactggatccctacttttcacaatatataaaatttaattcaagatggattaaagatttaagtgtaagatcttaagctgtgagaatcctagaagaaaacctaagaaacattttagacatgggtcttgggaaaggatatatgactatgtcctcaaaagcaattgcaacaaaaccaaaaattgacaaatggaacgtaattaaactgaagagcttctgcacagcaaaagaaactatcaacagagtaaacagac

SEQ ID NO: 902481 - DNA, 597 bp, Homo sapiens
cctacgccaaccacacaaggcagccacagcaggtcagaatgacagggtggtgtgtgtgagagaagagggccacagcaggggtccagaacatctctgttcacaggtggtgtggaagtgtctggagttctcaaatgygctagtgagggatacagagttgagagcaaggggctgggcttgagtggccattgtgagtcgccaagtgacacagttgattgccagaggttctataaggccattgaggtcagagatggacatcacatcaacaaggaagccaccaagcccggaaggtgctaaaagagcacacccaggggaccccaccatgaatgtgtcagtagcaggtgcacaaggacagaggccatggccagaaagagtcccgctggaggtcagaggaagctgggacacacagcactctcaccaggaacctctccctgaagcagagaggatgcagaagcttctcttgtttgaaggcactgaggaatgtcagagggaggggagaccctctgaaatcacccacagggagtctgaacttcaaattgactaattgctacaaaggccattttaacccagaaaagactgagttgtttttaattcacaagt

SEQ ID NO: 902482 - DNA, 636 bp, Homo sapiens
aacaaatgtgcactacaacaaactccagaaagggtctgggggtgaagtttggatataaatttctcccttctgtaaagaggacccaagagtaaatacttgtactgttttccccttggagtatcaagaaggcaagggtgtaaagtgggaatataaatgctagcatgccttatctagatcctaaagggctaatgatccctgggattttgttgcctaagtgatgaggaagaggctgtggttcctttgggctataggaggcctggaagttagtcaggagtgacagccagcaggacaggtaatcaccaagaggtcccctgggagggcgaccagattaaatgccaaggaaagggcgtggcctgtctatggaaacataaaggtgtggctacaattgccatggcaatgacctcagaagagtcagtggctatgcactagagtaatgccatcttcattcacacctctagaatggaagccaagtcagctcttcagaaaatgacagacatgtcccccagtgtcatgatgctgtgtaagtctcccctggaccaacaagctcccctggaagtaaaggmgaaggaaaaatgggaggggcagcaatacttaaactgagtaagttttaaaccagggtagacttggtttagatta

SEQ ID NO: 902483 - DNA, 672 bp, Homo sapiens
aactgcccttatcttgtctgagtgtcaaaatgtcatccaggagacctagagacaaagagtttacaggtggaaagtccagctgtaaattaactgcattgtccatatcctcttatttttctgaatttggggcttaaatttggggaatgcaaaatgaagagttttcagagaagaggaggtataaaaacatgagacagtctctagaggcaggtaatagttacccaaatgtttgttctctccaggcaatatttgaaaacacaccataacaagaaacaataattagtagaaacttttaattcttttaagctgtgagggtttttttgttttgttttgttaaaataatttaaaagcatgtccaaaggaatgagggctaatagaatattatagtgctaaaaaaggtacatctgtgagaaaaaatgactgagtcattttacagaaaaacacaaattataattttctccttttggttcactattcacgtaacaaattgtagtaaataatttactaatactgctctatgtgcaagaatttagacatagagagakaaatacacaaacagatgataaacataaagattttaactttagtcttaatatataattttataaatatattaaacaaaataatgcttattatattgaatttaccattttaattttctgcaacaatttcctg

SEQ ID NO: 902484 - DNA, 591 bp, Homo sapiens
aatgattaagtggcaaattagtgcaaaataaaatayaaaggtatgttttgtcatattagtgaggcctcaaactcctactttaaatttatgtttttcagttttcaggcactgaaatggcatttgctatggtacttagtacaaagtaaatctgtgtgacctgaattgaattctgtaatttaggtttgagaagggtggaatgaattggtatactttctagaaaatgaaatattcaatatttgcgtttggatcatctcacagcttatacttgtataacatcggatatgttccagaacatttcacctctcttgtctcttatccccatgtgttgggggagagagcgtggacttctgccacagttcccattgtaccatggaggtggggtgacttgggggcccaagacatgttaggataacgactggaaatagccagcctcctagctctctgctgcatgctttatctaccagaccactcagctttcccaaataattgacatttctaacctggaatgctattagaaacaataaaaataaagtgtgatattgtataagtacgcttcagtttcgctgtatgccaaaacttccagtggctgag

SEQ ID NO: 902485 - DNA, 547 bp, Homo sapiens
atcttgcaaattcatcctacattatgccaaatctatagctgttgattctcaccttcaatctgccacctttggtaagtattcaggaatatagatcaagtcatttaaattggcttagctcaggctctgctcatggaccaggctcagccagacagcacattgttttatttggtctgtgttaatgccccacagctagtgagatggttttcatctgtcatctctctgttgacagacacactctccccttgctgggcttcttgctacctgaacctcaaatgttcccccaaagtcttttacaagacttccccagaaagtgatgaatgctgcaaaaagggaaaacccaagtcagtgaggagggcaaattggcaagaatttagagttagaatgagtgactggaaaagagaactctggaagtaaacaggggtgaagcataggcaggtaaaagagaaaaccaaagagatggtgcaaacrtacctagattctgctattccagtgagcaatggagaggcctaatgatgttaacagggaaggagctatgcctatccaggct

SEQ ID NO: 902486 - DNA, 676 bp, Homo sapiens
agtgttttactaccaattttgtggtcagttttataataagtgygatgtggttctgaaaagaaagtatattctattgatttggggtggagagttccgtagatgtctattaggtttgcttggtccacagctgagttcaagtcctggatatccttgttaactttctgtctcattgatctgtctgatattgacagtgggcaggtaaagtctcccactattattgtgtgggagtctaagtcacttcgtaggtctctaaggacttgctttatgaatctgggtgctcctgtattgtgtgcatatatatttaggatatttagctcttcttgttgaattgatccctttaccattatggccttctttgtctcttttgatctttgttgacttaaattctgttttatcagagactaggactgcaactcctgcttttttttttctttccatttgcttggtagatcttactccatgcctttattttgagcctatgtgcatctctgcacatgagatgtgtctcctgaatacagcacactgatgggtcttgactctttatccaatttgccagtctgtgacttttaattggggcatttagcccatttacatttaaggttaatattgttatgtgtgaatttgatcctatcattatgatgttatctggttattctgcccattaattgatgcagtt

SEQ ID NO: 902487 - DNA, 676 bp, Homo sapiens
agtgttttactaccaattttgtggtcagttttataataagtgcgatgtggytctgaaaagaaagtatattctattgatttggggtggagagttccgtagatgtctattaggtttgcttggtccacagctgagttcaagtcctggatatccttgttaactttctgtctcattgatctgtctgatattgacagtgggcaggtaaagtctcccactattattgtgtgggagtctaagtcacttcgtaggtctctaaggacttgctttatgaatctgggtgctcctgtattgtgtgcatatatatttaggatatttagctcttcttgttgaattgatccctttaccattatggccttctttgtctcttttgatctttgttgacttaaattctgttttatcagagactaggactgcaactcctgcttttttttttctttccatttgcttggtagatcttactccatgcctttattttgagcctatgtgcatctctgcacatgagatgtgtctcctgaatacagcacactgatgggtcttgactctttatccaatttgccagtctgtgacttttaattggggcatttagcccatttacatttaaggttaatattgttatgtgtgaatttgatcctatcattatgatgttatctggttattctgcccattaattgatgcagtt

SEQ ID NO: 902488 - DNA, 630 bp, Homo sapiens
ctcttctgacttgtagggtttctaccaagagatccgctgttggtctgatgggcttccctttgtgggtaacccgacctctttctctggctgcccttaatattttttccttcatttgaaccttggtaaatctgacaattatatgtcttggggttgttcttctcaaggagtatctttgtgttggtctctttagtttctgaatttgaatgttggcctgccttgctaggttggagaagtactcctggataatattctgaagagtgttttctaacttggttccattctccccatcactttcgggtacaccaatcaaacgtagatttggtcttttcacatagtcccatatttcttggaggctttgttcatttcttttcactcttttttctctaatcttgtcttctcacttttttttattaatttgatcttcagtcactgattccctttcttccacttgattgaattggctactgaagcttgtgcatgtgtcaagaagttcttgtgctttggttttcagctccatcaggacatttaaggtcttctctacactgtttattctctttakccattcatctaaccttttatcaaggattttagcttccttgcagtgggttagaacacgctcctttagctcag

SEQ ID NO: 902489 - DNA, 703 bp, Homo sapiens
gtgtggagacgtctccaagattcctttcaggcaagctccccctgccttgtgggtagagtgacttagtttgctgtgggaggcgcatgaatgattctggtcaatatgctatggagccggaagctcccagcaggtgccattccttccagttaaagctttgactcctcatcagtcaccggtccaacaattctccttgctacccctaatccattctctgcccttccatgtgccctgtgtcaattgtattcacccctagaaccctagcatctagaacagtgccagcacatgggaggtgatatggtttggctctgtgtccctacccatatctcatcttgtaactcccataattcccacgttatgtgggagggacctggtgggagatgactgaatcatgggggcaggtctttcccatgctgttcttgtgacagtgaatgggtcttaagagatctgatggttttaaaaatgggagtttctctgtacaagctctctctttgcctgctgccatctgtgttaagacgtgacttgctcccccttgccttctgccatgattgtgaggcttccccagccacgtggaattttaagtccattaaacctctttcttttgcaaattgcccagtctcaggtatgtctttatcagcagcatgagaayggactaatacaggaggtgctccgtaaatatttgccaaactaatggaaatgctatgta

SEQ ID NO: 902490 - DNA, 628 bp, Homo sapiens
gctaacatttctaagattctccacatagtagagactactatgaagttaaagctatcaggatttatatttcaatagacataggaaagttgtaactaaaatacaataagtactacaaaaaaaaacgcaagtaaattaagctttttagtattttctggcaagttttttcacccccaaggacatttgtaatgttgttatcttcttataacagttaactaaacacttagagaaatagccagatagacacaagctagaccatattaaaatatagggcatattttaataataaacacaaactctccatttgacataataaattctgatcaaacttttcacttcttgaaatttcagaaaaaactattttgcaatccggctgtttcttccttaaagaatgcttttggaatatttggagttgcttaatagagactggttttgattgggaaacatggcgttacttaataacacaggcatgacagccacgtctgaattagcaactgatcacatgagtaagaaaaacatctagtgacggaagaagagtcagggactgagaaayaaccatgacaatgcacagggcatctttttacagagcctacaagaatatacacttcactggacagggattttaaattat

SEQ ID NO: 902491 - DNA, 432 bp, Homo sapiens
tactaggtccacttgatccactgctgagttcaagtcctgaatatccttgttaattttctgtckcgttgatatgtctaatattgacagttggttttaaagtctcccacaattattgtttgggagtctaagtgtctttgtaggtctttaggaacttgttttataaatctgggtgctcctttattgggtgtatatatatttagaatagttagcttttcttttgttgaattgttccctgtaccattatgtaatgccctttgtctttttttgatctttgctggtttaaagtctgttttgtcagagactaggactgcaacccctgcttttttttttttttttttctttccatttgcttggtaaattttcctccatccctttattttgagcctatgtgtgtcttttcatgtaagatgggtctcctgaatacagcacact

SEQ ID NO: 902492 - DNA, 671 bp, Homo sapiens
gccacctgagacacactgtctcctgacagagctcaggagagcaagaggtgtgaggagatgcasttggtgcccttatgtcttggtgcaccgggcacgtggtcaagcctgttcacatgcacaactgtccatggacacaaccaaggcacagtccaatggcactagtccaagggaggggtgaggacttgggggcaggaatccagcccttcccaagccctaaaccctttacaacagaagggcaactaaatacacagggagacaggtagactcacaagtgatcagaataaaagccagtgcacaccccagataactgcagcggccacgagccttgtaaagacccatgttttacggaggcagccaccagcttgcagaagctgagcttcctgtggccctgattctgcattactgaactactcatagaaccactgtttctgtcctcaaagcttctgtcttggtcccattgcctgactttataacaaccttgaaatacccaccaggactggtgatctcattcaagacacagaggtccgtctcaggcactgtgctggggcctgcctgtgcccagcctgcctgtaggactttggagtccgcaatgtcgaagtccttctgcatttacaccctgtggcctgaaccctgacatcatctcacccccagaccacccaacccatgactct

SEQ ID NO: 902493 - DNA, 666 bp, Homo sapiens
tgatgcctccagatttacactttttgcttagccttgctttggctatgtgggctctttttttgttccatatgaattttaggattttttttctaattctgtgaagaatgatgatgatattttgatggaaattccattgaatctgtatattgctttggatagtatggtcattttcttaatattgattcttcctatccatgagcatgggatatgttcccatttgtgcatgtcatctctgatttctttcagcagtgtttggtagttttccttgcagagatcattcacttccttggttaagtatattcctaagtattttatttgttttgcagtctttgtaaaaagagttgcattcttgatttgattctcagcttggtcattcttggtgtgtagcagtgctactggtttgtgtacattgattatgtattctgagactttattgaatccatttattggatctaggagctttttggatgagtttttaggttttctgcgtatatgatcatatcacgatgtgttatctttttgatatgctgttggatttggttagctagtattttattgagaagttttccrtctatattcatcagggttattaatctgtagttttctttttttgttatgtcctttcctggtttttgtattagggtgacagtggtttcctagaatgaa

SEQ ID NO: 902494 - DNA, 632 bp, Homo sapiens
ctaacacagtgatctttctctttgaaataaatgaataatctaaatgcctccttarcaatctagttcgtagtacagctctgaaaaaatggaattaatttttcattctataatctaaaagtatactgctcaatattatgaagtcactccgtctaatgtctccattatttcaaaatttaaaataatgctggaattcaggccctgaacagcatagagattatagcaacaactgcattaatctagcgttcattgtcctgtatgagaaggcttattttaagctgcatgaagtttactagtttatcggtttttaattacattttattaaaatatgactctggggcttcttttataaccatagaagaacatttgatcttcatttaaaaataaaactctcatttcaaaatcccaatgcttatgggaagcagaattaaatgctcttatttttttcaagtttttattataattgggattaaataccaataaatttatgtctgaattttataatctcctcatgcaatatagaacgcaagctgaactctttgtgtctactgttaaaattacttcttaaagttaattccatatccattattctttttcttctaattgagttgccttaacttcagtaaattgccctg

SEQ ID NO: 902495 - DNA, 457 bp, Homo sapiens
  misc_feature 430, 431, 432, 433, 434, 435, 436, 437, 438, 439, 440, 441,442, 443, 444, 445, 446, 447, 448, 449, 450, 451, 452, 453,454, 455, 456, 457: n = A,T,C or G
cactttctatgttgatttttaatgcttaggatgacygctaatcatgcaatagtacttctattgttgttactattttaatttgcaataagtttgaggtatttctatctttatgtgttacaatggttggtagtttttgtttttcctgtattgcccttaccatatttggatgaaatattctaacagtctcattaaacaagttctgtagtttcccttcttttattctactgtttaaaatatttggtataagatagaaatagtctgttttatgaagttaaaaaacttgcctacaaatcatattaggcatggcaagtttttgtttttgagtttttagtattcattcaatacatagtgtgattgtaaaactatgagcctttttgaagatttctggctttaaaaaacacttcaacgtccttgttctggtgccaaatannnnnnnnnnnnnnnnnnnnnnnnnnnn

SEQ ID NO: 902496 - DNA, 608 bp, Homo sapiens
ccctaggactcacattgtacaagtgtcaattgtacatgtatataaatacacacacacacacacacacacatccctacatacacwcgcacaaagtaagcaggatatgaaagaaaaaagactattggctgagcatgatgactcatgcctgtaattccaacattttggcagggcaagatggaaggattgctggagcccaggaatttgagaccagcctgggcaacatagcaagaccccatctctaaaaaaaaaatggaaaaagatgctggtattactatccaattcatcacagaataaaatgtgcccatattaaggagatccaggtctccaaatgcatagtttttctctagtaggacccacacattccaggattagagaattattcttcatctcaaggtgatgagtaatctgcacatttaatttaaatccatttaattaactatagcatttattataagaaagaatttatatggaactctagattcctaagtcatatagataaaaacaaaatatgtgtgaagagtaaatttttttaatggcccatataatttcactcactttctaaaagatgagcctgagccattttttcttaatatcaaggatatttttga

SEQ ID NO: 902497 - DNA, 608 bp, Homo sapiens
ccctaggactcacattgtacaagtgtcaattgtacatgtatataaatacacacacacacacacacacacatccctacatacacamgcacaaagtaagcaggatatgaaagaaaaaagactattggctgagcatgatgactcatgcctgtaattccaacattttggcagggcaagatggaaggattgctggagcccaggaatttgagaccagcctgggcaacatagcaagaccccatctctaaaaaaaaaatggaaaaagatgctggtattactatccaattcatcacagaataaaatgtgcccatattaaggagatccaggtctccaaatgcatagtttttctctagtaggacccacacattccaggattagagaattattcttcatctcaaggtgatgagtaatctgcacatttaatttaaatccatttaattaactatagcatttattataagaaagaatttatatggaactctagattcctaagtcatatagataaaaacaaaatatgtgtgaagagtaaatttttttaatggcccatataatttcactcactttctaaaagatgagcctgagccattttttcttaatatcaaggatatttttga

SEQ ID NO: 902498 - DNA, 570 bp, Homo sapiens
gactttttctatcaagaattccagtaaccaagccaaggaaatacaacttttataaataataataataatgataaattacatatatgtagccaaccacatttattgctaaccaccaggcaattttgtaggattattacatttaatgcttagaatattcctatgacattgttattgctatttttatttctcagttgcctaaagtcacatattaaatggaaaagctgaaatgtacaactctagtttagtctaaatacaatgccaaggttttttgtccaaagcagagtacttttcgatatatgtaatccacaaattggcatgtaaaaaccttcattttacataaaatatgcatttctctaggcattttatttaggtctctggtatattttgattaaactaagtaagcagttaaagatctaatctcttgatgtctttagtgttaaagataaataaggtcaaaacactttttacatgtagtaactcagttgactatcatcatagacctgttaggaaggcacttttgtagtacattgtactggagaagaaataaygaattctaaatccaagcttctc

SEQ ID NO: 902499 - DNA, 669 bp, Homo sapiens
atttgttccagggctcagaccttggggctttgggattttaaatattgttattatagttgtgggtaacattattcaaaggagcctcttttgcttaagtccttttaaaattcagggtacatcttagagctccctgtgcaccaacaccaagttttgtttatgtaattcaaattcttcttcacctagatgattgccaaatggaaattgaaagtcttcaaggactaaaaatacttggtgaacagtcagcaggtttgcagtgtctttggctatggaagcttggataaaatatgaacaggaatcaaattttaggtcaggacagacattaagaggacaaaacaagcaatattgagcagcaaagtgcatagcattgccaaccaatgcatgtcaaaaaaaggcttagttcaaatccagggcaagcacttgataactacctgatcttgctaacttgctgaatttcactcatcctccatcttttaatgtgtgcaatggaaataacagtagcacctgccttcaaaggtcttataaggattaaataaactaatgcctatgagaaattttgaacaatctctgacatatattaagagcataatataaagtaagtatgccaatgtaaatatttgtagttgattggataagaaycataggtgaaaagggattctctacaatgaaggt

SEQ ID NO: 902500 - DNA, 590 bp, Homo sapiens
ctggtcatcagagaaatgcaaatcaaaaccacaatgagatactatctcaccccagttagaatggcgatcattaaaaagttaggaaacaacagatgctggagaggatgtggagaaataggaacacttttacactgttggtgggactgtaaattagttcaaccattgtggaagacagtgtggcgattcctcagggatctagaactagaaataccatttgacccagagatcccattactgggtatatacacaaaggattacaaatcatgctgctataaagacacatgcacatgtatgtttattgtggaactattcacagtagcaaagacttggaaccaacccaaatgtccatcaatgatagactggattaagaaaatgtggcacatatacaccatggaatactatgcagccataaaaaaggatgagttcatgtcctttgcagagacatgtaagaagctggaaaccatcattctgagcaaactatcacaaggacagaaagccaaacaccgcatgttctcactcataggaaggaattgaacacttggacacagggcaggyaacatcacacactggggcctgtcgtggggtggggt

SEQ ID NO: 902501 - DNA, 645 bp, Homo sapiens
gccttgggggcatcaggcccatgtaagtgtaaggttaccacgagggaaggagagggattacaagcaagtttatagactgaatgttgaagccaccagcctcttctcactttcaggtctcagaacctcagcagctagatgttaccttccaggaaggagatcagaagaatcttgtctgggcaatctgaccagactaggaggacaaattgaaggataatgaaattgaggatgcccaaagtaacagatcacagcactccatacgtgacatccacgatggggaagcctagccacttgcacagcactgccaatcagacttttagtttcctaatttaaaacataagcagacaactaagaattaccagaaagtcaaagatgttctgtaactgaaaacatagagactaaaacaagtggggaaataaagtaaattggagggaataaagaaaatgcaagaataagaaaacttaaaagctgtcatcagtattatctgatagctagtaaaatacattatctttatraaacaaaagaataggagactataaaaattagcattcagatagcaaaaaatataatcttgaaaatgaaaaatatgatgacaaaagtgaaaaacttgatagaagaactggaagataaaggtgaagatatcaccca

SEQ ID NO: 902502 - DNA, 673 bp, Homo sapiens
gtggctaggcaagatagtgaacatttttcaccccatgtttttacatttataaaatgaagataataaagtttatctcacacgattgcaggaatatggaaaaacttcttacaaagagcactaagtcaatgtcagcctcctctaattttcacaggtgttttggtccttgaagactgtaagccaatactttttacaaaacacaggtattctaaatttttgctgtaaaactgacctcctcaacacttacatggagccttgtatttaagaactttattttacagtccttgaatatatctgagtattccagatgactcacatgaatattcaaggccattgaggtgttatgttacattaggtgaatatcttctctaataaagttgtctacacaacgtcaggtaactttgatttggtcagctcagtaggaaaaactcaactactgcttaaacttatgtgtggttcctgatttaacttgtaattttggtcaaagtggtagatctggtaactttaggctgactcctcatgaactataaagcagctctgagttggatatggcacatttcagcagaggcatgtcattttacctcacttcatccttccctrctttctgggactggtctagactcactaagtctcaaaatatagcactttctggtattgaaaaaaacaaaaatatatc

SEQ ID NO: 902503 - DNA, 582 bp, Homo sapiens
cctactcaataaacgatgctgagacaactggctagtcatatagtcatatgcggaagaatgaatttggaccctacttttcaccacatacaaaaattaactcaagatggattaaagatttaaatgaaagacttcaaacattaaaaatcctagaagagaacctagaaaatgacctcaacatcagctttggcaaacaatttatggctaagtcctcaaaagcaattacaatagaaacaaaaattgagaagtgtaacctaattaaatgaaagaacttcagcacagcaaaagaaagtatcaacagagtgaacagacaatctacagaatgggagaaaatattcacaaactatgcatccaaaaagtgtttaatatccacaatgtataaggaacgtaaacaactcaaaaagccaaaaaagaaaattcaaaaaaaaaaaaaccctattaaaaagtgagcagaggacatgaagagatacttctcaaaagaagacatgcaagtgaccaataaacatatgaaaaaaaatgatccmccttactaatcacagaaatgcaaatcaaaaccacaataagataatgtctgataccagtcag

SEQ ID NO: 902504 - DNA, 635 bp, Homo sapiens
ttattctctatataatggagagctctggaggggttttatacagaacataatataatataaattatttaatacatgtgaaaagacttagaattgtttatgtcatgtagtaagccctctataatttcttgttattattatcatcatcttcatcagagcaatgtttattaatcctcttaaaagaatttctacctaatgttcatattctaatgtacaaaactgtgagtttgcttttggtattttcaaagcactttctttgcaaaaacaaattgcaggaaagttgctcccagttttagtctcctactctgaaagaagtctggttccaaagtcaaccacctgctttaatctccagaactcactccaagttaaaatcactcaactccagtctatcaccaaacacgaaaaatttcagtttaaaaggatctccagcatctgtctggcaccatggtcgacaaagccagagtgagccagggctcctgcttatatgaaaaggaggagtctgagtatatttgcctggtgatctttgcaaaaaatgaagagaygaccacagaggagacccagttcagggaagtggagaaatgagcaggcagctttacacagaccacaaaaagttaatcaggctttggaacaattttatt

SEQ ID NO: 902505 - DNA, 637 bp, Homo sapiens
caaaaatcatgggactatgtgaaaagacaaaacctatatttgattggtgtaccttgaagtgactgggagaacrgaaccaagttggaaaacactctttgagatattatgcagaagaacttccccaacctagaaagacaggccaacattcaaattcaggaaatacagagcacaccaaaaagatactcctcaagaagagcaaccccaagacatgtaattgtcagattcaccaaggttgaaatgaaggaaaaaattttaagggcagccagagagaaaggtcagcttacccacaaagggaagcccattagactaacagcagatctcttggcagaaacccaacaagccagaagagagtgggggccaatattcgacatgcttaaagaaaagaattttcaacccagaatttcatatacagccaaactaagcttcataaatgaaggagaaataaaatcctttaaagagaagcaaatgctgagagattttgtcactaccaggcttgcctcacaagagctcctgaaggaagcactaaatacagaaaggaaaaactggtaccagccactgcaaaaacataccaaattgtaaagaccattgacaccatgaagaaactgcatcaactaacaggcaagataacctgctagca

SEQ ID NO: 902506 - DNA, 583 bp, Homo sapiens
aggatggcagtgttgtaagactcattctccaggcttaactttccttttggcataacaagtttgatggtcctgagaaattgtttgttgttgttgttgttgttgttgtygttctttcacaaaatatgcatttcttttggtctatctcctctcactggaatgaaagtttcacgagggcaaggatttttctgtcttgtttattgctatgtccctagcactgaaaacagttctcataatagatgcttcataaatatttattgaaaaaatagttccaagatagtcttcattttactattctgtgtttttttaatttttgcacactgggcacgaactgcttatataatcaaaaatattaaaataagcataaggaaagtcatacacaacacataactatatataactttctccaaagacattacaaataaaataggaaattctgggaaaatattgcaggtccagaaaatttaaatatttccaggttgagtaccttaattattcacttattaacttgaaatatattagtgatttctccctcttgtctatgaagctctttcttctcagatatatattttgacaaatataaatt

SEQ ID NO: 902507 - DNA, 440 bp, Homo sapiens
atttcttgagaactcactcactattgtgaggacagcaccaagtggatggtgctaaaccatttatgagaaattcacccccatgatccaatcacctcccagcaggccccacctccaatactgagaattacaattcaacatgagatttgggtaggggcaaatatccaaactatatctctattctgcaattctggagcacacagaattagggtttaaaaggtatattgtgcctcagcagaagaaagaagctgtgacaattggagctgtttgaaacctgttccacggggaggtgtgtggcacgtcattgaaagggatgaagagggccttctgtgatctttttatggatgtcatagaggagagtcacaaggacagagastaaaacaattatctatctttcctgccaactctaaggaagtctgggataataatctttctttctgata

SEQ ID NO: 902508 - DNA, 618 bp, Homo sapiens
gcaatactgtaccttcctgtatgagcttttaaaaaaagaacctgatactactaaactatagcaatagatgttaggatcatcttaatttgttttaattgcacctttctgcagcctgtcctccttaacggagatggcactcaattgagggactgcatgctagacagtgaaaagcatagcttagtgctcccatctaagaaaatgacccagatggttagcatttgtgattctctgagtacactctgccctcacttaatggcctcagtaggttcttggaaactgcaactctaagcaacatgatgtataacagaaccaattttaccaaaggctaattgataaaacgagaattaagttccgagggcatatttctggtcacaaaaacatcatcaaacttctaaataaagatctcaaacacttttaacattaaacattgaagtgaatgtgagcttatgtacttttaagaaagataattaaaagcaaatacaaaaattattttcccaattgtttaagttcaaggttgagggtggctggatcctaccccaacagttcaaggcctggagaggattccgtctcatcacagtgatcrcgcgcacacacacacacacgcgcgcacacgcacac

SEQ ID NO: 902509 - DNA, 179 bp, Homo sapiens
cagagacctgtaagcatgttcagagcaggsatatgttaattaaggagagaatttcccagtaagaagctcagcccacaacacctgataattaggaatgttataacaattcactgacccttcagggatcctttggtcgtgttggctgtcctcggggattcacagaaagcggtatcacaatt

SEQ ID NO: 902510 - DNA, 588 bp, Homo sapiens
gcagagacctgtaagcatgttcagagcaggcatatgttaattaaggagagaatttcccagtaagaagctcagcccacaacacctgataattaggaatgttataacaattcactgacccttcagggatcctttggtcgtgttggctgtcctcggggattcacagaaagcggtatcacaatttttcccagttgtcacttctgctgctgcttttgcagactgccacatttacaagtcttcaagaaattgtttggggagccacatgacaccgggatcacaggaactctcttttttgacagtatctgcctttctgccctcaggagccctttaacctcaacctgagcacttcttgggggaagagttcaacagcacaattcctcacaccccagagtatggaatcttgccttcagaacctgaatgtcacttggtgtcttagaatgaccttcttcttcagagggtgagtggtgagggggaccaaaacacaaatgtgtgtgtggcaggggggatcttygttacttcatattctcttgtagtagcaggagggtgcctgacttcaccacactgctatgtgtactattattgctaagcgag

SEQ ID NO: 902511 - DNA, 569 bp, Homo sapiens
cagctgtggagaaatttcactttggtgttttcctgggaatattttatacacacttttcagctgcccamattcaggggagatacgaaatccaggaaaggaaaaaaaaaaatcacttcattggataaaatgttttacaagatagcccatctgtctttgtgagttcagagtgtttttgtttttatttatttaagtggaactttaatgagggagaagaacatctttcccctcttcctgttcacctggcttggaggaagcaacctggtaaaacttcaatgaggcccaagtaaattttgtcactcttggattaatttatttgtaattaatcaagagttttatttggggatgattagcagccagccatattccagtttcgacatcctaaaaatattatcccatgattgactacttcttttgaagtgtggtaggaaacttgtccaacttgttaccaggttccaaaaatcctctctgttgacacagagggaaacctctaattacatgagtcactgtagttttacaactgaataaactgttaaagaaattggaaaaattgtcatcaagatgataaaggc

SEQ ID NO: 902512 - DNA, 673 bp, Homo sapiens
gtaagggctgctttgtgccagtgacaccattaaagcataaaatagaattcagcctcaagctccttctgatgtgacataggcagaaagtgtgtagtgtcttcatgtggacaggaggtctaaaatgagctccaaatgttctccactttgagaggggtgggtgacatggctatcttgccattgctccattctttgatggtgatggaaagcataaggctcccttccttccttccttccttcgatcaatccttccttccttccttcaattaatccttccttccttccttccttcgatccttccttctttcctttgatcgatcctcccttccttccttctctccgtccctccctccctttctccattccatccctttctccctcttttccttccatttcttcttccccatcctttttttatttcccctcagaatactaaagtcatatagcagggcaaatacagccaatgttgtgcctctgaacctgctttgaactcattgtttaactttgggaatactcatcttctcatccttctctcttcaattgccagcttcacactaggatatttacttggtaaattgttctccaaagtttagaagaaattgaactgtgctgagtgagaggtttgtgtrtatgatcaacttaatctcagtttctgctctgctgaataatcctgcaa

SEQ ID NO: 902513 - DNA, 651 bp, Homo sapiens
tgcctgtacctttttacatttctgtcagcaatgtatgagtgatccagtttcttcacrtctttgccagtatttggtattgtcactctttttaatttttagctattctgataggcatgtagtaatatttcattgtagttttaatttgccttcccctgatgattagtgatgttgaacatcttctcatatgcttatttaccgtctgtatatcctctttagttaaatatcttttcccattttctatttggattgcttgttttattactattgagttttgagattttttataatatactttatttactggtcgttagttggatatgtggtttgcaaatgttttccccagtctctctgtattttcatcttcttcccatgaggtttcaccaaacaaaagtttctaattttgatgagaacaaatttatacattttatggatcatggttttggtatcaagtctaagaagtctttgcctaactctaaatcctaacaatttgtttctggctttttttttccctgaaagttgtatggtgctgtttcttacatttaggtctatattccatttagagttcatcttcgtataacgtatgaggtttaggtcaagattctttttctttttttttgtctatgcgtgcttgatggctccagcaccaattgt

SEQ ID NO: 902514 - DNA, 605 bp, Homo sapiens
ggtctttgtggaaatccacggggagcygggtgagcaaaacgccagtgtctgacttcgccttgattgcatctgtgccctacaaaccccaacagaattgaactcacagctcctcctaattaggggagaaagaaagacaagaatgatagcagaagaatttcttcctgcttctgactgcaagctcttcagggacagcccattaagcccccagcctccaacttctgtttcctgactcatatctggagtacctaacacggtgccaggttctccctgggactatagccccgagtgtgacaagagtgatgaacaggggctggtttgaagagccagtccctgctctgggggcctgtctctggtatactgtgaggcaatgccaagtggcggcccaggggggatctgggaggcctcaagccagacaggtgaaggctggtccagggccttgcaggggtgggtgggaccttgcccgggaaggaggctgggagagtgaagtccaccactccatgcaaaaataaacaaacacgctgtttaagcaaatcaaatatcctgacatccaggtgcaaaccacagtgcctgccccatgctataaatttaggacagggtgtgaattg

SEQ ID NO: 902515 - DNA, 649 bp, Homo sapiens
tttatctcattttgtaatcctaacagccccatgggctgcgatattatgggtgaagaaactggccagagtggtcaagtgatttgtcattatcactcagtaatgacactgagattagaacatggatgtccatcctttgtccacactaatcattgcctagatgtgtgagctaagtagcattacacgagtatggaaactgaggcacaaatcatctctggcaccaaggggccctagggctatgagggagtaatgttaacaccaatgcccttgtcatggaaatgtgagcccaaaaagggttgtgctttccaaaccctgggcctctgctgtctttgagcaaatgaagcaatgccaggactgtctgggtttcatcattcactgtgctgcagcagccaaaaccttatgaccctcccttacaaaatcagtaagaagaggatattgcggtagttggatgcacagagttttcatctatgttccaggattcagggggtctgtgatctaccagaaaaatgttttacaaacatttgtakatttagttttttgtgtagcgggcccattgcttacattagattctcaaagttgtctatgaccctaaaatattaagaccctttgtctaatggtttttttttttttctttttctttttcttttgagac

SEQ ID NO: 902516 - DNA, 661 bp, Homo sapiens
taaagttcttttaaaatgtacccttaaacttgaatcctcctataaattagatatcaacctcctaaaatatacatatttaaagcatcattaatttagtgaagagttataaagtaaaattacaaaatgttacttaacaaaagaatggaatcagcttgtaccttcacagttaaacattttagtaacagctcatgtgctgataaatttctactctgatctcagaaaattacagaagctctaacactgatgtatctatttttacttttactgtaaattattaaattagttttactattgcagtgaattattaagttattttatcacatagccctggagttcaggattgtttcttggttttagtttagtaactcagtgtgactattgatttccttcattccaatattgtctttgctacctttaggatcttagagctatccagggtattgtgtactttcaagtggaaatgtcttggtcttcccttcagtaaccttcataaacaaataacagcaaacagtcaagcagcaaaagtcagtttcacattagtttctggcttgttttttagttttgattttggaacattgagtctagggaatgmtctgtgcaggaagatgtagaaagtgagcattttgaaaatcattagtttcaaggatcatattctgatgac

SEQ ID NO: 902517 - DNA, 690 bp, Homo sapiens
taatcagacaatctaaagtaaaagataaagagtaaatccaaaaagtatcaagagaaaagtgcctactcacttataaagaaatgactgaatagattctgaaaacaaaacaaaacaaacaaacaaacaaaaaccatgattcaaaaatacgctgcctagaagaaactggctttcctgtaaagacacatatagactaaaagtaaagggttgaaaaaagacattctctacaaatggaaatgatcaggagtctgtattcccatataagataaaagagacttcaaagcaataacagtagaataaagacaaggtaattatataatgataaaataatgagtacagtaaaagggtataagaattttaaatatgtattcagccaacactggagcattagattcatgaagtgaatactccttgatctaaagagagactgacatacagtatagtgagagacttgaacatgcctttcacagcattagaaagatcattttgacagataatcagctaagaaacatggaatttaaactgaacattagaccaaatggacctaacagacatttacaaaacattatatccagcaaatacacaatatactgttgttttattagcacatagaatattgcccaaaataaaccatatgtaagggcamaaaacacatctcaaagaatggaaaaaatgaaatcatgtcagtatcta

SEQ ID NO: 902518 - DNA, 541 bp, Homo sapiens
atcctggagtgatttaggaaaactatagaagctattgaaatcattaagtatagcccaagaacggtggaccagctggaagaaaaaaatagagctccagtctcaatatagggaaccatctgtggcagtggttttcaacccagattgcatattgctatcagaattcaccagagggctttaaaaactaccagtgcctgggactcacccaagaccaattaagttagcatctttgtggttgggatctaagaatttgaatatttgaaatgctccccaaggattctgatatgcagtatagattgagaatcactggtctagatcattttaatctagggaaattgtgcagttgaacaaatcagatgaaataaaaataagagaatacttctaattttgaggcactaaatagaagtgactataaaagtatagtaaacattaaaaaggacaagggtgaatcttgccacatccctttaaaattttagacagaaattagtgcagtamatttatagggtcatactttcttaaaagaccatcagagcagggatagact

SEQ ID NO: 902519 - DNA, 677 bp, Homo sapiens
taaattcctagtgtcttaaaatagacaatggggggagaaaacaagagaaactgacactacttcttgtgaatttycattgcttggaatctgtgaagagctaaatgataaaattatgctgaattattacttactatttaattaatacctaaagtattaatacctaaagctcctatctctaggatgaacagaaagttgaagctcaaatttatcaaattgctaatggataagtctgagatcagtagtatttttattttttgtttataaaaaggggctactagatcaatatttggaagccatgttgtaagatacatgtgaactttataaattggtattttcactgtagaatatttctgttgacaatatacaacattccatttagcactgttgaattatttaaacttgaattctagtttacttgacattatgccacaggattctgagagaatacaattatccagttatgcatttgtctagctaaaatttgaagatatatgaaatgaggattccttcaaacaggaagtgtgactattctcataaatttacggatactaagctaggctaattcttctagctatatcaaaattcttctacttaacatttcctagaagattttgttcatgatgtagatgtacatgttatttaaagtattttgtatcactacacatttttttacaaac

SEQ ID NO: 902520 - DNA, 572 bp, Homo sapiens
aaaaagaggtcatggctgtgctgacaccaccactgtagcacttcagaaactttctgatttataatctcaaccctggctagttccttgtctgcctccattaacagcgaggtgcagataaagaaacacagatggcacctattcatcagagatactagagaacacagcaaaccataaacccatggaataagactaattggaactgtgctttacatggcaaagatatgtgacttggtgtattgttggttaagttataaatgacacatcagaattacagtttcccagggggccctggcttgtcagaaaatgaccatttgaaaggagtaaactgctattagatggagaatgctaccccttctatgccaggagatttcgcaggaaaagtttcaggtcctctggctgagaattaaattcacgcaaactcttggctttattttaatacggaaaaggtttctaagcagatgatggtgacttctcagttttgtgaatttattgcttgttttatcagtcaaaaccattgaagtaggratgactgtattcacataaaaagagtcctgaaatgacagaaataaaag

SEQ ID NO: 902521 - DNA, 619 bp, Homo sapiens
caaaataagttaacttaggcaggaaagtccctaagagactaaacctatgttttaaccaagaagttattccacagtccaggcaactcttacaagttacttattttgttaccagtggcaggaatccgatttactttgagttatgggcagcgtatccatatgggtcctcagcaatttcagtctttgcctcttcagaagaaagaatttattctactgaggggcataaagcagaaaaagagactgaggcaagtttcagggcaggaggggaagcttatttaaaaaggctttagaacaggaaagaaaggaaagttcacttcgaagatatcccagagggtgcatgaaggtcagagaacattttaccttcttcctagtgtgtccggaattgatgggttcttggtctcactgacttcaagaatgaagccgcggaccctcacggtgagtgttacagctcttaaggtggcacgtctggagtttgttccttctgatgtttggatgtgttcggagtttcttccttctggtgggttcgtggtctcgctggctcaggagtgatgctgcagaccctcaccgtgagtgttacaggtcttaaggcagcgygtctggagttgttcctgcctcccggtgg

SEQ ID NO: 902522 - DNA, 625 bp, Homo sapiens
tgctatgatgctcaaggaaacatgcatgatttcattagcttagctgatagtgctgtttaagcagatttatgyaggtgagtaaagaaatgaaacccccaaccctcaccgaaataagtagcttcaagtagtatatgacagtgtaaaaaactgtaattgtgggatcagctgtagttagaaatatttcaggaaaggactgttttaagaggggccttttttaagctattatatttgttcaaagaataaccaaaactgtcacatttagtaaacatctctattaattgaagttctcctgttcattataaaaaagcaatgtaaagcaatataaatatatctgcatacccatgttcactgcaccattattcacaatagccaaaaggtgaaagcaactcaaatgtccataaatagataaataaactaacaaaatgttatatatgtgtgtgtgtatgtgtgtgtgtgtgtaatattaatcagcctgaaaaaaagaaatttttatacatgttacaacatgaatgacccttgaaaacgtgctaagtgaaataagttaagcacagaagaacaaatattctattatttcaactaaaatggtatctagagtagccaaactcagaaacagaaagtagaatgg

SEQ ID NO: 902523 - DNA, 581 bp, Homo sapiens
aaagacaaatctatgtgtttcaagacaagtttttcagactaactgtccaaaggaagagggaaaacagttgaaagacgggccatgattggtgttttcataagcatccattagtgtcttccaggtcaagcttgagttgtttaatagtaacaaaaatatgcattaattcatttggaaacatatcacttcttacagtgctttcctcattgcaagtcaagcattcatttatgctactattttctatttttacctctttatatttttatattgcaaagatgtataaactgggtgaaaccaatcaacagttaacttcaacagtaacaattcacagaggggttggaaggatgtataaaaatgtgaatagttgaaagttttgaaatatgaaacattcaaacaactattataactgaagaacatttcatgtaggaaataaaaaagcacagtacttgaggctgtagctcagtgtctttctgtctttatcccttagatgaaccatgaaaataggcactagcctgtgagtacagaacctacaaacattgagtcttaggataatytggcagcagacttaagaagaaacttaatat

SEQ ID NO: 902524 - DNA, 570 bp, Homo sapiens
gtcaaagatcagatggttgtagatgtgtggcattatttctaaggcctctgttcacctccattggtgtatttatctgtattggtaccagtaccatgctgttttggttactgtagccttatagtacagtttgaagtcaggtagtgtgatgcctccagctttgttctttttgcttaggatttctcttggctatacgggctaatttttggttccacataaaatttaaaatagtattttctatttcagtggtagcttgatggggatagcattgaatctataagttactttgggcagtgtggccatttcatgatattgatcttcctatccatgaacatggaatgtttttccatttgtttgtgtcctctcttatttccttaagcagtggtttgtagttctccctgaagaggtccttcacatcccttgtactatccagaatctacaaggaacttaaataactttacaagaaaaaaacaaacaaccccatcaaaaagtgggcaaaggatatgaacagacacttytcaaaagaagacatttatgctgccaatgaacatatgaaaaaaagctcatcatcac

SEQ ID NO: 902525 - DNA, 570 bp, Homo sapiens
gtcaaagatcagatggttgtagatgtgtggcattatttctaaggcctctgttcacctccattggtgtatttatctgtattggtaccagtaccatgctgttttggttactgtagccttatagtacagtttgaagtcaggtagtgtgatgcctccagctttgttctttttgcttaggatttctcttggctatacgggctaatttttggttccacataaaatttaaaatagtattttctatttcagtggtagcttgatggggatagcattgaatctataagttactttgggcagtgtggccatttcatgatattgatcttcctatccatgaacatggaatgtttttccatttgtttgtgtcctctcttatttccttaagcagtggtttgtagttctccctgaagaggtccttcacatcccttgtactatccagaatctacaaggaacttaaataactttacaagaaaaaaacaaacaaccccatcaaaaagtgggcaaaggatatgaacagacacttttcaaaasaagacatttatgctgccaatgaacatatgaaaaaaagctcatcatcac

SEQ ID NO: 902526 - DNA, 588 bp, Homo sapiens
ctgtgttagcctaatccccccatttaaacccggagtagcatgttaattctgtagccagaagagtgtcttgtcataactggcagggtcctgagattttggaatatgagtcttgctgtctgctactccgcacttaatgtcaacgagatgactgttttattacttctgggaaagaaatggggcacttaaatacaggcagattcagcagagcctggaagcagatagagcttgactccttggaagtaggtacaggttgcagagctgttggctgttagatatcatggcttaatgagtatggcatggacatggcaaggcccttcctcaccacagctgtcagtgtcatctgcacatgaagtggaggtggggacactctggggacatccctagccatctgcccctcaggctgaatccagactcagcaaccttcctcccaacttcaggattaattcccagatgtcctttttctcaaatgtagggagtgcttctggktgtttttttttttttttttttttttcagacatcaggcacaaatgatccaagcagagcctgcagagtacattagactcggtctgaaggcactagcctgagggg

SEQ ID NO: 902527 - DNA, 668 bp, Homo sapiens
gtttttctccagtattgtgttggacattctaggtctttactctttccatataaactttataaccagtttttcaacatctgcaaaagagtgtgctggggttttattgaggtcgctttgaacctttagagcatgttgggaaaaaatgacattttaacaagattgaatcctccaattcatgaatctagaatatctatttatttcagtcaaagtatttattaatttagatttttttatattcttatcaatatttttatagttttctccatatatatcttatatacattttcttagatttatacctagatatgccatattattgtgctattataaatagtaattttaaaattcaaattgcaattgttcattactggtatgtagaaaaccaatagacttttgtatactaaccatatatcctatctccttctatacttgctcattagttacagaagttttgttgttattattgttgttttgatgattttttaaagatattctagatagataatcatatcatctgcaaagaaagctttatttcttactttccagtctgtatacttttgttttctttcttattttattgtaccagctagtagtaattcagtgcaccgttaaataagaatagtggcaggaaacatcttgccttcttttytaagcaagaaagcatatgg

SEQ ID NO: 902528 - DNA, 578 bp, Homo sapiens
atttctgagtatatgagattcaactcactttagatggctagcatggtcagtctgtctttgagatgcgaaatgtgcaccgtgctttcttgtttatttccyttttttttttttttttttttttttttttggatacagagtcttgctctgtcgcccaggctggagtgcagtggcgcaatcttggctcactgcaagctccacctcctgggttcacgccattctcctgcctcagcctcccgagtagctgggactacaggtgcccaccaccacgcccagctaatgtttttgtattttcagtagagacaaggtttcaccatgttagccaggatggtctcgatctcctgacctcatgatcctcccgccttggcctcccaaagtgctgggattacaggcgtgagccactgcgcctggccttctttcttgttgatttcaactaatctaaaagtgagagcagttatggtatatggctggttatatatatatattttttggagttggttaatctgtggagaggtgagagcaccaagtacccagtgttaagaggcatatctcagctactcaacctaccaaaaatgttttca

SEQ ID NO: 902529 - DNA, 621 bp, Homo sapiens
cctatattgaaggcaaaggccaagaaaaagattatgagtacattggcttgtggttgcaaattaaaaatgcgctaattctactgtataaggtgggccttsttaaagctcatacactcaagagtgtgagaaatatactctataatgtttctgggactcaacgtatcgataagtgcattgtttgggggtccaatgacctggggtgttctgaaatgttcctcaaacataaagaaacccaaattacagtatctcacaactccccccataaagaaataagcaacatgtttagtagacttcatttctgaagaagtggtcatgaatgacattggtgaagaggaattttcatgtgggcagagcttcaggtgatatacttggtcattcatattgtgtggcaagaatagtttccatagatgacaacatatatgaactcattggcagtggggaaagacttgctttgtttatcaggggcctagaagcagacagcttagaagactgagacagagaggtctacagaaaaggcgtgtgcataaatgaggggggtaagcaaaaagagtgaagatctttatgttaccttatgatgctttattagtcaaagttctccagagaaacaaccaatggtgtgtg

SEQ ID NO: 902530 - DNA, 599 bp, Homo sapiens
ctttttagaactgtgattaagaaggtaatgattagggatgatcagttgtctcaccagcagtctgttargtggagctgacctgggctcatgccatctgcaaaggaacccatgggaaccagggaccattttcagcatttgaaaaggcttaacagaaactatgcttttacccaggatgaacatacaaaagctacccaaaccatcaagtttccttgcttttgtttggaattgcaaccctgtatggaaggtttcatgctgactccacgttctgattggctgtggatgacataataggagtttctgacacaggattggtctaactgtagatattgttactggagctggtaccaggtctcacttcccactacctttagaatgaggttgaccttgaatgtgagtgcccttgactatggaaatgaagccactgattgtttcttgcttgctcagctatgcttattatcacacctgtggcagtgacttgatttttataatgtcattatgaaccccttataaatatggattgttgattaaaatttggatcagtattgaaatggaagaataatacacagaattaatcagtttactggtaaacaatgtaagaa

SEQ ID NO: 902531 - DNA, 619 bp, Homo sapiens
gtctgactgaagaattaaaaagggggagaattagcatgtgtgttcagggcccttcctctcttttctccctattggaagtgagctgcccagcagacagggccctgttttacctactgagaragaaaaaatgtttgttcctgtggtgaaagatctgctcaggccctgcactgcctaaccttggagttcgcgtcgtggagctcattgtataaactacattcattccctaaaagctgacctctcattaataaaggggaggtttaaatatgtatttgctttacttattctgattctcaaatgaatcaaaattagagaacaggaaaagtttggagcaaggtcttgggctttgtcaaactctcctcacatttaacatatacatttgacatttaatttttttttattcaaattttggaagcaaaatgtgaagaagatcatagtagcctggtacatactgtgtgtgcatgcatgtgtgtgtttatatactttaaaaaattgaaacaagaagaagaaataaagagttaagtcacctgaggtgccattgccaatttcctgggaaaacaggtgaagcaaccacactgttgactattctgggttttatgtgctacctccaggaaagtaccgt

SEQ ID NO: 902532 - DNA, 600 bp, Homo sapiens
gcttttttcataaataaattccattttatacaaaatcgatttattaacaaatgagtttgctactagcacatacaggcatttttgtgcaaactggataaaagggagcttctttcttcaggatgaagcagcaatgagccagggaatatggcttgatgggaagaatatctctgtaatctaagaacaatcttaatgcccttgtcagacccttctcaatgaaaaccactgaatgttgaagaatattgttaaatcatgcagagatttagagaaaagatggtcaactgttaataaagccagtgtctaaattaagattaataattttaaattgacattttctaaaactaccacttcttgattttcttctttaaataaacagattatttcaagatagaaacaagataaacataagaagctgcatatgtagagtgtgtgtatgtgtgtgtgtgtgtgtgtgtggtttgggctagagggggggagagtaatacacttattaccatctatgtktccactgatatttggacattgttgttttaaaaaatagctttagggctgggtgcagtggtttttgcctgtaatctcaacactttgggaggctgaggcggg

SEQ ID NO: 902533 - DNA, 662 bp, Homo sapiens
ttactttatataatttttaacttgagttcttcaatattaaaaatgtgtttcatttgatttgacatatttaacayagttgttaatataattttaatttaccagttgttcaatgcttagtgactagtcaaatttattgtttgaagctcctctgtacttttatgtggaaaatctgacctttctagtatggactacttcccttttttcaactagtctgataggattttcacttgctaaaatgaaaattgtttatccatctacaacagaagtcaatggaaatgtgttcatggctgtatatacagctcgcagctaatctgagaggaatacaatgcaatgcacgatatggtttctccagacgtgttgcagcatacaaatggagtcaaaaatcaatatttctcaaagagatgattatcttagttgtatgcttaccccatactgctgaatacagtgaagaggttaaattaatgataatatcacaaatgatgcattataccatatattaaaaccatatgaaaatagacctgttataggttactaaggaaaattaataaagattttaaaaatgcacagaaatgcaattgagctgtgcttcaaattttattgatttaaaaatcaaaaattcaactctaattttcaatagaaataacctgtaaatacagtagatt

SEQ ID NO: 902534 - DNA, 609 bp, Homo sapiens
aagcccaaagctagtagaagacaataaccaaaatcagagctgaaggagactgagaccaaaaaaaaaacccttcaaaaagatcagtgaatctaggagctggttttttgaaaaaattaataaaacagataaactgctagctagactaacacagaatagagaagatcaaaataaacctaatcagaaatgaggaggatatcaccactgaccccacagaaatacaaataaccatcagagaatattatgaacacccctacacacataagctaggaaatctagaagaaatggataaattcctggagacatacaccctcccaagactgaaccgggaagaaatcgaatctctgaacagaccagtaacaagctctggaattaattcagtaataaatagcctaccaactgaaaaaagcccagtaccagatgggttcacagctgaattctatcagatatacaaagaagagctggtaccattcctgccaaaactattccaaaaaattgaggaggatggactcctccctaactcattctatgaggccagaatcatcctgataccaaaacccraaagagacataacaaaaaggaaacttcaggtcaatatccttgatgaacatc

SEQ ID NO: 902535 - DNA, 594 bp, Homo sapiens
atctataatgcttttcattatatatatacatatatatatattttttgagatggcatcttgctcttgttgcccagcctggagtgcagtggcacgatctcggctcactgcaacctctayctactgggttcaagtgactctcctgactcagcctcccgaggagctgggactacaggcacgcaccaccatgcccagctaattttgtatttttggtagagacagggtttctccatgttggtcaggctggtctcaaactcctgacctcaggtgatccgccttcctcggcctcccaaagtgttgtgattacaggtgtgagccactgcacccggcctttgttatatttttataacaaaatctagctccctcttccagaataaatgcccctggaaaagtctcagttatagcctcatacttataagtatgtgactagcatgggcaaaagcattagaatgtttcactcagagaattcactagaagacgaatcacatatactcctttttcctcctttgaacagctagtggtcaaaagttctagagtgcagcttagggccattcctggcttgatttgctcagtgaccacaagaatagtttcactacc

SEQ ID NO: 902536 - DNA, 649 bp, Homo sapiens
gaaagaggcatatctatttctctaccctctcagcttgggagtaccccatatcacttccactcaagttccactgtgttgtgtggcacacctaattgcaaaggcctcttggaaaagtgacttaattgtgtatacaggaaggagagtaagctggtttggcaaatggctagccattctctgccgtggtgtccccaccctcttgatcctcccttattggtgcttatctccaactctttgccatgttttattcatcacctagtataattctggattatatacattctcattgtttaattaggcacatgtgttatacatctatgagaacaattagattgtttttgatccattaagggaaaggagaatatgctttatatgcagaacataggagttatcaacctgttcctttactctccttaattcactgcctttgtcaccagacatgtctttcttaagcaaatctatccttgttacttccccttctcggaacattcactggttccccctttcttatacctgttgttttcacatgtctgtctgtggattgcttgaatgtagagtaaaatggtcaaaattaagacattgtagtctgttgcatgtgtgtgcacrcacgcacatgtatatgtgtgtatatagttgatgtcagattgccagc

SEQ ID NO: 902537 - DNA, 527 bp, Homo sapiens
tccttctagatctagcttgctgagtttttaacatgaaaagtagttaaaatttatccaaagccttttctgtatctattgagataatcatgtgatttttktctttagttctgcttacgtgatgaataacatttattgatttgcatatgttgaaccaaccttgcatcccagagataaagcctacttgatcatggtggataagctttttgatgtgctgctggattcagtttgcaagtattttgctgagggattttgtatcaatattcatcaaggatgtgggcctgaagttttctcttttgtgtgtgtctttgccaagttttggtatcaagatgatgctagcctcatagaatcagttggggagaagtccctcctcctcgatattttggaatagtttcagtaggaactcttatctgtatatctggtataattcagctgtgaatcggtctgtcctgggatttttcagttagtaggctatttattattaactcaatttaggagcttgttattgatcttttcagggattcaatttc

SEQ ID NO: 902538 - DNA, 695 bp, Homo sapiens
cggaagagaaaagaggtaaattcagttctactttcctacttgtatcacacctttctcttacttccttcttcccccataaatttaattcatcctccatggacttcttagtcattctttcccctttctcctgaaacattcattaaaatttaaagcttcctatgaagaagattcctagtccacgaacttaaaaccctaatcatatatatatccctgtggcattgttaagaacttcacagatcccaggacagaaaggaaaaaaaggttcactgaaacattcagatttgtcttggatacatatacttaaggcctccctgacctctatcgattaatgcatttttaggtggggccaggagatgcaaaacttgcttggaaaagcctaattgcagcgttctgaggaggacttaaaatgtaatgcaataaaccttaatgaaatggaatatgttagggtacagaagtagggacaatctattttaaagaatatacctcaggtcttgcccagtaaattgcatattggttcactcttgcaaacagcaaaattgtaaaaccacagaactcagaaatagactaatacatgcctttcgataatatgcagcattaggccccaatgctggcatttccactaccctctccaacatttttgtaggtggcctaaaaccmgatattgtagattttgtatgtaaacaaaagtttggatg

SEQ ID NO: 902539 - DNA, 582 bp, Homo sapiens
agtatgtctttatcagcagtgtgaaaacagactaatacagtaaattggtaccagcagagtagggcactgatgaaaagatacctgaaaatgtggaagtgactttggaactgggtaacaagcagaggttggaacagtttggagggctcagaagaagatgggaaaatgtgggaaattttgaaacttcctagagacttgttgaatggctttgaccaaaatgctgctaacaatatggacaacaaaatccaggccgaggtggtctcagatggagatgagaaacttgttgggacccggagtaaaggtgactcttgttatgttttagcaaggagactggcagcattttgcccctgtcctagtgatttgtggaactttgaacttgagagagatagtttagggtatcttgcggatgaaatttctaagcagcagagcattcgaggggtgacttgtatgctgctaaaggcatgaaaagaaaatcscattttctgaggagaaattcaagctggctgcataaatttgcttaagtaacgaggagccgaatgttaatcaccgagacaatggggaaaatggctccagagtatgacagag

SEQ ID NO: 902540 - DNA, 624 bp, Homo sapiens
tcttatttcagataaagcaggctttaaaccaacaacagtaaaaaaaaggaccaagaaggacatgacatgataaagggttcaattcagcaagaagacttaacyatcttaaatatataggcaaccaacattggagcacccgtattcataaaacaagtacttccagacctacaaaaagagttagatagccatgcaataatagtgagggacttctgcaccctactaacagcattagacaggtcattgaggaagaaaaccaacaaagaaattctgaacttaaactcaactcctgaccaattagccctcatagtcatccacagaatactgcccccaacaaccacagaatatacgtttgtcttatctgcacacagaacatactctaagatcaaccacatactcagccataaagcaaatctcaaaatattgaaaaaaatttgaaatcaagttaatcatacttccagaagacaatggaataataatacaaattaccaaaaagatcactcaaaaccacacaattacatggaaattaaacagcttgctcctgcatgacttttgggtaagcaatgaaattaagggagaaataaaaaaatcctttggaataaataaaaacagaggcacaatatatga

SEQ ID NO: 902541 - DNA, 631 bp, Homo sapiens
ggtcacaaaagattttagccttgtctgtgttatcagyattttaccaacataaataaatatttttatgagaacattgagttgaaattcatttttgcaggtgaggaaactgagccccaggatggagtggatagtaaatgaattaactttattaagatcaggttcagtcttggaatcgagctcactacttgcaaacttgtaacttttgtcaagttactgtgtgtctctgatgaatgattcagtaattgttaaaaagggggtgataatactacttattttcttaagatgtccattaggcaccatacgtcatctctctactcatttatttatttatttatttgcccccagccattgactgcaaagaggtgtagcttaataagggtcttgtttcagcttcatcaggtatgtcaagagctatgtcactgtgtgggaggcctgtgggagacaggttaatggatatggcatatacaaacaccatagagtgcagggggacaatcgaaggctttgtggggatctctagagagactgagtcacagcaattacatttagattggctttctcctctctcctctttggctcttcagtctcctttacatttcttgttccttaggatcacttctgataaaacctactt

SEQ ID NO: 902542 - DNA, 600 bp, Homo sapiens
acaaatgttacatgaaacaactttggtaagaagtacttcaggctgaaatatacgaagctgagatgattttgcttagaatgatgtgtcaaaaaatcagcaaaaggagaagaaaagcaattctttatttttatccaaatatatcagacttcataatttagtttcaacaaaaacttcaccatatatcatccaaaccaagacattgtaagagtgaaagggagtgctaccaataattacacaggtacaacaggtataaactggaattttcctgggtaaactgggacctatgatcaacctagaaataagggttaaactgcaattacatgcagaaatcatacctttcccacgcatgtgtggaaaagataaaaaaaataccattcactcagataaggtaattttgacaacagtagcactttctcatgagatagatttctgttcacatattatccccgtcctaagccagtcacattttytaaaataatcaatttttattccacacagttactttgcattatgttaccctgtttttattctttttttttttttttttttttttttttttttttttttttttgatgttgaaatggagtctcgcactggcac

SEQ ID NO: 902543 - DNA, 612 bp, Homo sapiens
ctaatgggagagactaataaaaattcaatatatgtttacatgctaactacatgtgtacaarattatgttttatgtgttatatattatcaatacttcaatggatgccattctccaaattttgcacaggaatcacaatgcatgtaaaatgttgatagaatggaaacattttgattattcaagcattttctatgcaaatccaatgctgtgcctcacagtgacccaaatactctgcagttctgagattgtggagttgaccacatcatatgctgtctgaaatatttggccagaggaaactaatcatctttgttatacttttcacagggaagaagttagtaatagcaacctttaagtacaaagtcatatcccagttgggccattggccaaggacaacagataaacaaataataaaacaaaaaccaaattaacccaaacctctctctcagtacttctatggatacgtccgcaggcaactccatatccttctttaatgactgagttcacaaatttaaataatagtttactctaattttagtaatgcctctgcttccctcaacacacaaacatacacacacatgtagagcacttgacatctgggtaggcataaataatcaa

SEQ ID NO: 902544 - DNA, 503 bp, Homo sapiens
caattttaaagaaatgatctgaaaggtagcaagagaaaagaaasaaataacatgcaatggagtccaatatgtctggcagcagacttttcagaggaaaatttataggccaggagaaagtggcatgacatatttaaagtgctgaaggaaaaaaacttttaccctagaatagtatatccagtgaaaatatccttcaaacatgaaggagaaataaaggactttcccagacaaacaaaagctgagggatttcatcaacaccggacctgtcctataagaaatgctaaaggaagtatttcaataagtaagaaaaggatgctaataagaagaaatcatccaaaggtacaaaactcactggtcatggtaaatacacagaaaacacagaatatgacaacacggtaactgtggtgtaatattctctttaatttatttgttcaaataacttccttatttgaagtttttcttcttttcttcatgtgggcatttatagctataaactttcctcttaa

SEQ ID NO: 902545 - DNA, 697 bp, Homo sapiens
cattttagtaatccataagttatggaagacagagaagtgactgcactctcttatgataagcagctggattgtgtgccattgtatcaatgacaccctctcgatatgcctactgctaaataacagtggttgttttattagccatccagtagatggcttattagtagggttgccaaaattaactaataaaaataaatgacagtgagctaaatttgaatttcagatgaaaaataactttaagtacagtaagccccttacaaaacctttattgttcatcactaattctaatttcactgggcaccttatatcctatctagcaactccttattaggatattaccagtctcttttaaatatgtatagatttttctcctgttgtaggatcatggcatagagtatagtttaatcctcaggggcttttaactagagaaaatattgacaattataccttgatcttcttgagcctcagcctgttagaagtagaaaggtttgaccgatataggccactgataaatacatgcttatcctgaaattccaaaattacccgccaagcctctgccctgaaggatctgttgtatgataaccagatgaatattcaagggcattaattccagcattgcttgcaagggtgaaaaattggaaacagctgatttgtttatcaatggsaaaataaatacaagtctagtctttgattctgagca

SEQ ID NO: 902546 - DNA, 637 bp, Homo sapiens
ttttatatatgtgtatgcttatgtataagttaattcaatggaagaaataawgcaaggcacaagggggagaaattaggattattttattgttataaacaagtcaactgcctttgaaggggtatagtgttatttgaaagtagacttgggttagttgtaaaagtatcacaagctggaaccaccactaaaagaggtaagaaaaatgtgttcagaaacaagagaaaattgaatcatataaaatgctaaaataaaatgaaaacaggcagaaaaaaattggaggataaaaatagtaataagaaacagggcaacaaatagattaaaataacaaatgttttttatatatatatacatgcatatatataaatatatatacagctatatatctatataaatatatatataaatatatatagatatatatataaatatatatagatatatatatgcaattattttaataatcactttaaaaaaaagacaaggtctccctatgttgcccagactagagtgcagtgatgattcacaggcatgattccactactgatcagcacgagaattttgacctgctctgtttctgacttgggccaattcatctctccttaggcaacctggtggcagcctgttcccaggtcaccatatt

SEQ ID NO: 902547 - DNA, 525 bp, Homo sapiens
ttcttatgatagtgaataagtctcacaagatctgacggttttataaaagagagttcccctacacatgctctcttgcctgccgccatgtaagatgtgactttgctccttgtttgccttctgccatgattgtgaggtctccccagtcatgtgtaactgtgtgtctattaaacctctttcctttataaattacccagtctctggtatgtctttattaggagcatgagaacagactcatacagtaaattggtacctgctagtggggcaccaccgtaaagatacctgaaaatgtggaagtggctttagtattgggtaaaagtcacagattagaacactttggagggctcagatgaaaacaggaaaatgtgggaaagtttggaacttcctagagacttgttgaatggttttgaccaaaatgctagtagagatatggacaataaggttcaggctgaggtggtctyagatggagatgaggagctttttgggaactggagcaaaggtgactcttgttatgctttagcaaagagg

SEQ ID NO: 902548 - DNA, 646 bp, Homo sapiens
acacacacacgcaccccccacacacacacagactttatatatatgtaatttaccaagtctaggctacaagaggaaactggcaaaaawtcactaattgaaatggagcttggccaagacatccatatctaatcccccttttctgattccaaatcagggagagtacatgctttgtgttttctggtaaaatacagacctatgtaacaatcagcatattttctcagaccagagcaagtaactcccaacaatgagtgtttgtcagtcctaactggtttctctacgtgggtggtgaaaaaataccttactacagtcattaattctttctttcaaaagaaccatgtgtcttgagaagttctgctccatcacagggcaatatcccattttaaatacagtgtttaccgatgtttgtccatgaatgacgtcaacaaaaatgtttaaatctcaccaggaaaggagggcttagttgccagactttgggagacagagttagttgatctttgcgctctcaaaggctctgttactcaattaagtgaccaatcattaactccaaagtatttaagcctaataatacaacaaaagagagaacaatgggtagtatctttaacattaatcatggtcacctttggtttagctgtttaggtcctttcct

SEQ ID NO: 902549 - DNA, 605 bp, Homo sapiens
cagaaaatcaacaaagtaacattggatttattgtaccctatacaccaaatgaacctagcagatatttacataacattttatccacaagctgcagaatacacattcttctcatcagcacatggaatattctgcaggatacattttatgttaggccacaaaacaacctcaacaattttttttaaaataaaaactatatcaaatatattttcagggcacaatagaataaaacaagaaatcaataacaagaacactggaaattgtacaaatacatggaaattaaacgacattcttctgaacaaccattggcttaatgcagaaattaaaaacaaagttaaagaactccttaaaacaaatgaaaatataaatacaacataccagctgggcacagtggctcatgcctgtaatcccagcactttgggaggctgaggtgggcagatcacgaggtcaaggggtcaagaccagcctgaccaacatggtgaagcaccatctctactaaaaatacaaaaaattggctgagcatggtggcrctaatcccagctactcgggaggctgaggcaggagaatctcttgaaccagggaggcagaggttgcagtgagctgagatc

SEQ ID NO: 902550 - DNA, 398 bp, Homo sapiens
ggtctggttcaccagcactgacctgcctgaactcctggcctcaagcgatcctccagcttcagcctcccgagtagctgggactacagactgaaattctaaggaagcaggtagatccccaaacaaactgttttttcctgaaaacaggaaagtcacaccaaccagttggaaagacctcagtttacctgagtcagcataatgaagaagtcccctctgctttaacttacaagaaaataacctgaagtaacctgatattaagcaatctgatttttttctattgttctgttttctygttcccaccttacaaagcccacagttctgctattgcccagtgggagccctccttctattttgaagaatagaggcttccctcattcataaaagccaattagatcttaaaa

SEQ ID NO: 902551 - DNA, 592 bp, Homo sapiens
ctgcataatattctgaagagtgttttccaacttggttccattccccccgtcactttcaggtacaccaatcaaatgtatatttggtcttttcacatagtcccatatttcttggaggctttgtttgtttcttttcactcttttttctctgatcttgtcttcttgctttatttcattaatttgattttcaatcactgatatgctttcttccacttgatcaaatcggctactgaagcttgtgcatgcgtcacaaagttctcatgctgtgtatttcagctccatcaggtcatttaaggtcttctctacactggttattctagttagccatttgtctaaccttttttcaaggtttttagcttccttgtgatgggttagagcatgctcctttagctcggaggagtttgttattactgaccttctgaagcctacttctgtcaattcatcaaactcattctccatccagttttgttcccttgctggtgaggagctgtgatcctttggaggagaagagaygctctggtttttggaattttccacttttctgttctggtttctctccatcttgtggttttatctacctttggtctttgatgtt

SEQ ID NO: 902552 - DNA, 629 bp, Homo sapiens
ccaagaaatatgggactatgtggaaaaaccaaacctacgtttgattggtgtacctgaaagtgacagggggaatggaaccaagttggaaaacactcttcagcatattatccaggagaacttccccaacctaggaagacaggccaacattcaaattcaggaaatacagagaacaccacaaagatactcctcgagaagagcaatcccaagacacacaatattcagattcaccaaggttgaaatgtaggaaaaaatgttaagggcagccagggagaaaggttgggttacccatgaagagaagcccatcagactaacagtggatcactcggcagaaactctataagccagaagagagtgggggtcaatattcaacattctgaaagaaaagaattttcaagcccgaatttcatatccagccaagtaagcttcataagtgaaggacaaataaaatccttaacagacaagcaaatgctgagagattttgtcaccaccaggcctgccttacaagagctcctgaaggaagcactaaatatgtaaaggaaaaaccagaaccagccactgcaaaaacataccwaattgtaaagaccatcaacactgtgaagaaactgcatcaactaatgggcaaaataacc

SEQ ID NO: 902553 - DNA, 629 bp, Homo sapiens
ccaagaaatatgggactatgtggaaaaaccaaacctacgtttgattggtgtacctgaaagtgacagggggaatggaaccaagttggaaaacactcttcagcatattatccaggagaacttccccaacctaggaagacaggccaacattcaaattcaggaaatacagagaacaccacaaagatactcctcgagaagagcaatcccaagacacacaatattcagattcaccaaggttgaaatgtaggaaaaaatgttaagggcagccagggagaaaggttgggttacccatgaagagaagcccatcagactaacagtggatcactcggcagaaactctataagccagaagagagtgggggtcaatattcaacattctgaaagaaaagaattttcaagcccgaatttcatatccagccaagtaagcttcataagtgaaggacaaataaaatccttaacagacaagcaaatgctgagagattttgtcaccaccaggcctgccttacaagagctcctgaaggaagcactaaatatgtaaaggaaaaaccagaaccagccactgcaaaaacatacctaattgtaaagaccatcaacactrtgaagaaactgcatcaactaatgggcaaaataacc

SEQ ID NO: 902554 - DNA, 552 bp, Homo sapiens
tcctgttgctatagctgattggattagaatgtaaacctgacctgcctttagcaygcccataggttggtcatcaacttctaacacaacctggcttaaaaggatgagctgaggctggatgtagtggcccatgtctgtaatgtcagcactttgagaggccaaggtgggggatcacttgaggctgggagtttgagaccagcctagccaatatggtaaaactatgtttccactaaaaacacaaaaattagctaggcatggtggcagatgtctataatcccagctactcattaggctgaggcataagatttgcctgaatctagaaggcagaggttgcagtgagctgagatggtgccactgcactctagcctgggtgacagagcgggactttgtctcgaaaaaaaaaatatagaaacgttgagctggaccaaacaatcaaaataaccttggttacataatcagaacaactctacatatgtagttcatctaattttcctactgaggtcattttcctttcaaggtctaggttaccttcatgtgaaaaagttccaatttaat

SEQ ID NO: 902555 - DNA, 599 bp, Homo sapiens
aaaattttcaaagccttgcaaggcttcttacttccttaagcaggtttctaagaatcattaatattagctgtgaccacccaagaggggagatattgtatgcagcattttcaaaatttatctatcaaagggacattttttcttatagaatctctttggacctagtactctaggcaaaacagtttggaaaacattcatctattatcaaggtaaaaccaacatgcacatatatgaccttaataccaactgtatttatggggcacattaaagttagtttcttataattaatgattattaatattgacatggttacatatgaacaaaatattgacagtttgacattatgtaaataatactgacacagtttgacattatgtacctttcagtgaaagatgagaatgcccatttcagatgaaaaatccttctgataacaactaattagatagatattgatttattatctcctatgtgccaggcactggttcaggctcactggacaaagcagacaaaattcttgtccttgtagaacttatagtctaattgggtaaaacagaaaatgaacactgtaagtaagyaaattaatatagtctattgtaataaag

SEQ ID NO: 902556 - DNA, 597 bp, Homo sapiens
tatttatctcatgcctttcttttttctattcataatatatcatttccraaagagaataatccattcctctttcatttactgaaagcagttttaaaacttcacattccttttttgttcatgggctgtgcaatagtcacgcttcagcagaactgtgcttaatttgaagcccctggcctacggttcctattcatcttctcaagcatggttgtcgtaattcacagaggaaggccaagtcctcttttacccagttatacctttcattgccgcttcctattcacaacggaagatgagtttccagttctttgagcttttttcacaaatataacctgactcgttaatgataattttccttgcctggcatctgggctcaaacacactcactccagaataacaaagcacagaggaatttgaatcccttgacaatccaagcaccatatccctaaccttgaatagaaaatagatgctaataaattcagggtcttaaaaatgtgaattatagtcacttcacacttcgtggcagcttcatgctgaagaaatagcttaaaacttaattacaatgcttgtcccttccttaagtgcagatgacattcttcagat

SEQ ID NO: 902557 - DNA, 608 bp, Homo sapiens
aggatcatgagacagaacaaaaagaaaaggggaggtgagctatttactgaaggcataaaattcaacttgtgttggcattatgtcactgaactgaatagctatcggagactctctttcctcaactttgaatgggcccaaaatgttactgttatcaaagccgcacattgaagaagacagcagataatgtacttggtaaaacaggcagcctccgccaggaaaatgtgtaacgcttccattcactgaccctcctttccctccgcatcaacttgtgtcataaattgctatttgctgacaagctgtgctgatatgaacccaatgctggttgcagcacaagaaaaacatgccatttacttagtgccagggaacaacagccttgcttctcccaagctgatcaccatgttgctggctggtagagggagaatggatggtaaccatcgttcgttaccagcctaattcccaggtatgcactaccgtagcattagtgaccagaggaaagacattcagctattctaggaagcatgagaaatttttctgacacctaccccagcccttcccaatgtccccaacagatgtacwcacaccactatctcactgcacagccaggtgta

SEQ ID NO: 902558 - DNA, 600 bp, Homo sapiens
agagtcttaaagtgcacagctctggagacataccagccctggagtcctggttctgctcctaacccattgtgtgtccttgggcaaggtacttagcctaggtaagcctcatttctctgtctgtacaagagaagtcagtaatatccggcttattatattttgaaaactaaattaaaatacacacacacacacacacacacacacacacacacacacacagcatttagtatgttgcctggaacataggaaatatccaaaaagtagtagcttaaaaattaaacaaaccaaagagttctaaaaacattgctaagattgacatgacatttgcagacagaggttaagaacagaataagctccagctaccatgactgttaaagtcatcccagtatcttattctgctctgtgtggcatcccgtgactctacctggatttgaaattaaacattctgaacactttcttagtgaaagagasttaaggatcaagacttactcagcagagacacttttgtatgagaaattgcttgatggctgtctagacacagacaggatttttcttttttaatgggaatcaggtatagagtggggtatctatttttttaaggga

SEQ ID NO: 902559 - DNA, 576 bp, Homo sapiens
acacatagtaaatgtgtatgtgcatatgtgtgtgtaactgtgtacataaaattatatattttcaacgcatctattttgcatgtacttcatggttcacaaaaatgttcaacatatttaacctgcagatttttataacataggatgggagttcacgttgaaatccattttcttattctagctcttcaaagcccacaatgatgaatataacaaaaccacttctctatactgtgcaatcagtcatattcaatactgtcaggatatacaagaataatgaatcttaattctgttattcactaacatttatttttcttctggttctgagaatacctaccgcaaatagtatctgctggtgctcatttcagtataactggaatggaacaagagagctgcatgaattgccaattataaacatctgagtttagatttgaaagtaaattcagcagmtaagatcatgacaggaaatctgccataccttttaggatatgacttactcatgctggaaagttatatacctacacagggttttattcacctatccagagaatacattggattggatttagtggtcagtagtat

SEQ ID NO: 902560 - DNA, 576 bp, Homo sapiens; identical to SEQ ID NO: 902559

SEQ ID NO: 902561 - DNA, 628 bp, Homo sapiens
gccatctccattggcctcaggaactgatgattcttttagtcctttccttatagtgcgtgggcccacagcttactttcactcattgcccacctggcttttgctgatacataatrcccttgcataacctccttggtcagcctaatcacttaaccccaggaggccccttcagaaaatctgcaaatcgcttctctgagtacgcttgagcgtagcttattcaggcctagataagctttgtttcttcaagacaaagcttgtcccttttgcttccagcatagactcaggccataggacccaagtctgaattttgggtgcgtaacttactttgagcaagttactatttctggtcctcaagattctcgtgaaaaataaagattaaaaatagtccttacctcctagcattgtttgagagttaaatgagtgagggcattttatacatttagactatacttggcatataatcagctatcaataaatattagataatattattttggcaagaactggaagtgacattggctttaccaagttcatttgtccatctgttcatttgaaatgtatttactgatcccctatgatatgccagctattgtgatcagccacaattaagaatagccactccatacattct

SEQ ID NO: 902562 - DNA, 553 bp, Homo sapiens
ctgctgggatttgatctgcttatttctacctttgtgaaacttcaccttactctggaatactaactctgtatattggtccattctcacactgctataaaggactgcccaagcctgggctcatttgtaaaagamagaggtttaattgactcacagtttcgcatggcctgggaggcctcaagaaacttacaatcatagcagaaggggaagcaaacacatccttcttcacatgggcgcgtctagtgcagagagaatgtgccaaccaaagggggaaaagccttgcaaaaccatcagatctcatgatgaactcactatcatgagaacatgcagcatgtggtgtaatggcccctgtgattcatttacctcctagtggagtccctcccagtgacatgtggggattatggaaatctagcaagttcaagatgagatttcggatggggacacaacaaaactatgtcaccctggaatgctgttccccttcctccatcataatcctcgcatcccccaattctagaccgttacctcttccaggcattttctccatggttgaccttat

SEQ ID NO: 902563 - DNA, 575 bp, Homo sapiens
ggggcaggaaaaacgcacagggcgatcacaagtatgggtgtgtgtgtgagcgtgccccccagcaggagggcatcttgtccggggctggttcctatcttatgtcctgagctgctgggataggccccakccactgaaaccctgaactggaataactgggtaaatgttatcttacttgtttttattaatctttctcaaatgtatgtatagctcacatttatttccatgtttaatattaagagtattttggtctttatttagaagttctgttatatttttgtgaccagaaatatgccataggaacttaactcttgcttagatcaattagcctatggtaaaattagtttcattatacatcatttcacttaagatagaagtttccaagaatctattgaagactttaagtagggaattaccataattataaaaatgcctctgggggatttaaatatatataaagtaagacagacaataataatagcatgtaagtcataatgggaaataaatgtagttaatgtgctggaaggtaaatatattgttcaggtggatagtaaaggatttgactaacattatatttt

SEQ ID NO: 902564 - DNA, 582 bp, Homo sapiens
atacaaaaaccaactcaagatggatgaaagatttaaatataaaagctaaaattacaaaaaccctggaagataacctaggaaataccattctgaacttagaacctggcaaagatttcatgrcaaagacaccaaaagctatggcaagtaaaacaaaaattaacaattgggacctagttaaactaaagaatttcttcacagcaaaagaaattatcaataaacaaacaacctaaagaatgcaagaaaatctttgcaaactatgcacctgacaaaggtctaatatccagaatgcataaggaacttaaattagcaagcaaaaacaaaccaccccattaaaaagtgggcaaaggacatgaacagacacttttcaaaagaagacatacaagtagcccacaaacatatgaaaatatgctcaacatcactaatcattagagaaatgcaaaaccatgccacatgagatattaaaaactgcactcacactggtcagaataattattattaaaaagtaaaaaaataacagatgttggtgaggttgtagagaaaagggaacacttacacactgctagggggaatgtaaattagttc

SEQ ID NO: 902565 - DNA, 688 bp, Homo sapiens
ctttcttttttgaccctgccctatcttaaccctgcagttgttctgtggtctctggcctcaagtyctgtggttccacacccacatcccatgttacataggatggcccatgcccagtgtttgaaatagtccctggtttcctacctggcctatcctggactctgagtatatctcacactagatgatcatgattatgatgagcttcttccatttttttctccttaaaaacaaaggtaaaaagtagagtgtgctaaactaatctttaggatcaagttgcagtctgtttttcggaaagttcagtgttgaaatttgaaacctatctcaggaaaaaaaaagaaaaagaaaaagctgttctgaaagtcatgttgaactttgaatttttgaccactgttattttttataattaatatgagtatttatcacagtgctgtcagcaggtccatatgagacccctttaataatttattaccagtgtggggatgctaaagaagcccttcctgcatggaacaaggagaaacactttttggaaaatcaggtaagccttttttcttatgacccaaggaagtttttaaagttcacaagagacgaagaactaatgtgtttccattatttaaacaatgtcatggtaaaagtataggtgggggaagaaaagtgacttactagaacaagagacacaaacaggagtggcaat

SEQ ID NO: 902566 - DNA, 606 bp, Homo sapiens
tgttgctgttgagaactctagtaacgttttgattcttgatcttttgtctaaatcattctctcactttatggargctttcaaaatcttttctctattccagatgctctgaaatttcacaataatcttggtatgagtgtatcttaattcattgtgatggatgctcaatgggcccttttaatctggaaatgtgtgttctacagttctgagaaatgttagtgaattattttattggtgattttttctcctccaatttgttctctcctcctgaaacatgtattatttaaataatccctctaattttatcatctcttcctatttaccatcatttaggtttgttttttgttgtttctgcactcctttctgatcaacctcctccaactctattggatttgttttagtttctaagagctctgtgaacattcttgttcttatttcataaatgcaatgactaacttttccaaaaattttaagggccacattttttgcattgtcttctcctccaaatctcttttactctcttttgctttaatcaccatttttcacatcagtggccttccttacctatgactatctgttcataattaagaatgagatattaaaaagcta

SEQ ID NO: 902567 - DNA, 505 bp, Homo sapiens
ccatccacctctgcctcccaaagtgctgggatttattaaatayggaatcctgcctggcatgagccaccatgcctagccagattccctatttaataaatggcactgggagaactggctatccatgtgtgtgaaattgaaacaggaccccttccttacaccacatacaaaaatcaactcaagatggattaaaaacttaaatttaaaacccaaactaagaatcccagaagaaatcctaggtaaaaccattcaggatataggcacaggcaaagatttcatgatgaaaatgtcaaaagcaattgcaacgaaataaaaaaatgacaaatgggatctaattaaactaaagagcttccacacagcaagagaaactatcaacacagtaaacggacaagctacagaatgggacaatattttgcaaactatctgtctgacaaaagtctaatacccagtgtccataaggaagttaaaaacatttacaagaaaaaaacaagcaaccccattaaaaagt

SEQ ID NO: 902568 - DNA, 563 bp, Homo sapiens
caaggaggtagaatctgaccataaaggaagcacctgccaactccctgggaggtggctcccttcctgacctccctgcttctgctcctgtctctgaaatccactgccctcacctcctagggcagctctctgcctgctctcagcctctgagtgtgctgggacatctcaaagcaagggatttggttcaaaggtgacttcaatcaatttttttcttgtagatttgctatcaatcaaatcacagttatattcatctcttggtgaattgaacagcataatttgccttttaaatctttatcaatttaattttattattttaaaatttattctcagtttcattaaggtaaaatagacaaacagagctgtatgaattaagggggaaaatagcatgctgattatatatatatatatacatatatattatatttattataatataatatatatgtagtgaaatgattaccacgatcaagttaattaacacatccagcaccccacctagttaccatttgtgtgtgtgttsttgagaacatttaagatctactctcaacaaatttcaatgatacaat

SEQ ID NO: 902569 - DNA, 563 bp, Homo sapiens
caaggaggtagaatctgaccataaaggaagcacctgccaactccctgggaggtggctcccttcctgacctccctgcttctgctcctgtctctgaaatccactgccctcacctcctagggcagctctctgcctgctctcagcctctgagtgtgctgggacatctcaaagcaagggatttggttcaaaggtgacttcaatcaatttttttcttgtagatttgctatcaatcaaatcacagttatattcatctcttggtgaattgaacagcataatttgccttttaaatctttatcaatttaattttattattttaaaatttattctcagtttcattaaggtaaaatagacaaacagagctgtatgaattaagggggaaaatagcatgctgattatatatatatatatacatatatattatatttattataatataatatatatgtagtgaaatgattaccacgatcaagttaattaacacatccagcaccccacctagttaccatttgtgtgtgtgttcktgagaacatttaagatctactctcaacaaatttcaatgatacaat

SEQ ID NO: 902570 - DNA, 642 bp, Homo sapiens
tgacctccataagcccctactttaactggaaaaccacaatgactttttgtgcctcctggattgacatcygctcagagccagtgttcagtagtccccaaaatgtctgataatttccctttccctaaagcacagtgaccctggtaaaaggccagaggtctccttcgggaaggatgggagagagattcaccacgtaaattgtcggtaatgtagtggggtccttcctcaagggaacccggcttccccttcattcaaggggttctgggcacgtagactggctcaagtctggaaattgactgacaggccgtgattctctgtttttgtatttcaaattagtcttttgtccattcgacctagaagttttatccttatataaattaaataggaatgcagtaggcttcctatcaattttacttccaggaacgctgtgattaattagccaatgccacagctctacacaagttagactattctgattgctgctttgtctctgctgtccattacagtagctacgaccaccttgcctttgacggttgagtgctgtcacttggcccctgccacctcaagatccaattattcccgttgtcttgtagttgagtgactgcggttcccactgttcgatctgacatacagagaacagcaatt

SEQ ID NO: 902571 - DNA, 616 bp, Homo sapiens
gggatcacaggcgcacaccaccacgcccagctcatttttgtatttttagtagagatagggtttcaccatgttggccaggctggtcttcaactcctgacctcaggtgatccacccacctcggcctcccagagtgctgggattacaggtatgagccactgcacccggccttattaaaccttttaaatgtgtaatcaagactaataaaggctaattacccacccaaagtcaagtaccaaactgaaattcaagtccagtctatcttactcttaatgtcctctctgccaggctattgagtacctcaagtaatgctcttttgcctaatttttctattccacaatctggttttactatttctgagtcatttttgttagtctgattagaaaatgagatcatattcctagatatttcattattaaagtaaggtacttcttccaaccacttaaaaccacatatctcgtttttatttaagttgttcataaaagggrcaacatatcattcttctgtcctttctctagaaatcaagtgcatttattaagaaagtatttattgagactctccactgcattatagatacttatctggaagagatgacatagaaaatacattggaagtatta

SEQ ID NO: 902572 - DNA, 585 bp, Homo sapiens
ataggcaagggaggcacctagggcatgcttttaaaggaagtgatgagtttcagtgttgtgcaagtataatgttaggccttgcaccatcctgagatcaagggcatctttatatggattcttctggctcctctcttgccacaccctagtcctagccttgataaaataagccctgtattaaagtttcattttttgtttgcatttttattttgtgtgatcacatgtacaataaacatgtagttagtgcccattacatgcagtaattgttaaggagataagctgctcacaatgaaatgacaacactatggattcggagtaagcagggtggatctgtttgggtctgacagcaagaactgccggtgttatctccagggttccctgcctgtagagccctggctcctggctccacctagatcttctggcttgatttctctggggtggacccctgccactgtaatttgcatatgctgctcaggtgatttgaatgcacagcgcartttcacaactcagaacctctgctatagaaatttttcaaaaggaggagagctaagatgagttggctgcctgttgcctctgagcactgggttc

SEQ ID NO: 902573 - DNA, 613 bp, Homo sapiens
ctcaggaaacttacaatgatggtggaaggttaacaaggagcaaggacattcacttggtggcagaagagagcaatgcarcaggggagataccagatgcttataaaaccatcagatgtcacgagaactcattcactatcatgagaacaggatgggggaactgcccccatgatccaattacctccctccctcgacaagtggggattacaaattcctcccttgacacatggggattacaatttgagatgagatttgattggggccaagagcaaaactgtattattctgcccgtggcctctcccaaatctcatgttctttatacatttcaaagccaagcctgccttcctgacagttccccaaagtcttaactcattccagcataaactcagaagtcaaactccaaagtcttatctgagacaggcaagttccttccacctatgaacctgcaaaatcaaaatcaagttagttacttccaagatacaatggaattataggcattggataaatgcttttatgccaaatgggagaaattggccaaaacataggagctacaggccccaagcaagttcaaaacccagaaaggcagtcattaaatctcaaaacttctaaataatct

SEQ ID NO: 902574 - DNA, 613 bp, Homo sapiens
ctcaggaaacttacaatgatggtggaaggttaacaaggagcaaggacattcacttggtggcagaagagagcaatgcaacaggggagataccagatrcttataaaaccatcagatgtcacgagaactcattcactatcatgagaacaggatgggggaactgcccccatgatccaattacctccctccctcgacaagtggggattacaaattcctcccttgacacatggggattacaatttgagatgagatttgattggggccaagagcaaaactgtattattctgcccgtggcctctcccaaatctcatgttctttatacatttcaaagccaagcctgccttcctgacagttccccaaagtcttaactcattccagcataaactcagaagtcaaactccaaagtcttatctgagacaggcaagttccttccacctatgaacctgcaaaatcaaaatcaagttagttacttccaagatacaatggaattataggcattggataaatgcttttatgccaaatgggagaaattggccaaaacataggagctacaggccccaagcaagttcaaaacccagaaaggcagtcattaaatctcaaaacttctaaataatct

SEQ ID NO: 902575 - DNA, 677 bp, Homo sapiens
tcttcccctacattgttgatatggtttggctctgtgtccccacccgaatctcaccttgaattgtaataatcccatgtttcgtgggagggatcccataggaggtaattgaatcatgggagcaggtttttcccatgctgttcttgtgataatgaataagtctcatgagatttgatggttttataaaagggcagttcccctgcacacaccctcttgcctgctgccgtgtaagatgcgtcttgcttcccctttgcctttcgccatgattgtgaggcctccccagccatgtggaactggaagaattaaacctctttcctctataaattacccagtcttgggtatgcctttattagcagtgtgagaacagactaatacaattgtctcactcttcatctgacctcccatgaatcatagagatcattgtactttgctgccattggagaacatgaaagtagctgggtatttctcaatgttatttgttggtggcatcctaaggaatcaaacacaaccagaatggttcaggccagtgcaccccacacttcaaggcatgtaacagtgaagttgaataaccaaggtagcatttaccactttaggttgtgtatagcgtgtacttaattgacyctctaaatgtaagcttctcattaacagggcttatgtccggtcaccagtaatgtgtctga

SEQ ID NO: 902576 - DNA, 649 bp, Homo sapiens
ttcattttaggtagagggtggggtaggaggcraggtttcagcattcatgatgctgactattctggatgttgaaatgcactgcccagaatcccctcagcatgtgtttctccagtagagggtatactgctcttgcccaagattatacccatttatacagagcagtctgcagacaatggctatttgataaacgggaaggagatagtatagagtcctaaccccttcctctaagttttagaaaccccaactgaaccagaagaggcctccattgagcctttaaccctgttcctactcttcttcctgtggtgctcacactgagaacatttccccataaacaccctgcatcccaatctctatctatctcggagtatctcagggaaccagacctgcaccacagacattcccttcattccttgtttcagccccacacctcatccctgcagggtgctacatcttctctctcagagtcctgaccctttctgagaacatttctctagaaaataaatcttgggtatttctgtggtagggtgtgcgggtagaaacaggagccttggataggatgtggggaggcaggcttctcttccattctcacacctttccttttaaattcctccatttaattacagataatatgaacatatggtccattcac

SEQ ID NO: 902577 - DNA, 649 bp, Homo sapiens
ttcattttaggtagagggtggggtaggaggcgaggtttcagcattcatgatgctgactmttctggatgttgaaatgcactgcccagaatcccctcagcatgtgtttctccagtagagggtatactgctcttgcccaagattatacccatttatacagagcagtctgcagacaatggctatttgataaacgggaaggagatagtatagagtcctaaccccttcctctaagttttagaaaccccaactgaaccagaagaggcctccattgagcctttaaccctgttcctactcttcttcctgtggtgctcacactgagaacatttccccataaacaccctgcatcccaatctctatctatctcggagtatctcagggaaccagacctgcaccacagacattcccttcattccttgtttcagccccacacctcatccctgcagggtgctacatcttctctctcagagtcctgaccctttctgagaacatttctctagaaaataaatcttgggtatttctgtggtagggtgtgcgggtagaaacaggagccttggataggatgtggggaggcaggcttctcttccattctcacacctttccttttaaattcctccatttaattacagataatatgaacatatggtccattcac

SEQ ID NO: 902578 - DNA, 610 bp, Homo sapiens
agttaaaaatactgattatttggtgacawttgagacctgtttatcaagaatgtttgtggctatgatcttagaatctagaattttaaccaaaagtgtattagtttttttatctattacaatttgaaaatttaaaaggtatatggtttttgccttcaccagatttctaaacaccactgataccagatttctcaaccttgattgcagaatagattcacctggggaagaaaaagcagtatctggatcctaccccaaaaccaattaattatgaatctcaggagatggggcctggaaatctgtaataaactaacttctctaagaatagaagtttccacgtgagaaataacttgattccatctggggtagttaaagagaaatctaagttttaaatttataaacgctatagttcgaataaacgttccagaatcgctggaatttcagggttacaagttttatgctattaaaaaaatactattttacatagcagatcttaaataatatgacaagtttcaacaggtgaggttgttttttgttgttgttttgtttacaaaaaatgttagcttaatgtaggaaagataaatagtaatttttaggtaattttgtcaaatttatc

SEQ ID NO: 902579 - DNA, 339 bp, Homo sapiens
tgagttatgggggggacttggtgggagataatttgactcatgggggcggtttcccccatactgttctcatggtagtgaacaagtctcacaagatctgatggttctawcaggggtttctgcttttgcatcttcctcattttatcttgccactgccatgtaagaagtgcctttcacctcctgccatgattctgagacctccccagccatgtgtaactgtaagttcaattatatctccttttcttcccagtctcaggtatgtctttatcagcagcatgaaaatggactaatgcagtaaattggtaccagtagagtggggcattgctgaaaagataccaaaaa

SEQ ID NO: 902580 - DNA, 339 bp, Homo sapiens
tgagttatgggggggacttggtgggagataatttgactcatgggggcggtttcccccatactgttctcatggtagtgaacaagtctcacaagatctgatggttctatmaggggtttctgcttttgcatcttcctcattttatcttgccactgccatgtaagaagtgcctttcacctcctgccatgattctgagacctccccagccatgtgtaactgtaagttcaattatatctccttttcttcccagtctcaggtatgtctttatcagcagcatgaaaatggactaatgcagtaaattggtaccagtagagtggggcattgctgaaaagataccaaaaa

SEQ ID NO: 902581 - DNA, 581 bp, Homo sapiens
aattaggaacaatattgttaatgacttttttttttgtgctgtaggaaacatattttttagtatcctcacaggtttcatataagtaggccaaatgttgcaatgcagggaagggacatttacttttgactccaactacagtaaaccctgggttgaaattcatcagaaattgtggatcttcagtggaatgcaagaaaagacttatatctaaatgagccagcctgcttcacaataacagttttgttttccttgaggagtgtttcttgactatctgatattatctgtccttcagggataaagtagaaatattttctgccctacagggacagtgattgaagcaaatcttggcattcacaaatgaaagggtgttgaatctcctgcaggtctcaagtaggtgcttgtcctatgctagtaatggaatttgcattactcatgccctgggcttatgaaagtctagttattaaaatgttaaaattaaaaacgctgaaaaatgacttatacttggcatcttgttcatagaaacttgaaactgtaataaatactatgatgggtagttgagtgtsagcctcccaaatgatctaggt

SEQ ID NO: 902582 - DNA, 455 bp, Homo sapiens
tcatatatttctagtaataagtaattttagaattttccttttctagttcatggcacttttgtggaaaacttgaaaaagtccattcatttcctctaatgattattttctatgtggggtgcaattgagaacaatgaaacaaggacaaaggaagggcctgtgatgctgctgagcaaaattcaccaatatccccgcactgaagcttaagcctgaactcagaagaaaatctccgacttgtactcggacctcatttactcttatttacacaaaactccaaaaacagtggttatctggtttccaaactcctggaagatttaaaccagcattttagaagaaccagaaggatgcatctattaagtaagatgtcagcaatgagaaggggcacctgacttccgcaaggaaggagagagggagcagayggagcacttggctagcggggcagtgcagatctctatagc

SEQ ID NO: 902583 - DNA, 620 bp, Homo sapiens
tgttttgcaggtttcatagtagtctactcttatcctccaggatctgtcttatttttggaggatcagactcttgaattaaacaggcttatgataggaaccgtaagcattgcatcttttaagcttttaggggtagcattggtgctatggtttgagtgtgtttcccagattttatgtgttggaaacttaatccccaaaaggatgtgttgaatgaaggttggtctttagaattagataaggtcatctgggtgggctctcatgataagactggtggctttataagaagaagagagatctgagctgacatgcacactcttgacctgttaccatataataccctctgccatgttatgacatagctagaagcccctcaccagatgctggtgccctgatcttggacttcatagcctccagaaccatgagctaaataaacttttccttatagattaccagcatgggattctgctatagcaacagaaagcagactaagacaactgatttctgtgataacccccatattttatattgctttygatttactcttttggtttgaggggcgatagtttcagaggcttctacttggcctttctcactatgatcactcttactccatggtccaggga

SEQ ID NO: 902584 - DNA, 609 bp, Homo sapiens
ttttactaataggggttcttccttgcacctytttctgtgtatgagtctctgctgccttaacaatgaatactaagtaggagcagtatgtactccattctaagccacatctatagtggttagtcccctggccctaggcttataacttgcctttatctcttcatgtgactggtttacaaaatgccactaagctgagctaggttggcttatcccactgttggcctagccctcttaggactttatctgaaatctttatgactactttcccagatacatagtgtgtgtctattgctctcctgggagaatctatgtaggcttctaggtcaggttggtcagacgatgcatgaaaagcataaaatgcctgcttcttttgggttgttcttccttcctacctaaaacctgacactttcacccttggcttcatggtcctgtgaatgcaacatgatttttctttgttactgaaaaagattttacttctccactcttatgattctctatacaatagacctataatttccttacctgatatataatctttaagcaatttaagatttttggcatatgaatgctgaaaattagaagaatgcaaagatttagattattatgctgaaa

SEQ ID NO: 902585 - DNA, 621 bp, Homo sapiens
agttgcttatcatcattagttattagggaaattcaaattaaaccatagtgggataccaccacacacatattagaatggatgcagtagaaaacaaaaattaaaaaatgaaaacaaacaaaaaacggcaaaaagctgaaaatgataagaactggcaaacttgcaaagcaattggtggcaggagtgtgaaatagtatggccatcctgaaaaaccctttggcactttcttataaaactaagcaagtgcatgttttatatcttcttagtatcgtaatagtgctttgcctgtgataggctttccatagatgtattttagaataacgagatgaatgcatgacatttcattctattttacatattttggaatagggacctttgataagtttatttttcctaaaaccccatgaagtcatggaattacacttatagaaattcagcgcagtccagcaatcaattgctgaacatttatcccagaggaatgaaaacttayattttcatagaaatctgtacgtacgtatttataacagcattatttttaatagcttcaaactggaaacaacctagatttccttcaatagatgaatcattaaacaaatgtggcaaatccatactatcgaatacaac

SEQ ID NO: 902586 - DNA, 612 bp, Homo sapiens
ccaagggtcaataatgaggttcagtgcgggtagaatgtcccgcacactccagagcccacttatggccctgtccaaatcctaataggcaacactgaatgtgaacgacatttgtttctggaatcagtctctcctctcctaacgtgggaaagagtgtccttagttactcacctccaggccctacctgaccagtcaggtcccagttatctgtgggccccaggtccacttcacctcattctgctccctctgcctggaaattcctgaccctcaacaccaatccttcactcttcaattaattcgttcttgacctcagggctcagggaagttatcagtttttccagaaagcattcctgcactcttccatgaaaatgctatgatatccactgcttagttacttccagtctttcacaaattacactaatgaccctgtcttatattttcacttgtctgattttgaaaaggcagatctttatcttcttcctctttgaacacgatgcctggcaaagggtggatgttcatgacggtgggtaggtgggtaggtggatgaatgaataytgtgcccttactttttatcacttttaaaacttccaacaattatcttactcaaagagtaat

SEQ ID NO: 902587 - DNA, 616 bp, Homo sapiens
tacatatgcccatgcatgtgcagatatgtaggtatatayatatatacacatgcacatatataaattatatgtccaaattatgtgtttttatttcaaattttaaaatatactgaagtgaaattatatgtcttcttctgaaagaggtaatgccttcactatatgctttttctttggttcctttgagaatatgcctggcacacaataaactctcaacagagattggatgaccagttatttgcaggcatcatgtaatctttttctccctttcgccccagaggaaaaataagcaatcttttatttttatatcactcatttgccaatgaaaggaatagacttcattgcttttctaagtagcagatactgtatccctccagaatctgaagtaagtagaatattcagttatgctcttgtgtttataccaagaaaacagttagttttctactttcctccagtagaaccaagcttcatttcccccactgattttcttatagaaaagaaagtaagtctgaaaacttgtcaatattaaactttcaaagaaataataaaattaattttttctcaagcagctgaaaaatggttgtaatcccctgaccatcagtcttatgatgatcccttt

SEQ ID NO: 902588 - DNA, 606 bp, Homo sapiens
ctctgctccctggtgcccacttctggctttcaggccacgttgtgttcagaatgggagatatcagrgaggaaaaataataaactcaccataaattcagcgatactccaaattctggcctttttcctcaatttgcttgctactatttaatttttgtgttccttatacattctgtccaggttctatagtttccttagagcaacgaggtggagtgtgtttctttcatctgaccccatattctttgagccaattcaaagaagggcataggacctgatatatggaaccatcttatcttccaccatcactatcattccatctccatgagcttatcttccaccaccactccatctccatgatttccatagagatcccctgcaggtgagattaagaggacttcaaagattggcaccctcatgactagacagatcctggagagtttaaaagtattttttccctttagaaatcaattcctactacataagaatgggtagttttccccaaaggggatatttagtgaataccatcttggggaactatgttcaattgtggtataggtttccctgaaggcctgtggttggtttcatgaaattatcttccaagccagactga

SEQ ID NO: 902589 - DNA, 643 bp, Homo sapiens
atggtggtttgctgcacccatcaaaccgtcatctacattaggtatttctcctaatgctatccctccccaagccccccagccctcgacaggcccctgtgtgatgttcccctccctgtgtccatgtgttcacattgtccaactcccacttatgagtgagaacatgtggtgtttgtttttctgttctggtgttagtttgctgagaatgatggtttccagcttcatccatgtccctgcaaaggacatgaactcatcctttttatggctgcatagtattccatggtgtatatgtgccacattttcttcatccagtctatcattgatgggcatttgggttggttccaagtctttgctattgagaacagtgccacaacaaacacacgtgtgcatctgtttttatagtagaatgatttataatcttttgggtatgtacttagtaatgggattgctgggtcaaatggtatttcttattctagatccttgaggaatcgccacactgtcttccacaatggttgaactaatttacattcccaccaacagtgtaaaakcattcctatttctccacaccctctccagcatctgttttttcctgactttttaatgatcgccttctaactggtgtgagatgttatctcattgtggtttt

SEQ ID NO: 902590 - DNA, 619 bp, Homo sapiens
cttctatactggtaataaaagtaattgtgaagccamcatctctaataatcactggttatctggtgatacatacagcagttattatatagaataatattataatttcttgtctaaatacttttagtaaaaaataattaataaatatctgggtaaaggcagcaagtaattcagggtcacacacatttttccaatattaaacaaaataaaatttaaaaagttaaccaaaaaaaagcagccaaaaatttactagtagcaatcaaaccaggaaaaatactaaattttatgacaaatatttctaaaggtgaagccaaggaaaaaacttgaaatgtttctacgtaggtttaagccacagtcagaccaacagccagaagcaataccaatgaaagaatgataattaataaaatcttatgaatatgtatcactattctttaatgtggagagatgtgagtcaatgaaatgagtaggaaatactgggaaattagaaaaatatttaagtatgaaacacctacctgtcactataagaccagagcaaaggcagagaggacagtgagggtttgcagttttctggtcccttgctgaactgggagaatggaaggagtctacatccatggtgggtgga

SEQ ID NO: 902591 - DNA, 619 bp, Homo sapiens
cttctatactggtaataaaagtaattgtgaagccaccatctctaataatcactggttatctggtgatacatacagcagttattatatagaataatattataatttcttgtctaaatacttttagtaaaaaataattaataaatatctgggtaaaggcagcaagtaattcagggtcacacacatttttccaatattaaacaaaataaaatttaaaaagttaaccaaaaaaaagcagccaaaaatttactagtagcaatcaaaccaggaaaaatactaaattttatgacaaatatttctaaaggtgaagccaaggaaaaaacttgaaatgtttctacgtaggtttaagccacagtcagaccaacagccagaagcaataccaatgaaagaatgataattaataaaatcttatgaatatgtatcactattctttaatgtggagagatgtgagtcaatgaaatgagtaggaaatactgggaaattagaaaaatatttaagtatgaaacacctacmtgtcactataagaccagagcaaaggcagagaggacagtgagggtttgcagttttctggtcccttgctgaactgggagaatggaaggagtctacatccatggtgggtgga

SEQ ID NO: 902592 - DNA, 555 bp, Homo sapiens
taaaaagtgcattgtatgttatggcatattctcttgtttttgtttctcgtttgaaaagatctattttttggtcttcattcttgaatgatagttaagttaatggctattttcccacagcattttagagatattagttcaccacggtcagtcttccattgttactgttaagcaatctactgcctgttaaattcctttgtggttaatctcctttcctctctgaccttttttgcggttttctcatagtcaatatatgtaattgctaactgtcataaatgccttcctgtataactagcctaaaatattttatatgttaggaagatgatttttttcttagtcttatgaaaactatactctatatggttatttgccattcctttattaattgtttcatttagttaacatttatggaatatcctctacatttatggagttgttctaggtaccagcaatagaggcaaaaacaaagcaaagaaggcctgtgctctaatagagcttatcttccactttcarttaagtctcacctcatttttccataggctttaaaaatattgggtt

SEQ ID NO: 902593 - DNA, 577 bp, Homo sapiens
ctgaccacaatttagccagatttattctatccttatatttaacaactgtatcataatagtaaattgtgtggttggaacattgaacaatttgcttccaacccattatgttagtcatgaaacttcccaaatagatctaacatattaggtagatttatttaacttctttattttagggaagcctaagctgtatagacagtttcatttatcctgttatcaaatatcattgaaaggttaaacttggtgttcagtgacattgtgcaaccaaaacttccaaagctaaagtggaaaataatggctgtggcatcctttccaagaaatccctatgaccctaatctcaaaactttagaggactcagctgttttaaactggagctctgaatatttcaactggacaaagtgtcttgggacttgtattcctctagcaggcaagaactggaaggaaggaaagagcgagaaagggaaatagaaaaagaggaaggaagagaakgagggaggaagggagaaaggaggcaggaaaagagagagagtacaggtgtaagaaagagagagagagagaaagtggttgatcattaaaagag

SEQ ID NO: 902594 - DNA, 658 bp, Homo sapiens
ttaaatatttttacgcaatcaaagttaaggtgttatcagctaaaataacttgttataactagaagatgttttatgtaagcttcatgktaaccacaaagcaaaagcctgtagtagatacccaaaagataagaagtaaggaatcaaagcataatgctagagaaaactatctaatcacaaagaaatacagaatcagaaaaaaaaggaacaaaagatctccaaaacaacctgaaaacaatgaacaaaatagcagtagtaagtccttatttactaataattacctttaatataaatgaaccaaattctcataacaagaaacagagtggctgaatggattaaataaaaaaggacaaacaaaacccaactatatgctgcttacaaaagactcatttacctttaaggatgcatatacattgaaagtgaaaggataaaaaaattcatgcaaataaaaaccaaaagatgttaagggtagctacacttagataaaacagactttaataaaaaatggtaaaatgagacaaagaagataattatacaatgataaagaggtcaattcatcaagaggatataacaattacaaatatatatgtacctaacaccagagcatctaagtatataaagcaaatatgaatagacctggaagaagacatagactgcaata

SEQ ID NO: 902595 - DNA, 619 bp, Homo sapiens
tctcaagagttcaattctttctgcttttgtttcattattctagacaggtttttgtgctttagaaatgctcagcagagtactttttaattcactgtttttcaagtaagattaattttcacatttcccacaggtttagtctttaatctgctatattataggactagaaaaacatagcaacaatgagtagatgaggttttgaatttcaagacgcggagccaagttgatggtacaacagaagggaaaaatatatctttctcacacacagaaacatcagtaatgtgttttgtggaaacttttaggtagctagatcccaaatttaaaccaaaaacaaaaaagtaagcaagctagggaatctatgaataagtaagcagaggaaatcaggctcttccattctcagtgggtttgtctgatctatatatttcctccaattttaggcccaaatttccccagaaaggcatttttaaaaaattgtataagccacagtgacttaactcttcaacaccgttatgtttgtaacttggcaaatgatcatctccagctctttggagarggttgttaaaattcatcttttaaagaaaccacttaattggctcattctaggaaaagcaacaacgctttt

SEQ ID NO: 902596 - DNA, 668 bp, Homo sapiens
cacttgagtgttgaaaacagattattatttatgttatatacgtgagaaaactcttacaagccaccacttttaagttttgcttttagtggcttatrtttcacaagtttaaagggcacttttaaattttttttggtaatcaccgggatatgagcagatgttatgaaaatcttcttatggggattttcaaacatagaggtctttttagtgacatgcacttctggcacttgtgtgaatttcatgataattcttggtatctgactgctctgaaacgcaccatcctaggtttgtaccatccttgctggagctcctgttctggaacctgggtgtcttcaaggatagcccaggattcttgtacttttaagcctgctacctgtggtttatgaccagataggaaatttaagaacaacaacaacaaaaaaagctaacagggtagagagagaatattgccgggctgactggcttccatccctcgctgggtcccagagcccaggaccccttggagaggaagaaccactcctcctgtctcctgcccagaggtctcccacttctcatcagtccctgggcttgggtgcctaggagtttcccttctgcctgtcttgagggctgagtatatggactgcaggaaggaggggctgctttgcatcttcatgctaatgcaagactttctc

SEQ ID NO: 902597 - DNA, 460 bp, Homo sapiens
gatgattataggtgtgtggttttatttgagtctctattctgttccattggtctgtgtttgtttccttaccagtaccatgctgttttggttactgtagccttatagtatagtttgaagtagggtagcatgatgcctccagctttgttctttttgttagggttgtcttggctattcaggctcttttttggttccatatgaattttaaaatagtctttctaattctgtgaaaaatatcaatggtagtttaatgagaatagcattgaatctataaattacttttggcagtatggccattttcatgatctttattcttcctgtccatgagcatggaatgttttcccatttgtttgtgtcctctctaatttccttgagcastgtgaagacgtttatgtggcccacaaacatgaaaactcaacattactgatcattagagaaatgcaaatcaaaaccacagtgagat

SEQ ID NO: 902598 - DNA, 653 bp, Homo sapiens
aaatgttaagggcagccagagagaaaggtcacgttacccgcaaagggaagcccatcagactaagactaacagctgatctctcggcagaaactctacaagccagaagagagtgggggccaatattcaacattctttttttttttttttttttgagacggaatcttgctcatcgcccaggctggagtgcagtgctgcaatctcgcctcactgcaagctccgccatccaggtccatgccattctcctgcctcagcctcccaagtagctgggactacaggcacccgccaccacaccctgctaactttctgtatttttagtagagatggggtttcacctggttagccaggatggtctcgatctcctgacctcatgatccacccacctcagcctcccaaagtactaggattacaggcctgagccactacgcccggcctcgacattcttaaagaaaagaattttcaacccagaatttcatatccagccaaactaagcttcataagtgaaggagatataaaatactttacagacaagcaaatkctgagagattttgccaccaccaggcctgccctaaaagagctcctgaaggaagcactaaacatggaaaggaacaaccagtagcagccactgcaaaaacatgccaaattgtaaagaccat

SEQ ID NO: 902599 - DNA, 583 bp, Homo sapiens
tgctgaacatgcaaaaatccccaataaaatgctgacatattgaagtcagcagcacatcaaaaagctaatccaccatgatcaagttggctccattcctgggatgcaaggctggctcaacatatgcaaatcaataaatataatccatcacgtaaacagaaccaatgacaaaaaccacatgatcatctcaatagatgcagaaaaggccttcaataaaattcaacatcccttcatgttaaaaactctcaataaactaggtattgatggaatatatctcaaaataataagagccattcatgacaaattcacagctaatatcatactgaatgggcaaaagctggaagcattccttttgaaaaccagcagaagacaaggatgccctctctcaacactcctatttaacataatattggaatttctagccagggcaatcaggcaagagaaagaaataatgggtattcaaataggaagaaaggaagtcaaactctctctgtttgcagatgacatgatcctatatctagaaaaccccatcatctcagccccaaagcttcrtaagctgataagcaacttcagcaaagtctcagga

SEQ ID NO: 902600 - DNA, 645 bp, Homo sapiens
cacccatgggttgaaacattcctataggtttatttaacagagaaggaagcaaaggctcartacatgaaaatgattcgcctgaagatttagtggacagaacctggaattcagtttcattgtcccaagtctggcgttcatttcctctgtaaaagagtcttttagctcttgaaagacttcctttctgggaaaaatcctcatatcccagaccccactatgagcagcagtaccctgagaaagtcactttctctcttggagccttcatttctcaatcataaatcaaagatgataataacctactgtgtaggtaattgtaaggataaaataaaatgagtatacaatacttggtgagtattagctactcaaagagaaaaataattatgtttttaaaaaaattctgggttcagagtttgccatttatcaatggcgtggcaattgacaagtcacattgttaccctggacctgaaatgggataacaatgcccatctagttcaggtaatagagaggagtgaataaggtaatacatgcaggagtgctttgcaaaagaatgctactatccacaccttataatcatttacaaacttctccaagaaattgaatgttggattatagaatatttgttcttctgtacatagttttagtcatagt

SEQ ID NO: 902601 - DNA, 551 bp, Homo sapiens
agtccacccaaatgagaaggaaccagaaaaacaattcttatactatgacaaaacaaggttcttyaacacccccaaaagatcacactagcttaccagcaatgggtccaaaccaacatgaaatctctgaattgccagaaaaagaatttagaaggtcaaccattaagccaatcaaggtggcaccagagaaagatgaagtccaacttaaagaaatcaaaaaaagatactgaatatgaatggaaaaatgtccagtgaaatagcacaaataaaaaacaatcacaactctggaaataaaggacaaacttagagaactgcaaaatgcactagaaagtctcaacaagggagctgaacaagtagaagaaagaacttcagagccagagcacaaggctttcaaattaacccaatctggcaaagacaaagacaaaagaatttaaaaaaataatcaagggctccaagaagtttggcgttatgttaaatgaccaaacctaagaataattggtgttccagaggaagaagggaaatctacaagtttggaaaacatatttgagggaata

SEQ ID NO: 902602 - DNA, 612 bp, Homo sapiens
gggggaggagggagggatagcattaggagatatacctaatgtaaatgacgaattaacaggtgcagcacaccaacatggcacatgtatacatacgtaacaaaactgcacattgtgcacatgtaccctagaacttaaagtataaaaaaaacactaaacagactagtaatagaatataaccacctcaacataataagtcatatatgaaaaactgagatagcattatactaaatagtgaaaggctgaaagctttttccctaagatcacaagacaaagatgcctactttcaccacttctattcaacatagtactggaagttctagccatattagctgggactccacacacacacatgcacacagacacacacacataactgttagagctaatacatttagcaaagtagcaggatacaataatcagcatgcaaaaattagtttcattcttatacgctaatgaagaacaatccaaaaaggaagtcaagaaaatagttacatttacaattgcatcaaaaagaataaaataccaatgcattaacktaccaatgaggcaaatgtcttgtacactgaaaactacaaagcatgctaaaaggaattaaagaatagttcaataaaa

SEQ ID NO: 902603 - DNA, 548 bp, Homo sapiens
tgacatctacttatggtgatggcctcaggaatcttataataatgtcggaacgcaaagagggagctagcatgtcacatgatgagagcaggggcaaggatggaggttgctacactcttttaaacaaccagatctcaaggaactagctgagcaagaactcactcatcatcaaggggatggtagtaagtcgttaatgagagatgggtcctcatgatccagtgctttgcaccaggcctcatgtccaaaactggatgtcacatttcaacatgagatttggagggaacaaataaccaaacaatatcattttggatccccaaatctcatgtccttctcacatttcaaagtataaaaatctcttttcaatagtcctccaaattcttaacttgttcaagcaccaagttcaaagtccaaagtttcatctgagactcatcttccacctatragcccataaaattaaaacaagtttttcacacccaagatacaatggtggcacaggcattgggtaagcattaccattccaaaataaagtaaaggagtaacaggccccacac

SEQ ID NO: 902604 - DNA, 568 bp, Homo sapiens
tgtagattctggatattagccttttgtcagatgagtaggttgcaaaaattttctcccattctgtaggttacctgttcactctgatggtagtttcttttgctgtgcagaagctctttagtttaattagatcccatttgtcaattttggcttttgttgccattgcttttggtgttttagacatgaagtccttgcccatgcctatgtcctgaatggtattgcctagattttcttctagggtttttatggttttaagtctaacatttaagtctttactccatcttgaattaatttttgtataaggtgtaaggaagggatccagtttcagctttctacatatggctagccagtttccccagcaccctttattaaatagggaatcctttccccatttcttgtttttgtcaggtttgtcaaagatcagatagttgtagatatgcattgtatttattataaaatatttttgtcatgtataattttagaaaatgttattaatattatattgagkagttgcgatttatttagtcatgctatatccgtataaattctcacaaaacactaaaagaaagaa

SEQ ID NO: 902605 - DNA, 597 bp, Homo sapiens
tgtcacattgcaaactaagatcttgtagatttggtcataatrgcaaatgtggacatatggtcatgctccatgcagggccactgaagaattcttagttattgttcccatctttcattttaacagaataagagggtagttccttttaatggctctgtactgtatcttcctttggacaaaataactagacaggttggacagcaaggtgaatcacctttggtagatactgagtatgaagtacttactcaggctgctccaagtgctgtcaatgagagggagaagggggaaagttctgagcacattagaaagtgggtgaaatttcaagtcctcctttttgtgtacttgacacaaaggaaaagaaaagcattcacagccctcatagaggctgcagggcttttcccagaaccacagaccaccacttacatcccttattgcacaacaggggtttccattctcagtttggtctgtgtgaatgattccaacaggagctgtgtgatgctacagtcctgatggtcttcatagttagtttgataatttggggtagctgcttgaactttttttaattttataagttgaatttatcatattttatattttaaa

SEQ ID NO: 902606 - DNA, 691 bp, Homo sapiens
agacccattgatctgttgcctaaaagaaacacttcaactgttaagayacgtatagactgaaataaaggaatggtgtgatggttaatactgagtgtcaacttgattggattgaaggatgcaaaatattgatcttgggtgtgtctctgacggtgtagccaaaggagataaacatttgagtcagttggctaggaaaggcagacccacccttaatatgggtgaacaccatctaatcagctgtgagtgtggccagaaaataaagcagacagaaaaatgtgagaagattagactggcttagattcccaggctacatctttctctaacgctggatgcttcccatcctcaaacatcaaactccaaattcttcagctttggaactcggacttgcttccttgctcttcagcttgcagatggcctattgtgggaccttgtgatactgtgagttaatattccctaataaactcccctttatacatatacatatatatatatatgtatatacacacacacatatatatatatgtgtgcatgtgtgtgtgtgtgtgtgtgtgtgtcctattagttctgtctctctagaaaaccctgactaatacagattttggtatcaggagaggggttctagagaaacagaatattaagcataaagttcttttgttggttttgtagtttctggagttggctgcttaatatgatt

SEQ ID NO: 902607 - DNA, 691 bp, Homo sapiens
agacccattgatctgttgcctaaaagaaacacttcaactgttaagacacrtatagactgaaataaaggaatggtgtgatggttaatactgagtgtcaacttgattggattgaaggatgcaaaatattgatcttgggtgtgtctctgacggtgtagccaaaggagataaacatttgagtcagttggctaggaaaggcagacccacccttaatatgggtgaacaccatctaatcagctgtgagtgtggccagaaaataaagcagacagaaaaatgtgagaagattagactggcttagattcccaggctacatctttctctaacgctggatgcttcccatcctcaaacatcaaactccaaattcttcagctttggaactcggacttgcttccttgctcttcagcttgcagatggcctattgtgggaccttgtgatactgtgagttaatattccctaataaactcccctttatacatatacatatatatatatatgtatatacacacacacatatatatatatgtgtgcatgtgtgtgtgtgtgtgtgtgtgtgtcctattagttctgtctctctagaaaaccctgactaatacagattttggtatcaggagaggggttctagagaaacagaatattaagcataaagttcttttgttggttttgtagtttctggagttggctgcttaatatgatt

SEQ ID NO: 902608 - DNA, 589 bp, Homo sapiens
actttctcttctttttccaattaaaaatatactatacacaaatttattcactcaatatttattcaacagtgccaggccatatgtttgacagtggatataaaaactacaaccatagttttatagcattatattataagcacttacactgttattaaataattaaaaaaataactttcaaagcataataagaatgtactaaaattcatttaacatttgtattagtctgttttcacactgctgataaagacatacctaagactgggcaacttacgaaagggagaggtttaattggacttacagtcctgtgtgtagctggggaagcctcacaatcatgtcacaaggtaaggaagagcaagtcacatcttacatggatggcagcaagcaaacagagagagcttgtgcaggggagctcctctttttaaaaccatcaaatctagtgagacttattcattatcaagagaacagyacatgaaagacttgcccccatgattcaattacctcccactgggtccctctcaaaacatgtgggaattcaagatgagatttgggtggggacacagccaaaccatatcaacattggtccaatatt

SEQ ID NO: 902609 - DNA, 589 bp, Homo sapiens
actttctcttctttttccaattaaaaatatactatacacaaatttattcactcaatatttattcaacagtgccaggccatatgtttgacagtggatataaaaactacaaccatagttttatagcattatattataagcacttacactgttattaaataattaaaaaaataactttcaaagcataataagaatgtactaaaattcatttaacatttgtattagtctgttttcacactgctgataaagacatacctaagactgggcaacttacgaaagggagaggtttaattggacttacagtcctgtgtgtagctggggaagcctcacaatcatgtcacaaggtaaggaagagcaagtcacatcttacatggatggcagcaagcaaacagagagagcttgtgcaggggagctcctctttttaaaaccatcaaatctagtgagacttattcattatcaagagaacagcacatgaaagacttgcccccatgattcaattacctcccactgggtccctctcamaacatgtgggaattcaagatgagatttgggtggggacacagccaaaccatatcaacattggtccaatatt

SEQ ID NO: 902610 - DNA, 514 bp, Homo sapiens
actcagaatggtaaactggctcatttgttgttttgttttatgctccccaccctcaggaaccaactcaatgcaagaggacagcttcaacaccctatgatttcatccccaacccaaccaatcaggattccccattttctagccccctgcccaccaaactttgaattttgggggaggattatttgagtaataataaaactctggtctctcagctagctcaactctttctctattgcaatttccctttcttggttatcagctttatctgagcagtggggaaggtaagcccattgggtgattacagtatgtattggttcattttcatactgctataaagaactgcctgagactaagtaatttatgaagcaaagaggtttaattgactmacagttcagcatggctggggaagcctcaggaaacttacaatcatggcgggaggtgaaggagaagcaaggcaacttcttcacaaggcagtaggaaggagaagtgctgagcgaagagggaagagcccctcata

SEQ ID NO: 902611 - DNA, 514 bp, Homo sapiens
actcagaatggtaaactggctcatttgttgttttgttttatgctccccaccctcaggaaccaactcaatgcaagaggacagcttcaacaccctatgatttcatccccaacccaaccaatcaggattccccattttctagccccctgcccaccaaactttgaattttgggggaggattatttgagtaataataaaactctggtctctcagctagctcaactctttctctattgcaatttccctttcttggttatcagctttatctgagcagtggggaaggtaagcccattgggtgattacagtatgtattggttcattttcatactgctataaagaactgcctgagactaagtaatttatgaagcaaagaggtttaattgactaacagttcagyatggctggggaagcctcaggaaacttacaatcatggcgggaggtgaaggagaagcaaggcaacttcttcacaaggcagtaggaaggagaagtgctgagcgaagagggaagagcccctcata

SEQ ID NO: 902612 - DNA, 514 bp, Homo sapiens
actcagaatggtaaactggctcatttgttgttttgttttatgctccccaccctcaggaaccaactcaatgcaagaggacagcttcaacaccctatgatttcatccccaacccaaccaatcaggattccccattttctagccccctgcccaccaaactttgaattttgggggaggattatttgagtaataataaaactctggtctctcagctagctcaactctttctctattgcaatttccctttcttggttatcagctttatctgagcagtggggaaggtaagcccattgggtgattacagtatgtattggttcattttcatactgctataaagaactgcctgagactaagtaatttatgaagcaaagaggtttaattgactaacagttcagcatggctggggaagcctcaggaaacttacaatcatggcrggaggtgaaggagaagcaaggcaacttcttcacaaggcagtaggaaggagaagtgctgagcgaagagggaagagcccctcata

SEQ ID NO: 902613 - DNA, 514 bp, Homo sapiens
actcagaatggtaaactggctcatttgttgttttgttttatgctccccaccctcaggaaccaactcaatgcaagaggacagcttcaacaccctatgatttcatccccaacccaaccaatcaggattccccattttctagccccctgcccaccaaactttgaattttgggggaggattatttgagtaataataaaactctggtctctcagctagctcaactctttctctattgcaatttccctttcttggttatcagctttatctgagcagtggggaaggtaagcccattgggtgattacagtatgtattggttcattttcatactgctataaagaactgcctgagactaagtaatttatgaagcaaagaggtttaattgactaacagttcagcatggctggggaagcctcaggaaacttacaatcatggcgggaggtgaaggagaagcaaggcamcttcttcacaaggcagtaggaaggagaagtgctgagcgaagagggaagagcccctcata

SEQ ID NO: 902614 - DNA, 600 bp, Homo sapiens
taagattgcttggtattggaacaaaaatcagtcattcctgatcagcacacagcataaaaaaaaatcttctaaaaatgttgcataatggtttaatgttttgctacagatatatttatacatagcccacttttgatcagttgagtgacctcatgataaatatatttgggcatttaattcaatttctctctatactgcccatttattaggtatatcacttattagcattttcatgaaagttgggaagaagaaatggtgtttgaattagttactttctctatatgttggcagcttctctaaaatgtcttcagggaaagattttaaattttggctgtagtaaaaatataaaaggtctagaaatttctattacccatgctatttcttagaaaaacagaagtttacaattaggtttttttgtgttcttattagggagatgttgctagccctgggactgtagtcgtatctccactttatttactattataacytaatgagatgttagcatcgttataaattattctttatagttaattgtatgagattatattaatttccatcagctactgttccacttaatagaggatatgcagctacgggtagcaa

SEQ ID NO: 902615 - DNA, 598 bp, Homo sapiens
tgaacctaggaggcggaggttgcagtgagccgagaccgcaccactgcactccagcctgggcaacaagagcaaaactctgtctcaattaaaaaaaacaaaaaaaaaacacacaagaaaaaaatatctaaactgaaacacagaaagaaaagaaatgggaaaaaatcagaaaggagcataaaagagatatgagacacagtaacaaatatccaacatacatatcattggagtcctagaagaagaagggaaagttagaatgggaaaagaagcaatatttaaagaaataatggtcaagaattttccaaacattctattgggccttttttcctactaccattaaaaaatatttctgaaattcttgttgttgttgttgttgttcttcaaatattccttactctctttaaataaaacatactttttttttgttttaaaattgaaaaatgtcttctctcttaaggatattaagaatagtatttgttgygtttgtgaggttttcttttccctcccaaatacttcttgtttctgtttgttttctgagctacatcaaccctttaaataagtattttagtactagtaaactgaatccaacagtatacggaaa

SEQ ID NO: 902616 - DNA, 577 bp, Homo sapiens
aaaactcatggtataagaggagataaatcccctcctgtcatcatattatattgtcctcatcttagatgaagtaaaaacttcagatttcatagcagttttgaataatcctggctgggtgcagtgcctcacatcggtaatcccagcactttgccaggctgaggcagccagatcacctgaggtcaggagttcgagacaaacctggccaacatggtgaaaccctgtctctactaaaaacacaaaaactagccaggtgtggtggcacgtgcctgtaatctcagctagttggcaggctgaggcaggagaatcgcttgagcctgggaggtggaggctgcagtgagccgagattgcgccattgcactccagcctgggcaacaaagcgagactctgacccaaaaaaacaaaaattaaaaaataaataaataaataaggaattacagaaattgattcagttgggtccaatctaggtacccattagatggttcttttcaaagcaaataaagaagctgtttatgtttatcctcttagagtactttaggaacacttccatttatgtraagaattcatatgtgagttccgc

SEQ ID NO: 902617 - DNA, 634 bp, Homo sapiens
caatgttaaaaagaaaggaaactttgacacatattacagcatgtatgaaccttgaggatatactaagtgcaataagccagtcactaaaggataaatattgtatgattccacttatatgagatacatagagcagtcaaattcatagaaacaggaagataatggtagttccaggggtggggtaatggggaattattgtttaatgggtaccgcatttcagttttaaaagatgaaaaatgttctgaagatggttggtggtgatggtttcataatggtgtcaatttacttaatgccactgaattgtactcttaaaaatgattaagatggtcaactttatgttacatgttacatgtgttgccacaacttaaaacatatttgagggaataattgaggaaaatttccccagccttgctagggacctagacatccaaatacaagaagctcaaagaacacttgagaaattcatcacaaaaatatcatagcctaggcacagcatcatcaggttatctaaagtcaagatgaaggagagaatctgaagagctgtgagacaaaagcatcaggtaacctataaagaaaaacctatcagattaacagcagatttmtcagcagaaaccctacaagctagaagagtttgggg

SEQ ID NO: 902618 - DNA, 602 bp, Homo sapiens
gatttctgatctccataaactaagagagtaaatttgtgttttattaagccatattaccaatcatgtgttacagcgtcaatagaaaataaatacaagagcgcatcaatttgttatccttttcatttgccaaataatatcccattgcatagatcatattttctcacatttgccagttcatggatattttaaaagttaccagtttcagccttttgttaataatacttcaatgagcatttgtgtacatgtctgtatgtggacattatattttgtttctcttggtttgatacctaggagtggattgtggctaatggggtaactttatgtttaactttttaggaaaccactcaacatacagtttaaattttgataaattccaatttatcaacgtatatatttatacattgtgtgtgtgtgtgtgtgtgtaatgtttgtgatgctatggtatactttgcccaaccaaaggccaacaagcttttctcttttgtaatctcctttgtgatcyttttagctcttgcatttagggctatgatctctttttagttaatatttgtatatggtagatttttttttcactaggatgtccaattgtcttagcaccattt

SEQ ID NO: 902619 - DNA, 621 bp, Homo sapiens
taggaatcgtttttggtggtactgatgaaattgcctagtaaattattttgtttgtgctctgggagagarttaatactcagagaagtgtgcagaaagaaaggaagttctggtgccatagaagtaaatttttattttaagttcaggggtacatgtgcaggtttgttacataggtaaacttatgtcatgggggtttgttgtacaaattatttcatcatccagtattaagtctaatatccattagttatttttttctgattctctccctcctcccaccatccaccctctgaaaggacccagtgtgcattgttcccctctgcgtgtccatgtgttctcgtgatttagctcccacttataagtgagaacatgtggtatttggttttctgttcctgtgttagtttgctaagaataatggccttcatttccatccatgtccctccaaaggacatgatctccttcctttttatgactgcataatattccattttgtatatgtgccacattttctttactctatcactgatggttatttaggtggattccatgcctttgctattgtgaatagtgctgcaataaacattcatgtgcatgtgtctttatgtagaatgcttatatatcctggtg

SEQ ID NO: 902620 - DNA, 611 bp, Homo sapiens
gctctaagacctccattatcatattgtgttatttctctactattttactgtattatacctcagtattataatataaactctgctaataattacttatcccctcccctttattttatgagtcctcacaacatasagattttctgttgttaacctttgtacctgtatcgtctaggacaatgcctcgctaaatattcacaagacatataagaaattggaaagaataactgaaaacatttatagttctgtcggtaatattttgtttcccaatattgtgctctttcctcaaccagtattgcttaactaatcctaacaaaataaatcagatttctaaaaaatgcttctagaactccattcttcaatcatattagaaaccctaaagacttcagcaatatcctcttctatttttgaagcaatcctgttatttccttctttcaaatactaattgcttcccacatcctataaatcagaattgttttttctcactttattatgagttactcactattctgttccagaagggaatacattatcttgtaaaaccgtcctatgagcttttgctcactttgttctgttggcacactttctgcttcacttaacctattctatatcgt

SEQ ID NO: 902621 - DNA, 648 bp, Homo sapiens
tttgtttattactatttccttagtgtctagaatcgtgctgggtctatatattctcaaaaaatattaatcaaaagaaggaaggaagaaagagaaagagaaaggattttatttccttttctgtgcctttagatttctaaagacaaatatgctttggagattatgatccacatctagcatagttcctccaagatatctgttggatatcttgcagagaaagaaagtataattggttcacttttctaataaagcctcaagacttttatttccctgtaacatttagatcaacttgagccttgatggaataacgtagccttagtagtttgccaagttgttttgctgactctgcaaggcacagcccatcacatgaagagggcattgaaggttataagtctggattacctcattgggcaataaattactgccaagtacattgtgaattttgtgtccttagaaacatgaagaccagtagttaactctccatcctttggtaattttttagagccttaggggactcatttatcttgttaatagtaatcaatattaataataaattagtggatacacaaatataaatgtgatgtgagaacaataatattggaaaaacaggcgttggayggtaaatagcctattattcctccatgtgctaaa

SEQ ID NO: 902622 - DNA, 623 bp, Homo sapiens
atctcaagtagttctttatagaagtgcaaaaatggactaatacaaaagattagtaccgagataattggggcattgctataagatacctgaaaatgtagaarcagctttggaaccaagcaatgggcagaggttggaacagtttggaaggctcagaagaggacgggaatatgcaggaaagtttgaaattttccagagacttgtcgaatggttttgacgaaaatgctgatggtgatatggacagtgaaatccaggctgaggtggtctcagatgaaaataaggatcttattgggaactggagcaaaggtcacacttactatgctttagtaaagagactggaagcattttgcccctgctctagagacctgtagatctttgaacttgagagagataatttagggtatctggtggaagaagtttctaaacagtaaagcattcaagaggtgaccttgcactttctgaaagtgtacagtcatatgcattcaaaaagacatgatctaaaattgaaacttatgtttaaaagagaagcaaaacataaaagtttggaaaatttgcagcttgaccatgtggtaaaaggaaaaccccatcttctagggagaaatgcaagctggttacagaaatttgca

SEQ ID NO: 902623 - DNA, 647 bp, Homo sapiens
gggtattttcaaaaacaaataaaaggcaaacaaactttgccaatttgttaggcaaaattttgtaatttatctttattttcatttgcattagtaaaatgaatgatagttcactatttgtttttcctcctttcgaaaatatctgtttatataatttgcttatttaatcctactgcattcttcttttttaaagaagaggcaggactactaattcttcagtgactcatttgatcatgcagatggtgccaaacataaaatggtttgttttcttgaactgaattgattactttcctgtgaaagaacccagggaaatgaattctaagtgatgtgacttgtccgattcccagaagcataatgatttcagtaggaagagttatttttgctgatggagtttttcagaagaaaatatttatataactctgaaaagtcagttttcacatgcaaatttactcttctgcattatagaaagagtccagttgcggaactgcctcatattttttcatcactgacatttcaatatccttttatttccttctaatctctttttctcttttactcagctcaygcaaaccaacaaacattggacccagaccaagttttttacttaccccttttttctctcttagaaatgaataagaattgctttcaaa

SEQ ID NO: 902624 - DNA, 507 bp, Homo sapiens
cagcccagatgcacaagaacatgccaagaataaatgggaggaatcaacagagacaaggcacatttttgatcccttgtagcgagggttgtttgtgagtgttcagtcctggcttgatgagtcactcattagaaaagaagaagtatgacttttttttctattgattccaggaagacttcgggtgggagggagggatttcaagaagtcaagagagtcaaagacaagaggaggaatagacttggccaatctgtttagactggatgctcttggggcaagtgagaacttaggtgctgagaagaaaacagtaaacaggaaagaaaactggttaacaagaacagggatgctcagggcaggcatctggtactttttatccctggcttaattccctctctctctctctctctcwcacacacacacacacacacacacacacaccccaaaaacaaaagatggcaaaggaggtagactgcagaaaggcacgagaaataacaagaagcaaaatatagctta

SEQ ID NO: 902625 - DNA, 611 bp, Homo sapiens
ccccaggagataagccaccattatctcttgctagatgactggggaaaaacacaaaccaactaaccttttagctccacctgactgctcatccatcctccatctgcacaatagraggaaaactttgtttgtttgtttatttatttatttattgagacagagtctcgctctgttacccaggctggagtgcaatggtgcgatctaggctcactacaacctccacctcctgggtttaaggggatggattctcctgcctcagcttctcacctagctgagactatgggcatgcaccaccacacccagctaatttttgtatttttagtagagacagtgtttcatcatgttggccaggctggtgtcgaactcctgatctcaggtgatctgcctgcctcagactcgcaaagtgcggggattacaggtgtgagccactgcaccaggctggaagactttataaaatcataaatctggtcatgccaacacctttgctgaaaatccttcagcatcttcccaaagcatataaaataaagatcaaattctttagcatcatctctgtagtgggctgaatggtgcttctccaaaaaagaaaaaaaaggctactgggacttgtgaatgtt

SEQ ID NO: 902626 - DNA, 562 bp, Homo sapiens
aggggaatggggacctactgatcaagaagcgtaaagtttaagttaagcaagagatctgctctacgagattatacttaaacaatactatattgtacacttaaaatttgttaagaaggtagatctcargttgtgctcttaccagaataaaataatttgttttacaaaaaaagcttctatttcttcggtatgtaaacctaaatccccagctactacacttcagatttgaaatgaattttgaattgttctgattaaattatttcatcataaaatcaccatggactctgacctacagatgggctccctcactgctactgagaactccaaacttctgccagctatactgctgccttccagacagatactttgtctggatgagatctcagtatcaaaagtaaatggatacagcttaagtgtctttccaagccaaatgttggactcatcacaactagaagaaaatggttatactaatttcttccatgagctccaagaaactgatttagtcttctatcttgctgagactgtgttggttttctattgttcaggacacagatatgcaaaatat

SEQ ID NO: 902627 - DNA, 588 bp, Homo sapiens
gcatatcatgaccactcaggatttgaagaaaacaaaagcaaaatttttaatttaaaagtaccagagatatatttacatagaacaggggtatcctatcttctggcttccctgggtcacattggaagaattgtcttgaggcgcacataaaatacactaccactaatggtaactgatgaactaaaaaaaaaaaaaaaaaaattgcaagaatcatcatgttttaagaaagtttatgaatttgtgttgggttgcatttaaagccatcctgggctgcatgcagcccgcaggctgcgggttggacaagcttgacatagaggatatgtaatatgtctttcatgaccaggaattcatcctctgcaccaactatctaaagacattaggttcctaagcactggattcagtgggcaatgtgtgtacaacctagtactaaagtacttggagatgtcagtttaaagctctagatactctttaagggtttcaaactgatgatttactaaaatgtttagtgtcggcaagcttacaaagtaccacttctactagatatgagggataaaccaccaraaaaataaaatctatggtttaatttataaa

SEQ ID NO: 902628 - DNA, 646 bp, Homo sapiens
aagcataagggattctattaggtggaattagcagtwttgtgatgaggaaaaagaagtgagatgttaggtgagcagggacaaaaccagcaggttcttgatttccttgatgagcagaagcaagctgtagggtggttagctccacacgctctccatgatggcacaggactccttgcttgctttagtaaatagttttgactaagtggcaaaaaagtgatggtatacattagcaacttatatgcatcattattcataagagtgccgcttataaccaaagaatcaattgtcatttgtagaatgaaggaatatataaataggaatttcataatttgtttaattttttctctatttgggctacaatagtaagtccttgagaaatctaatgtgaaaagcaactcagtgctaaacctaggggcgctaaatatgctaaatataatgggaagttataaggcacaataggaagaaagaagagcagggaactaggtaattgtgtacctgaggaaggccaaggtcaaaatttgatcagagtgaaagtagtttgtcacttccctagcaaagtcatgctgactctatgagatggggaacaagcttgtgcaagaagaaatctgagtcagcacagtacaggcgagaacctaagaaggacagtaca

SEQ ID NO: 902629 - DNA, 666 bp, Homo sapiens
ctgactcatttatgtaagagtggtgtattagtccattttcacgctgctataaagaacttccctaatactgggtaatttataaaggaaagagacttgattgactcacggttctgcatggctgggctggcctcaggaaacttacaatcgtggcagaaggggaagcagacgccttcttcacaaaatgacaggagacagaagaatgaaagaagaacttctaatcatttataaaaccaccagatctcatgagaactcactcactatcatgagaaaagcatgggagaaattgccccacgatccaatcagctcctaccaggtccctccctcaacatctggggatgacaattcaagatgagatttacgtggggacacaaagtcaaaccatatcaagttggaagagcataatgcagataatattgcaaaagccttttggaaaagggaaagtatttctagtcttccatggtcctatgagaagcaagaacctaggtgagatatgatgaatcatctggaatgagggtaaccacccctgctccactcctaacaccaattgcctatggcagagatcactaattgatcsctgagcttttatcctcagagttctgaaattgtttgagatcatcagtacaactcaccacggccactacaatctatttaagttgggacaagttt

SEQ ID NO: 902630 - DNA, 642 bp, Homo sapiens
atttgtctgtatctgcagttgtatgttacttataatagatgttttgttaatgtttcctaaatatgtgaatgaaggaatgaatgaatgaatgaatcaataaaaatgagttgaaatagcagagagtcatgtgtatgcgttagaacttaaaattctatcacaaaaaacaaaaagctttactgcggtaggcagcctaagggcccctctcaaagatgtctgtgtcctcctccctgggacctgtgaatgtgtacatggcaaaggagactgcagatgtggttgtgggtaggatccttggaatcgagagagtatcctggattatccaggtgggtccactctaattgaatgagttgttaaaagcgagaacatttccatgctgtgatcagagggggatgtaacgagctgaagcatgaaagagctgtgacactgctggctttgaagatggagggaaagtgacacaagccaagaatgcaagccctctagaaataagaaaggacgaaacacggatgctgtcccagaagctccagaaaggaaggcagccctgacaacacyttcattttagccctgtgtgacccatgtcagacttctgacctacaaaaatgtgagataataaaagcgtgttgttctaagccactaaattcctggtaa

SEQ ID NO: 902631 - DNA, 587 bp, Homo sapiens
cctgcccctgggtgtgttcattttggaaagaaagctgatatggcccaaagatctcttgaggctctggaggactgacagtggagcaacacaagcatgactggtctgtgcttcctgattaacaagagcagaggcaacatcagaaaacagcaatgaggaaatgcggattaggccagatgctgagttgaggagagtgcctttactggtcttccttggaggcagaggtgtgtctcccttggaggcagaggtgtggctctcttgacccactaaactgcatgaagccattgctgtgtttgcatctgatgttaggccaatcacagtactccttgcaggagttttacacacccaccatgtcacatttatatggtacaaatattgagagcttattctgtttctgctaaagttgtaagagctttacctgagtaaccttttaatcttcacgctacatttactttttttttggagatggagtctcgctctcgctctgtcgccaagctggagtgcagtggcacgatctcggctcatggmaacttccgcctctcaggttcaagtgattctcctgcctcagcctcccgagtagctggaactac

SEQ ID NO: 902632 - DNA, 589 bp, Homo sapiens
tccacggcccgacgccatgacacttcctcctccgcccgctccttcattcaccccccgcccctcctggctcgcggactccccgccaaggcgcgcgaccccgccccactccgctcgccgtagaccacgcaccaccctttttcaccaccgcctccgcccttgcgcatgcgcggggcccgctctaccgactcgccctagtcttttgctttctttttctgccctcggcctcgctcttgcgcacgggaccacaatgctccgcgccgcttgtcattgggaggcgccgaaggtggagaggtcggctcggaaggaaaaggtcggcgcacgcatgccgggtctagggttggcggggcgaaggggtggggagggaaggggcggggaggggaggggaggggaaagtgggagagggtggactctggccggtgtgaagagaggcggtcgggcggctgcgctgtgggggcctgggcgtgtacttcggaggcccgtcgggcgcttcctttagacgggaggtctagcggccctttaaaaagagaaaaataaccttcactgtcgcagcctcaygccactacttccattttccttttgggcgggtccg

SEQ ID NO: 902633 - DNA, 603 bp, Homo sapiens
tgggttgcatgcaccaacctttggagactactgatctaggaaaacatctgatatgtgagtgatttgttcagtttgtatccattactttggagacataatatggtagacacaacctggaattttgtgaatttgctttttttttttttttttttttttgagacagggtctttctatgttgcccaggctgatctcaaactcctggattcaagaaatcctcttgcctcagcctcccaagtagcttggactacaggcatgtgccaacactcccagcttggaattatgttttcgaagagtatggtatgtgactgaagtcttccttttttcaaactaaagtggacagtgggcccatgcttaggagactgagttctagctgccagaaatgctgaaactgtgttgttttgttaatttgctaattgactgcccctcccactccacaaggcagggccttttctgtctgtgcactggtgtgtccccagtgcttggattcatgcttagcacaggagagaccacaatcaatactgaatgaatttagcaagtgtcattgtgtgtctaaaataggccagctgtttatctacayagctagctcatttttggtagtaaatt

SEQ ID NO: 902634 - DNA, 627 bp, Homo sapiens
agagaggaggtggagatgacatttgggctgatattgtattaaatatatatatatatatatatatatatatatatatatatatatwtttttttttttttttttttttttacaaagcttcccaggtctttcaaatgtgcagctaaagttgagaaacactggtctagaaaaaaagtctcaattttttgtttgtttgtttttggtttttgaacattgcctatgagacatttaattttaggtgtctacttgactgggctaaggaacacccagagaaccagtaaagcattatttttaggtatatctgtgagggtgtttccagaagagattggcatttgactcagtgcactgagtggggaggagatgccctcacccaatgtgggcaggcaccactaattggttgagggcccagatagaaaaaaaggcagaggaaaggtggattctgtctctgttagtgagctgggacatctttcttcttctgcctttggactagaactttagattctctggctttggcctctggggcttgtaccagtctgcccccacaacctccacatccctcactaggttctcaggcttttgacctcagactgagagtgatgttattggcttccctggttctcaggcctttgg

SEQ ID NO: 902635 - DNA, 723 bp, Homo sapiens
acaactccaaagccgtaagaatacctctggaaatataatgatgaaaacattaagtatgataatacttctcaaagaataattgtgcctgctggaattatgcaatgcatttcayctaagagctatgcctagtgaggatatatgaaattaatgtggatgggaggcagggaaatattaggcagagaagggcagggtccctaatgaagccccaacctcaagcctggacctgcagcccaaagtaagtacatgcattcttgttttcccacctgaatgttgtcttttctaaaaccaccctggcctggcctgccgcccatcctgcatccataaaaaccccatgctccactggcagtagggtagcagaggaggagagaagagaagcagcagcaggacatcagagaggagcagcttgacttcagagggacagcttgctggggggacttcggagaacagtttggctggggatggctaaactccaggggaagaccactttcccacttcttcccctttgcagctccccaacacactgagagccattttcatcagcaataaatcctccacttttatcatcttcaattcgttcgtgtgacctgattatttttggacgccaaacaaaagctcgggatatggagggctgtcactctgagctattaaacacttaagccatccatgggtggcaaatctaaaagagcacactgtaacacaagccctctgttgctccggggatca

SEQ ID NO: 902636 - DNA, 590 bp, Homo sapiens
atagcagttcaagctcagcaaaatccctacttcttgaagaaatgacatgtttaccagggaattgtgagttaagggaaatagatctagtggaaatgtgtggatgtttagggtgcctgaacttttagcagagaagttttacatagtgtaaagcaaagaagatgatgaggctctcaatgatagccacactcctataccaagcatcaaagtcagtaatttcaagatctgcttttctacatacaaatctcaaatgctgccgggcatgatggctcatgcctgtaatcccaacactttgggaggccctggcgggaggatcacttgagatcaggagtttgagaccagcctggccaacatggtgaaaccccgtctctactaaaaatacaaaaagtagctgggcgtggtggtgggtgcctgtaatcccagctacttgggaggctgaggcaagagaaccacttgaacccaggaggcggaggttgcagtgagccaagatggtgccactgcactccagcctgggcracagagtgaaactcggtctaaaaaaaaaaaaaaaatctcatatgctagagttgtcacctggcaaaataaatttggag

SEQ ID NO: 902637 - DNA, 598 bp, Homo sapiens
ttgtcagatggatagatagtgaaaattttctccctttccataggttgcctgttcactctgatcatagtttcttttgttatgccraagctctttagtttaattagatcccacttgtcaattttggctgtggttgcagttacttttggcattttcatcatgaagtctttgcccatgcctatattctgaatggtattacctaggttttcttttagggtttttacggttttgtgttttacatttaagtctttaatccatctttagttaatttttgtataaggtgtgaggaagggatccagtttcaattttctgcatatggctagccagttttcccagcaccatttattgaacaggagatcctttcttcattgcttgtttttgtcaggtttattgaagatcagatggttgtagatgtgtcatgttatttctggggtctctgttctgatagaataatttatattctgatagaattggtctatatgtctgttttggtaccagaaccatgctgttttggttactgtagccttgcagtattgtttgaagtcaggtagtgtgatgcctccagctttgttcttttgcttaggattgtcttggctatatg

SEQ ID NO: 902638 - DNA, 599 bp, Homo sapiens
tgttattgttgtatctctgccaggttttggtatcaagatgatgtgagcctcataaaatgagttagagaggattcccccttttttaattgtttggaatattttcagaagaaatattccaccattgcctctttgtacctctggtagaatttggctgtaaattcatctggtcctgggatttttttggttggtaggcttttattactgcttcaattttagaacttgttattgatctattcagggattcggctccttcctggcttagtcttagtagggtgtatgtgtcctggaatttaatcatttttttctagattttctagtttatttttgtagaggtatttatagtattctctgatggttgtttgtatttctgtgacgtcagtggtgatatcccctttatcatgttttattgtatctatttgattctttcctcatttcttctttattagtctagctagtggtctattttattttttwaaaaaaaacaggtcttggattcattgattttttgaagagtttttcatgtctctatctccttcagttctgctctgatcttatttattgtcttctgctagcttttggatttgttagctcatgcttct

SEQ ID NO: 902639 - DNA, 640 bp, Homo sapiens
gtggtgctgacaagaatgtgtattttgttggtttggggtggagagttctgtagctgtctgctaggtctgcttggtacagggctgagttcaagtcctaaatatccttgttaattttctgtctcgttgatctgtktaacattgacagtgaggcgttagtctcccactattattgtgtgggagtctaagtgtctttgtaggtccctaagaacttgctttatgaatctgggtgctcctgtatggggtgcatatatatttagaatagttagcccttcttgttgcattgatccctttactgttatgtaatgccctttgtcttttttgatctctgttggtttaaagtctgttttatcagagactaagattgcaactcctgccttttttttttttttgctttccatttgcttggtaaatattcctctatccctttattttgagcctatacatgtctttgcacatgagggtctcctgaatacagcacaccaatgggtcttgactctttatccaatttgccagtctgagtcttttaattgggacatttagcccatttccatttaaggttaatatttttatgtgtgaatttgatcctgtcattatgatgctagctggttattttggccagtagttgatgcagtttctttag

SEQ ID NO: 902640 - DNA, 671 bp, Homo sapiens
gctcttgaaaggcaggtctggtggtgacaaaatccctcagcatctgcttgtctgtaaaatattttatttctctttcactatgaagcttagcctggctggatatgwaattctgggttggaaattcttttctttaagaatgtcgaatattggtcctcactctcttttggcttgtagggtttctgcagagagatcctctgttagtctgatgggcttccctttgtgggtaacccaacctttctctctggctgcccttaacatttttcctccatttcagccttggtgaatctgacgattatgtgttttgggggtgctcttcctaaggagtaactttgtggtgttctctgtgtttcctgaatttgaatgttggtctgtcttgctaggttggggaagttctcctggataataccctgaagagtgttttccaacttggttccattctccccgtcactttcaggtacagcagtcaaacgtaggtttggtcttttcacatagtcccatatttcttggaagctttgttcgttccttttcattctttttttctctaatcttgtcttcatgctttatttcattaagttgatcttcaatctctgacatcctttcttctacttgatcgatttggctattgatactttatgcttcacgaagttctcgtgctgtgtttttcagctcca

SEQ ID NO: 902641 - DNA, 651 bp, Homo sapiens
atatcagacaaagtagacttcagaacaaggaatactcatagagataaagaggggcattttataatgatgagagggttaatacaccaagttcacataacaaacctaaatgtatattcatctaataacagggcttcaaaatgcatgaaacaaaatgattgaaatggaagaagaaatagacaagtctacaattatagcatacagtcagtattcagtacatggtagctattataattattattaacattatcatccatctctgacatttccaaaacaagattcaaggcaggaatgccccacaattatttaacagtttcctgaaaagtctatccaaaatatcatgagaaaaacaaaaataagaggcctaagctattggaatagaggagataaaattaccattatttctagttgatgtgattttatgtttagtaactaacaacaaaacaaaaccaagaaaagcaaaataactaagaggtattagaataatagggctcagtgagggaaactatttgaaactaattacatttcaacaacttcatgtatgctatcagcaactaattgtaaattacaaataaaaagaagattctattcataaaaacaatgaaaaattttaaattcccaraaaaaaatcataagccctctatgaaaaaaatt

SEQ ID NO: 902642 - DNA, 608 bp, Homo sapiens
ttcgtttatttgtttagtacctggtactaaagaggacctaattcaaatgaatcgtgtagttgacaagcaggaactgaaataagttccctgtaaattatttacgtaacttggatgggaggacagctggtcccttgggcttgggctcctgtacccacatgagcaatctctgtttttgccttgcaacagtccacagctagggttaagttatctggaaagaatctccccacacatcagtaaagtggacttggctcacaataagctggtgaggtctgaggagggggtgaggggacgtatattgcacatacttcaacacacacatacatgcacctgcacatccctgcaaaccactttcacaactttcaggatttcttctctccaaagtcccacttggctatgttttaagggttccccttgatgccctttgctccatagcagcctccagtgttgtttttgctctgcctctggggaacttcaaattccttactctttttagtaagcggagctgtttagctctgtccctgctctgaccctcaatattactccatcatacacatcgcagcccaaygtcttcaactagattcattgatgtatgaagacggcgctttcct

SEQ ID NO: 902643 - DNA, 514 bp, Homo sapiens
ccaatagataggaacctggtctgacttgagatcaatgtcttctcggaaccaaacataataccayacaagtaggagctgataaataaatatttgatgagtcataataaaatgtgagatcagtgaacatggcaatcataattgtgagaggcatgtggtatagtaaaagcggccgtgggccggggcacctgtgctcgctattacttgctgcccctccatccactcccatcctccatgacttgccctgcattgcctttcatggaagtgctctcttgcttttggcttttgatgggtctggccaatggggagcaatggcaagacatcagagggagggaagcaaagaaaggccggggcaatgaaagccctggctccctccctgtggtgtctccagagctggctgtgtttctcaaaagtcagagcttctgtctctccattcccctttctgtcactccattcccctttctgtcactattccaggcctagggatggagaagttgatactatcccaagagtattg

SEQ ID NO: 902644 - DNA, 715 bp, Homo sapiens
aataattaagctccactggataacagctgggctgtcacttcccacatcctccatgctggcctgcctgaacagaggcattcatgccttgcctggctttatctaaattaggctcctttgtaggaaatgatatctgaaagtagcaataataaccagaagcagttacattttgtgttgatgggaaatattagtataaataacaaaatacgaaatgcatatccagtggctaatctcttgtgggaacatttccatggatggacttcccacattcttactttctttgaaatggagatgtcagcatctttcccaggactccgttcctgggggattatggttgctggatttattttgacatcatcatttcacaataagaagtgtctaaagaaagaagtggctatagaattgtctaaagaaagactttgaagacttcacaagataattacaaacccatcaggggtgtcaggtggcctgtaacagtggcttaaaacttgggacataggtaaagctgttaaggaacaagtcctctcattctttcctttttattttttgattagttggttgtgttgaccagagatcactaacgtattstatgattgccctcatgcatactgcgattgggtcacacacaaggaaattgtaaatggttttctatttcacccacctgcctatcttttacccttcctttaaacacatttaacagactcttgactttcaatta

SEQ ID NO: 902645 - DNA, 585 bp, Homo sapiens
cctagaagagtgagatgacatgaagggcaaggctrtcagatgtccagtggctcttggccataagaatgctccatttgccctctaacatgcagctttcaaaagctaggctttttgaagtctaatttacctatcataaaattcacctatttcagcatatagttctatgaattttgacaaatgcatatagttatggaaccaccagcataattgagatacagaacactgacatgcatttttaaaaacaagtattttgatttttttctgatttacataataactgtcctagtgctttgctttgtcttcatgaagaaaaagtcaagttgcaaaatttgaacaaatatattttcctcctacccaaattcacatgtatacaggatctataataagacagtgaaagaacaaagatgtagttatctgcctttccattgggaaaggcatggccaagtttataacagaaatgagccagcagctacttgaaaattcaacagaatgagttttggagttggaaatagaagcagagtagaaacatatgcagccacatcaggcatggagttacactgcccacatatgtgtttccaacctcaa

SEQ ID NO: 902646 - DNA, 617 bp, Homo sapiens
aacaaaaatattttaatatcacccaatacccagtccatattcttttttcctgattgcctcaawgatttttcccaatatttaatttattttaaaccaatttaaatatggctgcccattggtttcattgttctacttgtgaagaggcttttaagaaaccctaccttttattttttaaagaatccaggttatgtgtcctgtagaatgtgccacattctcaatttggctgattgcttccttgtggtgaagtttaacccaaccttctatcattggtgtttcctgtaagctagtattagagctaaaggtatgattcaactcggaggcaatgcgctccatcgttgaagcaagaacacttcatcagtgatgctatttcctattatgttgtatgaaatttttacattgttagttgctgagaatagagaaacagcatgaagtctagtttctggagaagtatgtcaaggtattatgagtgttatctgatgaagtgtttaatgacgtaaaataaatttctcaacccaagttggtttaaattcctgaaaaaatgatggatactctctcttctatcgcagtcaacattatcaatgcaaatgtgacaaaacagtggaatgaggctgacaagg

SEQ ID NO: 902647 - DNA, 589 bp, Homo sapiens
aggatgactttaaagtgtttagtttgaaccactggagacagaatttccattaatttagataaagtagattcyagaaaggtcaatttggggtagaattgtggtgaagagttcaattatagacaggtcaaatttgatttgcctgttagattatcaagggtagatgtcaagaaggtagtaaatatacttctgcattccagaataacataaggatatgcatttcagagttgttaacttataaaagagacttcagtcggatatgggatgtgtacagtgagagtgtgcagactgagaaaggtgatcaaggacagtgctcaaaggaaactgacagttaacatgaggctgaagagaagaataaaggtcaaaaaaaggagattgaaaacaaccaaccagttatgtaagggggaaatcagatgtacatagaattctagaagccaagtacagaaagaatttcaagggagttattaagtttttcaaatgctgctaataggtcaagaaaagaagcaagaaataaacattgaatttagcaatgtatgaccattgaagggtttaatgagagtaattttaaagtcctgttgagataaaatccaaa

SEQ ID NO: 902648 - DNA, 539 bp, Homo sapiens
ttcctgaagcaataaagcgaagcaagaggccaaaagacacaatcatctcaggcagctgcaagagcatagcgcacagtcagtgcaccttaactstgttacatccaaaacaccacttgattgaggctgtgtaagaagcagtaaggttgaacaaaacccaagaagcagcgagttgacaaaaacagaggatgaatccaacagtggagtccaacctctttttagtaactctgaagccaatagcttgtcttgatgttgcatatgaccataattcatgtctaaataagaataagccctctcaattttatatacactcttaaatgtgagattttatatttcattagtcagtgttctccagagaaacagtaccagtagggtgtacataaatatatatatagagagatttattttaaggaattggcttatgcaattgtagaggccagcaaatccaaaatctgtaggatggggctgcaggctggagactaggaaagggctgacatttcagttcaagtccaaaggtcatctattggcagaattctctcttg

SEQ ID NO: 902649 - DNA, 601 bp, Homo sapiens
gagtctctgggcaattttagagttcttcatttgcaactacgggcagagaaccagaaatcactggccaattgaaaaaagcctctaagatgaaagaataataacacaacgaaagaacgctgaggaaacagatgatgtatgaagcagaaaaaaagcttaaaaatacttaatatcctcaaaagggagggatattaaaggctctgtagagtaaaacattcagcaaacacttaaagatgcctttgaaagtgaaacgtgatctgtgtaatgaaaaaagtgaagataatggttggcatataaagttgagaatatatggcagactagagaacaaaactgcaaagcaattgaaaagaggagagatgagacaagaaaattagggaacaggtgcaggagttatatcatgtcatgaataagaaatccagaaagagagagtagagaacatgatagacaaggctttttcaaggaatttagttttattactgcaattcaaagacatttgtttttgaataaaattgcccaccactaagcatcaagcaaatgaataaacaaagaaaaacctamactaatggaaaacgtgacaacattaaaacaaaactctaaactcatc

SEQ ID NO: 902650 - DNA, 555 bp, Homo sapiens
ttcatatttgaatactctttatttctttctcttgcctgattgccctggccagaacttccagtgytatgttcaataggagtggtgagagagggcatccctgtcttgtgttggttttcaaagggaatgcttctagcttttgcccattcagtatgatattggctgtgggtttttcataaatagccttattattttgagatgtgttccatcaatatctagtttattgagagtttttagcctgaagggtgttgaattttatcgaaggccttttctacatctgttgagataattttgtggtttttgtgcttggttctgtttatgtgatggattatgtttattgatttgggtgtgttgaaccagccttgcatcccagggatgaagccgagttgatcgtggtggataagctttttaacgtgctgctggattcagtttgctagtattttattgaggattttcacattgatattcatcagggatattggcctaaaattttcttttttctgttgggtctctgacaggttttggtatcagcatgatgctggcctcataaaatgaatt

SEQ ID NO: 902651 - DNA, 666 bp, Homo sapiens
tattgaggattttcacattgatattcatcagggatattggcctaaaattttcttttttctgttgggtctctgmcaggttttggtatcagcatgatgctggcctcataaaatgaattagggaggagtccctggttttctgctgtttggaatagtttcagaaggaatggtaccaaatcctctttgtatctctggtagaatttggctgtgaatcagtctggtcctgggattttttttgtcggtaggctattaattactgcctcagcttcagaacttgttattggtctattcagggatttgacttcttcctggtttagtcttaggagggtgtatgtgtccaggaatttatacatttcttttagattttctagtttatttgtgtagaggtgtttatagtattctctgatggtagttcatatttctgtgggatcagtggtgatatcacctttatcattttctattgtgtctatttgattcttctctttttttcttctttattaatctggctagtggtctattttgttaatcttttcaaaaaatccagctcttggattcattgagtttttgaagggtttttcatatctgtctccttcagttctgctctgatcttagttatttcttgtcttctgttagcttttgaatgggtttgctcttgcttctctagttctt

SEQ ID NO: 902652 - DNA, 640 bp, Homo sapiens
ttccttccaccactaggttcaggatggatgaactgtttctgtttcctaracctgtggtgctttttctctcttggactcagagtctgactctattttatatctacttgagctatgggctaagctgttttcctttacgcacttgccacagcagttttctgacttgttttccttttgttttgaaacttggaggctttctacctccaacctcacatccaactcagaattgtgttttatctcttcttctcactttcagctgcttgaccaaagttttatcttctttgctcattaacattctaatacaaacagtccccttcattttttttattataccccattctcaagtagttctagactagagctgcttatatcaaatctttgccacttcttttggataacaccatctacctatagtggcaagtcaggaaattttgatttagcccatttagcttgaaattatcttacagtatttgtacagaacaagagtacatctacattgtagtgtttacttactaccaaattcaacacaacttcagaagaagaaaatatttaattataaggtgttaattgaggtgataagataaacaatttttcctttagttgactaaagttaaaattttaatttctgtatgataatggaaaa

SEQ ID NO: 902653 - DNA, 640 bp, Homo sapiens
ttccttccaccactaggttcaggatggatgaactgtttctgtttcctagacctgtggtgctttttctctcttggactcagagtctgactctattttatatctacttgagctatgggctaagctgttttcctttamgcacttgccacagcagttttctgacttgttttccttttgttttgaaacttggaggctttctacctccaacctcacatccaactcagaattgtgttttatctcttcttctcactttcagctgcttgaccaaagttttatcttctttgctcattaacattctaatacaaacagtccccttcattttttttattataccccattctcaagtagttctagactagagctgcttatatcaaatctttgccacttcttttggataacaccatctacctatagtggcaagtcaggaaattttgatttagcccatttagcttgaaattatcttacagtatttgtacagaacaagagtacatctacattgtagtgtttacttactaccaaattcaacacaacttcagaagaagaaaatatttaattataaggtgttaattgaggtgataagataaacaatttttcctttagttgactaaagttaaaattttaatttctgtatgataatggaaaa

SEQ ID NO: 902654 - DNA, 662 bp, Homo sapiens
atggttgaagaaaagtggaaaataacaagtgcccatttaggtttgaagaatccagaatgttttacctttgactttatgagttatagaagcttggctttgctctaggyttcatgttcccaaatgagccatctgtcagtatattcacttaattcttactaatttcagtttcctgtaaaggaaacaacttacatattgatgcttaaatccagaaagtgtaaaaggttttcttaaactgttaaaatatagtgtctgatataaaggatgtaagttactcagctttctgctccctaagccaaacagtgtttgtcttcagtgtgaaatttaactgtaaaaactacttgtaatgtcaagagattatagatcatattattaataaaatggacctgggtctaatattttttttcttcaaagggagtgtgaagctgtttattcttttatttgcatatgagtttttcttttagttttagtttttcatgttcatatttccactgatttgaaaacacaaaatttatttttataattttgttgcttgtagcataatcaagtgcaaaatcaagtgcaacctacttgtgactaaatctctttggatttatagctgaggatattgttagctaggttttgtcaatccctaatcattttttaaaatcaatgctgtattccca

SEQ ID NO: 902655 - DNA, 635 bp, Homo sapiens
tggcgttttgagaagggaattttttacgactgtgaaatttcagaacattgaactggtgcttccagccacaaagctgggaatacaggatggacagcattacggctgcataacattcctgacataactcaatgtttatttgtagaaactaatgccccagaatattctcttgggacctgaaatctcccctttgctcttttcccctggtagttgattcttactgtccactatccaaccataatgatgtaaagtgaaatctattttgcttgtgggggaaaaaaagaatggttcacaacttcactcggtttttttagttaacatattaacacttgtttcagagtaatgtatttgagtactcacagcacgttttgaagaaacaatacatgaagcaagttctctgtttaatagatgtagtctctaactcaaataatctggatttttttttttttttttgagatggagtcttgctctgtcaccaggctggagtgcagtggcacgatctctgctcactgcaacctccgccacccaggttcaagcgattcccgtctcagcctcctgagtagctgggactacmggcgcgtgccaccacgatcggctaattttttttgtattttagtagagacgtggtttcaccatgt

SEQ ID NO: 902656 - DNA, 602 bp, Homo sapiens
tttactggaagtctgttttatctgmtataagtataggcatccctgctctcttttggtaactgtctgttttcatggaatatctccttctatccctttactttcagtatatgcctattcttaaagtttaaaaatgggtctcttgtaggcagcatctagttggatcttgttgttgatccactcagccattctacatcttttgattggacagtttaacccatgtaccagcaaggttattattgatagtaaaagacttactcctgccattttgctaattgttttctggttactttgtagataatttgttctcttcttcctctattgttgtctacctttgtggtttggtggtttagttttctgctttgtggttacaatattgttttttaaatattcaacatgaatacactttcttgtttggataacgtgtaaaacgtctacaaggagggatagataataagttttcccttcagaatgcactgctttgcctgggatgaggaataatttataatggtaactgttgctggttaaaatttggctcctacccacattcatgcaaactcagcattctagattaaaagagatttaagagacttgccaagcaaatg

SEQ ID NO: 902657 - DNA, 438 bp, Homo sapiens
gggcacggtggctcacgcctgtaatcccagcactttgggaggctgaggcgggtggatcatgaggtcaggagatcgagaccatcctgaccaacatggtgaaaccctgtcactactaaaaatataaaaattagctgggcatggtggtgcacgcctgtaatcccagctactcaggaggttgtggcagcagaatcgcttgaacccgggaggtggaggttgcactgagccgagattgtgccactacatgccagcctggcgacagggtgagactctgtctcaaaaaataaaaataaaaaataaaaaaaataaataaaaatgcagattcttgtatctttcccagaccaactaagccagggaatttctgaaaggtggggcccaaataacgctcctgtacatcaaaattcaagaagtacaatyttagtgtgagatgcacatataggt

SEQ ID NO: 902658 - DNA, 598 bp, Homo sapiens
tgatctgatggttttataaggagaaacccctttctttcacttggcactcactctctttgcctgctgccatctatgtaagatgtgacttgctcctccttgccttctgccataatgtgaggcttccccagccacacatagaggtgtaagtccagttaaacctctttcttttgtaaattgtccagtcttgggtatgtctttatcagcagcatgaaaattgtctaatacagtaaattggtaccagtagagtgaggtgctgctgtagaaacccaaaaatgtggaagcagatttggaactgggtaacaggcagtggttggaacagtttggagggctcagaggaagagagaaaaatgtgggaaggttgggaacttcctagagacttgctgaatggctttgaccaaaatgctgataatgatatagacaatgaaatctggtctgaggtggtttcagatggagatgaggagcttattgggaactggaacagtggtgactcttcctatgttttagcaaagagactggtggcatttttcccctgccrtagagatatgtgggcctttgaacttgaaagagatgatttaaagcatctggtggaagaaacttc

SEQ ID NO: 902659 - DNA, 604 bp, Homo sapiens
agctatttatcctgatattctccctccctgcaccccacctacrggcccctgtgtgtgttgttcccctctctgtgtccatgtgttctcattgttcagttcccacttatgagtgaaaacatgcggtgtttggttttctgttcctgtgttagtttgctgaggatgatgtcttccagcttcatccagatccctgcaaaggacttgatctcattcctttttatggctgcatagtattccatgattatatgtacatttttccttatccagtctatagttgatgggcatttgggttgattccatgtctttgctattgtgaatagtgctgtaataaacatacatatgcatgtatctttatagtagaatgatttatattccttcgggtatatacccagtaatgggattgctgggtcaaatggtatttgtggttctacatccttgaggaattgccacaagtcatgccgaatggttgaactaatttacattcctaccaacagtgtaaaagcattcctatttctctacagcctcgccagcatctattgtttcttgattttttaatagccaccattctgactggtgtgagatggtatctcactgtggttttgatttg

SEQ ID NO: 902660 - DNA, 604 bp, Homo sapiens
agctatttatcctgatattctccctccctgcaccccacctacgggcccctgtgtgtgttgttcccctctctgtgtccatgtgttctcattgttcagttcccacttatgagtgaaaacatgcggtgtttggttttctgttcctgtgttagtttgctgaggatgatgtcttccagcttcatccagatccctgcaaaggacttgatctcattcctttttatggctgcatagtattccatgattatatgtacatttttccttatccagtctatagttgatgggcatttgggttgattccatgtctttgctattgtgaatagtgctgtaataaacatacatatgcatgtatctttatagtagaatgatttatattccttcgggtatatacccagtaatgggattgctgggtcaaatggtatttgtggttctacatccttgaggaattgccacaagtcatgccgaatggttgaactaatttacattcctaccaacagtgtaaaagcrttcctatttctctacagcctcgccagcatctattgtttcttgattttttaatagccaccattctgactggtgtgagatggtatctcactgtggttttgatttg

SEQ ID NO: 902661 - DNA, 647 bp, Homo sapiens
tgcttttgtttttagttcacaaatcttcaggttgagaagagycatactcaggtatcttcactgaagagtatcgtctgtatttgcacgtgatacagatgacactatctagactgtaaggtcctgtttgtctaaaccagagctgaggtgagttaattcctttttagaagctctgagactccatgtaagaagttcaagaaccctgagatgaccatgctggagaggccgggtgagatatctctgggtacttgttcctgttgagtatagtcttcctactttacctgtgagggtgctagctgtgtgattgagccatggtgggccatgcagccattatgagatatgagccaaattatgagatactgccatgattgttagtttaaaattagtactaagttttggggtagtttgttatacagcaatagatgatggaaacagaattctaaagatataattgtccaggtgtaaaataaaatatatgaaaggatatttattgtagcactgaaacaatctcaatacccttgaataaaagaccagttaaataaattgtggtacatatatgcactggaaaatatacgcagcagtttaaaaagattgaggatgcttgtgtttcattaatatagaaatatcttcaagatatataatgatgaaaa

SEQ ID NO: 902662 - DNA, 607 bp, Homo sapiens
ttaaatttcatatggaacccaaaaagagcccatatagccaagacaatrctaagcaaaaagaacaaagctggaggcatcagactaactgacttcaaactatactacaaggctacagtaattgaaacagcatggtactggtaccaaaacagacatatagaccaatggaacagagcagagacctcagaaataataccacacatctacagctatctgatctttgacaaacctgactaaaacaagcaatggggaaaggattccctatttaataaatagtgctgggaaaactgactagccatatgcagaaaactgaaactggaccccttctttacaccttatacaaaaattaactcaagatggattaaaggcttttaaacttcaaaccataaacaccctagaagaaaacctaggtaataccattcaggacataggcatgggcaaagatttcatgatgaaaatgccaaaagcaatcacaacaaaagccaaaattgacaaatgggatctaattaaactgaagagcttctgcacagcaaaagaaactatcatcagagtgaacaggcagcctacagagtgggagaacgtttttgcaatctacccatctgacgaaggt

SEQ ID NO: 902663 - DNA, 607 bp, Homo sapiens
ttaaatttcatatggaacccaaaaagagcccatatagccaagacaatgctaagcaaaaagaacaaagctggaggcatcagactaactgacttcaaactatactacaaggctacagtaattraaacagcatggtactggtaccaaaacagacatatagaccaatggaacagagcagagacctcagaaataataccacacatctacagctatctgatctttgacaaacctgactaaaacaagcaatggggaaaggattccctatttaataaatagtgctgggaaaactgactagccatatgcagaaaactgaaactggaccccttctttacaccttatacaaaaattaactcaagatggattaaaggcttttaaacttcaaaccataaacaccctagaagaaaacctaggtaataccattcaggacataggcatgggcaaagatttcatgatgaaaatgccaaaagcaatcacaacaaaagccaaaattgacaaatgggatctaattaaactgaagagcttctgcacagcaaaagaaactatcatcagagtgaacaggcagcctacagagtgggagaacgtttttgcaatctacccatctgacgaaggt

SEQ ID NO: 902664 - DNA, 634 bp, Homo sapiens
caaataaattgtacttcaccaaaagtaaacactttcktgctgtaatctatacccatgagaaactaaaatctcaacctacaaagtgaaataaaatatttgcaaatcataagcctgcaaaaagacttatatgcagaatatataatgaactttacaactcaataatcaaaagatctaaaaactcaacacaaaatgggcaaaacgtacaaatagatgttcctcaaaaaagtatgcaaatggccaataagctcatgaaaagatgctcaacatcattagctgttagagaaatgcagataaaaacaagactctacttcataaccactaggttagtataatcaaaaagacagacactacagacactaactagtgttggttaagatgtgaagaaattgggatcattgtgcattactgctgtgattatgaaatggtatagcagccttggaaaatagttgtgtagttccttaaattgttaaacatagaattatcaaatacaactaacaattccactgctatgtatatctccaaaaaaataaaaacacattgctagagaaacattttcatgcaaatctttaaaaaaaaaaaaaaaagcactatggtataataaagacctttagtctttgtccaggcttctggtaca

SEQ ID NO: 902665 - DNA, 636 bp, Homo sapiens
aataaatagcataatccatggaaagttcttattgccacgtytgacaaaaagtaagcacttgataaaatgctttttttcttatcattattaaggcttttgaaaaatcagtgattaggggagttagggtagaacctgtgtttatgggcagagatttctctttacactttctgaggaaactgtattacggcagtacatcgtaggagtaaaccagcaaggagactgcaagctgactgcttgagctcaatgctggccctgccacttcttagctatgtgggcttgagcaagttacttaaactaagactcagattcatcatctgaaaaatgggttgataataatagaatctacttcctcactttgtcctgaggattaaataagaacacgcatataaagttcacacagcacagtacctgaaacatagtatgctctcaacaagtatttttttattataaacaagataaaattgattcccctcatttacatctctggtcatatattcttttaatggtgctttgcagttttcagagagtttaactgacaaataataattacagatatttacggagtatgatgtgatattttgatgtatgtatacaatgtggaatgattaaatcaagctaattaacatatcctttttt

SEQ ID NO: 902666 - DNA, 726 bp, Homo sapiens
catcaaattgaactcttcctccctataacttcctcccattggttctatgtctgccctctggagggctagagaataagtggatttaatctcttaataatatratagtaattgctaccatgtgttgagtatttgtaaggttctgtaccaagtgtcttatgcactgtattagtcatggttcttcagttgcaagcaatagaaaccaacctggccaactgttttagttatcttttgctacataataaattacccctaaaattagtggcttaaaaaaactaacatatactacctcagtttctgtgggtcaggaattcagaagcaacttaatgggtgcttctgcatcagtctttctcaaaaggttgcatccaaaatgtcagccagggctgcagtcatctgaaggctagactgggtttgggggattcacttctaagctgctttacatggctgatgacaagaggcctcagttcctcactagctgttggccaaagccttcagccttgttgccacaaggacctcaatatagagcaactctaacacagagagagagagagaagccacagtgccttttatgacctaatctctgaagttactgaatatctatatctatatctatatctatatctatatctatatctatctatatatatatatacacacacatatatctcacagtaaacacaaggcttctgggtcagagacaaactgtttatttagttacagaatatttta

SEQ ID NO: 902667 - DNA, 614 bp, Homo sapiens
cttatatttcattgagtttctttaagatcatcattttaagttccttctctggaaattcattgactttcttatcacctgatgactttatcaccttgaacgttaggatacaagtcatttactccaagacatcaggccatctaggggtttgatgtgtaatcatgcaaaattacatggcctgcacaggaactgagttaaaaggtcagaattatgatttataaagtgtcccaagcaagtgaaacaaccaactatggctgtaaggatcatgaaaaacagggaattcccccccagtttacacagacaacaaaaactaagtgtaggtcactatctcattgtacccatggattttaatttatagaggtgactgagtgatgacatagaaagaccaatgccatcgaaagaataatttattacttacaagtcctgggagaagggggcatgccatgccacacagagccacatgggaagcactaagtttggttaggaggcataagcaggagcaagaggaaagcctaggccagagcctttttgggaggttccaggagaatttcaaggcaggatggagtaaacagcttagagctagcmagtttaaataacttcagtgggctttggcctac

SEQ ID NO: 902668 - DNA, 656 bp, Homo sapiens
aaaatgaaacagtgggtttggctatgcaaccctagagatttcaagactaaaaacaaaacaaaagagaacaaacaccaaaaacagcaaaactgttttccaacgggataattttggtattatatatayagattgtagacagtgatgaaaatactctagtagttactaaaatgaaaagatgtaagagaaagtctaaaacatctttttttaaaaactgagaaatttgtccttttttcttctttaaaggaggttgggttaacatttattctaaattgtttatttttatcctactcagtgacttgagatcaaaatttagtactctgaggagaaatattaccatgacatgtttttaatcagtcatctgattcttatatagcctttttagcctctgttgaatgtacagaagtttgttttataggtatatattatagttatatttctatatcacatagaatataaatataataattatatatattatattatggatggtgacaggaggcagacagactcctgggcagaaagttgggggagccagtgaaggcctaccttcatgccagggatgacctgaaacttgggagctggactgccagttctgggtggagtccgcagcctgagtgagaacttatggtactttttccaggcccacccatggctgc

SEQ ID NO: 902669 - DNA, 622 bp, Homo sapiens
gtgtgggtggcaagggcctacacaaggaaggccctactgaaggctctgtgtccatcagggaccctgtgygggctggccagaggcagtgggctggctggaaggagttgtgcccattggtggaggggcacgccaggccatagtgaccccaaagggaggaagtcaaagggttccctactctgactcatcttctttcccttcctggggtctcctaccccagctgcccactggctggactcaattggaaggcagagaacacatggcccacccaggcatgccaaagggtacaagcaagagaatacagagaacagatcggtgggacaagcaggagacatccagggccctgtacaggggcctctctgggaccgtgcccctccctccccagtcctgcttctgcacccccaggagctgactagacaataatgggacacacactggagatagcaccatcttcaacctgtcaggaggtttattgtaaaaggagatttagtctcttttttgcaagtaaaacaatgaaacctccataattgttccaggagaaataaacatgccaaaatatttaagtactaataaaacttaagaattatctcagcatatttaaatatagatgtatttttatggcagg

SEQ ID NO: 902670 - DNA, 572 bp, Homo sapiens
gcacctcacttgtctgcatcaccatggcccctaggagtgagcacgagcttccacaacctttgctgacaaacaggggttccgcccaacacagccatgatgcctcaacatccrgagagaccctgccttgtatcagcacaagactcctgggtttaatgatgcttgaccctagcttctttcaagactttggtcttcatttgtgcatctgcagggagcagggagcatggagggaacagcaagggctgggagtgggtaccaagtcaaattccagcaccacaacagggagcctcgtcttcagccagttcattcaactcagggggcttcagcgtcctcactggtccagtacaggcaacattccccctggcctgctgtggggtaacaggaaaaaacatggggtgccgccaatgacattgggagatgtatctgggggtgaggttctggagagcttcaagccctgggggatttgggtcttgaaggcacactgtggacctggagcagcactagccctgcatggcaccaggaccctgcccctcaccatgaaccagaaccctctccctgggagatgagttctcacc

SEQ ID NO: 902671 - DNA, 654 bp, Homo sapiens
ccacatggtcatgagggtgaacrgttgttgccctgcagcctggtcctgactttattataattcttaaaacccactgttatggattgaattcccaactaccccacccccaacaaattaatatgttgaaaccctaatccctaatgtgactgtatttggagacagggcctttaaggggtaattagggttaaatgaggtcataagggtggggccctaatggaataggactgctgtgcttttttttttttttttcaagatgtagtttcactcttcttgcccaggctggagtgcagtggcatgatcttggctcactgcaacttctgcctcctgaattcaagtgattctcatgcctcagcctcccgaatagctgggattacaggtgtgtgccaccactcctggctaattttgtatttttagtagagacggggtttcgccgtgttggtcaggctggtctcaaactcctgacctcaagtgatccacccgcctcgtcctctcaatgtgttgggattacaggcacgagccaccatgcccgaccaggaccggtgttcttataagaagagagagacatcaggaatgggtgtgtacagagaaaaggacacagcaagatggtggccatttgcaagccaaggagagagacctcaggagaaaccaacccgc

SEQ ID NO: 902672 - DNA, 604 bp, Homo sapiens
ggacttatgcacaattttagcaggccaagttgggtgggagtgagtagaacatttaatgactagatatgagtttatagccagcttgaaaggagaaattcttgaaggcagaatcaggtaatttaccaaactaaggaattaaaagatgttttcagttgtgtcagagtgaaatgcatgctgtctacaattgtgaaaaacagagatatatgtatgctatcaaaaacaaaaaccaacttttattctagagttaattgatggtatgacctggaattgaaatggtaacatcattagagatggcctttacctccttgtacttttctccatctgttctattctctgccctctaccaaatatctttctctctttactcaggcttcttttttctctgatctattatcttttcacatgtcacctcttcttaccttatttatatcataatcttccttttcccccccaatataactggcaagattcctgtagttaacaattcaaatatctgaaaaagagrttctaattgattcagcccatcttgaaaaaaaaaaatcacatgcctaaggtcttgggtcactaaataatatgtgtattgactggtggtgtagcttgtatc

SEQ ID NO: 902673 - DNA, 513 bp, Homo sapiens
gtcttgaagtcctggcctcgaaagatcttcccatttcagcctcttaaagcsctgggactacaggcctgagccatcatgcatggtccttaaaatattttaaataattatatgttgttttcctgacacttatttttcctaaaaatgacacaaagtaaattggaactattacgaaaagcaaactaataagcaactttcatctctggcaaaaataagcctgttttgtttcaacattcagaatgtagttgcggtgtcagtgggtggcagtaactgttaacacatgtgcaaagattagtcattaaatttctttaaaccaaaattccatctactgcaaaatgggaatatttataattttattaaaattatccaagataagagttggaatgtgaaaagtagattgcttttactttaggtggcaactattatattattacaacaactacactctgtgagatatgctgatatcctcttgaaattcactatagtaggacatgattacatataactaagtattgt

SEQ ID NO: 902674 - DNA, 693 bp, Homo sapiens
aaataggcctctttggtaagggagaawgcatctttattactgctgtgcataattagaacagcggggaggaatcaggggcttttaatgaatgagcagcgtgtggcagggaatgagtgagcgcctgccactgcgggcacccccaggcctgggcatccccaggagtgagcggggccagcgaggagacgaccaaggaagcacaggcagtgctcagaattgaaacctgccccactgaagcgggccctgctgatccttgctgcgttcctgtcattgcaaatgactcccaggctgcagctttgcagatgctgctctgagctctgccaggaccacccctcttcttccagccttgaccgtgacctggcagccgcagatgtcctgcggggctggcagctgctccatggcaccccttctgggcaatcctgagctgcagagtttttgccttgattttagtccccttatttttagggtggccatatgtcctggtttgctggaatagttctagtttatgcctcttttcctagtgaaattagtaataatgatatctttcaccttctaagtatctcagtttggaaggtgaattatgtggttgcgctccttatctttgtcttctcagccatccgggcctcaagacggatgagggaggcagtagggtgtgcaggtaaacctgggctttggtctcagatgcttgtaacatct

SEQ ID NO: 902675 - DNA, 550 bp, Homo sapiens
tgaagcaacatgaatgcaatgcacctgggggccattatcctaacgaataacgaataagataacgaatacagaaacagaaaaccaaatactgtgtgttctcacttataagcaggagctaaatgctgaatacrcatggacacaaaaatggaaacaatagacgctggggactacttgagggagaagagtggggagggttgaaaaactatctatcaggtactatgctcgctcccaggatgacgaaggattctaaatggccttgtaggtcatgttttgatatcttgtagcacataggtggtgagtaatagtattttgtaaatagaaatgtacgtaagtcataatttctgtatctaaatgatatatcttcctgacacttgcttttgtcctcaacaggacattttggggatctacacatgttgatacatatggatcctagttcattctttttcattgatgaaggcatattttggataatctgacaagtgtgaatgttattttgttggtttcatttgtattcccctgattactagtgaggttaaatctcaagcttttt

SEQ ID NO: 902676 - DNA, 595 bp, Homo sapiens
ttccatacatcaattttgcctgaagggtaagagacaccttaaagccatgaatccttcccctgggctggtggtcatgcacagaaggaacttgtcataagcagcatgtaaaagtgtccttcatgttagccagtcagctatattaatatagcaggaagcagaaatcaggtgtttaactcatttatagaagacataagtaatttctatttgaatggacctgatcaaatggaaccaaaggtcttagaaaataaaaggttaaaacccaagcaaaacggtatctcactcatcatatccagtagtaagaagtcctattaggccttttcccacaacacgtcagcttccaaatacagcacatgacaaagaaatacttcagggagatggaggaatggggggctcgctactgtgctggctaatgacattattacaaggctccaaccagcttcgaggccgtggtagacacagcacygtggtcctagggttagaaaggagccatagaagcagcatgaacaatctaatgcccagagcatggatgaggcgcctccatgcccaggactgctcccacccaccgttgctagagcacctaggaaagggcacagac

SEQ ID NO: 902677 - DNA, 595 bp, Homo sapiens
ttccatacatcaattttgcctgaagggtaagagacaccttaaagccatgaatccttcccctgggctggtggtcatgcacagaaggaacttgtcataagcagcatgtaaaagtgtccttcatgttagccagtcagctatattaatatagcaggaagcagaaatcaggtgtttaactcatttatagaagacataagtaatttctatttgaatggacctgatcaaatggaaccaaaggtcttagaaaataaaaggttaaaacccaagcaaaacggtatctcactcatcatatccagtagtaagaagtcctattaggccttttcccacaacacgtcagcttccaaatacagcacatgacaaagaaatacttcagggagatggaggaatggggggctcgctactgtgctggctaatgacattattacaaggctccaaccagcttcgaggccgtggtagacacagcactgtggtcctagggttagaaaggagccrtagaagcagcatgaacaatctaatgcccagagcatggatgaggcgcctccatgcccaggactgctcccacccaccgttgctagagcacctaggaaagggcacagac

SEQ ID NO: 902678 - DNA, 440 bp, Homo sapiens
tctctacaaaaaaaaaatttttttttaattagctgggtgtggtgacacatgcctttggtcctagctactcaggaggctgaggcaagaggattgcttgagcccaggagtttgagtgatgcagtgagctatgattgtgccactgccctccaacctgggtagcagaattttaagagaccctgtctcttaaaaatttttttacttttttaatttaaaaataaaattaaataaataaatttcacatggttctgggggttgcataggatcagctgggcagttctcactttgggtctcttctgatgtcagcaggagctaaagacatctgaagcctcaactaggctgtgtcccaaaaggcttctttacacacakgtctggcacctgggcagggatagtgggaacactggatgatggcccccacacatcccacacattcttgccacatg

SEQ ID NO: 902679 - DNA, 618 bp, Homo sapiens
aacatggtagtgacttatctagactggggcttcattttctgggaacagagtgacagagaagggcaggagaactggacgttgtgtgaccttcgatggggattgtttggggcatgaaaatcagctgtggaccaygcatcaagcggacgactcacagccaaatagaaatgatgccaagaacggcagtcatggccagtcctaaacatcagcttccaggcagagaattcaaaacatctgctcaagtgctgacctccacactgcattcctcatattcccgccctgcccagctgtctgtcggcaggcagagaccagctccctgtgaaaacctagagcagagggcaaagtgagatggggcgagggttgggggaaaggagggcactgtcgctgaaacaaggctcctaaaatcacttacaccttagactagttcctccattttacttaggtcccaccattgtttcaagcactcacattacatattgtcttttcaaaaaatatacatttaatgtggttatacttgtatgaatagatcagtgtgatataagtgatatttagtaaccgataattactacatgttagccatctgctattcctgagggtttcaccagaccctttcataaaagc

SEQ ID NO: 902680 - DNA, 660 bp, Homo sapiens
ggttttcaatctctctgaagggaatattgaggagagtaattytgatatggaactgagttggggatatatttctttcctgggagaaattcctgtggaagggagacaattatcagaatctttttttttttttttttttttttgagatggagttgcactcttgtcacccaggccggagtgcaatggcatgatctgcaacctccgcctcctgggttcaagcaattctcctgcctcagcctcccaagtagctgggattacaggcatgcaccaccacactcagctaattttttgtatttttagtagagacagagtctcactatgttggccaggctggtctcgaactcccgacctcaggtgatccatctgcctcagcctcccaaagtgctgggattacaggcgtgagccaccgcctgtacagaatctttttttttttccttcaggtcagatgggtaatgtgccgatgttgtaacaaggttcagagggtggcacatttcacatgtgcccgtgagcacccaatcttcacgctcatgaactacagaaggaccgaattatcagactcttaatggacacaggaacatatgtttataagacattgagattcttatgacaagagacatccctgtagggaagcaggtcatagacatagcagatggggttttagtg

SEQ ID NO: 902681 - DNA, 636 bp, Homo sapiens
aagttcatgttgagtgaaaaccataacacagtatgttatataactgaagcaaggattattttttgcctggttataagatttaaaaaatataatgtatactgggtgttaaattcctcaaaagaaatcacttttgcctaagaagagtgttttcctttctttttttaaaaactgggtaaaagtgagggaagaaatggaggaaggcaaaaacatcatgcttcatgcaaaatgtatattaagcttgtgaatgattcttgacaaaataaatactttaatccacttttaaacacttttaaggtgagttattgaaaactcacttttgttagaatccagtctgtgccatgactatgcttagctttactggaagttgctaaggaattctaatttctatgcctaaaataaatatgttcaatatttcactttatttgcagtatttcttgaactactgttatgttttaggcattgtctcattcttaatttattatcctatggaataggggtaataacaattgtctcccaaaactatgtttcacttataaggaaaaattattgtccttatagttttttttttktgtgtgtgtgtgtgtgtgtgtgtgtgtgtgtgtgtgttaaagacatatttcgttacctccactacat

SEQ ID NO: 902682 - DNA, 608 bp, Homo sapiens
ccagagacacaacgaagaaagaaaacttcagrccaatatccctaatgaacatcgatgtgaaaatcctcaataaaatactggcaaaccgattccagcagcacatccaaaagcttatccaccacgatcaagttgacttgatccctgggatgcaaggctggttcaacatatgcaaatcaataaatgtaatccatcacataaacagaaccaatgacaaaaatcacatggtcatcccaatagatgcaggcctttgataaagttcaacatcccttcatgttaaaaactctcaataaattaggtattgatgaaaaaatctcaaaataataagagctatttatgacaaacccacagccaattcatactgaatgggcaaaagctggaagcattccctttaaaaaccgacacaagataaggatgccccctctcaccattcctattcaacatagtattggaagttctggccagggcaatcaggcaagagaaagaaataaagggtattcagataggaagagaggaggtcaaattgtctctgtttgcagatggcatgattctacatttagaaaaccccattgtctcagcccccaaactccttaagttgataagcaacttcc

SEQ ID NO: 902683 - DNA, 608 bp, Homo sapiens
ccagagacacaacgaagaaagaaaacttcaggccaatatccctaatgaacatcgatgtgaaaatcctcaataaaatactggcaraccgattccagcagcacatccaaaagcttatccaccacgatcaagttgacttgatccctgggatgcaaggctggttcaacatatgcaaatcaataaatgtaatccatcacataaacagaaccaatgacaaaaatcacatggtcatcccaatagatgcaggcctttgataaagttcaacatcccttcatgttaaaaactctcaataaattaggtattgatgaaaaaatctcaaaataataagagctatttatgacaaacccacagccaattcatactgaatgggcaaaagctggaagcattccctttaaaaaccgacacaagataaggatgccccctctcaccattcctattcaacatagtattggaagttctggccagggcaatcaggcaagagaaagaaataaagggtattcagataggaagagaggaggtcaaattgtctctgtttgcagatggcatgattctacatttagaaaaccccattgtctcagcccccaaactccttaagttgataagcaacttcc

SEQ ID NO: 902684 - DNA, 551 bp, Homo sapiens
ctaaagagagatacaattaatcaaaactagagaaatgtaaactatattgctaatttgcttttaggataaattactggcagagtccaaaactcagtgaaatattctcattttcattttttctgagtataaattttccctatatctgagtcatggcttttaatgcagcttctttcctttcaatgcattctagcttcaatcaaagataactcaagaagttgactcttgggtttgaaagctccttacacatttctttgttaaaagcaattcctttattcctacctgtttccttctgggcaacaggacctggcattactttaatcctagttaatgctgatttaaaccttgcttcaatttcttataatgtcctggggaaataatatatcttgtatgagagaccccatacttctctttaaatccctatttttaaaatattgaaaagaacaatagttcataaattttatttatataattttatctttttatttgcaatacaatacacttttacactatcaatacaggamtataaaccttattctttttcacattttttt

SEQ ID NO: 902685 - DNA, 620 bp, Homo sapiens
gaattcggacaacggaatagggcagacgtggcaaagatatggctgtcttccaactgtgacctctgcctgaaggagccctgtgaaccagaacacccaacaaaagaaggtactggtacaaaaacagacatctagacyaatggaacagaatcgagagctcagaagtaatgccacacacctacaaccatctgctatttgacaaagtagacaaaagcaagcaatggagaaaggactcccaattcaataattagtgctgaggtaactgactagctatatgcaaaagactgaagctggtcgcctttttatgccataaacaaagatcaactcaagatggactaagacttaaatgtaaattctaaacttataaaaacactggaagataacctaacaaatatcattctggacagaggctgtagcaaaaatctcatgatgttgatgctaaaagcaattgcaacaaaaagaaacattgacaaatggaacctaattaaactaaagagcttctgcacagcgaaagcaactatcaacagagtaaatatatgacctacagaatgggagacaatatttgcaaaccatgcatccaacaaaggtctaatattcagaatctattaggaacttaatagaca

SEQ ID NO: 902686 - DNA, 492 bp, Homo sapiens
tttataagtgtttgacattttctcctacacacattctttctctctcctgcaaccttgtgaaaaaagtgcctgctgctccttccaccatgatagtaagtttcctgaggcctccccagccatgcataactgtgagtcaattaagcctctttcctttataaattactcagcctcaggtagtatctttatagcagtgtgagaatggactaataaagtaaatttgtagcagtagagggaggtgtcactataaagatacccaaaaatgtggaagcaactttggaactgggtgacagggggttgggacaccttggagggctcagaagaatacagaaagatttgggattttggaacttcctagagatttgtttaatgattttgaccaaaatgctratagtgatatggacaatgaagtccaggctgaggtggtctcagatggagatgaggagcttcttgggaactagaacaaaggtaactcctgctatgctttagcaaaga

SEQ ID NO: 902687 - DNA, 672 bp, Homo sapiens
cacctccaaccaggtccctcccatgacacgtggggattatgggagctacagtttgagatttgggtggggacacagccaaaccatatcaggggaagttgatattttgctaggaatctatgtggaattcactgttacttcagcatcatccttcaaacatggcatctcagcccaattgtgttgctataacaaaatgccacagactgagtataaaagaaggaaatggatttctcattggttgggaaggtggagagtccaaggtcacagaaccagaaggttcaatgtctggcgatgatgtcatctcctgacatcctcacatgatacagagggtggaagggaaaaaggcactagggtttccctccatcctcttttatgaagccacttatcccatgcatgagagctccaccctcatgagcaaccatctcctaaagctccacctcttaataccattggcgattaagtttcaacatgaattttgggagatacattcagatcatagaacagcctctaatttcttccatatataatttaaattggtattatccaatcatatcagtgacatttattcaactggcttcttaattttgctcaacaaacatttatcaacacctaaacaatacttaccmgacattctaccaggtcactggaataaagatgatagcacacctaggaatt

SEQ ID NO: 902688 - DNA, 644 bp, Homo sapiens
ttgctagattgggaaagttctcttggataatatcctgcagactgttttccaacttggttccattctgcccgtcactttcaggtacactagtcagacgtagatttggtcttttcacatagtcmcttatctcttggaggctttgttggtttcttttttttcttttttctctaaacttctcttctgacttcatttcattcatttcatcttccatcgctaataccctttctttcagtttatcgcatcggctactgaggcttgtgcatttgtcatgtagttctcgtgctgtggttttcagctccatgaggtcctttaaggacttctctgcattggttattctagttagccattcgtctaactttttttcaaagtttttaacttctttgtcattggtttgaacttcctcctttagctcggcgtagttggtcttctgaagccttcttctctcaactcctcaaagtcattctccatccagctttgttccattgctgctgaggagctgtgttcctttgcaggaggagagacactctgatttttagagtttctggtttttctgctctgttttttccccatctttgtggttttctctacctttggtgtttgaagatggtgacgtacagatgggttgttggtgtggatgtcctttc

SEQ ID NO: 902689 - DNA, 599 bp, Homo sapiens
taggggcagactgacacttcacacgactgggtactcctctgacacaaaacttccagaggaatgatcaggcagcagcatttgcggttcaccaatatctgctgtactgcagccaccgctgctgatactgaggcaaatagggtctggagtggacttccagcaaactccaacagacctgcagctgaaggtcctgaccgttagaaggaaatctaagaaacagaaaggacatccacaccaacaacccatctgtacgtcaccatcttcaaagaccaaaggtagagaaaaccacaaagatggggaaaaaacagagcagaaaaaccagaaactctaaaaatcagagtgcctctcctcctgcaaaggaacgcagctcctcagcagcaatggaacaaagctggatggagaatgactttgaggagttgagagaagaaggtttcagaagaccaaactactctgagctaaaggaggaagttcaaaccaatgacaaagaagttaaaaaccttgaaaaaaaattagacgaatggctaactagaataaccratgcagagaagtccttaaagaacctcatggagctgaaaaccacagcatgagaactacatgacaaa

SEQ ID NO: 902690 - DNA, 579 bp, Homo sapiens
aaaggtctaatatccagaatatataaggaatataaatgaatttacaagcagaaaacaaccccattaaaaagtgggcaaagaatatgaacggttttcaaagaaagacatatatgcagccatgaaaaagatgctcaaaataactaaatattggagaatgcaaatcaaaactacaatgagataccatctcacattagtcagaacggctattattaaaaaataaaaaaataacaggtactggcaaggttgtagagaagagggaattcttatacactgctggtgggaatgtaaattggttcagccattgtggaaagcagtgtggcagtttcccaaagaacttaaaacagaagtaccattcaactcagcaattccgttactgagtatatacctaaagaaatataaataattctaccataaagatacatgcacgcaaatgttcatcgcagcactattcacaatagcaaagatgtgaaatcaacytaagtgcttatcaatggcagattagataaagaaaatgtggtacaaataaactatggaatactatacagccataaatagagacaagatcatgtcctttagagc

SEQ ID NO: 902691 - DNA, 632 bp, Homo sapiens
attttaagatgagacctgaagatgagtagacatcaaactgataaaatttcagtggggaggatttacagctcttcaaacattgtgaaatctttacatctcctgagttcaccacattgccttgcactacataggcactcaataatgagaataaataaatctaaaatttaacttaatttattaattgaaatagttttctgtttcatggggttaggcatggggtcaggtgggtgccaaggaagtggtgtcaggggagggaagaatttcctacagcatcctctgcaaatatcactggctgtcttcagagtcctccctcactattgcctaattttccctcagcaggtatccagagctgcctcttcagtcaaactgagtccattggcacaaacttcctcaatttcctatgtccactctgcaaacttcctttctctgccctcagcctcctctgatcttatcactaatcctggaagacaaggcatctcttctccccagactgattttcccacctatgcacttgatccaatcctcttggcccttttcaggactgtgttcaaactgttgaatctaaagaaatcctctcttttgcttwtgtccttggtggaatttggctctgttggccatgttttattccagcc

SEQ ID NO: 902692 - DNA, 683 bp, Homo sapiens
ggcagccaaagccctgtgggttgcctatcagaacttgatgtcctgctctgagagagagggaccattcctgggaggcacgtatgccaatgcatgggaagccaggctttctcaggtgagtggccaagaagcctttcccagtccctgtccattccagctttctgtgagctttagactagcagagaggcagtgtggcctaatgaaaggagcatcaaatttagaacaaaagtgatatgggctcaaatctcaatatgggatttctctgcggcctagtcacttacctttcctgagcttcagttctctcctatgtagattgagtataataatatatacgtggtaggttgttatgaaaataagagatcatgcatacaaatgctggctggtgattaatgcatgttatgggctacagcttttctccaggtggtgtgacgctgctgctaataatggtgatgacatcaaaactgccaagggccttagaaatctgctggtccagcacgaagcagggagatcaccaaaaaggggaggcagagctggaagagaacacagctgtcctgmcatccaggtcactacatgccaatgctgatatgcaacaaaaaccatatgagattcacagtaggaaagagttaaccacaaagttagaaaactggtaaatctgcaatgtaaaacatccaatccagcacagacac

SEQ ID NO: 902693 - DNA, 620 bp, Homo sapiens
acagatcaatgttttggtaccagcaccatgctgttttggttagtgtagccttgtagtatagtttgaagtcaggtagcgtgatgcctccagctttgctcttttggcttaggattgacttggcattgtgggctattttttggttccatatgaattttgaagtagttttttcaattctctgaagaaagtcattggtagcttgatggggatggcaatgaatctataaattaccttgggcagtatggccattttcattacattgattcttcctatccatgagcatggaatattcttccatttgtttgtgtcctcttttattttgttgagtctacctctccctttagatcagcagtccccaacctttatggcatcagggaccaattctgtggaaggcaattttttcatggaccaagggtggggagggggcatggtttcagaatgaaatggtcccacctcagatcattaagcatgagttagattctcttaaggagygtgcaacctagataccttgcatacacagttcacaataggatttgggcttctatgaaaatctaatgctgcagctgatctgacaggaggtagagctcagacagtaatgttcactcactgaccactcacctcct

SEQ ID NO: 902694 - DNA, 579 bp, Homo sapiens
gcaacctccgcctcccgggttcaagtgattctcctacctcagcctcccgagtcgctgggactacaggygcccactaccatacccagttaatttttgtattttaatagagacagggtttcaccatatcggctaggctggtctcgaactcctgaccctgtgatccgcccgcctcagcttcctaaagtgctgggattacaggtatgagccactgcacctggtcagcaaagttttattgaacacagatgtgctcatttgtttactattttctatgaccactttagttgttacagagatcacatagtctgcaaagcctaaaatatttactaccgggttttttatagaaaaagttttccgacccctgacctaagctactcaagtccaatctacacacttaaagctttcaaaacataaaattaagacaatttaataatttgcctaaggtcacaagggtacttggcaagtgaagggcaagctaatgaatgccccctactgggcagtagaggcgatgttatgcgacatggttaacagctcagactaaacatcgttcaaatccaggctctgccacttactagctatgca

SEQ ID NO: 902695 - DNA, 623 bp, Homo sapiens
ggccaacaaacatataaaagatcatcatcactggtcattagagaaatgcaaatcaaaatcacagtgagataccatctcatgccagttagaagggtgatcattacaaagtcagggaacaacagatgctggcagcactgtggagaattaggaactcttttacactgttggtggaatgcaaattagttcaaccatcatgcaagacagtgtggtggttcctcaaggatctagagccagaaataccatttaacccagcaatctaatcactgtgtatatacccaaagcattataaatcattctactataaagacacatgcacacgtatgtttattgcagtgctatttacaataacaaagattggaaccaaccccaatgcccatcagtgatggactggataaagaaagtggggcatatatacactatggaatactatgcagccataaaaaagaatgagctcatgtcctttgcaggataatgaatgaagctggaagccatcattctcatcaaactaacacaggaacagaaaacraagcaccacatcttctcactcataagtgggagctgaacaatgagaacacatggacacagggaggggaaagtcacaatctgggcctgtcagagggtgg

SEQ ID NO: 902696 - DNA, 605 bp, Homo sapiens
tctcctttgattccatgtctcacatccaggtcatgctgatgcatgaggtaggctcccatggccttaagcaataagcaaatgggattcatccagggatgcaaggatggtccaatgtatgcaaatctatcaatgtgctacatcataacaactgtattagtttgttctcacactgctataaagaacaaacagagactgggtaacttagaaaaaaaagaggtttaataaactcagttccacaggctgtacagaaagcatggctgagaggcctcaggaaacttacaatcatggcagaagggtgaagggagagcaagcatgtcttcacatgggggcaagagaaagagtgaagggggaagtggcacacattttaagcaaccacacctcctgagaactcattcactataatgagaacaggaagggggaagttaggccccataattcaatcacctcaaaccagaccactcctccaacatgtggggattacaattcaacatgagatttgtgtgggaaaaaaatccaaaccatatcactctgcccctggcccctctcaaatctcatgtccttctcacatatcaaaacacartaataccttaccaacagtcccctaa

SEQ ID NO: 902697 - DNA, 592 bp, Homo sapiens
aattcagaaatgggatagggaaaatgcaagataaaactggagcrccttatagtgccagaaagtaagggagtactcaaaaaaataataataaataaataaaaagtttagggcataaaaataggactcaggaaagctcacaatggtcaatgctggaacaatttaagcaacaaaataaataacagtatatcatgctgttgttgaataaatatactatacatgttaatcagatccattagattgatagtgatgttcagtttaattatagttgctgattttctgcctgctggatctattactgatacaaaggtgtatatttccaactataagagtggatttgcccgtctcctttaaattatgtcaattattgtatagtgtatcttagtgctctgttgtgttacacacatagattactattcctcaaaatattgatcctttcatcatcatatactgtatcttttatcctaggtaatttttcttgttccaaagacttctttggatgaaataaatataactactccaatttccttcctggcattctctgtatttaattgggcattttatgtgaatttatcttctctcctcttagcatata

SEQ ID NO: 902698 - DNA, 355 bp, Homo sapiens
caggctcagttttctttactggaagagaaatgggacaggaaacccaatcttagtgttagacctacaaaaagaargtacattttgagggttataggtggcttgtccagatttgtcaagtggaacaatagttctcacttggttatacacttttatatgtgtatcttccattagtcaggacgccaaagggaaggaagagagatgagatgcatcacgaacctcccagagaaagcttttatcttagccaaatcttaaaagctgcataatttagagtattagccacttgccagtttgcttgttcctttcctacttttcttacactcctgctctgcctccagcaagcagtcttctcatgatc

SEQ ID NO: 902699 - DNA, 447 bp, Homo sapiens
cacccaacatataggaatcaaggttacttaccaaagaggacttaggagctgatatgttattgtttgaaaaatctatcwttgattgacaggccaagagattgcatttctgcctgaataataagagtttaagttcacagaacactctcagaaatgatatcttatttgatcgacacaatgcctataaactaggtattaatagtattctccatctgatagatatttccaaataaaggattaaggaacttaccttatttcatttaaaccacataaaactgtgtaaagcagttgttattttctttcatacatcaggatttttgctaatagtgttggttaggagaaagacgagccaaaatgcctaggttccattcccagttttgccacttaatgactgtgtgatcttgagcaagttgcttaacttctctgtgcctgagtttctgtacatgtaaa

SEQ ID NO: 902700 - DNA, 668 bp, Homo sapiens
tttactcagtgggaatgtttggggcctgagagaagtaaccacagccccagactatggctggactgagaatccagccaggagtccctagagacacaagtagatatctacaccttatatgcttttctttctgatttcaagatctgctatattacacacttcccaccctacccctattcccaagacaattgactacacaacacagccatcctccaagactccagtcttcaccttgatgaaaccaacatgtacattaattatggttacttctgagttgtagaaccatggtaacttttgtaatatctctctctcttcattttctttttaaatttttacataaggaacatgtgttagttacttaattgaaaaaaaatttttaatgtattcttagcaggcatctaacatttttggcactctgctcaatggttattttctgaagactcaatacaataattatatttttaatctggctccccaaagtaacatttaatttacaaaagagtcaaacttaaaataggccaagctatatgtcttataagtaagaaataaaaaaaattacagaatcttagagctgaaaagctctccagcatcatgtagtccagtgatctttaaactgtgtgactttgaatcttagagctctgyacataaatgtcttggagttaaggtagaga

SEQ ID NO: 902701 - DNA, 575 bp, Homo sapiens
atcaaagaaaatttcttaagcagtaaactttcattctacaaaatattgtcttttaacttcttactgatgtaccttcttttggaaatgtaagcgcttaatgacatattgactcttgctgaagccacaagccaattactcatccttccaaatagattttttttcatggagtgatggagatgggaatatgtagaagaagatagaaataaaattaaaaattcattgggaaaacagaataagaaccatttaaacatgaactcaattgtaagtgacaaggtataaaaaacgaggtgttttatagaatcaaatataaaaacttgactagaataataggaaagatgtgttagtaaaaccatggcaatatgataacaccattgttatttattgaacactttctatgtgttaggcatgtgctaaatatagtagctaaatatagtatttatctcattatgggtgtacccagagataagcccatttgggatgtataatatctcaayttctgggtccatttcatttaatatccttgctctagtatgtgaagtatgtatgttatttgcattgacaaagactgacctgaa

SEQ ID NO: 902702 - DNA, 686 bp, Homo sapiens
tccccatactgtggtctgattcccatagcaagtgaaattagcactttaatttccatattatctcctttatattacagatgaataatgtgcaggaataaagaggaagatcttagggggaattaccaaagatgaaaaaaagtattatgcttcattctgaacaggttttatatcccacactgacttatcactggcataggaaaataagtctccatccattcagcacagagaaaaattggagaagttatccctttgagagacatgagtctcctgagataaatctcctgcattacttgttccatgtcctctattcactacccacttaaagctaagtgctttaggtacacttgtttctgaataaaaaaaatctatagattgcacagttttaataataataactatgatgatggtaatagttaaaatttatcaaatgctgcctgtgggccaggtgctaaacacttcacatgcgttaacgcatttattcaactctatgaagtttctcacagatacacaaactgaagaacagtttaattacttgcccaattttagtaagtggtagagccaggattccagcagagacatttgacactaatgtccacatccagtaacactgcacaagtcacaaaggagacccaacacatgtataatctacckacaagttctgctggctctactttcaaaacatgttt

SEQ ID NO: 902703 - DNA, 615 bp, Homo sapiens
aactagtattacccaaaaattaaccccatcaaatttcactgtgtgtattcaaaacacccaaaacactttgtcwtggattctccttgtaagaatgatgatgatgatgatgattgcaacaattatttattaactgcttactatgttatgagtgttttaaatgtatgctttcatttaaccttgtatccactttagaaggaaggcattattaccttattttataggtacttatataaagagggagtaacaggttaagagagattacatgatttgagacagttcatatggctcaaatagcagcctttaggcaacatgacccaccccttcaaacttaacagttagaaatacagactgggcccaaagcaactagaaagaaggaggtggtaccaagagagacacaaatcaatgaaaaagaaaacaagactagagtagtaatgataaacacaactgaaggctttttaaaaagaatgtttttattttggaataattttagctttagagaaaagttgcagagataaaattatgtatctcaaccagttttccctaatgtgagagtctaacactattatgattcagttttcaaaactgagaaatcaactttggtatgtattactatta

SEQ ID NO: 902704 - DNA, 603 bp, Homo sapiens
agaacacatggacacattgcagagcagcaacacacactggaacccgttttttgagggcgcagtggagggagggagagcatcaggaagaatagctaatggatgctgggcttaatatctaggtgatgggatgatctgtgcagcaaactaccatggcacacattaacctatgtaacaaacctccacatctggcacatgtacccatgaacttaaaaataaacgttgaagaaaaaaaatttaaatgtacctctttatcgttagtgtctggctcatgactgtcacataagaaagatagatggatgggatggatatttgaaaaaatcaataaatgacaatttttatcccaaatattaattaagtagctactttaaaatatacaatgtgactggctctcagagagataactcaaaagtggattctgttatcaagatgttggtagttaaggaggggacttagatcactcatggccattttcaaaaaacaagtataaaccatagcatgttaattagatatgggttgaaagtaatmtacatggtgccatgtattttatttagaattggtggagaaaaacgcctttgtaaagcttcgagtttaggaatcattaat

SEQ ID NO: 902705 - DNA, 648 bp, Homo sapiens
tgcagtggctcacacctgtaatcctagcactttgggaggccgaaaagggtggatcacctgaggtcargagtttgagaccagcctggccaacatggcaaaccctgtctctactaaatatacaaaaattagatgggcatggtggtgggtgcctgtaatcccagctactcggaagcctgagacaggagaattgcttgaacccaggagtcggagggtgcagtgagccaagggcctgccattgcactccagcttgggtgacaagtgcgaaactccgtctcaaaagaaaaaaaaagttatgtttatactctactgtagtatattaagtgtgcaacagcaatgtgtctaaaataacaatatatataccttaattaaaaatactttattgctaaaatatactaacaaagtcagcacatgtctttggaaaaatgatgctgatggacttgcttgacacagggttgccagatactttcaatttgtaaaaaaaaaatgcaatatctgcaaagaacaataaaatgaggtacgtctatatttagttttttttttccttttaaactctgaaaaaattggtctcaaaatgatgccacaacttaaatagtaccacagtattattctataatgcactgtttgggttatagctatactagaagccca

SEQ ID NO: 902706 - DNA, 600 bp, Homo sapiens
ttactgagctcatgcaactcaccttgcaacactcctatttgagctgtaartaaaccagatggctcctgccaactagtacaggaccttagaataattaatgaagctgttattcctattcatcctatcgtcccaaacccttacaccctttgtagataaattccatctaccacagcttggtttactgtacttgatcttaagaacaccttttcctgcattcctatatacccagatagctatttttttttttttttttttgcctttgaaaggcaaaacccagatactcaaataactcaacagtgaacttggacagttctgtgccagggattcagagataacccccgcctttttggacaggccctagctaaaggcctgtccaccctgcagcctctcccagatagcaatatactccagtatgtggatgacctactaatctgtagtcctaccaaggctgtttcagaccaaaatacagtatttgtaactaaacaaatttgctaactgtgggtacaaagaagtttcttccaaagtacaaatatctgcacaaagcattcaattttggggtcttagtttaacccccagtacaatgagcctttctagtgccag

SEQ ID NO: 902707 - DNA, 636 bp, Homo sapiens
aatccacagccaacatcatactaaatgggcaaaagatggaagtattccccttgagaagtraagggaattttaagagaatttttgctgtttgttattaaggaaacttttcttttgtctgttttgtagtgactgtgctatttggattacttttaaaatgcttttggatgtcaaaactatttttttctttcctgaatgtgacagtagatgtgccagtttcatagcagttccatttaggttgctgtgtttgggttaacagagatatataaatgcagaaatgtcttatagacatttagagatatatgacctgagtttagatcagagaaggcttggagagatttataaatctttgtatggttgtggcagctgacactaggggaagaaagagctctttgaggaatatagtgcaggagcaaaaagcacaggggctaaagcctaaagaaatgcagtgatctacaccaagacttggttagacatagagatactgacattagatatttaggaatgaaaaggtaaggtgcactgtggttggctgaataggaatttcaagaaaataggcttcataagggtgactgagaaatgcaatcttaccaaaatagactgaatatttggagtatgatatcaaagcaacaggatgtg

SEQ ID NO: 902708 - DNA, 645 bp, Homo sapiens
gagactatttctaatgcttattatgttttagatgatctgcttttctaacttgattcatgtagagttttttctcttttttttakttaaaaaaagtcccatctatatcttaaagtgaatcaatgtttattgatttggtctgatacacgatggcatattttgatcagctagctcatattttctttgtcaggcaaattttcttctgtcataattttgattgttccttctgtttcctctggtttttaattagaaaattctgtactcttaaccctctgtcttccatgtctgctttcctatcttgcaactttttagtctttatcagttaggaaagtgttcagatattaataacagaatatatagcaaaagagtggattaaacaaatagggctgtttatttcacacaacaagaagtccagagactggcaggttatgcccagtgcagctgatagatgcaggaggcagagaagcgagggtccctggagagtcttcaaccctccccacaagtgtttacatcagatgtttttgtgcaaatgagggaaccttcccagggccttctctgggcatgtgcgcaatggactggggattcacctacacactgggagaatagggtggagccactgagaattcacaccttatgcagtggggagga

SEQ ID NO: 902709 - DNA, 645 bp, Homo sapiens
gagactatttctaatgcttattatgttttagatgatctgcttttctaacttgattcatgtagagttttttctcttttttttagtwaaaaaaagtcccatctatatcttaaagtgaatcaatgtttattgatttggtctgatacacgatggcatattttgatcagctagctcatattttctttgtcaggcaaattttcttctgtcataattttgattgttccttctgtttcctctggtttttaattagaaaattctgtactcttaaccctctgtcttccatgtctgctttcctatcttgcaactttttagtctttatcagttaggaaagtgttcagatattaataacagaatatatagcaaaagagtggattaaacaaatagggctgtttatttcacacaacaagaagtccagagactggcaggttatgcccagtgcagctgatagatgcaggaggcagagaagcgagggtccctggagagtcttcaaccctccccacaagtgtttacatcagatgtttttgtgcaaatgagggaaccttcccagggccttctctgggcatgtgcgcaatggactggggattcacctacacactgggagaatagggtggagccactgagaattcacaccttatgcagtggggagga

SEQ ID NO: 902710 - DNA, 606 bp, Homo sapiens
agtgtggacagcagtgaagagaagacatgtgcaaagtggagatagaccctgtgcatgagatgtcagaacacacctttagaaacatactgtcagagagtgaggatccttgccaccccaaaatgaatattataatttatatttgcaagaatgagtatagaactagggtgagcaaggcagcctgggtgacagagcaagactctgtctcaggaaaaaaaaaaaaaagagagagagaaagaaagaggaaggaggggtggaaggtgtggagggagcatgctggataggaggtgctcagtatgtattcagtattcagcagttgcaggaaatgagggcagctgtcaggttacaaagctatgagaacttcaggagggtcctgaccactgctgtgtgatcctcatagaagagctgttttgtgggtggccctttcagattccatgagttccaaagcaagcgcttctagcaatgctgagaaaggtcaaggctgcaaaccacccagcttattacattaactaaagtatttctcattcatttgggtccatagtttatccacygaatataataatgcagcatttacaattgcattttgttgttgttgtgaatagaacaccc

SEQ ID NO: 902711 - DNA, 589 bp, Homo sapiens
caaatcttgcagaattaagcagaaccccyttttttttttttttttttttttttttttacttttttgatacagtgtttcactctgtcacccagaatggagtgcagtcatgtgatcttggcacactgcaacctctgcttcccaggctcaagtgattctcccacttcagccccctcaggtgcacactactgtgcctggctaatttttcttttctctatttttaattttttgtagagatgggttaaatcatattgcccaggctggccttcttttcctaagttcaagtgatcctcctgcttcaggctcccaaagtgctgagattacaggcgtgagcaactgtgcccagcccactgtaattttatggggaccaaacttctggacatgtggagacgggaaggaaaaggatctgaaaataagataaaaaacataaattaattattcagtaagagggaatagaagaagacaggcctggaataatctagtctcaccacctggctgtcttgaccagcagttattctagtaaacctactgccatgagcaaagagaaggcctttatcaatatcatcatcattggccatgtggactctggcaa

SEQ ID NO: 902712 - DNA, 608 bp, Homo sapiens
aaaagatgctatgtaatctattagagcaattgttttaatattgaaaaagatacttcaactgattgtttttttacttccagacattaatggtcttawacatattcatccattctgaacgtaacaaaacaaactaaaatcctgcctgtaaccatatagtaattgttttttatactttctcccttttgatgtatatgctataacctctatttccattggaatcaaatttgtattaataacttactatttataacatttttaacacatttctgcaatataagtagcttatttataacctacttctcaaaaatgcatactagtttcatgctgcagatggcctcacaccatccggcacttgtcttactcttttgccctctctctctttttttgtgtgtttgtgtgtgtgtgtatttccctctatctctctccattaggttaagagttaagaagtgtcaacacaagaaaatgggaccaggcgtggtggctcacgcctgtgatctcagccatttgggaggcttaggtgggtggatcaggaggtcagcagttcgagaccagcctcatcaacatggtgaaaccccatctctactaaaaatacaaaaagtagccaggtg

SEQ ID NO: 902713 - DNA, 675 bp, Homo sapiens
acttgtggatatggtttggctgtgtccccatccaaatctcatcttgaattgtarctcccataattcccacgtgttgtgggagggacccagtgggagataactgaatcatgagggcggtttctcccattctgttctcatggtagtgagtaagtctcacaacatatgatgattttataaggggtctccccttttgcttgactctctttctctcttgtctgccaccatgtaagacgtgcctttcacctcccaccatgattgtgaggcctccctagctacgtggaactgtgagcccattaaacctctttttctttataaaatactcattcttacatgcacatgtatgtttattgcagcactatttacaatagcaaagacttggaaccagcccaaatgtccatcgatgatagactaaagaaaatgtggcacatatacaccatggaatactatgcagccataaaaaagaatgagctcatatcctttgcagggacatggatgaagctggaaaccatcattctcagcaaactaatgcaggaacagaaaaccaaacacggcttgttctcactcataagtgggagttgaacaatgagaacacatggacacagggaggggaacatcacacactgggacctgttggggggtgggggacaagaggagggagagcgttaggacaaatcc

SEQ ID NO: 902714 - DNA, 654 bp, Homo sapiens
acctgatggaagtttcccgaatactaacccccacattttcccatacttcaatggacatacttccattctatatctgaatcccaaaaacaccgggaagaaaaacaagataaaatttaaccattatgtcctgaaccctacctctaattggggcaaaaaaaaaaaaattgaacctgataaaatcagtctagctgtctttcactagcagttagagggaaacttattccaagacgtcttaggggaaaagagagaaaacagaggagatatttgaaatggagaatttaaagtcactcttgaattttctctgagtatcatagacagtgaatgcctctcccttgtctgtgaatactaaataactccttgtctttctgacttggtgttgctactgctggtattctctctaaaatctcatagctctctgaattattgcctccagggacactgaggctggggggaagtgagcaagtgtctccagggaatgcacaatgttttatctcctcgttcaacatccttttcatttatctcacaagtactctaaaattctagcrgaattaggaagttaaggacaccaaggacctctttcagtctatcagatttacgtacatctaagacacattgttgagtgggaaaatgaagagtgagcaaatgacaaagtag

SEQ ID NO: 902715 - DNA, 529 bp, Homo sapiens
ccacccttgattcattgtttaagattaggttgatgcaaaagtaattgcatttttaccattacttttaatggcaaaacacagttacttttgccacagcctaataacatatagcgatgattataactgacaagtagtaaaatataatttaaacttatttttgtttttgttttattttgagataaattttcaattaaatctcatttcattacttactatgaaattttagtccccatttaagtgaattctctttaatgagatagcacttttctttggtccttgtttatgtctcaaaatattctgtagttttctgctgatttgcacatcatcctgttgtgattctccttatcctaccaggtgcaattcaaattctacttcttctaaatatttttcatcaccttcttttataaaaagggaataatgtttctttcccctcaaaatttatatgttaaaaccaaatccaaagataatggtatttggaagtgkggcctttaggaggtgatggggtcatgagggtggagccctcatgaat

SEQ ID NO: 902716 - DNA, 620 bp, Homo sapiens
tgtaatcagtttctgagatcctatcaaaasaatgacaaatcaatttggaaaagagacccactgaaatgtctgaacagattcaatcttctctatgactgaataattcaactttctttttaaatccaagcctagttttatggagaagccattccttttcttcttgagtctaggaaggcaaatctggattattatatctgcaggattcagcgctcataataattgctttttgattgttttttttttctgtgaggttgctgtaagaccaaccaacaaacagggtgattaaattagggcagagtttacaaacttgatatgcacagccctcaagaattacagctctttggcctgatggtatcttttgtggggtatgcacaatattttactaatttgatttagttgccagtatttttaaaacaggtgattttacatgttaaaaaaaatccagactttaagcttattagaaaatgtggcaactctgggcctgcgtttccacattcaatagtcagagaaacctatttttgttgggaaacagagcagttaggaatatattctgctgcaagtaatagaggtttaaaccacagggatattcattgcttgttcacaaagactctggagatagg

SEQ ID NO: 902717 - DNA, 720 bp, Homo sapiens
ttttaaaattgtatctacttctttgtcaaactcttagttgtgttcatgttttgttcaaaatttcattttattttttgwccatatattctgtagttcagtgaacatctttcagaaggttattctgaattcttcacctgtcatttcctaggtcctattgttggagctttgttagtttcttttgaaggtgtaatggtttcctgaatctttgcaattcttgcatctttgcattggtatctgtgcattaaaggaaacagccacctttcccagcttttatagatgtgctctggcagggatacacttgcattatttagtctagtctatgattcaaagtgggccagttggtgacagtcctgaggagctagaacttgctttcaggttctctagatgcctggactgctgcctttgctctgagttcatatggagaagctacctaggctctgctatccagcgagacaactggctgaattctgcaatcagtctgagcttctgggtaggcactgcaattacctcagattggaccaaaccacaggaagatcattccttggccaggtagtattactatgtgagttcagcagttgatctgggttgtaggagggtgtctgaaattaggtggagatgttgattggggtgaacagaaccagctgctttgcacagtggaaatgcacagttcagctgtgtctccttgcttatgagaggatttggggtggactttgagtccag

SEQ ID NO: 902718 - DNA, 609 bp, Homo sapiens
tagctttttaatatctcattcttaattatgaacagatagtcataggtaaggaaggccactgatgtgaaaaatggtgattaaagcaaaagagagtaaaagagatttggaggagaagacaatgcaaaaaatgtggcccttaaaatttttggaaaagttagtcattgcatttatgaaataagaacaagaatgttcacagagctcttagaaactaaaacaaatccaatagagttggaggaggttgatcagaaaggagtgcagaaacaacaaaaaacaaacctaaatgatggtaaataggaagagatgataaaattagagggattatttaaataatacatgtttcaggaggagagaacaaattggaggagaaaaaatcaccaataaaataattcactaacatttctcagaactgtagaacacacatttccagattaaaagggcccattgagcatccatcacaatgaattaagatacactcataccaagattattgtgaaatttcagagcatctggaatagagaaaagattttgaaagcytccataaagtgagagaatgatttagacaaaagatcaagaatcaaaacgttactagagttctcaacagcaacatga

SEQ ID NO: 902719 - DNA, 439 bp, Homo sapiens
accagtctctttgctaagcataacaagagtgtcttttactccatttcccaaaaagttcctcattgtacctgagaccacctcagcctggacttcattttccatatcactatcagcattttggccaaagccattcaataagtctctaggaagttgcaaactttcccacatcttcctgtcttctaagtcctccaagtttctatgtaaagttccaaactttcccacatttttctgtcttctgagccctccaaactgttccaatctctgcctgttacccagttccaaagttgcttccatattttggggtatccttatagcagtgccccacacccttggtaccaatttactgtattagtttgttctcacactgctaataaggacatacctgggactgggtaatttatacaggaaygaggtttaattgactcagttctgcattgct

SEQ ID NO: 902720 - DNA, 651 bp, Homo sapiens
tttcactggctagtggaggaraaagagccagaaacaggcaattagattgcaatgtgggatctgggtgctgtgataggggtgagtacaagagatcctggaagcttctgggaagagcacccaacccaagggacgagggtaaggagcaagaggtgggaagggaagggtcagggaagagattattccataaaagcttggaggatgagctggagtctgcctacacaggatggtgctggtgtgtgctattactcaggtccaccatgtgacataagaagaggtaagaggtgagactgagagagcaggggcctggtccctcagaaggccttcatggggcttggacttcattccagggggaaatggggagccatgacagggttttaggtaggtacgtgacacgttcagcttctcataattattctttgaaggagatggctctgggggttgggggagatggatttgaaaaggggagagtggaggtggggagattagtcaggaggcttggcagccaactctgtgagatatgacaagtgcctgaacagcagccatgggagctggggaaggaatcctgggccgaagccccagagcaaacgaaccttgagctatttgtgggtttgcttgttgattccattctttcaacaaacattctgagtgata

SEQ ID NO: 902721 - DNA, 604 bp, Homo sapiens
ctgagttgggcatactgcctgggaaatgtccctgtacccctttcattcagaatgtccaataatgcctagcatggtcactaaggactactgagagaaggctgccaggagggtatgttttatagaacatcttgagcctctggagttattttggcctccctcccacttcccctttaccttcccttccatagaaaggtgctggtgataagcattggggtccaagaacataatttaacctgagttctcgatctctccagctttctgaaggatccaagtcaagaaacgctttgcaatttacaacccctaccttgtggtactgccaaatctttcttaagaaggctgttttatattccctcttgagtttagtatgccatgtttcccttcgtatattaaaagatgaaaatcaaggtgatggacatgttcccttagtaccagagtcagctgtcaagtttcgctggttgactttatctcctcctacaacacttcattgccagtatgrtcttcacagggagaacctaggagagtacatatgtctctctcacttttttcacctggtgagctacctgggaggtgaccagaaaaaaagaaagtgaaattcatacacaag

SEQ ID NO: 902722 - DNA, 703 bp, Homo sapiens
tgaagtcaggtagcatgatgcctccagctttgttctttatgcttaggattgacttggcaataagggctctttttggttccacatgaactttaaagtagttttttccagttctgtgaagaaagtcattggtagcttgatggggatggcactgaatctataaattaccttgggcaatatggccattttcacgatattgattcttcctatccatgagcatggaatgttcttccacttgtttgtgtcctcttttattttgtcgagcagtgttttgtaattctccttgaagaggtccttcacatcccttgtaagtgggattcctaggtattatattccctttttagcaattgtgaatgggagttcactcatgatttggctgtttgtctgttattggtgtataggaatgcttatgatttttgcacactgattttgtatcctgagactttgctgaagttgcttatcagcttatggagattttgagctgagacaatggggttttctaaatacacaatcatgtcatctgcaaacagggacaactcagagagtttaacatcctcaacttgaggcagcggacaagagcaatgcaggrcatatttatctggaagatacttggcactgcatctgatagagactaaactgagagaaaacctttttaaccggcctgtcttgatatcctgcaattccaccacattgcaatccaaaaaac

SEQ ID NO: 902723 - DNA, 703 bp, Homo sapiens
tgaagtcaggtagcatgatgcctccagctttgttctttatgcttaggattgacttggcaataagggctctttttggttccacatgaactttaaagtagttttttccagttctgtgaagaaagtcattggtagcttgatggggatggcactgaatctataaattaccttgggcaatatggccattttcacgatattgattcttcctatccatgagcatggaatgttcttccacttgtttgtgtcctcttttattttgtcgagcagtgttttgtaattctccttgaagaggtccttcacatcccttgtaagtgggattcctaggtattatattccctttttagcaattgtgaatgggagttcactcatgatttggctgtttgtctgttattggtgtataggaatgcttatgatttttgcacactgattttgtatcctgagactttgctgaagttgcttatcagcttatggagattttgagctgagacaatggggttttctaaatacacaatcatgtcatctgcaaacagggacaactcagagagtttaacatcctcaacttgaggcagcggacaagagcaatgcaggacatatttatctggaagatacttggcactgcawctgatagagactaaactgagagaaaacctttttaaccggcctgtcttgatatcctgcaattccaccacattgcaatccaaaaaac

SEQ ID NO: 902724 - DNA, 599 bp, Homo sapiens
tgcactaggagattagttttcaaatgcacaatgaagtgcgctataatttgtaattaaacatatataaagcacttatttgtaaattattttcttagtatataaagtaaarcaaatataagggtatccacagagcaataaaactctcatctagttagtttatggcgtgttttcttgaaaggaaggaaaataaacagatttggaactattataccgagaactgaacatgaccacaatacgcattgggaatgtgctgtgcatatgcctattatccaaaatgtctacagctgctcccgcaaaaagtttgagggaaataggcaattatatggtttctgggagtcagaatttttagaacttgaaaaaaaattagatattatctaggatcattatgttatcaaattctagagataccatctcccttcattttatgtgactggcacatctgagtgatacatagactacaatgaaaatggtgccccctgcagcatgaaattagcaatatcacatccacctctcatttaatacatttggaaactcagacccacagagaggaatcctctgccctgacagctccaggagcctagctttgacgtaggaagggt

SEQ ID NO: 902725 - DNA, 670 bp, Homo sapiens
gtacattcaattactggtcctttgctgtacctgcaggagctatgctgggggwaaataaagatggataaaatatacaggggccaccataaagaaaacaatagtctaatagaagaaacaagttaatttctcacattgaaaactacaatgcaataggatcagaacaaaaaaaaaatcaacaaacttcagatgaggtaggaaagaggtgaccgacccttgaatcagtctactcaacaggcaatcaaaacaatgacaaaggtgcacattggactaaataaaaataacacagttttgaacaaaatgccaagaaaatgacacctgacttgtattcaaaaagcacattattcaaccaggctagaatcctggatggtaatattgtcaaattattatgaaagcaaataatgtcagacactatctaatacccactgcagagaaaaccttgggttcaacaatggcaaaaaaaataaataaataaaataccaaactgatcatatgcaaatgaaacaggtagaaatgaacagggttgagtggtgtggaggaaagaaggtggaaagaagatgtcctctgaaggcaaaaagagagagaaagagaagaaaacgaccaattcacagtagttaaaaaaggctgcctccctgtggctttcccacggcaaaagctggtcttttccagagtg

SEQ ID NO: 902726 - DNA, 573 bp, Homo sapiens
atgtacacagttttttattttgtttacttacaatagattattcaattatgtttactatacgatataccactttcttccatagtctgagcaaagtcttatagagcttcaagtatcttcttaggcactttkgatcatcaacagttatgcacatcatcctagtgacctgtccttcctcaaaccaaggcttatgaccttgacctctttaacacctcagaaccaatacgtattttttaggcatatgaaataataccagggttctatttgcactcccactctggttaaactcagacatgtccccccgcccccgccataactgactctcttatccttggaaatgaaaaacgtttcacagaaatccacaactagtttttaacagatacttgacacctgaactatagtccacaatgcactaagtgctcataccgacctctgtagcttagaaattctacaatctctttttaatgtctctaattgtactgtttggtatgtaacagggaattattttgagcatgtctcattaacaaaagatttatctcctactaagcatcttcccttcttaggaagtctgcaaag

SEQ ID NO: 902727 - DNA, 600 bp, Homo sapiens
aaaccagagacctttgttcacttgtttatctgctgaccttccctccactattgtcctatgaccctgccaaatccccctctgtgagaaacacccaagaatgatcaataaaaataataawaaaataaaaaaaaaaaagagaataacagtggctagtgcataatttagaaaagtataagtcacctgaaagacatagcaattctaaacttgtattcaccaaataacatacattcaaatatgtgacacagaaattgatcaaattgtgagggaaaatttaaaaatctacaaccatagtggaaaatttttaacactcttctctcactaattggtagatcaagcagacaaaatcttaggatatagaggatttgaacatacaaattttaagtttaatatgatggatatatattgaatcttgaacccaacagtttgagaatatgaaaattttcaagtacacttgaagcgtttaccaaattgaccactatgatggttaattttaggtgtcaacttgaccagattaagggatacccggacagctggtaaagcattatttctgagtacgtctgtgagggcatttacagaagtgattagtgtttgaatcagtgg

SEQ ID NO: 902728 - DNA, 583 bp, Homo sapiens
aaataaaagcagaactaataaatttagcaaagtttaggatataaaatcaacatgyaaaaattggttacatttgtcactagaaaatgagttatcaaaaagggaaatttaagaaaaaataatttacattagtatcaaaaagaataaaatgcctacgagtaaagctaaccaaagaggtaaaaacttgtatactgaaactacaaaacattgctgtaatcaaagaaaacacaagtaaatggaaatacatcccatgtttacgaactggaagacaacatttttaaaaatgttaatattgctgaaagcaatcaacagattcaacaaaatcccctttaaaatcctaattgtattttttgcagaaacaaaaataaatttttctaaaatttatacatcaagaggctgtcaatagccaaaataatttataaaaataaagtcagatgactcatacttcctgaatttgacacatattacaaagctacaataattgaagctgtgtggtactgacatgaatgcagacatattcaccaatggattagaatacagtccagaaataaaccctagtgtatgtggttcagtgatcatcaacgag

SEQ ID NO: 902729 - DNA, 658 bp, Homo sapiens
tcaagacaaaaaccataagaagagacaaagaaagtaactttataatgataaagaggccaattcagcaagaggatagaacaattttaaatatatatacacccaacactgaagcacccagatatataaaggaaatattgttagagctaaagagacagataggccccagtacaaaatagctggacacttcagcgccccactttcagcatctttaagagagaaaatcaacaaagaaacatcagatttaatctgcacaattggatttaatagatatttacaaaacatttcatccaagagctgcagaatacattcttttcctcagcacatagatcttcttaaggataggccatatgttaggtcacaaaacaagtcttaaaacatttttaaaaattgaaataatgtcaagcatcttctctgaccaccgtggagtaaagctagaaatcaataacaagaggaattttggaaactatacaaatacatggaaattaaacaatgtgctcttgaatgaccagtgggtcaatgaataaattaagaaaaaaactgagaatttttttgaaacaaatgataatggaaacacaacataccaaaacttacgggatacagcaaaagatgtactcagaaagaagmttatagttacaagtgcctacatttaaaaagagga

SEQ ID NO: 902730 - DNA, 573 bp, Homo sapiens
agattgagaccatcatgggcaacatggtgaaacactgtctctactgaaaatacaaaaattagctgaatgtggtggcgtgcacctacagtcccagctactcgggaagctaaggcagaagaatcacttgaacccaggaggcagagattgcagtgagccgaaatcatgcaactgcactctagcctggcaacagagcaagactccatcttaaaaaaaaaaaaaaaaaaaaaaagtttacaggaactgctaactgctaactagaataaccagtttagaaaggaacataaatgacctgatggagctgaaaaacacaacacaagaatttcatgaaccatacacaagtatcaatagctgaatcaatcaagcagaagaaaggatatcagagattgaagatcaacttaatgaaataaggcatgaagacaagtttagagaaaaaaagaatgaaaaggaatggacaaagcctccaagatatgtgggactatgtgaaaagactaaacctacaattgattggtgtgcctgaacgtgatggggggaatgsaaccaagttggaagaaacatttcaggatattatccagg

SEQ ID NO: 902731 - DNA, 546 bp, Homo sapiens
agaaatagctgatgaccaagagaaaaaacagtaaacaaaacaaactcatagatgacccagatgtcataattaacagataagaacttgacaatacatttacaaagtataaaaagaatagattataagatagaaaaaatagaggaaaaaatatagaattttagcagaaaagagaactctctaaaaagaaccaattggacacactagaactaaaaagatcaaaatatgtgaaattaagaattcattgaatgggcttatcagcaaactggacaaagccaaagaaagaaccactaaccttgaagataggtcaattagaaagtatccaaactacagagagaaagtaatgaaaaacaaaagagaaaaaaagaggcatgagagacacatgaaactatatagaatggtctaatatacatgtcactgaagttccggaaggagagaggagaaaaaattaaggcataaaaacatataaaaagataattactgaatattttctggctgagtacagtggytcatgcctgtaatcacagctctttaggaggctgcttgagc

SEQ ID NO: 902732 - DNA, 605 bp, Homo sapiens
tgtattccaggtttgccaatagcaacagatgtcactttcaacatgccaacaagtcccccaggatttcagttacctgaaaagggatgatctcgaatacttcaaaaattgccataatcctattaaaatggtacttttacattcaaaatgcttgtttatagcagagttccttactttgcataggtaatactcaaatccattagaaacgtatatctaattgtgtccatcgtagggactatgatatcttgaatcttgatttgtttatctcctaaattagtatttttaattaattcattccaatggacccagcgacctttgtttttcaactacaagaaaatataagttttaaaatattaaaaccatgtacttgctgtatctgaaaggctcttttcaacatgtatactattatattagcttttaaaaacttaagtcttcccccttttaatgaaatattacattcacataaaagaacacatatagcatattttaagtcataagcagattaataaaataagcattcatgaaaacaycaatttaaaaaatatattttttcaattttcatttttaataacctgaaaaatataatgtaacttttgttatcacatatt

SEQ ID NO: 902733 - DNA, 641 bp, Homo sapiens
gttagtatggttatgtgtgaaactgatcctgtcattatgatgctagctggttattttgcatgttagttgatgcagtttyttcatagtgttaatggtctttacaatttggtatgtttttgcagtggctggtacgggtttttcctttccatatttagtgcttccttcaggacctcttgtacagcaggcctggtggtgacaaaatctctcagcatttgcttgtctgtaaaggattctatttctcctttgcttatgacgcttaatttggctggatatgaaattctaggtgaaaattcttttctttaagaattttgaatattaccctcccactctcttatggcttgtagggtttctgcagagggatctgctgttagtctcatgggcttctctttgtcagaaacccgacccttctctctggctgcccttaacattttgtccttcatttcaaccttggtgaatctgacaattatgtgtcttggagttgtttgctcttctcgaagagtatctctgtggtgttctctgtatttcctgaatttgaatgttggcctgtcttgctaggttagggaagttcttctggataatatcctgaagagtgttttccaacctgcttccattctccctgtcactttcacgtacaccaatca

SEQ ID NO: 902734 - DNA, 655 bp, Homo sapiens
tttggctattctgggtcttttgtggttccatataaatcttaagatcatttttttctatctctgggaagaatgtcattggtgttttgatagggatttcattgaatctgtaaattgccttgggtagtatgggcattttaacaatattgattcttccaatacatgaacgtggaaaatttttcaacattttggtgtctgcttcaatttctttcatcagtgttttatagttttcattgtagagattgtgcatgttttgattaattcctaggtatttaattttatttgtggctattgtaaatgggattacttttttatttcttttccagtttgttccctgttggcatatagaaatgctactgatttttgtatgttgatgtgtattctgcgactttactgaatttatcacttctcatagttttttgttgcagtctttaggtttctccaaatataagataatatcacctgcaaataaggattatttgacttctccctttccaatttggatgccctttatgtgttctcttagattgctgtagctggracttccagtactatgtggaataacagtggtgaaagtaggcattcttgtattccagacctgagaggcaaggcattcagtttttccccattcagtatgatactagctgtgggtctgttg

SEQ ID NO: 902735 - DNA, 638 bp, Homo sapiens
aaatgttatctattttggtagtctttccaaagaacaaygtttaattttgtcatttcaagaatactatataagaagaaccaatcatacaaccttttaagattggtattttcacataacataatgccctggagtctcatctaagttgttgagtgtatcagtggtctgcttgtttttcttgctgagtagtataaagaggtacaaatgtaccacagtatgtttaaccattcacctgctaaagaacatttcggctgtttccaggtttcagctattataaacaaagctgcaatgcatgacatgtgtaggttttcatgtaaacacgtttttatttttctgtaataaatttcctggagtgtgattgctgagccttagagtgagtatgtataaacatagttttacttattttctaattcttatgcctttaaatattactcatatctaatcacattggctaatacctcaaggacaatgttaaatcatattgaagttagtgggcatctttgctttagcgggaatgcctctagtttttccccattgaataagattctggcttttggatttgagctttatatggtttattatgttagggaagtatccatctacatgcgtttcctagagctttgtaaagtaccacaatctgg

SEQ ID NO: 902736 - DNA, 636 bp, Homo sapiens
ttcaactaactcgttcattgaaacttcctgactcaaatgagtgcaattaatttctggcttgttatataatatgtayttagaatgtatgtataatattaataacaaactttgtcattaaaaaatgtttttacagaaaatatttcatttacctctgacatgtactctgtgatgtaggcattattgtccctacttcatggataaattgagcaccagagctttaaagcaatttgcgtgttgtcacagggcaaatgcattgcaaaactggtaccaaatccatatcttctgattcttaaccctggatttgttccattatacatcaggctaccatttgactaaattcttatgcatctactttaattccaggcaaatctgcaaaataattagtggcctgagtgtaaacattttcttcacatagaaggaaatcaacatatactttatgtcatgtcttatttatcagtttacaatttcctggtctatattaactatgttttctttatatgcttcttgacattatttacatttctcaggttttttgattttgctgaacttgtggctactatgcaatatgttttagcctctctaggcttctcccaacatttgtgtgcacttgtattcacaagactagtatgaaagtag

SEQ ID NO: 902737 - DNA, 664 bp, Homo sapiens
gaatgtaaggggaaatcttcttgagcttctagrgaaagatcttgctcttaaaataaaaaggtaaagcccctacagaaagtggccttgccccactccttccttcctgctcagggtctgggctgaggatgtggcaccttctaccttgtgaccatgaggagacaagatcgaaagattagctgagaatggtgggggaaaaagggaaactttatgagcccccaaaagaactctggaatcataaaccatgcttctagttaagtaaatactgaacttccttatttttaatccaggattaattagtctttctgtgactttcctccaaatgagattggccagggacaataaaatggtgtctgaacaggtgacaagtagggccctccctcagccaacagagataagaaagagcatacacttgggtttgggatagatgatgggtggattaatttgtttgttaactgcaaagtaacctcttcctgatgaaggatcaaacaagaagcctataataccggcagaccacagaaggcccaggtgctagccttatcgggttgccaagaagaaaggagaaggagaacaaaaaggcaggaggactcccttggcagagatccagagcaaaggcagctgttgcttctcatgaacactccaaagtttatcacagtcacctgttacc

SEQ ID NO: 902738 - DNA, 670 bp, Homo sapiens
  misc_feature 529: n = A,T,C or G
aaaaaatctgtgtctcatgggtctttcagctataatttactgctattttactggaaccctgttggtatggaggtaaagtgtattgttgtggggagtgagcatactctaatcttccaattaaawctcagcctttcagtgggcctgtgtctgacctgtgactttcacaaatgattcttcttgtgtaatttttcctcctccttttagatgaggcaagaaaactagatggggctagagtgagagaagtgcatttcttctacagctctggaacaagtctctgaaaaatctttccccatgagaagtagacctttgttatagggaaggctctaggcaggcacttttcacaatacttactcttcccttccctctgccagagccataaggggaatctttctcagatcttcacgagaactcgctgggtttcctggagggaaaagtcataaaagtgtttgtggagtacgccctaaaactaatggctcccaggaaatattctcacatcaagtccatgtggcagccttcagaaatccatcanaatgcccatttaagtatttctatctgtttaaggcttcagtagcttctgttccaggaaagcaaattttgctgtggctctttagagttgcttgcctctctaggtttcagggtggtgttttgccccccaaatcagttttctgat

SEQ ID NO: 902739 - DNA, 619 bp, Homo sapiens
tatttccttgagcagtggtttgtagctctccttgaagaggttcttcacatcccttgttagctgtattcctaggtattttattctctttgtagtaattgtgaatgggagttcattcatgatttggttctctgcttgcatattgttggtgtaaaggaatgcttgtgatgtttgcacattgattttgtatcctgagacttgctgaagttgcttatcagttcaaggagtttttgggctgagaagatgcggttttctaaatataaaatcatgtcacctacaaaccaagacaacttgacttcctctcttcctatttgaatactgtttatttctttgtctttactggctctatttttctcttggatttcaatgatttagtctctttttgtggcatgtctcgtaatttttgtttgaaatttttattgaattatgaacactgtatttaaacattttagaaactttggatgatgtgttctgttgtcttatgcctgggagaagaataagtcccytgcctccgcctttatctccccctcctcttcttctctttttttctttttcttcttctggttttgaatctttaatgagaaaaacaaatataatattgatctcaagaacactgtgtgtt

SEQ ID NO: 902740 - DNA, 591 bp, Homo sapiens
tgggtcccaactctcctactctgttcttcatagccttttaacacccacctgtgacaaattgcaccaagctcagaaacccttccttgaaacctctaggatcccttgggagccctctacactaacagaaaccttyccctttcccagcccttggctagcacctgttgctctctttctcattaacgaggagcaggtggctgctgaggcactgagtttctcttcctgagaaaacctgagatataggaaatcccagggtgacaggtacagcttcagcctcaacctagcatttgccaccttctttcaatagttgagagagtgtgtgagttagggactgaattgtgtccgccaaaatttacatgttaaagttccaacccccagtacttcagaatatcactgtatttggagatatggtctttaaagagataattaagttaaaatgaggttattagggtaggctctaagccaatattactggcattatgaccttaccagaagagaaaatttggacacagagagataagaccatgtgaaggcacaggaacaagacagcaatctatgatgaaaggagagagcctcagaaaactaactttgctt

SEQ ID NO: 902741 - DNA, 530 bp, Homo sapiens
agcaatctatcattgaaataaaaaaaggtttcttcaaytttcttgccagaaggaatattgttaaactttcccatgcaatatgaaaaacggtttacatctaatttctgaaatcatatgaaactaataaaacttaaagaccttgttcatgcaaataaacccaatgatctccattcctgtaaagcatctgagtccagctaaaaccaatattgcttagctacagaaggtcacagcccaccagtagagtttcattcatgttccacaatctctctccatggccttcatgttctcatacactttggatgctggacttcatggccttttgtcagctgactctctagcattttcattcccacattctctggcactgctacatgaaacctactctccatcctggaactttgcacaacgttcctggcacccatcataactaatgcacttaatggcatggaaaatctgacttctttatccttctccactaaatgtctgcccaggatccacttcctctatgaaattattctcaaagagtttga

SEQ ID NO: 902742 - DNA, 603 bp, Homo sapiens
tatactctggatttcaagcatgtgtccacacacttcacttctacacccttgcttgtcctggcagcaaagtagcaccagggatgccagcaggctggggcatgtctgtgccactctcaggcagtgggaagcattctgctcacccccctcccattgtccaatacacacacacacacacacacacacacacacacacattctggggatgctctgaggctgtcttggactcatctgcccagccgcagctcagcagaccctctgaccgtcctgagcatttcctcctctgtcctcctgctcaacctggaggagacctggaaaggggacttcttcttcttctccatcccctcaagaatgagatgtggtcccttctccaccccctgggaaatgagacaaggaggtgaagtcctctgcttcctgcctccaggtaatgacaagaggagaaaagagcctgggagggctccattcctttcccagcaagaaaggtgacgagggacaacagcaggagcayggaggaaatcatgtcttattaaccaagtgtactccaaattccagtaaaattcccagatataattaaggtgtttcctgcagtttaaatgacaagttagg

SEQ ID NO: 902743 - DNA, 619 bp, Homo sapiens
caatgtttataatagtgtttcaagttgttatagatgtaagcagtgttattttctgtatttattgagattttaatcactggaaaattttaattagtaggatttttaaacagatgtactgttttgggtttctcctgttaatactattttgatattttaaacaatattgacaaaaatgtgatcttgcttcaaattgttttatggtacacattcccaaacacactaatctttgaacatgtaaacatttgaatgtttgtatcttaattattttgtgtagtgaccttctcattttaagcccaatgcttgtttcattccatggcagtcatcttcattttgaacatcaggtatatattcattggcatcgtatagaaattggagtgtactgaccatctgttattaacctaagtggctaattttagagtacttaatcattacatggatttccagctctaaaaggtaaggattatatttttttgttctctgtagctttgraagtgccttgataatagttactcaaatgtttttaagtgctatctactaacttatttttacaggttattagccattaaatagtgttatttaaaattaaaatttatttgaaacactgttacattttgatatt

SEQ ID NO: 902744 - DNA, 635 bp, Homo sapiens
aatgtgggaaagcttggaacttcctagagacttgttgaatggctttgaccaaaagcctgatagtgatatgaacaataaggtccaggctgaggtagtctcagatggagatgaggaacctgctggaaactggagcaaaggcgactcttgttatgttttagcaaagagactggtggcattttgcccctgctcctgtggaactttgaacttgagagagatgagttaggttacctggtggaagaaatttctaagcagccaagcattcaacagatgacttgggtgctgttaaaggcatttagatttatacaggaagccgaacctaaaagttcagaaaacttgaacccagacaatgtgatagaaaagaaaaacccattttctgaggggaaattcatgctggctgcagaaatttgcataagtaatgaggagtggaatggcaatgttaatccccaggactatgggggaaaatggctccagggcatggcagaggtcttcacagcaaccccttcaatcacaggcctggaggcctaggagaaaatggttwccttggccaggcctagggttcccatgctgtgtgcagtctagggacttggtgccctgtgttccagccactccggccgtgactaaaaggggccaaggta

SEQ ID NO: 902745 - DNA, 646 bp, Homo sapiens
gaagccccaagccttggaagtttccatgtggtgttgagcctgcgggtgcacagaagtcaagaattgagatttgggaacctctgcctagatttcaaaaattgtatggaaatgcctggatgcccaggcwaaagtttgctgcaagggtggaaacctcatggagaacctctgctagggtagtgctgaagggaaacgtggggttggacccccacacagggtccctactggggcaccacttagtggacctgtgagaagagggccatcatcctccagaccccagaacggtagatccacttagagcttgcaccatgcacctggaaaagcttcaggcactcaacaccagcctgtgaaagcagccaggattggggctatatcctgcaaagccacaggggcagagctgcccaagaccatgggaacccacctcttgcatcagcatgacctggatgtgagacatggagtcaaaggagatcattatggagctttaaggtttgactgccctgctggattttgaacttgtgtggggcctgtagctcctttgttttggccaatgtctcccatttgcaatggctgtatttatccaatgcccataacccccttgtatctaggaagtaactaacttgcttttgattttacaggctcataggtggga

SEQ ID NO: 902746 - DNA, 604 bp, Homo sapiens
ccttaggcctgaaatactgtctggaatccctactttctcttttctattgctcaaaacactgtatcttgagaaactctcaagtcaccctaatcagaagtagaaatccaataaagaatctagtttagtttttaaaatgcatatgctcttcactaagagtaattctattataaaataaaagatgcaccacagtaaaataataccaatggctttacttgtaacaagttcttttagtcattaatgtttacaacttacagcctaacagcatgccaaaaatcattgccatagagtgagggaaagaagggtggagaggaagagaagtgggaagaaagaagaaaggaaaaagagaggaagaaaaagagagagaaataagtaaaaggaaaagaagaaaagagaaaaaatctctgcataacttcagcatcctcatcagatgaaacaacagcccaattctgcaggcatctctcaaaatatttcactgtggcacacwgagattcctccatgggaaggaactaagtcgcagaggcagtaaaactcagctaccttaaaataaatttattaaagcatttatatatttatccatgggaaagaaaaagtctaaatcagctac

SEQ ID NO: 902747 - DNA, 604 bp, Homo sapiens
aaccaagaaggacaatgaaaagaaattccacattcagttatggcattgatcacatgaaatgattgtttactcttaggragtaaaaatagattggagagagaagggaggcaagtttttaaatcttgtttaattttatcagtacacattgaattacaaaatatttgcagtactttatttttacagtaattttaaaaggaaaaatagcagagaaactttgcaaatagttttcttcactagtaaaaataaagtgtcttttatagttattaagctttctatgttatgatattcttctcatttatatttctaagattatctttcatataaatcttataccctttggaatgtttattatttcctagattgggccagaaagtggacttgatttttatctttccctctaaatcttttggtcttttttttttcttcatgacctgccttctactcagtgtttctttgattagatgtagaattgctgactggaaggtattgctcatgactttcttgttctttctttctgattaaggactaatttaaaaaaattaggcttcatcaaaagagcaaccttattcaaaacagaagaacataggcaatcagcaaagctgtt

SEQ ID NO: 902748 - DNA, 629 bp, Homo sapiens
ataatgtgtaagtaacagaagtttacaatgasaaaacatggaaccacagacatgaaagaacctaaaggaaataatagataattgcatccatactttgagaagctccaaaatccaatctatggcaaataattgtgatattcacatctgtagtttttaaattcacttttgtagagcatagttacctaaatgcttttatggaagtaatgtatggagaattcaggccatgaaatttattaaaatgaatttgagtggttaagttttaaaaagcagagcatctaattcttgcaaacatggatttcatgtacgtgctgaacccccaaactctttcattcagagttactttgtgactagtcctacctcttttatagatatgaactgtattcgtgaaattgtctgtgcaatacttggacaggagaaatggaaataatgtccgttgtgctgttggaaactgctgatcctgatcctactgagtaaggtgtcatgcactagtaacccgacctttaacctgaacttgcctttggggaattttgagaagcactaaatcaattgatatggtcattgcaattgaaggacttgtcaaattttttccagttttcaaagggggtaattggaatctaaaatggcctgta

SEQ ID NO: 902749 - DNA, 644 bp, Homo sapiens
caataagaaataaaataagtagcctccaggcattcccttggccagaggagcaattgttttttaaatagccctttggtgccatgtctattactaaaccatatgactcattttttaatattactgcatktgagttaacacagtcttcccaaattaaagttttagatggggcctcaaaatttttagggcatggttttccccaggtttatattgaaagtgtggggtatctcccattactccccctttcatttttcttaaaggagaaagggagatgctggagaccaaatgtcccggttcctctgtagctgatctctccggaagataagcagcccagatttgggtttctagatggatacaaccaggtgcatgtctgaggcacagaggggggtatctgtaacccatagtaacattaaatgcagggccttcttctcctggtttagcagggcaacagtcatctgtagctccaggaatccacacactgtcattagtgtagatttctgcaggagcatccagccaggtgagaggtcgaataagtggaggaaaaggcacataagcccaataagaataattttgtggagcaggtaaatcagtgtgagaggaaactggtgagacagaaagtataaggataaataaaacccattgtaagc

SEQ ID NO: 902750 - DNA, 622 bp, Homo sapiens
tggattctcaattaatgttgattgatacatctttataaaaatttacatttattatgtcagctgagtaatactgcagccatgcagttagatattattcttaagttttaaatattataaactgaagtttggctttgaggactcaaaccaggttagagcgagggctaggtccagagctaggtctcaaatttaagttctgttacttaagggcaaatgctctttttgctgattcatggataaaaatgttcttagatctgtggcattcatcatcagaggcagtgttcacattttccacatttgttggagaccctgggcagctccgaaatggtgttctcactacctgaatggtagtgaatgatgcttcctaactgaaggggaaaggattgatctggtgatcgttttcatattaggccccattattgaccaatactcaaccagcccgattcaagtgctgttataaatacatacagcacaatgagtttcattaaaagactcttgatgctccttacaggggcctgatactgaatcccaggcaattatcaaaacttgacttcttttagaatcacagaaggtcaaagttggcagggyccttagagctaatccgtgccaccatccttgagccctc

SEQ ID NO: 902751 - DNA, 599 bp, Homo sapiens
aaattagggtggggagaaaaaaagaccctgtcctccaaataatggggactcctgctctgatcactgattactggctatgatcacagaagtatagatgaagaggtgaaggccatttttgttatgcctctccctcatggttgcaagcccctccccttctagctggagtgaattccaggggatttaagggactggtgtcttttttttacctcctttcatttatctccttttcaccttatggaaaccagacattgaagactagtgcatccaaaagctgctacatgtagagaggaaattaggaagtcactgcacgtgtccaggcaaaggcacaggctcaggctcagaaaaacccaagaaaaccttaagtgtatagctcaggctgatctgcacagagagagcctacaacaatttaaacaacaacaacaacaaaaaacagtaagtcttagagaaggaagagactctgatttccggaaatacaacactgttagattcaaaygtccagttttcggcaaaaaaagaaatcacaagtcatacgtagaaacaggaaagtatggcacattccaagcaaaagaatgaatcaacagaaattgtgcctgaaaaac

SEQ ID NO: 902752 - DNA, 582 bp, Homo sapiens
atgtgaaaatgaagcaaaaccttgactgaatgctatttccagaatgagtgaattgttttgtgaataagaaacaataataatacctgggatctctcagctagtttgacattttctggcagagctactggaattctctgctgttgagagttcattttctcctccatagactttttcataatttttgtttctgaaatatactctacatcagagtctgtctcttctatgtttcttttctgtcctctacggctcgctgaaagctcaaaggatgaaagagattcatgcttcaagtcatcgcccaaaagcctgattttctgggttttggtattttccttaaataacaaagaacatgtttttattttttggtagatagcctatttataattaatcaccacttctctcataacctcattataataggtatttcttattactactaaaaagtttttaaatcagaagcttagaaacaactttaataatgtataatgccacaatggctcattaagaatttgattcataaatagctscaaagttgtgctgggtcaagaaatctgattttgaggaataaaaagcccagcaattgag

SEQ ID NO: 902753 - DNA, 604 bp, Homo sapiens
ccaagggaaatggaagtacacagaaatctattaatccattactcagaaaaaaaaacactaacctgcctcttcagttcttactttttctgagggtaaacttggttctccacctccaattttgttactggctacaacccgaaattcatattccacccatgggtttaactcaactacagtggctgtgtgcgtcttcccatcgatgacctcaggcactacaaaggaatatttcagaggtaagagtctgcctgctttagcattgacttgaaatccatttatatgtgtgcagatgacatctgcctctcctgctttacctgttgtgacggtttgccaacccacggagaaaggtgtccgagcctggatagaataggatataactgggctatggttgtctttaccttctttccaagagagttgggctgttgtgtctgtaatttcatctaccttcacattttctggtggtccaggtgaacctaaggaaggcacaaatggaaacattgagtagcagttccayaaatgtcatcctctcctatcaaagagaagagaatgtcacatgaccacttcaatatctctgacttttcccaatttcagaagcacttagggaaaa

SEQ ID NO: 902754 - DNA, 595 bp, Homo sapiens
gaggacatctaggatgcgggtcatcttctgtttctgttttcagtgctggtcacttgaatgtgctcattttgtgaaaatgaattgggctatcctcttatgacttgttcatttcttggtagaatgcaatgcttaccaaaatgcagttatgattatgcacaactatacccctaaatgctcagctttcaatagggtcatagatgggagaagtcaagtaacatgactgtaattccaaactccaacttctttcatgggaattaaacatttaataatagtaattaaattaaaatgttattagcatatcttaacatttcttatcaagatgcaattgagtattcccaggcatttaagaaaaaaaaggtaaaagaaactccaaaaggaagtttcacttatgtcaaactaattctttcccccatcaatttgtcattgttagagaatatagttagtcatgaattaaatgtgataaaggatgtgagagagaaatgtccaaaaaaaaaaaaaaaaraaactcggtaaaattagttgaaatgggatgaaatagtcctagatggattatttaccatatttataaataaacttgcatctaatatttagaaat

SEQ ID NO: 902755 - DNA, 612 bp, Homo sapiens
aggccaagtccatgaatacaactctgrccattttgctcctgagcctgtgctcttaaccacttgattttgctactggatgttaaaaactctatgtttgggagtgtggatattgcagtgagtgaagcagacaagatgtctgccttcatcaaaatagataacaatacaaaatgtaactaagtgcagaattattgctgtagcaataagttttcaaaaaggcagtaattcgatttttatagtatggtaatggatggcttcacaatgaaagtagtggataaaaaagtagtggataagttttttccctaaccacttatgacatatttaataagcagaattttaaggcaaaacttgcagacagaaaagtaaccatgataattaaaggatggaagagtaagggtagttaagtttagttggcatgattggtaaatagacaatgctttttctcatgtcaaggtctataaattaggactgtattagttcatgccttagcctctaataaaattaagctgggttattcttctagctaaatctagaagtagaagacatctggttatggcagttttaaatgcaagcctaaaatgtttgtatttgtcctgaaaacaataggaagtcaca

SEQ ID NO: 902756 - DNA, 609 bp, Homo sapiens
caaaaactaggactaaacaagagaaaacatttaatacttctcagagataatcaggaatattaactaaattttacatacttttttcctatcaaacagattctaacagagkatttattatagctgcttgacaaaggaaaaagtctcaagttatatgaagctccattagcatctgtaaattgaggaaatcagagtagattatctacaattccttttaacccttatatcctataacataaataaaacaataatggaaacaagcaggaatagtaagtgaatgtgaaattaaattccagttagtggatatgactagccattgagattgaagtgaaaaaaaaaaaggctttaaaattgtgactaataggaatcaatccaagtagatgggcatttggagagataccatgttctctttaactctgtgcctcaaagccaactgcagtgatgagaaagttgctcaataaatgttgaatgaaaaatgacacagaagacaattgatggagaagatatcctatttttattttgttttatgagtatttcttccaaaatttcatagtagtttaatagagaaggcagtaaaatggtttagataaataagaaaatagaataagatgt

SEQ ID NO: 902757 - DNA, 324 bp, Homo sapiens
acagacccacagtcctaagagaacatggttttgtgggccgcacccaggttccccataacatgtgcagcctagtgacttgttgccctgcatgccagccattccagccctrtctgaaaggggccaaagagcctgggccatggcttctgagggtgcaatccccaagaattggcaccttccatgtggcattgagcctgcgagtgcagagaactcaagaattgaggtttgggaacctccagctagatttcagatgtatggaaatgcttggatgtccaggcagaaatttgctgcagggattggggtctcatggagaacctctgctagggc

SEQ ID NO: 902758 - DNA, 617 bp, Homo sapiens
agctaatcaagttttcagaaagttgtagaatgttttcttagctagacagagacaagtaattgccctgcgtgtctaagcatttggtcctcctttaaaccaacactacttacatatacaagatttttttccaacgttttttagctaggtggggagaaaataagtttctattaataaaaagtttgtgcttcttaatattcaaaactagaactgatatcaatgttataaaacattttcacttgaactgtgccttcagattttaattactatattattcacgatggaatagtttgcatcactcacatccaataaaagtaaaaatgagtataatttaaaagttcaggtctaaataactacaatttctccttttggctgacattctgggcagcaaatcttacctcacgtttctgcattcctgttttcagttcagtgttcttttgtatttgctttcgacccatgactgaagttgtcacattgatgctgccaattctctgtgcctttgtaagtgagaaaaacytttccttctcctcatatggggaaagtaataagtcatttacaaaggcctgtttgtaattgtggcctttagcgtctgtggactgcgttttaggtgcattatgaga

SEQ ID NO: 902759 - DNA, 578 bp, Homo sapiens
tcaagagattgagaccatcatgggcaacatggtgaaacactgtctctactgaaaatacaaaaattagctgaatgtggtggcgtgcacctacagtcccagctactcgggaagctaaggcagaagaatcacttgaacccaggaggcagagattgcagtgagccgaaatcatgcaactgcactctagcctggcaacagagcaagactccatcttaaaaaaaaaaaaaaaaaaaaaaagtttacaggaactgctaactgctaactagaataaccagtttagaaaggaacataaatgacctgatggagctgaaaaacacaacacaagaatttcatgaaccatacacaagtatcaatagctgaatcaatcaagcagaagaaaggatatcagagattgaagatcaacttaatgaaataaggcatgaagacaagtttagagaaaaaaagaatgaaaaggaatggacaaagcctccaagatatgtgggactatgtgaaaagactaaacctacaattgattggtgtgcctgaacgtgatggggggaatgsaaccaagttggaagaaacatttcaggatattatccagg

SEQ ID NO: 902760 - DNA, 631 bp, Homo sapiens
atcagaagcactttgctttcagcytttgtgtctgctgtgagttaaaaacatccattaaactcttcagttgcctattcggttcagatgcctattggccctgcccataaataccacttattcagttggtgggaagccccaggcaactagtaatacctaatgagcaaaaatatttgttttgtttttttggaaatactctcttgctacacatgccacaaccttggaataaatcctggaattttttttttttttttttttttttgatgtgtgtttgctgggtggttttgtttctggtttgttttacaaaacagacatatcactttgttgtctgtcaacacatgacatcttttcttctgaagaatttccaagtgcattctttttcttcagaacatttcagtaggaaattgaggaggaaatttgccagttttcttggtaatgaatgattatctatttggcagaaggctgtaaggtggggcatagttgctccaatcagtgctatcagattggggatttatcaagtggtcagcatattaatgggtctaaccatactttgtttccttccttaggcctagcaagtgctttcactttgcatttcatcattacattttccagtgaaatagctgtatccttatac

SEQ ID NO: 902761 - DNA, 597 bp, Homo sapiens
gtcacagctgaggtagtgccaggaatttggtgtgggggacaggaggagacaagcaaagactatttaaaaacaatgaattttagcctgtctataagtactcttttctatgaaaacataaaaggaaatttcccttacaaatgttgattgataaacatgaacgtctatatggaaaataatgcgatatctgagctaaaaggactcttagtgaactctgatccaatctccttgatttgaggatagggaaaagtgtaatccctaaaagattaaatgatatttccaaagaaacaacaagttggtaattaagtccggcctgaaatctggggcttctgcttcccaggttatgagctttctaacactccaagaactgtgaaccctggagggaaggttgtaatctgactttaactcctgaggacatgtggatatgcccttcagggtccagggacatttgggttgcacattaacagttaaaatatgmtaaagcaccgcattttctccaactccattcaatgcctaaggtttattgtttgttcagttttagccaactatatttcctgagtgtttcaaaaggcagcaaggtggcgaggatacaagggaaag

SEQ ID NO: 902762 - DNA, 510 bp, Homo sapiens
taagagttcaaacctaggccgggcacggtggctcacacctgtaatcccagcactttaggaggccaaggtgggcagatcacgaggtcaggagatcgagaccatcctggctaacatggtgaaaccccgtctctaaaaataaaaatacaaaaattagccagccgtggtggcgggcgcctgtggtcccagctactcaggaggctgaggcaggagaatggcgtgaacccgggaggcagagcttgcagtgagctgagatcgcaccactgcactcccgcctgggcgacagagcaagactccatctcaaaaaaaaaaaaaaaaaagagttcaaacctgcccttcctggtgcctgccctaaggatttcagacttgccaagccagcctccacaaycgtgtatgccgtttccttgcagtacatctcttgtgatctatctggttctattttttctggttgaatcctgacttacacaagatatcacacttattttgaataaacgtcttaaagataactcatgc

SEQ ID NO: 902763 - DNA, 641 bp, Homo sapiens
atgtgagaattagtttttactttataaatattctgtattgttgttttatcattttttattccaaaatacttctttaaataggaaaaagaataagtacgaaaaatatttgacttctaattaagaataaaaaactgtctcatagtcttgtcaaactgctttaaaattcttccacctaactttttctctttttccttcactcaggatcaaactctcattaatccgacagttcttccagctttgtctgattacttccctattttctcttactcaagtattctcattaacaaaatctttgcacattttattttgtcttgatatctacttatcagaggatctagtctaacaatctaacttttggggtctacattctcagaaccactaggtataagaatcatatgttaatctatcacagaaatattccaaaagtggtaagatgcccattgggaatataaaaattgtaggtatataaagtatgcattcattaaaacattagccgtcttctatgactatcaatcacttgattctcctggagaatgcagagatctctactgaacactcmtccaggccagaaaaagtgcccttcctgcttcttccacacattaagacctagttatttaaaaaatatttttattttacaattg

SEQ ID NO: 902764 - DNA, 627 bp, Homo sapiens
cctgaaatatattttccaagttgcttgctttcttcccatctttttcagcgatgccaatgaatcataggtgtggtctctttacatartcccatatttctcagaagtttttttccttcctttttgttttgtgtctgactcatttagttctgagaccagtcttcaagacctgagatttctccttagtgtagtctattctgctgttattacttgtggttgcattatgcaattcttgcagtgtgttattctgctcacatctgtttggttcttttttataatgtccattttctctatcagcttcaatgtcattttactgtaatccttagattccttggattgggtttccaattgctcctgaatctcagtgatctttgttcctatctgtattatgagttctatttctgtaatttccatcattttagcctgtttaatcactcttgctggggaatagtatggtcatatgggaaaaagaagacactctggctttttgagttgccagagttcttgcactagttctttctcatctgttgttctattacttgtggcataatttgagtgcagtcagtaaacttcttttctgaatgttttcagaggaccagaactttgtgcagggtatttgtttgtagctga

SEQ ID NO: 902765 - DNA, 593 bp, Homo sapiens
gtttcacaggcctcactggtgatacctccaagtactagaaaaattgaggcaactagagtctggagtagamccccaagaaactgcagcattcctacagaagagtggacagaatgttaaaagaaaaagaaacaggctgggtgcagtggcttatgcctgtaattccagctttttgggaggccaaggctggtggatcacaaagtcaagagatcaagaccatcctagccaacgtggtgaaaccccgtctctactaaaaatacaaaaaattagctgggcatggtggaatgcacctgtattcccagctactcgggaagctgaggtaggagaatcacttgaacccaggaggcagaggttgcagtgagctgaaatcacacgaccacactccagcctggtgacagagcgagactccatcaaaaaaaaaaaaaaaaaaaaagaaacaaacaaacagaaaacaacaacaaccaaaaaataacacaaaaactccatccaaaggttatcaatcttgaaaacagaaggtagataagcacacaaagatgagaaaaaaatcagttcaaaaacactgaaaactcaaaaatccagagtgcccactttcctcc

SEQ ID NO: 902766 - DNA, 578 bp, Homo sapiens
aatttgtctgactaaactatgtttgctgtaaataaaaatatagtgttgaaaggaattattaattattgagagattaaagaaattgcgaattacttggtgtacatagaatctccaggctggatatttatggcgccttaattttagtctcagccagtcatatttcattatactataatgctaccaccatattttattgcccccaaacctcaattttaatgcatatcatataattaatcttataattaaaaagttatattccaccaatccttgctgtaccaaaaattatttccagttcctcctttctcctacatcatacttccctggtgaaattctcataatgacttgatttgtccaatagtatttacaacattattatatgactaggatgactcttaggtaattacctagctctttgatctagaacattacatatatacacacacacacacacacatatataygtatatatatgtgtatatacgtatatatgtgtatatatgtatgtatatgtgtatatatgtatatatgtgtatatatatgtatgtatatatgtagtgttctagatcaaatatcgaata

SEQ ID NO: 902767 - DNA, 643 bp, Homo sapiens
ttttgcaattgtgaattgtgctgctatgaacattcatgtgcaagtgcccttttcatatagtgacttcttttcctactgtgtagatacccagtagtgggattgctgaatcaaatggtaatagatcgcccgatmattaaaatgaatatatgatcattttgaatgatgctgaaaaagcatttgataaaattcaacattccttcataaaaacaccctcaaaaaactgggtttggaagcaacatacctcaacataataaataaaagccaaacatgacagacccatagctaatatcatactgaatggggaaaaactgaaatcctttcttctaagatctggaacatgacaaggatgcccactttctccattgttattcaatatagtacaggaattcctagctagagcaatcaaacaagagggaaaaaagtaaagggcatcccaattgaaatggaagaagataaattatccttatttgcagatgatatgagcttatatttggggaaatgtaaagactccccctaaaaactgctagaactgataaattcaataaagtagtagaatagaatatcaacatacaaaaattagtagcatttctatatgacaagagtgaacaatctgaaaaaaaatcaaaaaagtaatgtcatttac

SEQ ID NO: 902768 - DNA, 679 bp, Homo sapiens
ctgtgaccaaagcttttcctcttattaatcattgtctccactgctctgcccatctaaagtctcccttcaaggtctagccggacacttgtgtctctaaagccttccctgaatactccakccaaagtagtacatggtggcaaagaacaaccagccagtttctgataatatatctaataaatatgatatataaatacatatatgtacacacacatatatatatatacacatatgtaatatgcttttttaccttcaacatttttacatttggcagtttggtttcaagtatagtataatgttattgttagtagtataacagatatgcccccatcacaggtagagggtacacattaggtcgcattacttttattaatcaaatttaactcctaggagcccccattctgccaaacccaagaaagcattttgcttctttgacttcctgggtgataaattaatccaggatgtcagttcttgtgtttagtgccttctagaaagctggaaaatccactaaagcagaatctcttaagcttccatgtgcatgtaaagcctctgcagaccttattgaaatgcaggttctgatttggtgggaaggaggcccaagactccacatatctgatgacctccctggagatccctgcactgccactttgtacaccacattcagagcagcaaggcaagagga

SEQ ID NO: 902769 - DNA, 473 bp, Homo sapiens
tccagaatggtatttcctaggttattgtccagggtttttatagttttaggtgttacatttaaacctttaatccatcttgggttgatttttatatgtggtgtaaggaaggcgtccagtttcaatygtctgcagatggctagccagttatcccaggaacatttattgaataaggagtcctttccccattgctagttttttgttgattttgtctcaggtcagatggttatagatatgcagcattatttctcagctctctattctgttccactggtgtgtgtgtgtgtgtgtgtgtgtgtgtgtgtttaccggtaccatgctgttttggttactgtagccttataatatagtttgaagtcaagtaatgtaatgtctccagctttgttctttttgcttaggattgccttggccattcagggtcttttttggtttcatctgaattttagaatatttttttctaattctgtgaagaatgt

SEQ ID NO: 902770 - DNA, 590 bp, Homo sapiens
cctgtaaacgtggtaaatgagggaatagaatttccagctttaatttttctgaataggattcaaaaatgaaattgtataaaaaggtatccagtgaaaaacacacacccatccccatctcccatccagttccctccgtaacccttttcttagtttcttatatgtcctttgcaaatacagtataagcaaaaaagaatgggcctttttcttttcttccttattttccacaaaatctatcaaaatgggtttttttttgttttgttttgtttgagacagggtctcactctgttgcccaggctggagtgcagtgacaccatcacggttcactgcagcctcgacctccccaggctcagttgatcctcccatctcagccttctgagttgctgggactacaagcatgcatcaccagacctggctaatttttctattttttgtagggacagggttttgctgtgttgcccaggctggtctcaatctcctggacacaagcaatctgcctgcctcagcctcataatgtwttctttaatgttaaaccccttcttgtgttgagaggcctggcttgtgtgtttgagcgcagctgcctacctttgcag

SEQ ID NO: 902771 - DNA, 552 bp, Homo sapiens
tgcagtggctattcacaggcacaatcatgcacctactatttttttaatcaacttttattttaagttccaggrttcatgtgcgggatttgcagatttgttacacagataaacatgtgccatggtagtttgctgcacagatcaacccatcaggtaggtattaagcccatcatccattagctattcttcctgatgctctccccccagtgcaccttctgacaggcctcagtgtgtgttgttccccaacatgtgaccatgtattctcattgtttagctctcacttataagtgagaacatgcggtgtttggttttctgttcctgcattagtttgcagaggataacggcttccagctccatccatgtccctgcagaggatatgatctcattcctttttatggctgcacagtattccatggtgtacatgtaccacattttctttatccagtctagtgttgatgggcatttgggttgattccataactttgctattgtgaatagtgctgcaattaacatacatgtgcatgtatctttataacagaatgatttatattcctt

SEQ ID NO: 902772 - DNA, 572 bp, Homo sapiens
caatggactaagacacctagcacgcccccacctccccatgggaatgagtcatatcactcctgaaggaccgctgtgagttcaggcatatagggcagaaagacagaggcrcacgctgccatttgcccataggttgttactgcaaagcagcccggggacagctggaggtggtatggaggctgggccaccttgtattggattgtccacagaccttcttgctttctaaatagatctgatttccacagcagaactcagcccctcttcctttattttttttctttttaatagatttttaaaaattaatacaagtacataattattataggtattcaaaagctacagagctatataggagaaagtcagaccccagaagtgcccacattccacaggtgaataggcagcacctcccagtcattctgtgtcccctaagaggctacaggtatggaaatgggggcccagaatggacccatcggcatctctctggaggaagctgatattgcacactcccttctctgaggctactggcccacgtggtgctaatccagctgcaactgtcagaaaatgatgctccctgg

SEQ ID NO: 902773 - DNA, 572 bp, Homo sapiens
caatggactaagacacctagcacgcccccacctccccatgggaatgagtcatatcactcctgaaggaccgctgtgagttcaggcatatagggcagaaagacagaggcgcacgctgccatttgcccataggttgttactgcaaagcagcccggggacagctggaggtggtatggaggctgggccaccttgtattggattgtccacagaccttcttgctttctaaatagatctgatttccacagcagaactcagcccctcttcctttattttttttctttttaatagatttttaaaaattaatacaagtacataattattataggtattcaaaagctacagagctatataggagaaagtcagaccccagaagtgcccacattccacaggtgaataggcagcacctcccagtcattctgtgtcccctaagaggctacaggtatggaaaygggggcccagaatggacccatcggcatctctctggaggaagctgatattgcacactcccttctctgaggctactggcccacgtggtgctaatccagctgcaactgtcagaaaatgatgctccctgg

SEQ ID NO: 902774 - DNA, 531 bp, Homo sapiens
ctttgctgaatgcatcatcaccatcatcactstcttcctcctctttatcctcaaggtatctggtaacagttctgaagaggcattagagttgatttattactttggggaagtgagatgtaaggtgcagtccccagaaaccttcagcttcttccatgggagtttctctttccacaggctcctttcaggacatgcctagtcagtagaggaggcctccatggtaaatgacgttaacattccacgaacttctgtctctcccattccccactgccccaagcaggatggttcacatcttgtcctgctgctgcccttgtcccttgtcccacagatggtcctgctcaaggcttacaccactcactgcccctcctcccagagtcctcccttcacacccatcatcactattcctggaaggtctctgcttcttcctgggctgctcagggccatgagaactggacatctggttgctgctgggaaaggacaaagcccatctttgacttgcacagtttgccaagctgtttgtgaaagaggacttta

SEQ ID NO: 902775 - DNA, 577 bp, Homo sapiens
ctgtctcctgatgagacacactgttctaccttggcactccccagttgtcctggatcarccccatcttgccacttcttttctgcctacagctgattttagcatgtcttgttgccttacttcccttgcctaattctcacactagtatctccattttgcttcggccttgactcctggtcttcccttcaattacaaggggattttgttcatgtcttcactcacccctaagcaatgacgattgatctatgaaaaataaagtgaagaggaggagggacgtgtgtaaagaggaaagcctttggtgtgacacattgtgtttttgagaagtattttctataaaattccttctttttccttgttgttctcacttcaggccatgaaatgtgatgcccaaggagcaaagtgtcttaaagttcctaactccactaacccacaagatccgatatcttgagagacctcagattatatgtcctctcttcttcctgctcttgattctatttttttcttttactgttagtaaactggtctctcaagattaaccatgagagcactctcctccatagaacatatttctgcattgacc

SEQ ID NO: 902776 - DNA, 577 bp, Homo sapiens
ctgtctcctgatgagacacactgttctaccttggcactccccagttgtcctggatcaaccccatcttgccacttcttttctgcctacagctgattttagcatgtcttgttgccttacttcccttgcctaattctcacactagtatctccattttgcttcggccttgactcctggtcttcccttcaattacaaggggattttgttcatgtcttcactcacccctaagcaatgacgattgatctatgaaaaataaagtgaagaggaggagggacgtgtgtaaagaggaaagcctttggtgtgacacattgtgtttttgagaagtattttctataaaattccttctttttccttgttgttctcacttcaggccatgaaatgtgatgcccaaggagcaaagtgtcttaaagttcctaactccactaacccacaagatccgatatcttgagaracctcagattatatgtcctctcttcttcctgctcttgattctatttttttcttttactgttagtaaactggtctctcaagattaaccatgagagcactctcctccatagaacatatttctgcattgacc

SEQ ID NO: 902777 - DNA, 617 bp, Homo sapiens
gtgatggtaaagtgacattttaaaaagtttggtttggttgaaacacaatttatctcaaaagaaagggttttactttgggaatgaatccaagtagtccaaaaggctcctatgctttcttagacaataaattttacagctttgactgagttaggtttttaaaaatcatcttcctgatcatgtaggtcaagtgccacagattcatggtgaacaaacgtaacagctgtgagtggtggaaaactgatattaatacatcggtaagaaggcaggattctattcagactattctagtttttacagtatggatagattaaatatacttcttgacttaacgttgacaggaaaagaagacaagcctctggtttttgaaacatgggtggcatcctttgaaagaaaggtcaatacaatctgagaagttacaaaaacgtgttgagtagagaaaggaagtgaaatgacaaatggaagtctctccccttatgccttctcctatcttcagaagagttmaaaaagcctacatcatctacatctgatttctccagggtctgaaaaacctgcaaatatggctgtactctacctaaacaccatggcaaaatctgtataaatcttactagccaaaacaa

SEQ ID NO: 902778 - DNA, 577 bp, Homo sapiens
ctggctggccatatgcagaaaactgaaactggaccccttccttacaccttacacaaaaattaactcaagatggattaaagacttaaatgtaagacataaaacaataaaaacccyagaagaaaacctaaccaatatcattcaggacataggcatgggcaaagacttcatgataaaaatgccaaaagcaattataacaaaagccaaaattgacaaatgggatctagttaaactaaagagctactgcacagcaaaagaaactctcatcagagtgaacagtcaacctacagaataggagaaaaattttgcaatctacccatctgacaaaggtctaatatccagaatctacaaggaaattaaattaatttacaagaaatatctaacaatcccatcaaaaagtgggcaaaggatatgaacagacactcgtcaaaagaagaccgtcacatggccaacaaacatgttaaaaaaagctcaacatcactgatcattagagaaatgcaaatcaaaaccacaatgagatactatctcacgccagtcagaatggccattgttaaaaagtcaagaaacaagatatgctgac

SEQ ID NO: 902779 - DNA, 639 bp, Homo sapiens
tctctctacctctgcccctggaatgagaagttcgtgccatacagaggcagcacctctattgtcaggaataaggcctcctgccactgcatgtgaatatgttctgtgartgagaaataaatgtagattatatgaagcccctgagctgttggggctacttctgcctaatttatacctggacaaatatatgaggtagcccatattgacgtcaaaataaaaaagtcacctgtgttaataattacaaattcaaccagttcataaagtgataattgataaaatagaagctccaagggcagtctttcttcacaaaattaaccactattatgtttcaaaaaaatattttatgcaggcacaaatatacatatatacacacattatatatgtttggaaaatacatattttttgagaaaggaaatacatatttcttaaaatttttatgaatccaaaactccacacaccttggcattgtgctttttaaaataatcatgtatcttggctatatagttatatgtcattttttaaaaatgcattgcatagataaaacctagttaaccaagtagttgtgggagttttaggagaggagagcaatcatctttaataaaacctggtaaaataggtctttgggtgtagattttacttagt

SEQ ID NO: 902780 - DNA, 582 bp, Homo sapiens
cctctcctatagcccatccctcaatacacacacacacacacacacacacacacacacacayacacacacacacacacacacacacttccttcttcacatcttccacagcaacaagataagcaagtccaaaactctgccttggccccaagtatctaaacctagcacaaaataagtggacccagcctacggcatgttttacttagccactcatttggtgacagtacatgccatatgtatgtgtatataaactttaggatgatctgctacgatccctggctcctgatgattacagctttgtaaatctgtttcccttgagtgtgggtaggaactgagacttccttgtaactaattaaataatgcaaaggcactggaatgtcactccatgaccacattaggtttataagaccatctcactagctgactgactagaactatcttcttgggtggctttgaagaaacaggcagtcaggttggaagacctatgtgacaataacctgggggaagtggggctctaggaacagagggcagcctccaggcaccagccagcaaaaatccagggctctcagccataccacaaaaagg

SEQ ID NO: 902781 - DNA, 575 bp, Homo sapiens
ccacgtctggctagtttttgtattgttagtagasatggggtttcaccatgttggccaagctggtctcaaactcctgacctcaaatgattcacttgccttggcctaccaaaatgctgggattacaggtgtgagccaccgtgcccagtcaagatcccgtaattcttgagcattcctgaaacctagggaaagatggaaagtgcttgcaggcaaggcccatggaagacagaaaaatcatttatagactgcagtctctaaagacacaggagtgttttaccacatgctgatatcacgcagggttggtctggggaagggattctgaagccaggggaggtagttttggccactgaagtcctggctcaatggaatcacttcttccctctcagcctgacaaagcaaagtgggctagtcccatcttccttacctccaaaaccagtacagcattaagaaattcctaatctaccgtgatgtgtgagggtcaaaaaagtgggcctagaggtgaaaaatggatcatagacaaaatattagacatccttcaccctttgtcaaaattaaaaacttttattcatcaaagggca

SEQ ID NO: 902782 - DNA, 567 bp, Homo sapiens
cataaaataatgctaacatttctaaatttaatccaacaccgaagggttgtttttgtccttctcctttcacatttatatcttctttaaaagaacawattttaataaaattgatcctatgtctactgagtttacctggagagcaagcataagtcattcacctcctattttgaaactacttgaattgagatgctttctcatatcccaggtagcttctccttcttttaggtctatgtctattttgtctattagtctatttataatagactatctaaccaaatatatcatttatcagggaagatacctagccagtttttatgaaaagcaatttgaaagctactgtaacaactgtgatggcagcagcagactgcctggagcacccactgccatgatgccagccactgcagggagagcacagggagaaggtgggtagcccacctctgtagcccaccaccctgagggctgccaggatggggctggcctgtgacacctgctggtgggggagtagtgcagttaaacagaggggggtcctgaggcaaagctggacctggggcagtgccgcacttgcac

SEQ ID NO: 902783 - DNA, 628 bp, Homo sapiens
ttgtggggctaagtgaactgttgtgaacgagtacggctcatctccatggtactgacctcaaaagttgagagaagtastaccatttcacctttagttttacttaattgttgccataagcctactggagaaaatttaggtaacatttttaacttcattcttcttcttattttttttaattatactttaagttttagggtacatgtgcacaccgtgcaggtttgttaaatatgcatacatgtgccatgttggtgtgccgcacccattaactcatcatttaacatgaggtatatctcctaatgctatccctccccactccccccaccccacaacaggccccagtgtgtgatgttccccttcctgtgtccatgtgttctcattgttcaattcccacctatgagtgagaatatgcggtgtttggtttttttgtccttgcgatagtttgctgagaatgatggtttccagcttcatccatgtccctacaaaggacatgaactcatccttttttatggctgcacagtattccatggtgtatatgtaccacattttcttaatccagtctatcgttgttggacatttggcttggttccaagtctttgctattgggaatagtgccacaataaacatacat

SEQ ID NO: 902784 - DNA, 584 bp, Homo sapiens
cccttgccccaggagcagcccacatctaatggtattggaagagagaagaggataagccctcttaccactaagtggaataatgaagggccatctcagctccttcgctctggtggggttggctgaggcctctgttgctgcttcatcacagctcaatttctcccccagcccaatcctgcttccctcattcttacacagttgttgctgctgagcacacacaccaataaattttttgcatgcaaattttggtttcaggatttgtctccctgcaaactcaacctgaagcaccatctaagacagattggtggtcatctaaagatgaactgaattctctgggagcctcaatggaactcaagtgacagcattataaaaagatggaagtgtgctttctatgttcatttaaaagccagagagaaatcagaaaatgtagtccatgcagaatctagaaagttcctggcacattgtaggtgttcagtagatatttgcggagtgactgaattaaacatctgttcaccatatcagtgggttaaaggataractaaggttaagccagagagccctagccaatggctttttactttcctcca

SEQ ID NO: 902785 - DNA, 664 bp, Homo sapiens
attttcatttaatgaatcaagatgcctttagctcaggtaacaaaaaccatggttcaaaccrtcttaaacaaaagacaaatttattctctctctcttcttatctctctctctctctcacacacacacacacacacacacacaaacacacatacagtcccgaattcagctaagatgggcttcagatgtgctgtatcaggactcttgctctatttctctgcaattcttgtggctcagcccttgttccactataaaaaatggctacagaaacttaaagcatcatatacagttaactttatatccagagaagaaagaggatttttgtttcaggagaagaaaactttcccagccacatgtaatatacttcttaacatcccacagtccagaatctaggccctccccaccccatttttaaactaatcaccggcaagtggaacaggcggcttttggtttagactcctcatcattttacatgtgatacattctagttttaggagaaaaaaaagcataaaaattgaaattgaaggttgattctaagaatgctatgattttgtctggggagtagtaacattctgtactattcctgttgttcataccacaattatttcatccattcatccagccaccaaaccatctctccattcatccaagaagtatttattgagtg

SEQ ID NO: 902786 - DNA, 627 bp, Homo sapiens
agaatctgttgctctgcaaagccaatggacctttctcatcattgtcttctcttggctgattggtacaatgatagaggtctctcctgggtcagttttaatccatgacagatgagaaatggwcatttcttgtgcaaatgggactgctctttttgctctgcccttgggctctcacatcttctccccaagagcggcagtgaatggaaggcacaggtgggagccacatagaaagggatcacattctcagaatccatcattacaatttaacaagttaaagagaaaacatggctggttgttgcattgctctagtttatgctctaacattccagtctgtaaacttaacatgaatagcaaatgaattattgttctccattttttctgaatactctgcataaaacttgcatttgtagtcatcacaagtacatatgtggcacttaactcggcacaataataacctttgagtgtcattggaagccagtattcatggggtcacaatgaataatgcagcatcacgagtaatggtgtaaccagcaattaaataaatgatattaggaaactgcaaaatcaagataatctctgttgcttcaacacaaacaggttccagtgagccatggcattgtccgtaacatc

SEQ ID NO: 902787 - DNA, 629 bp, Homo sapiens
ttcttctcagcaccatatagcacttattctaacattgaccacataattggaagaaaaaacactcctcagmaaatacaaaagaatgaaaattaaaaaaaaaaagtctctcggaccacagcacaatcaaattagaactcaggattaagaaactcactcaaaatctcagaactacatggaagttgaacaacttgctcctgaatgactactgggtaaataactaaattaaggcagaaataacgaagttctttcaaaccaatgagaatgaagagacaacatagcagaatctctgggacacagctaaagcagtgttaagagggaaatttataccactaaatggccatatcagaaagctgaatagatctgaaattgacactcgaacatcgcaattaaaagaactagagaagtgtttagaatggcgatcattaaaaagtcaggaaacaacagatgctgccatggatgcagagaaataggaaggcttttacactgttggtgggagcgtaaattagttcgaccattgtgaaatacagtgtggcaattcctcaatgatctttaatcagaaatatcatttgacccagcaatcccattactgggtatatacccaaaggattatgaatatttctactgtaatg

SEQ ID NO: 902788 - DNA, 602 bp, Homo sapiens
taaaagattctgtagcagtagcaagttacaccatatctattattatacattttwttgtataatactttgctaagattttcccaagcatcagaaattatgtaactcctcaactttaaaggtaaggagactaagtccagaaactctgaacaaatttacacagctagaaaatgataaatttggattaatcacgtttttctaagtattgttctatttgccctgaaaatatatataaataattactaaattctggaaagagcttgtaggaattcaaagagagattaatgaggactagagaaattagaagaagcttttgaaagaaaagagagcttaactttgaaggaaataaaactattttattccaaaatatggctccctggtataatcagtattcttaattaaaactctttaaagatcaacaaaaatctttagagatcaacaagtggcagagacttcccctatccacataaagataggactgactcaccaatgagaacaattgtttttgttcctctccctgttatctcattatccattacaggagagaagaccaaaaatgtaaccacattgtaacagaccttttttcaagataataactgtttcca

SEQ ID NO: 902789 - DNA, 595 bp, Homo sapiens
aatatggccactaaattaataagtgaccagaaagtaaatgaagttaaacaacttgtcccagtttctagatagaaaggaggtatatttcatgttttggagggatgatgctcttacattcatatatcacttcccagtaataataaagaaattttctttccctttttaactctgacattattgagcaattatctactatttaccaaataccaccttaagtcttaaagatcagtgatgaacaagacaataccctgtcattttgaattaataccttagttggaggaaataaacaatatgcaagtaaacaaattaacaggacagtttcagaaagttgcaggaagttacacagaatacctgatagagaaggacggagtgcaagtaaatagggtgaaagagaaagggctctctgagagttgaattgtggaatgcagccagcagcagcagatctggagggaaaaccttccaggaagaagacatggcaagtgtgcagtccctgaagtaagaccaaacttggcaagtttaagaaccagaaggagggacasggttagtggagcatactcactgaggaagatggggatgtatgagggtctctaagagg

SEQ ID NO: 902790 - DNA, 521 bp, Homo sapiens
ttatttagtttttttaaatttattgagtcacgtgctaagcatttttcacatatgtgactaaaataatataccttcaattacaatttgtaaattataagtaaaggattttgcactgttaaaaaaagagtaagttactttcacagtaaaccctataatggaatgttaatttgtttctgcatgaattcaaagtcaagtacttttggacttcctcttccatctttgatggagcacttaaaatcagacccatgcacccctagttcttggggaaatagaaaaaaaaaaaattaaattttaaaataaaaattaaaaaacaggaaacaaagcaaggaggaagaggagcaacctaaggggcactgaagaattaatgaaaagacaggtcttgaggggacaaaatcttggagaagcaggacaacactcaggaagtcaaccagctgttcctttttccttcagggcattttcagactctttacccattgcaagaaaktgaacatccatgcaagatacttggtaagccggaattg

SEQ ID NO: 902791 - DNA, 677 bp, Homo sapiens
tattttaaggccattgttatgctgttttggttattaaagctttgaagtatattttgaaatcacatagtgtaackctgtcagatttatttttcttcgggttacttctgctttttagggtcttttgtagttccatatatattttaggatagtttttgttccatttctgtgaataaaggcattggtatttgatagggattgcattgaatctatagattgctttgggcagtattgatattttaataatattgactctttcactccatgtgcatggaatagctttctatttatttgtgtcctctttctttcgtgagagttttgtagatttcttttagatattttttcttcttacattgaatttattcctagtttctttatagttttgtaactgttgtaaatggtgttttcttaatttcttttacagattgtccccatggataaacacacacacacacacacacacacacacacacacacacacacacacatatttttaatgataatttgttatcctacaagtttactgaattcatttatcagttctaacaaattttttgttgagctgggttcgagccccacatatgggcaccacttgttcacagatgaacaagtatacattttaaaaatataagatgatgtcatctgtgaacaaggaaaatttgacttcctcttttccaaca

SEQ ID NO: 902792 - DNA, 620 bp, Homo sapiens
tactttaagttttagggtacatgtgcacaatgtgcaggttagttacatatgtacacatgtgacatgctggtgcgctgcacccaccaactcgtcatctagcattaggcatatctcccaatgctatccctccccgatcctcccaccccacaacagtccccagagtgtgatgttccccttcctgtgtccatgtgttctcattgttcaattcccacctatgagtgagaatatgcggtgtttggttttttgttcttgcaatagtttactgagaatgatgatttccaatttcatccatgtccctacaaaggacatgaactcatcattttttatggctgcatagtattccatgttgtatatgtgccacattttcttaatccagtctatcattgttggacatttgggttggttccaagtctttgctattgtgaatagtgccgcaataaacatatgtgtgcatgtgtctttatggcagcatgatttatagtcctttgggtatattattagtcattctacagctgtttgctatagaattatttgctataattatakaatttgctataattattctggaactgcactctgcttgtgcattaaaagatatgttttctgggtatctacttttg

SEQ ID NO: 902793 - DNA, 657 bp, Homo sapiens
aaacattcaaaccatagaattatcttaggtctcatattcgtataataaggataataatccatagtgttatttaaaggattgaatgagttgaaatatgaaagctctcagcacatactgaccattaractgtgattcatcattgtaacttttatcactatattaactttttattattttgtataaatatttcagtaaagtttccagagtgactgaagtttttttctattgttgttacagacatcttagtttttacattttaaatttatgagtgatgattatttttctaaagctattgctcacaaagaatgcaaattcacaaatagtattttgacaacagagctggagtaatatcataaaattaatgacaaccatgttttatataattacataaattctatatgacaactttgacttcatgttaaggaataattgcatagaatccgggcaaaattttaaaatgtaataaaataaaatttattaacaataaaagttattaataataaaagcattgcctaaaacaaatagatcaaccaggtaaaaagttcaaaaatatttgtctatgttaagctatagcatttcatagcatacaatggaaaattaaagaaataggaaaaagttaattgaatagattttcaaaaatgaaaacaatagtcatta

SEQ ID NO: 902794 - DNA, 677 bp, Homo sapiens
tttctataggtaaaaaataaagagtggctcaagtgtagggctctggctcaggatctttcatgaggttggctgacttcagtttcttttcatatggatctcatcataggctactctgagtgtcctcacaacaaagcaactgcttccccatagcaaattattcaggagagcaaatataaggatcttttataatctaatctcaaaagtgacatatcattaattctattatattctattagtcacacaatgcaaccctgttacaatatgggcatgaataccaaaagaaggggatcactgggggccatctgagagtctagctaccacaaatacagtagaaaatggagaggcctgacataacctggtgagtgcatgccctagtagactaattctatttcaacttgtagaacgctatatgagtgcaaaaagcaagtctgctggtctaattacaactgaaaggaagcattattttaaaaatgctgtatgtatgaagggaaaggtgtatataaagatgtttccatgaaagggaaaatgatatgcttttgggatacatattattctcaggttataacaagaagaagaaaaggaaaatgtctttttctatctttgaattaaaatgataagatcccttttttcagttartgttaatgggcaggtgttacaattgtctgttttcaagctgg

SEQ ID NO: 902795 - DNA, 564 bp, Homo sapiens
agaacttacctggttgggaacacttggcacaggtggycgcacacctggctgggagaattaagtgcagtgcacttgactccactggaagagggtggctggaagcttgagcctggtttctcctggattcctccctatgctccttttttacttggtgatttttcatctgtgttcttaaactgtaatgtactgtaagcatcagtacaaaggcctttccaagttgtgttgacatcctctaaaataataatcaaacctgtggtagcattgaggtacccatgaataaatggtgtgccatgtggacacagttctttccctaactctaataacatgggaattactaagtgtgtggaacaatgctcatgttaactcccagagagtcaccttccatcctgaaataaatctgctgtgatatccttgatcccatgctccttgtacaacctgtcatcctagtctcagggaacaaaatttttgtttctacacagcagggcagtaacaaggaatccaccttcaggaaaaataaaaggcagcaggtttagaagagatatttcaactatattaagagtgtat

SEQ ID NO: 902796 - DNA, 590 bp, Homo sapiens
gcagtttgtctgctaaaaaggacacttggctgaagtagtgagaagaggctgaaatgcagtttatgtcctgcatggggcagccagggtcacttttcctaaataataaaatgatgctatgtaggctaagagctgccctagatcttaaagcaaggttgccaaatgatacatgtcccaggcaggttcacagattcaagatgtgtgggctgagggaggagggtggtgtcacgaagagccatcagaagggagtagcagccactttctccagccgattggtcccagatggggcgtgtgcatatcactcagacagagcttctgatttcttaagtaaaattagaaacagagattgtttccattgcatgttagcaacaataaacacctaaaaaggtggtctaaatgaaacactaagggttagatctgacctgtgggccactgattagcaaactctgagctagagttatggatgaaattgggcacatagttactaagagtggaactataaaactcaccgagggatggaactcacagcattgcttgcctccaaagtcactgtrctctaaataactctgaactctgcatattttatggcattc

SEQ ID NO: 902797 - DNA, 599 bp, Homo sapiens
atctaattctcacaacaatacgtaatgtatgcttttactccactttacaaatgagaacatctaagcccaaagtcacatagctagaaaaactgcagagcaggacttaaacccagttctatctaaatacaaagaatgtgccctttaacacaatggtaaataagaaataaagttcactagaatatcacttaaatgaaactgttggcctttctctcctggacagataatgtaaacacagcagtcatgaccaatttcactcccaccttaagaagaaccatcagaaagtaggtaagtgataaagggaataaccaagtcaactctgaatctgctgtagttaatgagggaataaatgatttatctaactcattggttaaaagattatctgaaacaaaaggataaaagcattactatgaaacttaaaacatatgtaaaatagttggacattattttttatgaaagacaaagaataaaacagatatggatcatgaayattttcattttagtgataaggattgtatttaaatgtagtaaaatatacataaaatggaaacattttacaatttagagatatactatggattggcacatgtatgtacattggg

SEQ ID NO: 902798 - DNA, 539 bp, Homo sapiens
gagatttctgggagtgtctcggctttctgaatgcagttgcctttcatgagctcatgaaccttcttaagatattatgatcttttacccaggcaaggggaatttcctcagatatgattaaagagtgggcgggccatgtcctcagaagtcagaagacttaatattggaaacatgaactctcttggagccattcccaattttatttcagaggaattcccccttgcagaaccactcccacgatggaaggcagggatgaaggaagccttttgaaatgtatttattttttaatctgaaagttgaagagtttcccctccccccaccatggaaactactaaattaagagtctgggtaaacagtttgaagtctcctttttaggatgggtaaagtaaacaagtaaagagtactcaaaaattctcattaaaggtacacaaccatcctgagttattatttccaagggaacrttacctcagtcgtggatggaagcctcatgggtgacgagagatcagggcttttacttaaagaacgaggcagctttcattaag

SEQ ID NO: 902799 - DNA, 679 bp, Homo sapiens
acactgggtgcagtgttccaaacccatccctactctcctgacaattatttggaatccaggtcatctcctaagcacaggccaggagtggctgcgggaagktattgctttgcttcatgaggacaacctcccgggtagaggttttggcatagggaagggaaggggtgggggctctttaaatcttgtttcccttagtacccacctgagtctgcacaatcctcactgtggcaaatgccccatattaaacctaattctacttaaccactatcgcctttagtattattgggctctttttgttgttacagtaggtcccttttgatcatcacgaatttcgggatttctgagcaaatccaattcactctccccaccacttgctgatactgaaggttttgttactaccctgtccccagcctttacccttccaaagctctctgtcagccaaagctcaccacctttcttggccttctccgatgtcccacacctccctccaccacagggttctatgcaccagcagccagaaccacatagagcataacataagaaccaggctgtgtgaggcgctcaatgagggtgtgcgactccaccccagacccgtcagggatccttcggggggcacttctgaaagcatcagctgtgactactcgcactttcaaaccacctctcatgggaggagagcacctcc

SEQ ID NO: 902800 - DNA, 679 bp, Homo sapiens
acactgggtgcagtgttccaaacccatccctactctcctgacaattatttggaatccaggtcatctcctaagcacaggccaggagtggctgcgggaaggyattgctttgcttcatgaggacaacctcccgggtagaggttttggcatagggaagggaaggggtgggggctctttaaatcttgtttcccttagtacccacctgagtctgcacaatcctcactgtggcaaatgccccatattaaacctaattctacttaaccactatcgcctttagtattattgggctctttttgttgttacagtaggtcccttttgatcatcacgaatttcgggatttctgagcaaatccaattcactctccccaccacttgctgatactgaaggttttgttactaccctgtccccagcctttacccttccaaagctctctgtcagccaaagctcaccacctttcttggccttctccgatgtcccacacctccctccaccacagggttctatgcaccagcagccagaaccacatagagcataacataagaaccaggctgtgtgaggcgctcaatgagggtgtgcgactccaccccagacccgtcagggatccttcggggggcacttctgaaagcatcagctgtgactactcgcactttcaaaccacctctcatgggaggagagcacctcc

SEQ ID NO: 902801 - DNA, 662 bp, Homo sapiens
taactgaacattggagctcttctgtggtctcaagcatctttgaaacatgttgaaaatcaaacaggctctgaggagcttcatattcttgactgttaaaactcatgtgaactagaacatctatgacaaactcataaaaatgtcagcaagaaaggaaggcatcatagctgttttcttaacttacttttattttcactattttaggtctcaatatcaaatgattttctaacctctacttttaaaaaattaattgaaatgttggccatgtttatgatgagtattattcaccactccaaacaagactctgctaacatttgtactcaatttctggtaccctcggggcctaataaatgcagtgatatgtaaaatatgaatattatgctccctagatatcatgaaggagtagaattaaaattgtgagtgcttaaaatgatgtcatctcattgtggttaaattctgcattttactgatgacttacgaggttgagcaccttttcatatgctcatttattcattaaaatgagtaatccttacacaagaataactaagcataaagaaataatgctaaatgcagttaagaattctcattttgcacttgtgcatttgggctttgttaaagaatcaggttcrttatcacagaggcaggtcagtgctgcaggtgcatta

SEQ ID NO: 902802 - DNA, 625 bp, Homo sapiens
aatttccatcttaagtcaaaattgcatatcctagcaaaagttacagtgtgtrttaggtacctggtcaatcataaagtggaacttttttggatcattcatgggtagtgacaagcatgatgattagagattcagccaaaggaacatcttgacacacatctccaataatatgttcttttccatgatcaatgaagacatttaccatgggaatgaaggagaccaaattaccattttctacattaattcatcaactcacaatgcgaaccccatgaaatagttctcttcttttgttcttaataatttgtatcttttaactcccaacttcttgactgtgtctgacttctggctacatacattgggtgaaattgtcacattttattaatatgtcaatttttcatttacatcctggttcacctctttcttgttttatgactttggacataacccctgtaaaatagcatataagagcgttagtttcctaattttttttccccagaatactaagtagacaataattttaaaatacacacaggcacttgaaaaataatagtaattacaaataaaatatatgtatatatataaaaatatgtgaatcaatgatatatatatcatatatatacatatgtat

SEQ ID NO: 902803 - DNA, 625 bp, Homo sapiens
aatttccatcttaagtcaaaattgcatatcctagcaaaagttacagtgtgtgttargtacctggtcaatcataaagtggaacttttttggatcattcatgggtagtgacaagcatgatgattagagattcagccaaaggaacatcttgacacacatctccaataatatgttcttttccatgatcaatgaagacatttaccatgggaatgaaggagaccaaattaccattttctacattaattcatcaactcacaatgcgaaccccatgaaatagttctcttcttttgttcttaataatttgtatcttttaactcccaacttcttgactgtgtctgacttctggctacatacattgggtgaaattgtcacattttattaatatgtcaatttttcatttacatcctggttcacctctttcttgttttatgactttggacataacccctgtaaaatagcatataagagcgttagtttcctaattttttttccccagaatactaagtagacaataattttaaaatacacacaggcacttgaaaaataatagtaattacaaataaaatatatgtatatatataaaaatatgtgaatcaatgatatatatatcatatatatacatatgtat

SEQ ID NO: 902804 - DNA, 677 bp, Homo sapiens
tgtgcggaaaaacatattcacctaactttattcatataaatttttaaaacagaagaattcattgacatggaatttacaaaagcaytcatgcaagctaaaatgtatggaaatgaaaaattaggttagatgcaaaattttggggggacagaggaggaatctggtgaaaattcatgatccagatacaaatttgaagtggcacattgtattagttcattctcatgctgctaataaagacatacccgagactgggtaatttataaaggaaagaggtttaatggactcacagttgcacatggctggggaggcctcacaattatagcagagggcaaatgaagagcaaagtcatgtcttacatggtggcaggcaagagagcgtgtgcaggggagctcccctttatgaaatcatcacatctcatgagacttattcactatcacgagaacagcatgggaaagaccctccctcatgattcagttagatctcaccgggtgtctcccatgaaatatggtaattatgggagccacagttcaagaggatatttgggtagggacacagctaaaccatattacacatggatccatttgctaatgttaaatcatcagttattcatttcattttttcctttttctgatttgctaaaatatttggaagtttgtcttgccacagaaggcaaggacatt

SEQ ID NO: 902805 - DNA, 616 bp, Homo sapiens
ttctaatcagaattccttttacgaattgacacaagrtaagtccagactatttggcttggctaattctctttggtaagaaaaatttcttgggtgtaaaagaattttttttaaagaagaaaaaaaaatcttgaaataggttcatgttcctaaaaagtaagcttgcataaagactgttcttgttgccaagttcaggagatttctaatgcaatgtaaaggattaagtgacacactgaagagagatttgaaaagttaactatgctgcatgtgaacagaaagcctttagcatctctacataacatccttgcatgaaagaaacgtggattaaaaccactgtgacttaacatagtacacactttgttgcagacaataggtaggtaattgatcagttgttctccactgacttttcaatctcgtgtttacagcaataaaaacataaagcagtactcatgcagacaccggcaaagaagcatattgtgatggatttactatttcctttgtataggccttagattggaaattagctgaacttgtagattttgagtcctcattcgtcatatgaggggctggcctgccaatgcaaggcatgttgctgcacaaacataagatctccaggaaa

SEQ ID NO: 902806 - DNA, 689 bp, Homo sapiens
tttatttatacagatagaccctctaaatcttttttaaacttttccaaagactaactctactttaaaaatagaaaaaagtttactcagctagaatttagtaagactccaagcaatcaaaactctatctatctatctatctatttattttggagacagagtctcactatatcccccaggctggagtgcagtggtgcaatctccactcagtgcaacctccccctccccggttgaagcgattcccctgcctcagcctcctgagtagctgggattacgggtacctgccaccatgcccagctaatttttgtatttttagtagagacacggtttccccatattggccaggctggtctcaaactcctgacctcatgatccccctgcctccgcctcccaaagtgctgggattacaggcgtgagtcaccgcccccagcctattcattttttgagacagagtctcactttgtctcccaggctggagtgcagtggcgcgatctcggctcactgcaacctccacctcctgggttcaagcgattcttctgcctcagcctcccgagtatttgggattacaggcgccagccaccaggcctggctaatttttttatattttwagtagagatggggttttaccatattggctaggctggtctcgaactgctgacctcaagtgatccacccgcgtcggcctcccaaag

SEQ ID NO: 902807 - DNA, 610 bp, Homo sapiens
aacaaaagtgaaaattgacaaatgggaactaattaaactaaagcttctatatagcaaaagaaactattaacagagtaaccagacaacctaccgaatgggagaaaactttgcaaacwatgcatatgacaaatgtctaatatccagcatctataaggaacataaacaaatctacaagaaaaaaacaaacaacccaattaaaaactgggcaaaggacatacacagacactttttaaaagaagacatacatgcaaccaacaatcatatgaaaagaagctcaatatcactgatcattagagaaatgcaaatcaaaaccacaatgagataccatctcacaccagtcagaatgactattactacaaagtcaaaaaaataaaagatgctagtgaggctacacaggaaaagaatgcttattcaccgttggtgggagtgtaaatcagctcagccattgtggaagacagtgtggtggtttctcaaagacctaaaaacagaaataccatttgacctagcaattttattactgagtatatacctaaaggaatatacatcattctattacaaagacacatgcacatgtgtattcattgtagcacaatttataatagcaaagaca

SEQ ID NO: 902808 - DNA, 659 bp, Homo sapiens
taggtagtgaaaaaagtgaaataataatattgacttatgattgtatcaaacatctagttatgyagacaaattctcactgaacttgtctctaggtagtgaaaaaagtgttgacttgcaattgtatcagatatagtagtcctatccaaatagtttcaatgcgtcttacatcttcctttcccactagaacatggttacttagttttttagatctattcatttgattttgtgagctacttaatactcttctcacaatagtgacatattcattggtgagatcaataatggtaacttaaaatcaagtgacacacaactttgaatgcctacataaaccaggtcattggttttcttagttgcaaagagcagaaacaaattctaattaaacttaagcagtaaaatttgatagaagaatttgccttctggtagtagaaacaaataacgtgaacaaaagcaaactaatgactaaattaataataaataatataattatttaagttagtaataaccatgaagaaacacaggagtaaaggaaaagaaaatgactgggactgtttcagatgataacttatttagcttgggtggtcaaggatataagtactaaatgttaaattgaggatgtaattattgaacagaactttgaagaaataaaagatacagacatt

SEQ ID NO: 902809 - DNA, 629 bp, Homo sapiens
aaccaggaagaaatggaaactcttaacagatcaagaacaagtttcaaaatcaaatcagtaattaaaagtaaaaaaaaaaaaagccctggaccagatagattcayggctgaattcttccaggcatgaaaagaagagatgatactaatctgatttaaactattcaaaaaaattgagaaggggctccttcctcactcattctgtgaagccaacatcattctgataccaaaccttggcagagacacaaagaaaaaagaaaactacaggccaatatccctgataaacatagatgcaaatatcctcaacacaacactggcaaaccaaacccagcagcatatcagaaatttcattcaacatgatcaagtagactttattcctgggatgcattggttcaacctacagaaatcaataaatgtgattcatcatatgaacagaattgaaaacaaaaaccatataatcatctcaatagatgcagaaaaagctcttgatgaaatccaacctccttcatgataaaagctcttaacaaactagttactaaaggaccatatctcaaaataataagagttatctatgacaaatccacagccaacatcatacttgaatgaacaaaagctggaagcatttcttttgag

SEQ ID NO: 902810 - DNA, 541 bp, Homo sapiens
ttctcctgtttgcttatttgtctatttgtttttgtttatgcattctaagtagcaacttttttttttttttttgagacagagtcttgctctgtcaccaggctggaatgcagtggtgcatctcagctcaccgcaacctccgcctcccgggttcaagcaattctcctgcctcagcctcctgagtagctgggactacaggcaagcgccaccatgcccagctaatttttgtacttttagtagagatggggtttcaccatgttggccagaatggtctagatctcttgaccttgtgatccaccctcctcaggataccaaagtgctgggattacaggcgtgagccactgcgcccggccaagtagcaacatttttgtcttttcatctcatttactcctaaaaacaacatgaacaatttccrtgaacaaagatccactgcagtcaaactattttgtttactctatttatcctttttcttattaaggtaaaccatgcaattttggcctctgaactagtgtaaggacttaatgcctctacttagtatctgaca

SEQ ID NO: 902811 - DNA, 600 bp, Homo sapiens
catcagggattctggagaattttgaatgctcacattcacctcgcttggaggcttcatcaggtyaggacatttgaggtggaaaaggtatggaaatttaccaagaagcatcgttggaaagacttgggactagagaacaggatctagagacagcactgaggcaggaatatgaagagcaggagacagtgacaacacttagctggccacaggtcactgggcaggagtttattaaaatgagactgctactagtgagacaaccgcagcatgatcctgggtgacagaacgcattcactcacacgctgtgagaggcgggatgacagggcaccctctgcaatcacagatgcaagattcttggttttaaacatttgctgtattcaacatcttttgtttggtgtccatttactcctcctaaactctcttgctggcttctagtactatttcttcttgctctgtaccaaaggggtctactttgtatcaacagggctgcagagtagggatagagaggatattatgtcaggtagactccaggaagcaatttcacaacaggagaaaaggttcaataaccctggatcaggatgcttcaaagcaggcaaggcaaaaatg

SEQ ID NO: 902812 - DNA, 620 bp, Homo sapiens
aatccttggtcagtacaaagtccccagggaggaacagtgaaaacragtgtggaaaatcacaagaacaaagagagtgggaggtgaaggattgaaggaaaaaaaaaataagtaaaagaagataaatgaaaaatggaagaaaggaaagatgtggaaacttggttcgggaagagagaatatgtaagaatatggacccatttgcaagccattgtccctgttgtggccttagaaacatttgacaacaaaatgtaccctaatcctaaatataatcaaattctaaaagccaaattgaccttccagatgttgagggtgaataattaaagtcagtcctttcccagccccacattcagtgcattatactgatgaaggtttgcttttgtgcttggcttcactgctttagaattacagaaccaccatttctggaggcttctttgaaccacattcacaaacagattagcttaattatttactgctttcctaactcagatgaaatggttctgttaagggaaaaaaagttactcccagaaaagacaagacaatatccaagccaagtgagagctctctgctgggtctttgctgccctctttgttgccgtttcagcccagattcaaaggcacatttct

SEQ ID NO: 902813 - DNA, 598 bp, Homo sapiens
tttccctcactcttgctattgcatattctatgggtttgacaaaatgtataatgacatgtatccaccattcgagtatcatacagagtrttgtcactactctcaaatccttggtcctccacctatttttccattccccaaccccttggaactgctgatcttcaccttaatcttttaccttaaaaattaacaattagtgactttctccttggtaattaagatactccttttctgttgattgtggtgtttctgcttttacaactaggtacttcaaattatgcagttattttctttcagattctacagtatgtagtttttatcaaatagttcttcaaataatttgcagtaccttatttaacttacctagcataataaaatcctagtattatatgtacacacatatatgtacatcatatatatttcaataatttcaggtaaagaatgatttttacatactcatctcatttttcttcagaattagaaaatgaattatatttgtgcttggggcaggatgttgtgtaaatttctgtgttatgtttatatatctaactaaaatatggtgttaccagattagttttgtaatttcaatccagttttttca

SEQ ID NO: 902814 - DNA, 648 bp, Homo sapiens
tgatctagttattgaaatggagggggaacagtaaattcctctaaatccattctccagtgtttttagaacttaatcttctatacttgggtcaataaagctgtgaaggttcaatgattctaggaataaagaarcaagtaataaggtagttgtgaggctttgtagactataattgaaacccttactttttaataggaaaattacttttacccacatttttctttggagctaaacagaccattgaactgtacttggatcctgctctttaaagtatgcatcaatactgtacacaccaggtttttgctaagatggctacactgcaccagtatctaaattgacatgtaaggttgggttttatatttgaatgtttctttgtagataatatgttatactggttgactgacccatacaaaaggaaattatttactttatttctatttatttaaaatatcttagatacaatttgatggcaaaccatttccactgaaagggaaatagtgacatcttgtggaatcatctaattttatcctaaagtctagtcattaacatttttattcctcaaaataagtgaaatacatattctctccttagagaacaaatgaacttttgtaaaactagcatatgttatatatcacgatgttactttatggt

SEQ ID NO: 902815 - DNA, 640 bp, Homo sapiens
tctgcttgacttctggggaggcctcaggaaactgacaatcatgacagaaagtgaagggggaacagatgtcttatgtggagggaacaggaggaacaaragggagcaacaggggaggtgccacacatttttaaacgaccagatctcacttaccatcatgagaaccacaccaaggggatagtgctaaaccattcatgagaaatctgcctccatgatccaattacttcccaccaggttccaccttcaacattggagattaccattccacatgagatttgggccagagacacagattgaaaccttatcatgtcttcattctaggctggggtggcgggtgggaagatagaccttgcttggagatggagtgtggtgtaggtgtcccaccagtgtttggggacaagagactaaaggctctgtgttcatgctacaaggtcacttgttttgccaggctgtgagcagcttgggtactgagcaccctctctcccagctcttttccatgacacacaaaggccagagcataaaaagggggcaaaatgaaataggaatttgtaacttcttaagacttgaatatcagtgttccatttttttcttttattaaaaaaggcactgaggataataatgttttacatcggatgctccttat

SEQ ID NO: 902816 - DNA, 528 bp, Homo sapiens
ttaaggctaccactcctatgggtccttccctagagctataggtcagctatagctctctttctaagtccaataactattttttcactgcttcccttttaggcctaatgagataccactcctgtacctgttgtcactagtccagaatgtttcatcattctttgctggctttccttaaccctgactatacctttttagtagttgtggcattaagcatttctccatcccctctgttgagcacagcaactgcttcctgctaagaataagtagtggtgatttacaggagatgtaagactgccttgcttcaattatatatgctttgacctcaaaaatcacaccccctaccccacccaattaaggtgaatggacaatgtgaattagaagcacatgacaaatggtagagcttgatccattcatttgaatgcatccgtgatggactgaggtgtctacatgaggcaaagctttcatcaaccaggctcagttaaaacaacagcaggaagaatgtccacarggactttagctcccaagctg

SEQ ID NO: 902817 - DNA, 605 bp, Homo sapiens
tggccttggtgtcatctataaaatgggaatgctacctgtatctctcctggtggcagtgaggagtagatgatttagtgagcatgcagctgactctgaggagctgttcagttacagctacatcctaggggccttcctcactaagaccgtgtgggcaatgctgcacttctcagatctgctgccactgaagttctggatatcattttaggtagaaaaatccgatcaatgctgtcttttgaggcttggatttgaaactgagctacatgggaaaagaggcaaggtgcaggtgacacaattcctagacacacattttatcagagacagagtgatgctggagctggccatacaactagtggcttctcactccagcaggggcttctgagagtgaaaggtgcagtcgtccctcaggggtatgtttgggagttcccaaaagcaaagtgtagactgtgttttcagtcctcccagtgactctgaaatccactttatactgataaagaatctctttcttaaactggccatatggattaaatttttgaaaaaaaacttatgattcaaaaaactaaaaacatgttctaagaatattacakaaaacagtgtagaaagcactt

SEQ ID NO: 902818 - DNA, 564 bp, Homo sapiens
ttataaaatcatcagatctcatgagaactcactctcttgagaacagcatgagggtaaccatgtccatgattccattacctcccaacgggttcctcccatgacacgtgaagattatgggaactactacaattcaagaggagatttgggtggggacacagccaaaccatgtcagtcatgatatgagaaattatcaaattaagatgtagggaaggtttttaaaagatttgagcaaccacaaatgacagatatgtgctatagtagtgcaaaataccattttgctcttattaaaaatataattgttcttgataatctgaattataaatgtcatggataattatgatgcattatgctctcagcagctaaaacttcaagcaaaatacacacctagagaggaatcagccttaacaataattctataaatttaattttctttatttctgatarttacattttagttgacttcatatgtgatctaaatacattaccattattttggacttatgatgtagctcttgaagtacatatatgatgtagctcttaaagtacatatagaagagcagataa

SEQ ID NO: 902819 - DNA, 612 bp, Homo sapiens
aagtgtcaagctttaaaatgttgcttgcactattaatatgccatcaataggactgtrtgcaaatttctattttataaacataaaaagggcttcagctttcaagtaaataaaggtaatcagtttatctttttcaatgatagttatttagtgaatattttagaaaactctgaatagttttcctaaatagccgatgataaagtaagaatataaaataaaatgttgagattcactgagttaaattaactcaataaatgtttctttgtttttattgcattaaatcctcttttgaacttttagctctaaagattattttaaagcaaactaattatttgggtggtagtttatttattttaatagagaagattaaaaaaagaaaaaagaacctgttttaaaattataatttctttttaagtatcttggaaatctctttaacctcagtaattggaatgtatatttctgatggtataagtaggattttaattctaaaagcaggaaaacttccgaattagaatagttttagagcaaaaaagaaaggtattagttaaaatagaccaatcatccataatgggttataatcagtgcatttgttccttcactcaattgggagataag

SEQ ID NO: 902820 - DNA, 612 bp, Homo sapiens
aagtgtcaagctttaaaatgttgcttgcactattaatatgccatcaataggactgtgtgcaaatttctattttataaacataaaaagggcttcagctttcaagtaaataaaggtaatcagtttatctttttcaatgatagttatttagtgaatattttagaaaactctgaatagttttcctaaatagccgatgataaagtaagaatataaaataaaatgttgagattcactgagttaaattaactcaataaatgtttctttgtttttattgcattaaatcctcttttgaacttttagctctaaagattattttaaagcaaactaattatttgggtggtagtttatttattttaatagagaagattaaaaaaagaaaaaagaacctgttttaaaattataatttctttttaagtatcttggaaatctctttaacctcagtaattggaatgtatatttctgatggtataagtaggattttaattctaaaagcaggaaaacttccgaattagaatagttttagagcaaaaaagaaaggtaytagttaaaatagaccaatcatccataatgggttataatcagtgcatttgttccttcactcaattgggagataag

SEQ ID NO: 902821 - DNA, 643 bp, Homo sapiens
accacatgaggtcagatgtggaattttccacatgtggcatcctgttggtgtttaaaaagtttcaaattttggagcatttcagattttcagattagggatgttcaaagaatatatacayatataattttggctcttaaatcagattttgccttcataagcaaatcagcaaacacagtcaccactaagcactcacttcatgtgtgactcacactgtgaagggatttcaagtcttttgacagaccaagacaggaagcacatctcaatacactatgaagcaagctttggtgggttagattaggagatgttttctcagaaagtgactacttctgggatctctgttcatcacctgttgaggggtcaatcccgaggggttgagatgctctggcaagaagggacaactaaggacatcccctcacttcttgacagtcagcccctttcccacagggtaagggattcaaccaggaccaggtaaaaataatattcattcactcattctttcatcagacaataattattacatctaccatgtgtcaggcacctgctaaatggtggaaatataatagtgagcaaaatcaaacacagtctctgctctcatggattttacagagtactgattagacttgaccgaggacaatggctgaag

SEQ ID NO: 902822 - DNA, 616 bp, Homo sapiens
ttgatcatggtggataagctttttgatgtrctgctggatttggtttgccagtattttattgaggatttttgcatcaatgttcctcaaggatattgatctaaaattctctttttttgttgtgtctctgcccggctttggtatcagggtgatgctggcctcatgagttagggaggattccctctttttctattgattggaatagtttcagaaggaatggtaccagttcctccttgtatctctggtagaattcggctgtgaatccttctggtcctggactctttttggttggtaatctattgattattgccacaatttcagagcctgttattggtctcctcagagattcaacttcttcctggtttagttttgggagggtgtatgtgtcgaggaatttattctagtttatttgcatagaggtgtttgtagtattctctgatggtaatttgtatttctgtaggctcggtggtgatatcccctttatcattttttattgcgtctatttgattcttctctcttttcttctttattagtcttgctagcggtctatcaattttgttgatcctttcaaaaaaccagctcctgtattcattagttttttgaagggtttttttttttt

SEQ ID NO: 902823 - DNA, 551 bp, Homo sapiens
tttctacaccagaatttctatttggtttcttttcaaaatttctatctgtttatgggtattctctgcttggtgagacattgttctgatgacttcctttatttgtttgtmtatgattttcttcagccatgttagtatatttaaaatagttgattatacattttagatgagatattaaaaatatacataaaataaaatagttgactaagtcttggtctagtaaattcaatgtccaggctttctcaggaaaaatttttgataatttctatttgtatttttggtatatgggttatatactcttatttcctttcataacttataattattttcttgaagaggggatattttgaatattattatgtaacaactctcaggatcatgttctcctcctccccagaggtttatgttcttcatattgacattgttttgcctgagtgtcaagtggattttctgcactaattttgtaaagtctaaatttcttctttgtgttccttaaaatctccatttcattatattgttggtcagcttgtgatttaatagtgatttccttaaac

SEQ ID NO: 902824 - DNA, 638 bp, Homo sapiens
aaggacatttttgagatcataattaatatgttaaaggatcaagaggaaaaaatgggaaacatgcctcaataaattaggattttcagcacagagattgaaactataaagaagagccaaatgcaaattatagaaattaaaaacacaatatcgaagatggaaattcatttgtcagttttatcagcaaacacaacagagtaaagaattaaagataggtaaatagtaactatccaaagtgaaacatgaatagaaaatacagtttttgttttttttaactcagaaggcttgggtcaatctcagagagtttaattgtataagtagattcctaaaaagagaagaaaaaacatgacaggaaaaaaagtattttaaaaatatacatttcagaccgggcacattggctcacacctgtaatcccagcactttgggaggctgaggtgggccaatctcttgaggtcaggagttcaagaccagcctggccaaaatggtgaaacaccatctgtactaacatacaaaaattagcygggcgtggtggtcggcacctgaatctcagctactggggaggctgaggcaggaaaatcacttgggcccaggaggtggagtttgcagtgagccgagattgccccactaaaccccagcctggg

SEQ ID NO: 902825 - DNA, 638 bp, Homo sapiens
aaggacatttttgagatcataattaatatgttaaaggatcaagaggaaaaaatgggaaacatgcctcaataaattaggattttcagcacagagattgaaactataaagaagagccaaatgcaaattatagaaattaaaaacacaatatcgaagatggaaattcatttgtcagttttatcagcaaacacaacagagtaaagaattaaagataggtaaatagtaactatccaaagtgaaacatgaatagaaaatacagtttttgttttttttaactcagaaggcttgggtcaatctcagagagtttaattgtataagtagattcctaaaaagagaagaaaaaacatgacaggaaaaaaagtattttaaaaatatacatttcagaccgggcacattggctcacacctgtaatcccagcactttgggaggctgaggtgggccaatctcttgaggtcaggagttcaagaccagcctggccaaaatggtgaaacaccatctgtactaacatacaaaaattagcckggcgtggtggtcggcacctgaatctcagctactggggaggctgaggcaggaaaatcacttgggcccaggaggtggagtttgcagtgagccgagattgccccactaaaccccagcctggg

SEQ ID NO: 902826 - DNA, 650 bp, Homo sapiens
gtttagaatctaaaatgcataagaaagtagatttctgataatgataggaggatcctgcttttcatattggatggctatgtatgactcaatgttaaatattaaaatactaaaaaatttaatgtatttagttcccttttttgaaagggctagggcttctaacttctaaagccactttaacattatgtttgtagatttagttttaagaatattatagcataaactaagtaaaatgttgccagaatgtttttcaatatggagtaaaatttttattgatatgtacttattttctataatgggaactaacctcacataattttaaaagaagataaattttaaagtataaaatgaatggatttctgttttctcaactgtctccataaattacatgccaatatgaaaatctctcattattataagtatgtagaacatttatgaaatccaatgttccttttctttgtcatagtttaaagttagttttcacagtacttcacttaaaagaaaattaatccatctctgctgtgtaatcyttagccctaatatatttcagtcatggttttccctttgtggctctgatatttacactttaattcacagtacaaaaatatgtgaaatgacactatcagtgcaacaaacgatatgcatttcaatat

SEQ ID NO: 902827 - DNA, 548 bp, Homo sapiens
ttatatttatctatctcttctaattcgacataagctccaagagggtaggatctttctttttttcagtcttgctccaaatgcctaaaacagtgtctggggcgtactgggcactcaataaatatttgcttagcgaatgaaggaatgactaattctacagaatataaagacatcaatagttttctcccagagaggtgttagttgtgttaaattctaacctgttttaaaaatttcaaagataaaagaaagactttaatgacctagagttaaaaaaattacccttgccaccattttttcctgataaactaaaatgcttaaaatgactcaattgtctagaggactctcatgatctgaagttgtctacctctttgatactccctcctaccactctcaccacagctcaggaggcttcagccaccccagccaatacacaaagccttttgccatgttagggtgtttrcccttatccatcccctagcttctacccccaaatccttcatggctggccctttcatatcactttgcctcagatcagatgtcacctcttcaga

SEQ ID NO: 902828 - DNA, 639 bp, Homo sapiens
aaataaaagttaagcaggggagaagttaagtttgcatttatttctttgagtgtaatatacattgcccaccttgagaatattattgtgtgcactgtttttaagaaagggcatttttgctatcctaatagaaaacataatgatttttgtttttttttaggggaaacactcacttttacatatgtataaattccctttttcagaactttttatcagaaaacagaagattaaagggcctgatttagaccatgagaaaccctcactttattatgcagctagaagtgtggtggataggataatgagcctggttctgttgaacacagtccaaattctctgggaagaatgtacatttctattgaacgtgggtataaaatcaggaactaatgtgtcttgagtgcttcctgtgtgtcaggctaggttttggattctgaatgctttgagtctcattcagtcctcagcacaactccatgaggaaggtactattgcatccattttacataggagaaactaaattacagtggggaagtcagttgcccaggtcacacgtagaataagcggtgtagccatgctttgggtttggacagtctgactctagaaactgtcaactcacatctrtgggatttccaggaggaggaccttaaa

SEQ ID NO: 902829 - DNA, 574 bp, Homo sapiens
gaaaagccaataacttcagataaatactacacagaagcattctgagaaacttcgttgtgatgtgtgcattcatctcacagagttgaacctttcttttgatgagcagttttgaaacacttttcgtacaatctgcaagtggatatttggagccttttgaggccttttgtggaaaaggaaatatcttcacataaaaactacacagaaacattctgagaaacttctttgtcatgtgtgcattcaattcacagagttgaatctttcttttgattgaacagttttgaaacactttttttgtacaatctgcaagtggataattggagccatttgatgtctattgtggaaaagaaaataccttcaattaaaaactactcagaagcattctgagaaacttctttgttatgtgtgcagtcaactcacagagttgaacctatctttttattgtacagttttgaawctctctttttgtagaatctgcaagtggatatttaaggtgctgtgaggcctactgtgcaaaatatgttcacataaaaactacacagaagcattctgagaaacttctttttgatgtgtgcat

SEQ ID NO: 902830 - DNA, 574 bp, Homo sapiens
gaaaagccaataacttcagataaatactacacagaagcattctgagaaacttcgttgtgatgtgtgcattcatctcacagagttgaacctttcttttgatgagcagttttgaaacacttttcgtacaatctgcaagtggatatttggagccttttgaggccttttgtggaaaaggaaatatcttcacataaaaactacacagaaacattctgagaaacttctttgtcatgtgtgcattcaattcacagagttgaatctttcttttgattgaacagttttgaaacactttttttgtacaatctgcaagtggataattggagccatttgatgtctattgtggaaaagaaaataccttcaattaaaaactactcagaagcattctgagaaacttctttgttatgtgtgcagtcaactcacagagttgaacctatctttttattgtacagttttgaatctctctttttgtagaatctgcaagtggatatttaargtgctgtgaggcctactgtgcaaaatatgttcacataaaaactacacagaagcattctgagaaacttctttttgatgtgtgcat

SEQ ID NO: 902831 - DNA, 593 bp, Homo sapiens
ctgctcattcaaaagataggttccactctgtgagttgattggacatatcacaatgaagtttctcagaatgcttctgtgtagtttttatgtgaaratatttgctgtcccacagctggcctcaaaaggcaccaaatagccacctgcagattctgcaaaaaaagacattcaagactgctcaatcaagagttaggttcaactccgtgaggtgaatgcatacatcataaaggagtttctctgaatgcttctgtgtagtttttatttgaagatgtttccttttccaccatagggggtaaagggcaacaaatatacacctgcagatactacaaaaagtgtatttcaaatgggctcaatcaaaagaaaggttcacgtctgtgatatgaatgcacacatcaaaaagaagattctcagaatgcttctgtgtagttttcgtatgaagctatttgattatacacagtaggcgtcatagctctccacatatccactgtcagattgtacaaaaagagagattcaaaactgctccatcaaaatatatgttcaactctgtgagttgaatgcacatatcatgaagaaatttctgagaatgattatgtgta

SEQ ID NO: 902832 - DNA, 593 bp, Homo sapiens
ctgctcattcaaaagataggttccactctgtgagttgattggacatatcacaatgaagtttctcagaatgcttctgtgtagtttttatgtgaagatatttgctgtcccacagcwggcctcaaaaggcaccaaatagccacctgcagattctgcaaaaaaagacattcaagactgctcaatcaagagttaggttcaactccgtgaggtgaatgcatacatcataaaggagtttctctgaatgcttctgtgtagtttttatttgaagatgtttccttttccaccatagggggtaaagggcaacaaatatacacctgcagatactacaaaaagtgtatttcaaatgggctcaatcaaaagaaaggttcacgtctgtgatatgaatgcacacatcaaaaagaagattctcagaatgcttctgtgtagttttcgtatgaagctatttgattatacacagtaggcgtcatagctctccacatatccactgtcagattgtacaaaaagagagattcaaaactgctccatcaaaatatatgttcaactctgtgagttgaatgcacatatcatgaagaaatttctgagaatgattatgtgta

SEQ ID NO: 902833 - DNA, 664 bp, Homo sapiens
cagcttcaactgaacaagagctgccccatagttcctgaaaaacaacgttaaacacccgttactataatgacccacagtcagagatgttatctgtaaggaagctagtgggagttttaagatcaactagaagtaagkgattaaaagcaagcaaagcaggttagtgttgctgggcttaatcagcttagcccttagtttcactttagtgctgatgtatttcatccttcctcatttcacaaatgaggaaacagatcttgtgatttgttcatcccaatttgattcctttaagaagcccatccccacctaagcaagacatattagaattcatttgaaagaaatcctcctccaggttacatggattccccctgcctttcacctgccctgcaccaggctctcagtttctgttaattcttcatgcagcccctgcatctgatgcgtaacagtgcaggatctccctcttcagtgtgctctgactgcagagcctgctccatttctaagcagttgctcttgcttcagctctgtggtgatgtaatcttatgaacagctttctaggtaatcttccccctggtttgatctggccccctggacctcacaccagtatactgaccagtaggctaccttctcaggtctgtcttgaccttggccatgagaatagatttttaaaaaa

SEQ ID NO: 902834 - DNA, 633 bp, Homo sapiens
taaaccttgttcccctccggctctaagttggtacaaatgttctttcatgtgctgagaaatatggcaaattcacccttctatgccaggtactgcaattactgctgatggcttatctgattcttcctcgaaggctgttaataatgatgatttgttcgtagtagtaatcaaattcattcaatggcctgaaagacactgcttccttccctacaaaatttttatcgattaaaagtgattcatgatgactgtggaaggtacttgtacagtttctgtgtcaaacattcaagaacaactatcaggcataacgtaactatctttcccatgtgcaatatattgtttatagcagcaagaaggtaaatttttttcgtatggtccttgaactttcacagtatctgttatctatcattcagtgtcccagttccgcatctgaattgagtccaaattctattccaacaacttgagaaaaactcccaccaaaagctgaatatttgttaacctcattttcaagaccttcaagcagctgtgcctgtgttactctgacaactaaaactggggtccaytatgagaaggatagccaaaaaatcacgcaaagcgaaatttcccactggatgtattcaattagatctggaagtacct

SEQ ID NO: 902835 - DNA, 379 bp, Homo sapiens
tacttcattaaagcagagtttttgactgtcatgttcctaggtgtatcctagcaagtarcacacaggatctattaaataaatgtttgttccatgaataattacctcttagtaagttaggcaccgggtataaagtcttaagcacagactgtgaggattgataactacagaataagaaaatgtggtaaaaagatactctgaagccatcttatattatatggagcctacgtggtcattgcacttaaataaataggtataggtgttcgaattccatttccgtgtaatccaatttattcattacctgaaattaaatatcactgaccgttaatataaatggtaattaaggcaggtcactaggaggtatgaatacctttgctttttt

SEQ ID NO: 902836 - DNA, 592 bp, Homo sapiens
tatgagaattacatttcagttagtttgcttgattgattaacaaatckccctttcaaagtatagtagttcatattaagttaaccctaactagggctactcatccttgtccatttgtacttaatagtccagccatacaaatgtaggatttctctgcctaaggagtgtgtgtcttaaattatattgcttctttatacaaacacatctttataatccaaattatattgatttcctgggcatgctctataagtttctcaccttcttgaatatattgagcaaggcaacagttgcatgcatcctagagaaaaggaatagcatgaagttcttaaccactgagaataacagggagttatatcaagccttcttccagcaaaagtccataaggaaagtaaaggttttcctcaagcctttatttcttaggtcacaaaaagttgcaagcctggggcttaaactcattctcctccttttcttggtaaatcctaaatagcactgcatacctttctgattcacttcaccttagtacatatgtttctaaggactgagatccgttaactgatctctgcttttaaccccaccttatgcctgtaacttgtag

SEQ ID NO: 902837 - DNA, 592 bp, Homo sapiens
tatgagaattacatttcagttagtttgcttgattgattaacaaatctccctttcaaagtatagtagttcatattaagttaaycctaactagggctactcatccttgtccatttgtacttaatagtccagccatacaaatgtaggatttctctgcctaaggagtgtgtgtcttaaattatattgcttctttatacaaacacatctttataatccaaattatattgatttcctgggcatgctctataagtttctcaccttcttgaatatattgagcaaggcaacagttgcatgcatcctagagaaaaggaatagcatgaagttcttaaccactgagaataacagggagttatatcaagccttcttccagcaaaagtccataaggaaagtaaaggttttcctcaagcctttatttcttaggtcacaaaaagttgcaagcctggggcttaaactcattctcctccttttcttggtaaatcctaaatagcactgcatacctttctgattcacttcaccttagtacatatgtttctaaggactgagatccgttaactgatctctgcttttaaccccaccttatgcctgtaacttgtag

SEQ ID NO: 902838 - DNA, 664 bp, Homo sapiens
atatttttgatagcttgctacatactaagtcctcgcctgggtgttggggtacagaactgaaatagagacagacatgatccctagcrctataagtattttgttctagtgataatgataaagataaagatgaaaatggcaatgatgatgaaataaatcatgccatttgctgatctagcaattcagatacaatgtcaaggttaagaaataagcactttaataacaatacgctaaagagcttttggtgctccctagatcatgctatgctaatgaattatcctgcactttaagagtttcttttatacacacattaaaaacagaaaaagagattgagaccatcctcgctaacatggtgaaacctgtctctactaaaaatacaaaaaattagctgggcgaggtggcaggcgcctgtagtcccagctactcgggaggctaaggcaggagaatggcgtgaacccgggaggctgagtttgcagtgagccgagatcacgccactgcactccagcctggacgacagggcgagactccgtctcaaaataataataataataataattaataataatagtaatgataaaagaaaactccaggagcatttcaaagtagctaatcacatactgaaaaataaaacaagctttatgagttgctaactcatgaaaagttagat

SEQ ID NO: 902839 - DNA, 629 bp, Homo sapiens
ctgtctttttttttttttttttttatgacggggtctggctctgttgcccrggctggagtgcagtggcagatctcagctcattgcaacctctggacctcctgggctcaagtgatcctcccacctcagcctccccagtagctgggactacaggactacaggcatgagctaccacgcctggctaaatttttttttttttttgtagagacaaaagttttaccatgttgcccaggctggtcttgaactgagttcaagcaatttgcatgcctcagcctcctaaaatgctgagattacaggtgtaagccactgcactcggcctatagtctcattttaaagacatattttctagtagctttttcaacattcgctcaatgtgtcattttcattacgattgttcatactatgtgaaacccaaatagtaagttgatcttcaagccttaataactgatttcaaataattttccaaataggcaatgatttttcttactgaaaacatttcctccattattttcagtagtgatcaatatcagggagagaacttatctacatcctgaaaccaaaaagaacttaggtctgttaaattctgatgatcagcatagatggccacagtttatttaaataccatagatctt

SEQ ID NO: 902840 - DNA, 693 bp, Homo sapiens
aattctgcacagatacccaggctgtgccttcagcgtcagacacccttcatcmtcaaccacccattggcctggtgaccacctcttctgtggacactcagctatagtgcctggagctgggaggagcatcctctggcccctgaccacctcagcagagtggaccatgtcctgctctggcctctgctggggctggggtttgctttcaggcccctatgtactccactgcatggatcagttgctccctctagaatatcaagagctctacctttcacctgtttgggatcctctaagccagacttcctgcatgaagggatgaagggtaagtttttgttttcagggggatgtgggaggatgaagaggctgcagcaggtccttttggatgaaggatgttctggattcagacgaggtggtgaggaaaggcctttggatgaagaacacgctcagggcgggaggataggaattgtgctagagggcagggcagaagggagtgtgggtattcagagggcagcaggtttcccccttcctcccctaccattcttagacctggcaggtcctaaggaacaggaagtagttagtggtacgtagacggtgggaatcctgctgctcagggagaggtctgcaaaggctcccatgtaggcataaatatataaagaaatgggccacacagaacccagggccagatagtataggttcatg

SEQ ID NO: 902841 - DNA, 469 bp, Homo sapiens; identical to SEQ ID NO: 897963

SEQ ID NO: 902842 - DNA, 643 bp, Homo sapiens
atcaacccgaggaacagtgtcatatggagggctcagtgttggtctctgctgctggcatattgaacactcarcagtggccatagccaggccagccttggtgagtgggagtccatgttgctgagcccatgtgtaacctccatccctgccaccacggccactttgttcatgggcccattgggtgatgcaggggtggctggggatagaggttgagtggtgtccacagaacaggtcatcccattcccttgattattaaaatcctcctctgctgaggtcacctgttggtgagcactcacatgggatacaaatatacagtttttgaccactcagagaggtctatccacatacttcttccccaaatttctttgtaccaattttccaaaaatgcttcttccaagtccctgaccatccagccaaaccatgagctacagcccatgaatcagaatataatcgcacatctggccatttctccttccatgcaaagtgcactaccaggtgaactgctcaaagttctgcccacaaggaagatttcccttcacctctgtccttcagggatgtccaaaaaataggctatagtgctgcagctgtccatttttgtctggtatctgcatattgtgcaggaccatctgtgaaccaggccctaatc

SEQ ID NO: 902843 - DNA, 651 bp, Homo sapiens
ccccaagcaaatattcagtaagccttgtcactttgaatmtgttaagttgatctcaaatgattctaactctctccagctatatatcattatccaagttcaagctaccatcatctatatattccttgggaccattggaacagttttctaactggtctccctgcttccatcttgacagcggtttccattctagaaataatggtgacattctgaagttgaagttatcatacaaaaatgcgaaggtattatgatactctaggcacaaaatcttgcaaggtttcctattatctttaggacaaatccttgaaactcctcagcgtggccctttataatcttgttctctgtaagtttctgtttctccttgcccactacacttcatacattttagctttcttttagctccccagacataccatgcgctttcttaactctgagctttcggcacattttagttccctctacctcaaagttttccctctcctgtcctgttaggtcgctcctactcattctgtgtttttaaggttacttgttacttctttcctgaagccttcctcagcattccaagcctagggtaatgtggtttatccactttgaacttccctccaatagtcatcatcacattattatgattacgcatttatgtgacagtctttc

SEQ ID NO: 902844 - DNA, 573 bp, Homo sapiens
aaactcaagccatcaaagaaaatttcttaagcagtaaactttcattctacaaaatattgtcttttaacttcttactgatgtatcttcttttggaaatgtaagcgcttaatgacatattgactcttgctgaagccacaagccaattactcatccttccaaatagattttttttcatggagtgatggagatgggaatatgtagaagaagatagaaataaaattaaaaattcattgggaaaacagaataagaaccatttaaacatgaactcaattgtaagtgacaaggtataaaaaacgaggtgttttatagaatcaaatataaaaacttgactagaataataggaaagatgtgttagtaaaaccatggcaatatgataacaccattgttatttattgaacactttctatgtgttaggcatgtgctaaatatagtagctaaatatagtatttatctcattatgggtgtacccagagataagcccatttgggatgtataatatctcaayttctgggtccatttcatttaatatccttgctctagtatgtgaagtatgtatgttatttgcattgacaa

SEQ ID NO: 902845 - DNA, 590 bp, Homo sapiens
gtaatttataaagaaagaggtttaattggctcatgattctgcaggctgtacaagcatggcgccagcattgctgggcttctggggaggcctcaaggagtttttctcatggtcgaaggcaaaataggagcagtcactagacatggcaaaagcgggagcaagagagcgatgttgggggcggcgtgctacacaccttttttttttttttttttgagactgagtcttgctctgtcgcccaggctggagtgcagtggtacaatctcggctcactgcaacttccacctccccggttcaagcaattcccctgcctcagtctcctgagtagctgggattacagtcacacgtcaacatgcctggcaaatttttttgtatttttagtagaagtggggtttcaccatgttggcctgactggtctcgaactcctgacctcaagcaatccgccagcctcagcctcccaaagtgctgggattacaggygtgagtcaccgtgccctgtcgctacacacttttaaatgaccaaagctcatgagaactatcttttttatttttttgttttttttttgtttgtttgttagtttcaaagagtggagagtt

SEQ ID NO: 902846 - DNA, 600 bp, Homo sapiens
tcagcacattggccaggctggtcttgaactcctgacctcaagtcatctgtcgacctcagccttctgaagtactgggatgataggtgtgatctaccacacccagccaacattatttctatgaggagtaaatgagccataaccactattcctctactcctggcacatagtgatatctcagtattaaactcaacgaatttcaaagtaattttttttaaatgcaagtattgatgttacaatatgacacactgcatgtatttaagtagatgcgatggcagaaagtatttaaatggttttgataattacgtattttctttggaagtgagatggtaaattatttctaatttgtgccaattatttataacatgattttcttgaaaaggtctagtgtatttcatgtcaatttatatagctgattttcaaaaatactctaattttatacagtatctatttcaatatgagttgtcatttctacatatataaaaagtataggattttcaaattttgtattcgtactgaaatgatatcgatacaatctattttcttgaccacttygtgggattcatgagagggatgccccatggtcaacctatggtacttgac

SEQ ID NO: 902847 - DNA, 614 bp, Homo sapiens
aaatggaaaaacattccatgctcttcgatagaaagaatcagtattttttaaatggccatactgcccaaagcaatttcacagattcaatgctatttctatcaaactaccaattacatttttcacagaattagaataaactatttcaaatgtcatatagaaccaaaaaaaagcttgaatagctaaagcaatcctaaggaaaaaaaaatgaaacaaagatgaaggcctcatgatacctaactttaaaatacattacagggctacagtaaccaaaacagcatagtactggtacaaaaacagacacatagactaatacaacaggttagagatcccagaaagaaagccataaacctacaaccatctgatctttgacaaaactgacaaaaacaagcaacaggtaaaagactccatattcaacaaatgatgctgggataactggctaatcatatgcagaagattgaaattagattctttcctttcaccatwtataaaaatcaactcaagatagattaaagacctaaatggaaaacctcaaactgtaaaaactctaaaaggaaacctaggaaatatcaccttggacagaggccctgacaaagattttatgacaaagctttcaa

SEQ ID NO: 902848 - DNA, 702 bp, Homo sapiens
caactgaatttggattggctgaagaatagaggtcttcttaaatgacttattttgtactctcttttgctgtcgggaaaaatgagtactatcttttctctccacactaccatgtgttttaaagggactttctacctrtagctacgtgaaaatgtcatcactgtccatatttctggttaagaaaactaaggcccagagaagtaaggtgaaccccaaagtctcagattactatagccacaaagccaagatgtaatcctaggtctcttgacatttgggttaatgtttatttcatcacatatctgtcaatgtttttaaaaagcaaaagaataaaaagcaaagaaatagtaaaaaggatcattctggttgattttttgacaagttgtataccctgtggagttattaagtggaggttcagcatctgggttatttttgatcacctgatggctccagggacaagggtttgagcagctcagaatgaaattggctaggggaacagtatctcttctgacacaaatcacagctttgaacatttccagcatttacctacatcaggcacgcacttgaaagactccaagaagtcatatatgaaagctggtatttttaaagcccctatctgaatatttgtaaaacttgatgacactaaaggacagtgcttttcaaattaaaaaaataatgctgaaaaggagttggaagtgcattttactc

SEQ ID NO: 902849 - DNA, 610 bp, Homo sapiens
cacaaaggaagaagagtcattatctgaaaacgacatgcattgcaacayaattcacaattgcaaagatgtggaaccaacttaagtgcccatcaactaatgagtggatgaagaaaatatagtataaatacaccatggaatactactcagccataaaaaggaataaaataatgtctttgcagtaacttgattggagcagaaagccattattttaagtgaaataacacaggacttaaccaaaaaccatatattctcacttataagtcagagctaagctactagtacacaaaggcatacagagtgatgtaatggacttaagagactcagaagggagaggttaggaggggtgtagggataaaaaaacattaagtacaatgtacactacctgggtgatgggtgcaccaaaatctcacaattagccactatataattcatccatgaaacaaaaaaccacttgtaccccaaaagctatgtaaataaaatatatatatttttaaaaatttaaaaagaaccaacttaagtgcccattgactaatgggtggataaagaaaatgtgatacatatacacacaatggagtactattcagccataaaaaagaatgagatcttgtca

SEQ ID NO: 902850 - DNA, 575 bp, Homo sapiens
tccagaaaaatatttgttttaatgtctccagtttgatagttgaagcaacacacttgtaagccagaagtaaatcataaatcattygtctgtaagtttacaccacaatctttgatatttgaagagaggttatacatacacatacacacatgcaatcagatgtctttcccagaaaatgttaaaacaaaatttgtcttaccagtctgggaaagttggcttctgtgggcattatgaaagctggaattgctttgatgtgattctgaatccaaatggccttttaatctaagcctctctatcatctccatctatgtgtttgtaataaatacatcaatttatgtgggatacattctttttatactcattatttcttccttttcttgtcaccatcaccccttgaaaatttcttttttttaattgtcaatttactctaaaagcacctggatctggtcataggaaggttgaattgctctcctactcaagaaacaaagcacacatcctctgatactgatgtatttactatttatatttttttctcttagtgtttctgattttgagagaaagaactatcatcctcctaa

SEQ ID NO: 902851 - DNA, 621 bp, Homo sapiens
aatgaaacaagaattggaaagaaatttgatccattaaaacttagatygcaatcctgaaagcaccagtttggtaactgtttattaaataagaattaaatcattggtacacattttatttcttcattctttacatttttttcttcatgtagtaaaaaactagatttatgttattgaagcagaattcactaatcatgtaaagattagttgatccttgaaatgctgcatatctaacatttttagaaattggtttctctgggccagacaatatctgagaaagaaagaattgggaagatactttcagttctgtacaaaaataatgaaacagatctggtaagctgaagatctgagcattattttgacagacatgggaaatggggactgcacctgcctatctcacctggttttcaatgcttcacttgcactggctttcagccattttcaaccatgtacgaatgaggtacatggttaacattaaatgacaaggtcactactaatgatgtcctggagggcagccagcctagtcccaaatcctgaatttgccatgtggaaagaaatgaacatgcaacatgaaaaactgctgcctctaaattccgagataataatacaagtaatacatagttt

SEQ ID NO: 902852 - DNA, 550 bp, Homo sapiens
caccctccactggggagtgtttaatttatttcagactcttgaaaaatcaacaaagtttatattatatctgcagccatctaagctggctgcaagatcacgaataggtaaacacattaccaatgtgtgtgttaatcttttggtcattctcatacactccctacttctcatcatccactaaagatcaagcacacactccctacttatccactaaagatcaagcacttgatgataatagcaaaagtaccagattgaggaaataggctcactgcccctaaaaatagataaataagtccgcagcaacttctttccactcttaatattagtataaatctatgttcatttcaattgcatgagaaagaattttttttttttttttttttttgagatggagtctcactctgtcacccaggctggagtgcagtggcatgatcttggctcactgcaacctccrcttcctgggttcaagtgattcttatgcctcagcctccaaagtagctgggattacaggcacccaccaccacgcctgactaattttcatatttttagtaga

SEQ ID NO: 902853 - DNA, 644 bp, Homo sapiens
gaataaataatttagctaagcttaaagtgtttaccttgggcctggccctatgtgctcaatatgtattaactcattgaacaacagtcctacaaagtatgtgctgttatcattctaattttgcagatgagaaaactgagatacgaagaggttagatacctttcccaagggcactcggccagcaggtggtgagatcgggaatgcgatcagcactgtaacaccatagcctgtattctcaaccactgtttaataaatgcctctgagagcctagtttctactatttaatccattttgatgctcatttcttaggcttctatgagttctaattattgaccagtaaagaaaaccatgaatcccacttgcatcctctcattatgaaaggtatctcttatggattgaattgtgttccccaaaaattcctgtgttgaagccttaattctcagttccttagaatgtgaccttacttggaggtcaaatctttacagacataattaagctaaaatgaggttattaggatgctaatccaatatgactgttgcccctataaaaagggaaaatttggagacagacacatacatgcaggaagaataccatgtgaagaygaaggcagagatcaagatgatgcttctacaagccaaggaacagca

SEQ ID NO: 902854 - DNA, 669 bp, Homo sapiens
actggactttatgctaaaagatttataaataggtaaacattaaaaacaaaaccatttaagttattttatccttatttctacagatcacaaatctgagayataaaagagttcccacattaagtgacagagctgaagtttaaacacaggttgtctagctccagaatcagtgcatataactacattaaagagcttcaagtggaaatgtagggcaaaattctctagctttagagaatggaatcaactaaagacaaggatgtgaaatagcaagatatgtgtggggaacactaagcatctttgtgtattaactatttttcatttgtaaacctttccttacatggagtagagctcctccataaatggctaggaatatcttgataagttacaattgttcttaactagcctccctgcctctaatattttacccttctaagatgtcttgcacattaacgccaaataaatattcctggctgggcagttatttgcccacttaaatatatcaatgaatccccataatgtgtagaatcatttccaaactctttaatatgtggatcaaattactgtagtatctgagcccaacagatttagtaagttcccaccatcctttatactacaaataggaagttccaggtttattttttaagccacattcgttaagggttatatttattt

SEQ ID NO: 902855 - DNA, 669 bp, Homo sapiens
actggactttatgctaaaagatttataaataggtaaacattaaaaacaaaaccatttaagttattttatccttatttctacagatcacaaatctgagacataaaagagttcccacattragtgacagagctgaagtttaaacacaggttgtctagctccagaatcagtgcatataactacattaaagagcttcaagtggaaatgtagggcaaaattctctagctttagagaatggaatcaactaaagacaaggatgtgaaatagcaagatatgtgtggggaacactaagcatctttgtgtattaactatttttcatttgtaaacctttccttacatggagtagagctcctccataaatggctaggaatatcttgataagttacaattgttcttaactagcctccctgcctctaatattttacccttctaagatgtcttgcacattaacgccaaataaatattcctggctgggcagttatttgcccacttaaatatatcaatgaatccccataatgtgtagaatcatttccaaactctttaatatgtggatcaaattactgtagtatctgagcccaacagatttagtaagttcccaccatcctttatactacaaataggaagttccaggtttattttttaagccacattcgttaagggttatatttattt

SEQ ID NO: 902856 - DNA, 648 bp, Homo sapiens
atggttatcttttctgagttgactaataagaactcttgccataatagtgatattatcttattttacaaatatattttccacttagtcctgtggtttttttctgtttgttttttttttgtttttgtttttgtttttgagacagagtctggcactgtttcccgggctggagtgcagtggtacaatcttggctcactgcaacctctgttctcctgcctcagcctcctgagtagctgggattacaggtgccctccaccacacccagctaattttttgtattttttagtagagacagggtttcaccacattggccaggctggtatcgaattcctgacctcatgattcacccaccttggcctcccaaagtgctgggattacaggcgtgagccaccgtgcctggctgtctttaattttttattgttttaggatgtacagaaaagtaaaatttttatgttgtcaaatctaccaatctatttcttcacggtttctgccttagaaaagccttttcaaactaaaattacatacatttttaaacctagtttacagttctatatttctttagtctacctagagtgtattgaagtgtataatgcgagytaagtttcaatatgcagtttttccaatgtgtaagctgttatcccaacactatta

SEQ ID NO: 902857 - DNA, 621 bp, Homo sapiens
agttagaaaaaacatctgtccctcaggcatttggatgctgcatcaagggacatgttttgttagaacaaatagaacccaatacactgcacctttccctaccctagaagtcactatcagaattgtcttaaggcycccatccaactgtatgaaataattagggcagcctatatgcctttgcatttgcaccgacaattgactatgatttgcaattgggtacatgcagttttcaaaatctcatgctcataatgaaatacacacttcttactgtgacttacaaggcctacagaatccaacacacccttttgtctctggacccctcactggcctccttgtcaagtatgtttgccctacctgacacacagactgagatcttatgcctacttccagggcttctgcctggaatgttctgcagaattctcatggctgactcctctgatttcagtctcacacattccctccctcagcaaggccttctccaacttccctgaagtcccctttcctcccggtcactctcttccacattaacttatgtttccttccagacccttatagtatctgaaatgacttggttgtacatttatttatgtgagaaatcaatgtccctctcactagaatataagc

SEQ ID NO: 902858 - DNA, 792 bp, Homo sapiens
acctgtacctagatctttagagtatacaaagttgaacaaaatgctggtttgagagtactgtcttcaaataacgtaaaagctaatttgatgggtaatattttagaaatattaaatgtaaagggaaaatgagatagcagaagtgtagaccaaatgagcgaaaggtagcatgtaggtggggactaaggaaatcctacatgtcaaacgtgtttacatgagcacaagggtgttggaaggattttacaggcagatttggaaacatggaggccattgctgctgttagaagtgcttgatttttagtatttgttttgtgatcctggggtaacctaaaggaaggtaaagaaagactgaataaaattgatatatttcagtccttgggaacaccatataagaaacatacaatacaatgccttatgtttcatatgtaaccaaatgtatacatccacaggaaatatttttcttcagttaacaattcattatcttttcccaattatagtctctttccaaaacagaataataatccatatagttaaatcagataaacgtttttttccatcaaacttgaattcttgagtaagaaaaatctgtgtcaatcttatgaaattatttgaattttatgatcatctgttcataacatgaatgcaggctatattagagacctaatgcttaacttcttgtcccataaccagaatcaaaaaatctgagatgagcataccaagagaaaaatgaagcaatcatgggcaaatgtggtrcaggctgacacagagttactttgacgcaggctaacagtgctga

SEQ ID NO: 902859 - DNA, 511 bp, Homo sapiens
gaaaatgtggggcaggggtttccagcatccagtgaatcagactaaggaattctgctctaacctcaagttagagcaagtcggctatttatttcctttattcaagttgcatctggggaactatttcaagctatttataaagacatcctttttttgattatcatactgtacaattatctgctttatttggtttcccagagtatccagctaaaaaccatgactgtctcttaaaattttcttaacaggtatatattaaactgagtgcttttgccaatttaaagacttcatgttgaatataaactattttgatgcaggctctggtacttattcctgcagatggttaatacttctcccatttgttaagtctggtaattatattacaaatagtaatattaytgattctgacagtaagatcagctagggtttattaagcctttactctgagtcaggtattatgtaaagcattttacatgacattaactttttaagtctttataccaatcctataagagat

SEQ ID NO: 902860 - DNA, 648 bp, Homo sapiens
cagaaaataagtagttctgtgatgtaggtcagtgaacttgctgtgatagcaatgatgtatgtgaaaataccagagagtactacattttgttattgttgttaaaatgttgtctgtcaaggttctatgtatggaacagataaatttacatttcctcttctacctctctggccacctctcattagtgtgttttgctgggtccttgcttcctcagctgctaaatgttacagggtcccaatactcagagcaagccttgtctctccctagtttactccccctccacctgtttctctctttgctccccatcccagctctttttgctgatctcatccagcccatagctttacataccaactatatatgaatgaattccaactttgtatcattagcttctccccatcgtctccattggatgtttaataagcatcttaaaataaacacatagaaagcagaacttcagaatcaatacccaggcccataattctctttctcctttagttttctctatgtcagtaaatcactccctcatcaaacaaattgcttggaccaaaactctgggtagtgttctcctttagaaagttttgtcamatgttcctccaaaatcctgagtccttcttttcactatcttcactacttgcaacttttcagtcc

SEQ ID NO: 902861 - DNA, 522 bp, Homo sapiens
atgtatacacacatatataatatatatgtatgtatgtgcgtgtgtgtatatatatatgtgtgtgtatatatgtatatggtttatataccataaaccaggtggcttgtagtcaagaraaatttgtttctcacaatactggaggctgaaaacttcaagaaaaaggcaacagcagatttgatgtttggtgatggcctgttttctcattcacaggaagccatatttttgttgtgtgctcacatggtcaaagggtggtgggatccctacagggtttcttttgaaagggaactaattcctttcatgaaggttttgtccctatgaccttattacctcccaaaggccccacatcctaataccattatcttgcagattaggaattcaaaatataaattttgggtggacataaacggttcatagcaaagcattttagtttgatgtagtgtaacttacttctgcttttgttgcctgtgctttttctgtcatatctatgaaatcactgcccaggccagtgtcataaagtttttt

SEQ ID NO: 902862 - DNA, 641 bp, Homo sapiens
tgaaggtaatagcctgaaaaggctctattgctattttcttggttgttgtttgtatgttacatcagatgagttaaggagcattttcctggttataattttctgatgacaaaacattcatttaaaatgttttgtttcatttaaaatatttaaaatgtttgaatatatattttatctccttgttaatgacagctctttgtagctgttttaagtaagtttatttttaaaaatttcaatgttctcaggccatttctactctagggtttgattatagcaaaccgtttgccactgaaaatgatgggctgagatagaagttttatagaacagcaagttgacattaacatttgtaatatatgtatggcatcagaaacagttcaatcagagaaacagaatcagagaatcagtaggagatacacattgagagatttgtcataaggaactggctgatgtgactgtaggaggctggttggccaagtccaacatccatagggcaggctgtcaggaagcgcaggctagagcttgggagttgaagctgccatccrtagtttcaagtggaatttcttcttcagggaagcctcggctttgcttttatcgactttcaactgattgactcagggccacccaagttatttaggattatttcc

SEQ ID NO: 902863 - DNA, 611 bp, Homo sapiens
aatgtgtcctccaaagttcaggtgttggaaacttagtccctgtattaggccattcttggatcgttataaagaaatacatgagattgasttttttaaaattatttttaattttttttgagatggagtcttgctctgtcactcaggctggagtgcagtgaagcgatcttggctcactgcaacctctgcctcccgggttcaagcgattctcctgccttgtcctcctgtgtagctgggattataggtgcccaccaccacacctggctaattcttatgtttttagtagagatggggttttaacacattggccaggctgggtcaggcacagtggctcatgcctgtaatcctagcactttgaaaggccaaggtgagtggatcacttgagatcaggagttctagactgggtaatttataaagacaagaagtttaattggctcaaggttctgcagactttatagcaagcatggcactggcatctgctcggcttctggggaggacttgggaagcttctgactatggtggaagggaaagggggagcagacacatcacatggcataaagcaggagtaggatggagggcaggtgccatacactttaaacaactggatttcccga

SEQ ID NO: 902864 - DNA, 522 bp, Homo sapiens
atgtgtgtgaataatataaacggatgccaagcattttagagcagaatgaatgctggattccatcttttctcaatgctccatttcactaagattcagaaaggktgggatgtgaataagattacaaagcattttaaattcccagggatttcactcctggtttagtggtctttccatttaacaggctgtaatctcaaatactgttcttaagcataagactattttaaaatgtgtttaaaattaagtataattatatgtgtatacataatttgggaggacttactttattttctttaaagcagcccagatataattttttaaattatttttcacttgtatataagttaaaaaaaatttaaatactatattgttatagaaaaaataactgctttaccaagagttaagtttgtcaagaagatccacaccctcttctccctctggggaagagaaaaaatacaaaacaaaacacctggtgcagcaagatttcgtgcatgcactgcctgaagctacgaataaatttattag

SEQ ID NO: 902865 - DNA, 678 bp, Homo sapiens
aaaaaaaagtatagcactgcaattcttctcactaatattttcatttaggaacatatagttactgctaattaaaatgttatttaatatgtcataggwttgctgttattatattcaaatgaatcaatgaatgaatgctttaaatttcttcagtttagattatggtatatatcagcagatatttcccaaatggaatctctttgaggtcctcaacaatttttttaaaaatagaaagaggttctaggtccaaaagtctgagaactgctgctgtacaatatgtacaagtaataatttatcacaaaagggtgcagggttaaggaaaaagtcttttaactagttatatataaagtatttcatagctgaaaaagaaagaaatacgtttcttcttaaagactcctctgggtcttttcttttctcatattgtcctatgcctccagccaggctcaaaatgtatgtggaacatgtaaatcttagtaaacatgtgatttttgcgggggaggaatgagatagggtaacacatgttattttgttatgtttctttgcttttttgttttttcctgtttcttttctttcttttttttttgtgtgtgtgcaaatcaaagcctctttaagactggttcattttaccaggtttgtccacttgactttttttcttaaataagaatacagttaatcataagg

SEQ ID NO: 902866 - DNA, 716 bp, Homo sapiens
atctgcctgagctccataggtaatgttatgccagtaaagaggaagagggtaaaaaagaaaatctgaaatttttatctctcacatgaaactctctctctaaaaagactcctaaaatgatatgttcctacttccataaagacaatctttggaggccttgccacattttcagcaaattcaaacataaaccgagccccttcagctagtcattcttcacttaatattttgcacttaatattttgaaatatgatactatagaatgttttccaaaattggaatagagaccaaaattttaaagtaaatgctaccattccacccaggtaaggtaaaataatgtgtgtgtgtttgtgtatgagcaaaaaaagcaaaatattttattaaaaagtatagaatattttagtgtaattgcagccattgaatttgaaactttttttggtaattttacagaaagtcacacttttgctattgaggtttactcagtcatcctaagagataaacatggtgttttaaaccaataatttcatccttaaatttttatatatgttacagagatttggattatttcagggtttcactctacagttagttacaatagaatttcccatttgagcagcaaaattcaagaaggttttttttatgagttgatttcckttttagaacttcgttttatgctaagatgcctttcatcaatacgtagaatactaaactatgatttggtt

SEQ ID NO: 902867 - DNA, 572 bp, Homo sapiens
agggcccaggtgcaacggctcacacctgtaatccctacactctgggaggccaaggaaggaggatcacttgaggccaggagttcaacactagcctgggcaacatagtgagaccccatctctataaataatttaaaaattagccagttgtggcggtatgcatgcacctgtggtcccagctacttgggaggctgaagtgggaagatccctttatcctggaaggttgaggctgcagtgagccacgatcatgccactgaactccagtctgggcaacacagtgagatcccatctcaaaaaaacaaaaacaggaaaaagaggtgccaggaatcagggccacctctggcagcagttgaggttgcagcagactatctctttcacattttttaaaactgcagggcatcttagagccttagagtacaagtcaaagtgttcaggctttgagtgtttcctcccactgccccagaccagttctagggtatgatttttatctttatttctggctgtataaatctgggcctggttttcagctctttcaacaatacacttttyaataaaacttcttctctgtttaaatt

SEQ ID NO: 902868 - DNA, 586 bp, Homo sapiens
gagatattattcaaacaatctgtaaagtaatttttgattgaggtgaagaaggaaaacttagtttggaccttacgtgttgaamtttctggttgtttctttgcatagcgcagatactagtaaacacacacttgtgatttcatcatccctctgtataaaaatgcacacattgtcaaaagtgattagtccattcagagaccacacttgatgtttatctgtcttattgctggcctcctggggacgtagatgtccaaggtggacacacagccttcccagagaatctcacccagtctcagagctctaagtgtgtaggatggtttggtgcttgcttgttgactgctgattttaacagcccggtgggtttttcaagtgtagtggaacggaaaactcagttgctcttgatgcaaactaaatagttatctttcaaactgtgagtccctctcttctctgtgggcatatttaaaattaggaagaacacagcagccacttgtcttagtgaatgcagtgacttgccttgggccacacaagagcagccaggcacattgccagctctgacagcaatggcgggttctggggtgtagactcaggg

SEQ ID NO: 902869 - DNA, 652 bp, Homo sapiens
tagcactagctgttaccatttgcrttagtcaactattgcaacaataatggtgcataataaagtacctcaaactcagtatcttacaataataagcatttattttcatgctcatgggtctataaatcaattgtatgggcttggccacgtggccttacggctgaagatagggtttaggattgctccacatgttggttctggggtccatactcaagggtctatggctacctgaggcatcttcctttcatgatgatcaccaaagaaggggcataagaaaccataaaagcacatttaagttctctgcttatctcacatttgctaatattccactgataaaagcaagtcacttggctgaacccaaaagcaatgggcagggaagtatcttctgcaaatggtcaaaggcagacgaaatggatatttgctgaacaagaaatctaaactatcccccaatattagggtgtgcaccctctctctcctttccttctttctcatttttgctccctgtcatctttgtgcctgtgaatgtttctgtattctagtgattttgatggctattgccttggtcaggttagggctaaggaagttgattacaactgaggttgaagagtggtcaattcaaatactaacttacattaagcactgccccagactgaga

SEQ ID NO: 902870 - DNA, 627 bp, Homo sapiens
ttttctcctatgtatatctctaygcttactgccaagactagcatttttactatccacaaaccagaatataccagtgagttgggagtttatattatatattcagacataccaagaaacaatgcagcttggatgatttccatttttacttcttaaaacatccactgtctaacctcacattgttataatttcacactattgtcaagaacacctattgtacatctcatggcatgataaaaaagtaagaacgaatcctgcagttaggataaaaataaaagctactaaaaatgcattcaatcttaaagaagaaaatgtttaaaaaagtatttatttaaaaatagaccatatgcctaaggggtttgtaggtaatgagtccagagtgcttgtttgatatattgctatttcttatcttaacaagagtgatagaaaggggaggtcatttacatatgaagaaaattctagaacacatggctaataaggaggtagttatgttttgtttttaggaataagaccacctctgaaaaagtacacttctctataactggatatagtttctgaaaagaatataaacttcatgagtgctgattcacagtctaccttgttccttcatgtacatcatcacatttgatc

SEQ ID NO: 902871 - DNA, 646 bp, Homo sapiens
ataactactgaaacattcaacatgatgaatctcaagtaaattttgctaaatggaagacgtcagactcaaaagggtatgtactatataatttcatttatatcacactagggaaaaggcaaaactatagcggggtggaggaaggggttgattccaaatgagcacgagggaatttgaggaggggagatacctgttctacatcttgattgtggtggtggttacatgattgtatgtgtttgtcagaatcatagaactgtacactaaagagagtgaatatactgtatgtaaattacatctaataaatctgatttttttaaaaaagataattactatgtaagaaaacattcatctttccattttaaaaaattattgaacatttactttgtctaacaaagacgaataacactctaaaatacccctttgagtttctctatttagtcacttaaattgtactgtatttgtgtattaatcagcctaaagctctccataggctttccattgcaatgtgaacaaatgttcactctttgcactggctagcacaatcaggctattgcctacttctstgatactgttttcttaaccctttctccatagctgactaggattgaaccaaactgactttcttctgtcctgatctcatcattctcac

SEQ ID NO: 902872 - DNA, 653 bp, Homo sapiens
tttgggccagctatgttgctaggcacttggaatccaatggcaaggcaaagacagaaagacaaaataactaactaactaactaactaamtaaataaataaataaataaataaaaccaaaaaagcagaaaggccgacagaaagaagagacagaaaagaaaaggaccggtttctgactttaaagagttgatagtctagtgtatggtggccaacagagcttcctataatagtggaaatgttctttattctctgctgcccaatatgatagccactagtcacatgtggttcttgaatacttgaaatgtgtctggtgtgactaggcaacagaacttctattctatttaattttaattaatttaaagttaaatcgctacatatagcaagtagctactatattagacagtataggtctagagggagaaatacttgaatcaaataagtgtaacattatacctgtgttatgtgctaagaaggatattaagtaccaagtgctctgagaactaataggaagatttgaccaattaagtaagttcaggaaacacttccctaaggaagtggcaaaggagaagaaatcagaaagaagagtaaggttcaattagatggagtgagttgtcacataaggcaatccaggcattaactaagggaaaataatatta

SEQ ID NO: 902873 - DNA, 629 bp, Homo sapiens
ccagatctctttataagtatttctttattcattccactctatttgagggcctatcatatgcccaacastttatacagccttgggaatacacagttgagaatagcacagggatactccctgcattcagagagcatacagtttgagggtaggacagacattaaataaaggacacaatctgtaggtgaatttaaggaaagaaccaagatgggattaaacactattctgcttcttactgactggtgactatatttcatcatgatattaacagcattataaaacacctaggaaaagtcaacaaattataatacatttcagtctgtcaagcagttttgtttaaggcagctttaaaaaatcctgacgtctaggacacaaccaagaccagataaggcagactttggggtgggacccaggcatcaatattattaaagctttccaggtgattccaatgtgcagccaaggttgagaatcaccgatttcaggggaagtttacacgtttttaatttcttttgtataaacatataaacttactttccattttatctaatatccaaaggccttctaattcatatgcccacttagtcacagaaaatatttatgcctcatcaccaagtgtaaaatttctgggtggg

SEQ ID NO: 902874 - DNA, 609 bp, Homo sapiens
cttatttcacgtagcataatgtccttgagttcatccatgttgtcatgaatggcattattcttattcctttttgaggctgaatattattccattgtgtgtgtgtgtgtttgtgtgtgtgtacgtgggtgtatgtgccacattttctttttccatttatttgttgacagacacttaggttgtttccatatcttggctattgtgaatagcgctgcagtgaacttgggaaggcagttatctctttgagatactgatttcatttcctttggatgtatatccagatgtgggatttctggattgtatggaagttctacttttaattttttgaggaacctcatactgttttccataatggctgtaccaatttacattcctcacaacagtgcacaaaggtccaggaagggagattattaagacaatgagctgagagcctaaaagtccaagttggaacggttgaagttacaatggtgagaccaaatgattcccaaacttgtctgaacattggcatcccctgggaactttcagaaatactgatgcctgtaatcaacccccagagattgtggcaaaattkgcctggaatgcagcccaagttttggaagcattaaaagatcc

SEQ ID NO: 902875 - DNA, 546 bp, Homo sapiens
ataaggttggggaaaggtaaactgcatttstatcagagactctttaggctgaatgattgtaattcaaatggttatgattctagtgacttggatccgagcaaaattggaaaagataaattctctgcctgagcctaggattagtgactacaaagataaggaggtaaaaacaaaagaagagcattgagattcagagagaccaaacatcaagagccctcccctgtatattacagtgtacagacacacactgaggaaaggaatatatgttcccactgtggaaaatagacaactactgcagtctgagagccaggagaagattaatggtgcctttcttacccatccttttgttttagaagtttgccaagatgcaaaccattgggctgaaggctaggggaatggacagggtatggccctattccagaccaaaaatgatggttctgtgggatctccagctttggttactagctcttgaagtttagctaatggaattaagtagaaattcaaccaagtttttaagtttcttttttaacttccaaaaatgtttacagt

SEQ ID NO: 902876 - DNA, 584 bp, Homo sapiens
ctctaccaataattttttaacttttctgattagtcatacctataataatctagatacccaatatataaagttctaattattttaggtcactttttaaatatgagtagttttttaaaaatatcataataccagtaaagaagtaagaatgaaactcatgtctccagaatatccaaagcaatctaagcaaaaagaacaaatccagaggcaccacattgcctggcttcaaactacactacaagctagcataaacaaaacagcatggtactggtacaaaaatagacacatacaccaatgtaacagaatagggaagccagaaatgaagccatatgcctacaaacaattgatcttcagcaaagttgacaaaaataaacaatggagaaagaagaccgtattcaataaatgatactgggaaacaggccagccatatgcagaagaatgaaactagactcctatctctcaccatatagaaaaattaactcaagatatattagattagacttaaatgtaaagctgaaacyatgaaaatcctagaagaaaacctaggaaaaactcttctggacattggcctagaaaaataatttata

SEQ ID NO: 902877 - DNA, 639 bp, Homo sapiens
attgagcactcaccaaggcaactaggaagtatatcccaggcagctttcctcattttrgctcaagtaaactctttaaaattatattttatcctcagcttatttctttaggtcaacaggataaaggaagttgagaaagatcttacttcagaaatactaccatgatgcactcagacaagcccaaacttggcagatagctaagtctaacatgttgtcctgagaaaagttctccagtactgaagacctcccatctgcaatgtcctgtagagaggaaatgcctgctggatagtcatttattctcagttcccaggaatactttccacttctctctgctgagatctagttcctcagcctgcgcaaaatctaaagtaacacatatttgaatatctttcatgggttgactcatgaccaaaaaaagaaaaaaacaatgctatcaataccttgcccaaaaactgtagaaagacaaaacagccaaaaaggcacctttttctgctttgataaactaccccaccatctctcactctttctcagttgtaaatcagacaatattttaagatgtctgctaaagtacagaggaacacaaatgaagagctccacatggtttcttcagagcatcatttttcttatttaaagttctattag

SEQ ID NO: 902878 - DNA, 619 bp, Homo sapiens
actctgaaaacagactaacaacaacaataaaggtgagtataaatattaaattacatttggcatatgtcatcttagtctcaaaakagttttgcaaacttgtaatttggaagacatgagtcatgcatgcattaacatagcttgtattgtcttaaaattattccagattggttccacattatggcagtaaacaagtcacctcaaatgtctgtagttattgctgtaattgatcaacttgtcaaagcagaaagtgaaagaactcagacttattgagctactcttaagttacttctgcagttggtgactgagctacctgctgagtggatagggacctgacaggtggaattgtgcagacagtagctatgggacattgggtttccttctttgaaaactatcaggtccagaagtcacatataactccaacttccaagtttttcaatgatacttcttcacaagtgagatcactgtttctaaataaaataaaagaatggactggataaagaaaatgtggcacctatacaccatggaatactacgcagccataaaaaaggatcagttcatgtcctttgtggggacatggatgatgctagaaaccatcattctcagcaaactaacacaaaaa

SEQ ID NO: 902879 - DNA, 721 bp, Homo sapiens
ttacaaagcactgctagaaatagaagtgaatgttgtgaagtcacaaaatgcaaaatcaacataaaaaaatcagttgtatttctatatactagcaacaacatagtggaatagaataagccaactatctgtcaggagtccctaagaccacccctacacctcggatagtcataggactcagcataaagttgtactcttggccaagacttttaacaatggtagagtaagacttactgctgaatcgtaagggataaaggcacaggtagaggctgcaggaacccatatacaggcttctctatgctctttccctcccaagaagggtcacacagagcacactcttcccccacaacaaaaatgcagcaccatgtggatgatgttgctgtctaaggaatcccatttgagacttagcagacaatgttttaattggaagtggtcacatagctacctcctgcctaaggtgcaccaaaattccagatttctagaaggaaagcaggtgtcagcatgaaccacaatttttgtgtgatcattctatgcacagtaagccactctcctcagttaaggagtattttttataaatttaggaaactgtttaccagttgagtcggagacaccccccaaaagccaagcttgcaagcaatcctctataaatgacagtagtctcaggtctgctatactaacttttatgatccaagaatcccrttattgactatatctaaaggaaatg

SEQ ID NO: 902880 - DNA, 677 bp, Homo sapiens
atagtggtatcagaaagaaaaagaaaacaaagtatgaagatagaaagaaacaaatgtcttgggggaactatttcagatagagtaaagggaaagaaagataggaaataagaagaaatagcacttctgtctttttccaactttataaccaggaattaagcctctaaacacagcttccttcttttttcatcttacaggtcctcatgataataccccaactagacctttaacttccttcttttcgtacaagatctcctgctcactaagatggcacacaacagagataattgcttattttcaaggtttcagtgttttctcataaacattataatatggcatatatattattttatatattacataatattaatataatatataatattagtatataatgataaatatgtattatatgtaataaataatatataaactgtatttgatataataaatatatataataaatatataaaatataaactattcaatgtaaataagatgccatatataatgatattttatatattattaatatattgtgattttaaaaagggttttctttttttcttcaacttttattttgaattcagggatatatgagtatgtttcttacaaaggtatcttgctacccaggtagtaagcayaggactcagcagttagtttctggacccttttctctc

SEQ ID NO: 902881 - DNA, 645 bp, Homo sapiens
cctgctctgttgcccaggctgtagtgcagtggcacaatctcagctcaccacaacttctgccttccaggttcaagccattcttctgcctcagcctcccaagtagctgggattacaggttcgcaccaccatgcctggctaatttttgtatttttagtagagatggggtttcaccatgttggttaggctggtgtcgaactcctgacctcaagtgatctgcctgcctcggcctcccaaattgttgggattacaggtgtgagccatcgtgcccggctagtcctttccttttgcttgcattcctgtaagagagcctaagcctcagcctgtgtaggagcacagaactttttaagatgactcatatacatgaggccctcccctcagctgttccatcattgagaaacttgtttctccatcctacattttctcagcttctgttattaaccctgatcccatggagatggagacagcttcatttcatttcaggctctaaaagtcttcctgagctagggggtctcatctaagcccgtggcagtaaataccacatttacactaacaattcctacatctatctctttttaggtataacctctctgctgamcttaagcctcacacatctaactgcctctaaggcacctcaaattcaccata

SEQ ID NO: 902882 - DNA, 676 bp, Homo sapiens
aaattctttgtaaagtggaaagtgctactcaaatatcaatgcttgyttttcagtctgagcagccattttcgtgtctgctgcctccttagagcagctattgactactctccagaaaaaaagagaatctgataggtttcacagaggtgatagagaaatttcagccacttccaccttttgtaagtgaatcacataatattctccattgtatccacaataaaggcaacaggactcatgtaggtgacctaacagggaagggaatgttggttaggcagcaccacctaatggctgctggacagaacctgtatcctcttccttgagaacatgggctgctttatcacttttttgtagatgggttttagatacaggcagactaggcattacactattaatttttaccaaggtcaaaagagatacatgactttgaccacctccttaaatgctgttagaaatgtgactggacaatgtcaggcatatcagaatcactgccactttgcctactcaaagctaatagatttagggcaccatgactaataagatggcatcttgctttctattaaagacacttcttttaatttctgctacagatgaagaaagaggaaataaaagctacttagaataaaccctgctataacttagcatatgtctggaaaagaacttcaggggaaattcaactcga

SEQ ID NO: 902883 - DNA, 632 bp, Homo sapiens
cttcttgtatgtgtaaaagcatctaccattttaattgaaaaattaaaaatatttaaatgtaatttttaaagaacaaatagacacaaagtgtttttgwgtacatgccttgcatgtgcatatacatgttaaggccaaacagttggagtgtgcctaatttcatgtaacctaccatgatttgttggaaaattatgtgtatctacactggatagatgagccaagtgaagctcaaggtagataagtggcttcccaaagtcatacctcactaagaccatatgttggccttctttctcctgcccgggacctcttagctggcccagtgttcacttaccagccaataccaccacatttctcaggtcgacctaatgcacacagaattgggagtctggtagagttgggaatcctgttaatcagtgtctcctttggtaggacataggtgatgatttcagtctaaataatgggcagtttaatgtcatgtggtgggatgggtgcaaggtgttgctaggctttgaaacattggccatctgggatttgccccttgcttcccacaagaactgtctgctaagcactcatgtccaggtagcactgccattaaagctatgtagccactcattaccaagctctgaaatccatct

SEQ ID NO: 902884 - DNA, 632 bp, Homo sapiens
cttcttgtatgtgtaaaagcatctaccattttaattgaaaaattaaaaatatttaaatgtaatttttaaagaacaaatagacacaaagtgtttttgagtacatgccttgcatgtgcayatacatgttaaggccaaacagttggagtgtgcctaatttcatgtaacctaccatgatttgttggaaaattatgtgtatctacactggatagatgagccaagtgaagctcaaggtagataagtggcttcccaaagtcatacctcactaagaccatatgttggccttctttctcctgcccgggacctcttagctggcccagtgttcacttaccagccaataccaccacatttctcaggtcgacctaatgcacacagaattgggagtctggtagagttgggaatcctgttaatcagtgtctcctttggtaggacataggtgatgatttcagtctaaataatgggcagtttaatgtcatgtggtgggatgggtgcaaggtgttgctaggctttgaaacattggccatctgggatttgccccttgcttcccacaagaactgtctgctaagcactcatgtccaggtagcactgccattaaagctatgtagccactcattaccaagctctgaaatccatct

SEQ ID NO: 902885 - DNA, 641 bp, Homo sapiens
tgttttacaatttctacatctgtataaactttattactcttaaaactcttctgagttcctcccttgaagagcatatgtgctgcaccatgttgaaccaaggagtgagagaagactcactttgtcaatgaatataaacagaattgatatctgagcctttaagagccaactcatgttttcaaatgtttctctctcatccccatagactgttagtgttccagaaaggaatgtttaattggcctgtgtgttggaagaaagaagataaagagcaaagctgtaagtgacccacaaggacataggagaagagttaacctttgttgctataagtcactgtggcctttggagtggcttatcactccaacacaatttagccaatcctaatcgatattctatccctttatctttctgcctatttcttattttctttgtcttatctcctcttctcttcattcaacttcttcaaactaatcttttcagatcttgccaaatatttttctcttaccaaatcctataagctatctgatatcttctctttcctactatcttttttattctttcttcaactgattttatcctatctatccactatccaattggastgaaaggaaaatagaggaagggtatagccaagatgtcttttaaga

SEQ ID NO: 902886 - DNA, 629 bp, Homo sapiens
tatgatcactgggtacatagctgctccccttctstctccaaaacctcaggcccacagaatgcctccatgaggatggctcaagagactgtttaaatccagtatgcccaaaatggagattactaacttcagccttaaactagatcttcttcctgtgattccaagttcaaagaaaagcaccatagtctgctcaatcacccaaccagatatctggacatctttgattctttcctctccctctctcattccccatgcccgaataagtactgacaacacaaactccacaccctaagtatgctgcagatctactctgatctgtaactgcacagatcagcactacctaagctaatgcctatgttagttcagcggttgcctaatgaagcttcctgaattcaggcttgtctcatccactttattcccctactgatcagatgatcttgaaaagcttttgatcatgtcacctaaggtagtactaggtaagtttttcttacctttgctcataatgctccagggattccttattgccctttgggtaaattccataccctgctaacaatttcatatatctcaactccttaatttacactcagggttttgaatgagctatgctctcttaaaacttattttctcaa

SEQ ID NO: 902887 - DNA, 636 bp, Homo sapiens
cattctgctgaaatctcactcagggtcattgcttctggttgtgcagagggggctggcagagggaatgaataacagctgcatcttaagtcacactccctgaaatagagctatgtccactgaaagggtggttggcttttctgtttggtaaaaaggcactgttctcttcccaatccccagcccaaaagactgtaggtcccttgtaggaagtgcatttttctaatttgcacaaaattacccattggcccagccagactcttgtctcacagtgaatgtacattgacaactattgtgcattaggcatttgatatattgcattaaacaattatatgctaacactttgcagaggaccttgcatatggtaagtgttcagtaaatttttatggaatcacgttgattcatattgcccatggccaaggcctagaacctttcaatgacatgttacatgtccatacagagagttataaaacctgtttgtagttttgttggcataaatatgcatgatagcctttgatatgctctctaatcatctgaatttttaataactaaaacgtttatcacttgctttcaacagaaaggtgttgtaaggacttgtgaattaaaatctataagcrtgttcacatcctcattagagagtgg

SEQ ID NO: 902888 - DNA, 607 bp, Homo sapiens
caaaccaatcatatcttaaggccttgctttaacaatataacaccagataaaactgcttctgaggacttgtggtttttaatctctaagataggcatraggcttgaacgtatagaatatgttactttcaccttcttgcaagtttcatcagcaatggtacacagtacactagatacatctaaattatacccgtcttaggttgtatgttgctgctgctcaatgttacaatataattacatttctgttttcttctttttccaaccacatttaactgtttgggagttaaactcattattcacaggccattccaaatgcttttggaaaaacaaaattcttctccctaataacagtatatattcatagtaccagatttaacaaccattcatggctggcatcatcattattcaccttttatacatgaggcaagggggactcaggaagtttagaagtctgtactacatttttctgataatgaatatttgctacggaaaattattaggggccacacacactgtgtgaccaaatattacaaaacaagtaacaaagtttatattcacaatttattttattttattggaataactgtggaaaacaaagtaacagaagatta

SEQ ID NO: 902889 - DNA, 620 bp, Homo sapiens
actgtaacacagatcattggtgtttcaaaaaacccatccatccatgtcttcatttatttgcaaaacaagggcaggaaaaactagaattaaattgttaattctctctcggtctctcagggcaatatgttgggcagttacttgagtgagatattttttatcaaaccaaatatgctgaggcaggaataacatcaaaggtgtttgtgatgtactgttgctctcattagttacctgcagatcaaacaggtatctgttctaacacttcgattttgaaacttaatgctgtgtttgttaaatttacttaattaggacctcttaacacctcagatagtcgcttaaaacaacaacaacaaaaacaacagtaatacccagctgttagccctgcggatgaaacaataaatgcaaagttaacactttttaaaggtgaatatgtacattttgatgcctcgacagcattcagtaaaaatcaagtgtgcttagagataatctactaarttgctgattgtttctggacctgtaactcttaataaatattgcaaatatctaaaagatatggatcattatttaggggaaatgtatgtgtatgcataaatgcaatcttttataatctaaaaatacttttc

SEQ ID NO: 902890 - DNA, 582 bp, Homo sapiens
ataaataaaactttaaatgagccagggcatgataaaccattctcagtaaatgagacaagggataaagtaatagcctttgccatccccttgttggataccaaggtgtttgtccagacttccagacctcagaacactcaatatagaaatgggtttctccagatatgggacgggttcatttggctgacagccactaagggacacttaagccagatagctcccttatgctgggagcaaagaaatcactcccttgataactggccaaacacaactcgtgttatgggatggattccacctggacagtgccgacatactatactgttacaacagagggacctatttgccacagactggtctcagcaacctggcttgaattggtatgctcccaacggaacccagtggctctgcagcccaaacttatggccttggcttccctcaggttggttaggatgctgcactctaggtattccctgggcacaaggacgctgggtaaaaaccatggaagtctatccttatcttccacatgtggttaaccaagggactagggccaytgttcacaggaatgatcacctacccacaatcttt

SEQ ID NO: 902891 - DNA, 626 bp, Homo sapiens
aggagtggtgagagagggcatccctgtcttgtgccagtttgcaaagggagtgcttccagtttytgcccattcagtatgatattggctatgggtttgtcataactagctcctattattttgagatacatcccatcaatacctagtttattgagagtttttagcatgaagggctgttgaattttgtcaaaggccttttttgcatctattgagataatcatgtgggttttgtctttggttctgtttataagatggattacatttatcgatttgtgtatattgaaccagcttgcatcccagggatgaagccaacttgatcgtggtggataagctttttgatgtgctgctggattcagtttgccagtatgttaatgaaggtttttgcatggttgttcatcagggatattggtctaaaattctatttttttattgtgtctctgtcaggctttgatatcaggataatgctggcctcataaaatgagttagggagggttccctctttttgtattgattggaaaattttcagaaggaatggtaccagctcccctttgtacctctggtagaatttggctatgaatccttctggtcctggactttttttggttggtaggctattaattattgcctca

SEQ ID NO: 902892 - DNA, 508 bp, Homo sapiens
  misc_feature 380, 411: n = A,T,C or G
atattctctgatggtagtttgtatttctatgctattggtgktgatatcccctttatcattttttattgtatctatttgattcttctctcttttcttctttattcgtcttgctagtggtctatcaattttgtgggtatttttcaaacaaccagctcctggattcattgattttttgaagggtttttttgtgtctctatctccttcagttctgctgtgatcttagttatttcttgccttctgctagcttttgaatgtgtttgctcttgcttctatagttcttttaattgtgatgtcagggtgtcaattttagatctttcctgctttctcttgtgggcatttagtgctataaatttccctctacacactgctttaaatgtgtntaagagattctgctatgttgtgtcttatttntcattggtttcaaagaacatctttatttctgccttcattttgttacatacacagtagtcattcaggagcaggttgttcagtttccatgtagttgagt

SEQ ID NO: 902893 - DNA, 577 bp, Homo sapiens
  misc_feature 307: n = A,T,C or G
ttcacgtagcagaggaataaagaacactaaggattgtggcggggacctcatgctggtgaacatcccttcctttgctaagakttaattgcaagactgcatcaagctgcaaaggtgggggaggagctggcagaaatagagtccctagctgctcacccactttttagcagcaactctaccctgtatgaaagaggagcatggacttttgatatacagccaggtatgtctgatagggatggaaaccttcctgaaatgcatgagtactgctcctgaatgatgcagagaacataatcctttcttgaaaacttantgcagttgtttcccagtgtgtgttcctagttaacctaatcctgtgaggtgctcccaaaacaaaactaaacaagacaaagtcttgtgtcagaacgccaataatacaatttccacaaaggggaacatttttggatgtgaattgcattttaacatatgtgactcttttaattcatttcagattacttaaatggatggattttttttttaaactgtcactcttctacctgtttctcttcatctttcccaggtgcctttacagctgtgaagtcag

SEQ ID NO: 902894 - DNA, 679 bp, Homo sapiens; identical to SEQ ID NO: 900642

SEQ ID NO: 902895 - DNA, 628 bp, Homo sapiens
ttcactttgcagtttgccctctcactccctgaagctagggccctagacttggtacctccccctaaataaatgtttgagattgaggagttaatgtatcaaggaaattgactttccagtgaaaargcagggatatctccttacaaatgaatttgcatttcctttcttctccctggtgcttaccccgccccatcattaactgtttagaaatatgtttaatttattttaagaaactaatacagttatatgccactaacaatgacttctctttttagacttgagaaatgcttgtgtcccacattttaaagaaaaatcagtgtcaattctcaattattctgggaataacgatttagtgcagcggttctctgccttctcaggcccaaagcctccctttatgtaacacatattttgagatacccctttaccattctaaaatgaaatttgcaggtaatataacctaactagccacataatcacacaaaaaatataaaatataaattgcaatataaaatagaaatttaaaaaatgtaactgaaaataatgtttcaataggtaaatgacaaaactgaagataaattctacaactttccaaaatatttcacagggagtggaactaatctggatgagaacc

SEQ ID NO: 902896 - DNA, 600 bp, Homo sapiens
ggaatgctttcaacttttccccatttggtattatgttggctgtgggtttgtcatagatggcttttattacattgaggtattatgttccttgtatgccaattttgctgagmgttttaatcataaagtatgctagattttgtcaaatgctttttctgcatctactgagatgatcatgtgattttggtttttaattctgtttatgtggtgtatcacatttattgacttgcgtatgttaaaccatccctgcatccctggtattaaactcacttgatcgtggtggattatctttttgatatgttgttggattcggttagctagtattttgttaaggattttagcgtctatgttcatcagggatatcagtctgtagtttccttgattggttatgtcctttcctgatttgggtattagggtgatgctggcttcatagaatgaattagagagggttccctctttctctatcttgtggaatagtgtcaacagcattggtaccaattcttctttgaatgtctggtagaattctgctgtgaatctgcctggtcctggactttcttttggttggcaattatttagttacaatttcaatctcactgcttgtta

SEQ ID NO: 902897 - DNA, 605 bp, Homo sapiens
atatctatgtctgactatctttcttttgaaagatcttttttattctcttaatgtcctccactttttattaaagtttatctttttcccttgcaaattggcaaaacagatacaacatcaacaaacttatcaaaattatctttgagaaaccaagacccaacagggaggcagagtgattgaattgattgtgcagagtttgacagaagaagggatatttccagatacgcctcatatgagaatgccaaccaacatggccatctaccaaactaataaatattttgcaaaaaattccttttttaaggcccgtcttgacacataggtaacttggtcattttttggttataaagggcagaatgatttcttcagtaccaaagagtctgaaaactacatactctgatgccaactcccttgtaaagcaattgccatgttggaggagggaaccattattgttcacgggagccagatgtacctggttggggggaggctttgggatgycaggcacaggatcaggctcttgttaggtgtgaaggggttcaagcagatcatgacaattcacaaagtggagagtgagcaagaggcagagtgagcacaacattctttttgtactc

SEQ ID NO: 902898 - DNA, 646 bp, Homo sapiens
aaaacaggaacataacaggatctatcactcrcaatagctaataatacagaaaaccaaattatcaggatgagatattttcctaggtctgaaatctgagaagtaacattgcatgagtctattttggggaatttttggaatcacatataatattgtaattaggccttgaaggaaagaaaaaaaagaagatagtaacttggtgtaaataatgaattcaggctgggtgcagtggctcacacctgtaatcctagcactttgggaggccaaggcaggtggataacctgaggtcaggggttccagagaccagcctggtcaacatgatgaaaccctgtctctactaaaaatacaaaaagtagccaggtgtggtggcacatgcctgtaatcccaactacttgggaggctgaggcagaattgcttgaacctaggagatggaggttgctgtgagctgagatcatatcactgcactcctgcctgggagacagagcaagactgcatctcaaaaaataataataaattaattaattaatacattaattcataaagataaaatagaaaaaatcaccgatgcaggtgaagacaagatctagaagactgaaggaaatatcgaatgtgcaccactggtgtggtcaccaatcaggcatactgcccc

SEQ ID NO: 902899 - DNA, 646 bp, Homo sapiens
aaaacaggaacataacaggatctatcactcacaatagctaataatacagaaaaccaaattatcaggatgagatattttcctaggtctgaaatctgagaagtaacattgcatgagtctattttggggaatttttggaatcacatataatattgtaattaggccttgaaggaaagaaaaaaaagaagatagtaacttggtgtaaataatgaattcaggctgggtgcagtggctcacacctgtaatcctagcactttgggaggccaaggcaggtggataacctgaggtcaggggttccagagaccagcctggtcaacatgatgaaaccctgtctctactaaaaatacaaaaagtagccaggtgtggtggcacatgcctgtaatcccaactacttgggaggctgaggcagaattgcttgaacctaggagatggaggttgctgtgagctgagatcatatcactgcactcctgcctgggagacagagcaagactgcatctcaaaaaataataataaattaattaattaatacrttaattcataaagataaaatagaaaaaatcaccgatgcaggtgaagacaagatctagaagactgaaggaaatatcgaatgtgcaccactggtgtggtcaccaatcaggcatactgcccc

SEQ ID NO: 902900 - DNA, 286 bp, Homo sapiens
tgcattgtttgaccaaattytggggagacagcactgataggaagaacttatgtggttacatgtctggcccacgtgtaccagaaacacataaacagaagattcgcccccacagcttctgtagttagaggtggcaatgagacgtaggcacagaggagacactaagaattgcactcctacaaactcattgatccatttgttgattcagctggaagtcaggtgcttacaggaagtggaggaacaagccaattacatcctatgtaaaaataggcatgataataacaactgc

SEQ ID NO: 902901 - DNA, 630 bp, Homo sapiens
tcaacccaggtacacatacaaatgtgtggtttgccaagcctggtggacagcaggaccaggaaaatgggttgggtgaaataagaagccctttaagccttctatcaaagctttcccttgcaccgtgcttcttcatggtttcagaaagaattagagaacaggagcttcctattaccttttattttgggacttgccaagaaaacctgcccactctgatttccatttttctctaaccagtggagccccaacgacattgctggtaagaccagttctcctctctcttgtcagctttgtgtggtggctctgaattcttattctggtttcactacagaacattaatgagttgatatgtgtctctcttctcagagcctacaggtttagcagcaggctgtgactggactgtttaatattctagtctctagtggatggggcagcagtaacagccaatgctgtgctctcatccatccacccatctttattcctcctgatctattaaagcttccttataaaattgctaagtatgtgctcacggctttctctgaggcaagtgcatgagaataattacttttattttaataayaaaagaaagtagggttaggaaaagtgagagatttattccacaaatcactgcag

SEQ ID NO: 902902 - DNA, 588 bp, Homo sapiens
caggttgccttccttatcactacctacaaaaattaactgcagatggattaaagacttaaatgtaaaacccaaaactataaaaaaagaaaaaaaaaaaaaccctgggagacagccttgacaataccattctggacataggaatgggcaatgatttcccatgacgaagatgccaaaagcagttgcaacaaaaacaaaaattgacaaaaggaatctaattaaactaaagagcttctgtgcagcaaaagaaactatcaacagagtaaacaggcaacctacagaatgagagaccatttttgcaaactatgcatctgacacaggtctaatatccagcatctgtaagaaactcaaacacatttacaaacaaaacaaccccattaaaaagtgagtggacatcaacagtcacttttcaaaagaagacatacatgcagccaacaggcatatgaaaaaaagctcaacatcacttatcattaaagaaatgcaaatcaaaaccacaatgagatagcatmtaagaccagtcagaatggtgattattaaaaagtcaaaaaataacaggtgctggtgaagttatggaaaaaaaggaacacatac

SEQ ID NO: 902903 - DNA, 614 bp, Homo sapiens
acagaaaaaattgtgtcctcamaccctgcccttgaaaactaggctaagtttaataatataatggaagaaattggcctagtttccatttccactaaaagagtttttttttcggagggggaggaattaataaataagattaaattatggttctattaattgctgatgaaataaaattaaaaggccgggcacaaaggctcacgactgtaatcccagcactttgggaggccgaggcgggaggatcacgaggtcaggagatcgagaccatcctggctaacacagtgaaaccccgtctctactaaaaatacaaaaaaattagccaggcgtggtggtgggcgcccgtagtcccagctactcaggaggctgaggcaggagaatggcatgaacccaggagacagagcttgcagtgagtcgagatcgcgccactgcactccagcctgggcgacaaagcgagactctgtctcaaaaaaaaaaaaaaaaaaagaaagaaagaaaattaaagtattaatgattgtcattaatactttacagatgacaaaatgaatgcatagaaaggtaagtaacttatttaagaggtcacagaaataataaaatacagaaccagatccaaccatgta

SEQ ID NO: 902904 - DNA, 619 bp, Homo sapiens
gtgccacagtcttttgctgcacccatcaacccgtcatctacattaggtattcctcctaatgctatccctcccctagcccccaacccccgacaggccctggtgtgtgatattcccctccctgtgtccatgtgytctcattgttcaactcccacttatcagtgagaacatacggtgtttggttttctgttcttgtgttagtttgctgagaatgatggtttccagcttcatccatgtccctgcaaaggacatgaactcatttatgtctgcatagtattccgtggtatatatgtgccacatttcctttatccagtctatcactgatggacatgtgggttggttccaagtctttgctattgtgaacagtgctacaataaacatatatgtgcatatgtctttgtagtagaatgatttataatcctttgggtatatacccagtaatgggattactgggtcaaatggtatttctggttctagatccttgaggaatcgccacactgtctcccacaatgactgaactaatttacactcccaccaacagtgtaaaagcattccttggccaggtgcagttgctcacacctgtaatcccagcactttgggaggctgaggcaggtggatcatg

SEQ ID NO: 902905 - DNA, 614 bp, Homo sapiens
taaaagaatagagttatttttctttagagtgaagaaagaaaaataaaagttaatctgctaagatgttaacagtaattaatgctgggtatggaaatctcttattttcattttcttattgtacttaactttttttgtttctaaaaagtgttagtgaaagattttttaaaaagtctttacaaacttgtttagtaaacaaaagcagttacaaatgggcatattatgtaagtttcactcttcagaatgaaatttaaaatgaatttttctctaggttccttaattttaatagtggagagtttgatagttaaattgatgtttagtaagaataatcacaagatcgcatttgggaactgaagggaaagggaaaaaggcaatggtcatttcacgaatgcctactgtgtcctcagcaatggactaagtcctttattatctcatgtagtcttcacaaaaaacccaggagatgggcactattattattcctgcttttrgaaatgaggaatctgaggttttgagacagtaaatcacttgccaggattgtgtgaggcaggattctaacccaaattgtataacttcaaagcccattgcattcattctctcatttaattctcataatcttt

SEQ ID NO: 902906 - DNA, 667 bp, Homo sapiens
cttgtgacatggtgggtctgatagaatgaaaaactgttctaccctcattgtcatttgatgtttcaagatcagatactctcaagggctcagcagcacatttggagctgtttattgagcastatataattttgtgctatagatggtatggctttgtgcaagaaccctcagatctacttatgattctcctattggtgcttgctagaaactccacacagtgtcttttcccaccagagataccatagggtctgctgggtcatatggcccaagtggcaaggctgtttacacacagtttggacctgctatagaacatatccttcatctgggccacactgaaagctggtatccttacaggttatgcagtaaatcatcagagtaccattaccaaatggggcataggctacctccaggattcaaaaaaccaggttttgtggttgttttttcataataggaatccaagaggaataatttgtgttttactttgacagacttgtcctaagctcctcaatggtcccttaaacatttcattgatctggtacatctttgaatctttataggatttatctcccatcctatacagtgcatgtttcttaccaaggcctccaatgtacttccacttattgatcatcttgttaattaattatgaccatttaactactgtgatattctg

SEQ ID NO: 902907 - DNA, 667 bp, Homo sapiens
cttgtgacatggtgggtctgatagaatgaaaaactgttctaccctcattgtcatttgatgtttcaagatcagatactctcaagggctcagcagcacatttggagctgtttattgagcactatataattttgtgctatagatggtatggctttgtgcaagaaccctcagatctacttatgattctcctattggtgcttgctagaaactccacacagtgtcttttcccaccagagataccatagggtctgctgggtcatatggcccaagtggcaaggctgtttacacacagtttggacctgctatagaacatatccttcatctgggccacactgaaagctggtatccttacaggttatgcagtaaatcatcagagtaccattaccaaatggggcataggctacctccaggattcaaaaaaccaggttttgtggttgttttttcataataggaatccaagaggaataatttgtgttttactttgacagacttgtcctaagctcctcaatggtcccttaaacatttcattgatctgktacatctttgaatctttataggatttatctcccatcctatacagtgcatgtttcttaccaaggcctccaatgtacttccacttattgatcatcttgttaattaattatgaccatttaactactgtgatattctg

SEQ ID NO: 902908 - DNA, 584 bp, Homo sapiens
cttggtcccctgaaggcaattgacctcagtgcaacctggagcactctmttagctctgatcccactgccacctaccacaatcccagcacctggcacagccagggacagctgccaaccatccatccaagttagaaggcttaagcaagtatccagtaggagtcactcccttacctccacttttcctacaatctgtctccatggagttgcttattaaggccaagtgagtctataagcctctctgcaaaaagaaattttccttaaggcattcaaatgtttcactgctttataagaccttttaagaacacttacatttataatgcagatttaacatgtgcacaacttttttgcacaactgtttaaaatcttgttccaaagacttgtagaaattaaattttctaactcattcccagagaatgctagtctttaatctacgatgaattccctggttctcttgtgttcctgacttcaaatgatacaaggcatttgtctcacaatctctcaccaacaataggccttcctagcatatctaggcctcattttgggttgttgattctaaaaagtgagaagtctgaggtttaatcaata

SEQ ID NO: 902909 - DNA, 584 bp, Homo sapiens
cttggtcccctgaaggcaattgacctcagtgcaacctggagcactctcttagctctgatcccactgccacctaccacaatcccagcacctggcasagccagggacagctgccaaccatccatccaagttagaaggcttaagcaagtatccagtaggagtcactcccttacctccacttttcctacaatctgtctccatggagttgcttattaaggccaagtgagtctataagcctctctgcaaaaagaaattttccttaaggcattcaaatgtttcactgctttataagaccttttaagaacacttacatttataatgcagatttaacatgtgcacaacttttttgcacaactgtttaaaatcttgttccaaagacttgtagaaattaaattttctaactcattcccagagaatgctagtctttaatctacgatgaattccctggttctcttgtgttcctgacttcaaatgatacaaggcatttgtctcacaatctctcaccaacaataggccttcctagcatatctaggcctcattttgggttgttgattctaaaaagtgagaagtctgaggtttaatcaata

SEQ ID NO: 902910 - DNA, 571 bp, Homo sapiens
caatgtgatggcggtaggagctgaggacttttcaaggtgattaggtcatggaggtggaaccctcatgaatggggttggtggcctaataaaagagacctcagagagcccagagaaatgccttttcccttctgccaggtgagggtgcattgagaagacaccttctacgagcccaaaagcgagtcctcagcagacactgaatctgacggcacattgatcttggatttccaacctccagaagtgtgagaaataaattgctcttgtttataagccacctagtccatgatattttgtgatagcagccccaaaagactgacataattcctgaaggtccaggtttccccttggtatcatttccctttgatctttcccatttctttagagcatggttgttggaaacagtctccgagttttccttcatctaagattgcctacataatatttttgctaacttcagaatttgcacgggtgcttctttttgtttattattttaaaagtgttattcccctaccagcttgtctccatggctgttacagacaggaarggccagtgagacgttagcagaaacctggga

SEQ ID NO: 902911 - DNA, 652 bp, Homo sapiens
aatactcttttctatggagatctaagccaggccaaggttaaggatacttttamgagaatgttatcattttaataatgttcttagtggcaaagactttctactaaataacaaaggcccaaaataggggttatatataagaggctcactttccttaatctctatagaggtaaataattgaggccctaaaactgtagtgttggtttttatcataaagtgtcaacttacaaatatttatctaaatggttggattattactattgggaaaattatgtgataaattctttgaggatttgttcacttatccacaatctcacctccaatgtatattatctaagaaaggctgggcaccgtgccaagaactatagaataaatagcctgagccacgagtagtttctgctcgtggggttatagtttgaggatataagaaatataaatatcaaaatatcacattatattggtgccagaactgtacagtcatgttattcagccacatgcaaggttgtttgtagagcctgtgaggcagatgagctgagtgcctgaagacagacaggtctgaggctaggaataacttcctggtgtttccaggattaaacaccctggcaatctgagaactagagtacctcctatccataaagtcattttctttatgacc

SEQ ID NO: 902912 - DNA, 600 bp, Homo sapiens
tgagaccacttaaacaaacaaacaaacaaacaaaactaaagtaaaacaaaactggtatgtcatcatagtagtaaacttttaagaacacagttattgttactttttagtctctctagcctattcactgactaaatgtatttgcctccaagcactaggctctgctcttgagaaaattatatgcctcttttccctaaaaaagctttattttgatgtatttcctcaggctacatttttaaagagggcatcagaggcagtcattatttctattcttgataaagaggctaattgtgaacttattttttttttctatcagtacctggtgacaggcatttgctgagacatagtgacaggtgtaagctgacctctacaaaattgtaacctagtttctgcccatataataactgttacaggcatcaaataaaaatgtattctacaaaagcctaacttcagattatttcaactttaaaaaatatgtagttaataatgtacttaaattataaatatttatcatkactaattgcatgcaatacttaatctttaatttagaaagcagagcatattgttaaagagctattgtaacaagcagtggataagagaatt

SEQ ID NO: 902913 - DNA, 609 bp, Homo sapiens
taacaataaatgtttattttgaagaaaggatgaagaatgactatgttgagcctggcttcagggatctttcataaaacattgatagatgtttcgccagtagtgctagaattgaagattttgyttcaatatttctgtagaaatatttataaagaaataaatctcatgttttcttttttccctaacatcagaaaaacatgttattgtaggctttgagagtattgactttctcgtaagggaaatataaacatctctaccacttaccctcaaatatgttacctagagtcttactcattttagttcctagtaaaagggttctatgttttgagtaaaacatattgaatgtcaattatttccctgtaatgatcccaaatatcttgaaaatgcaagaagtactttgctttctgtctgtcagcagcaacgcctagagggccatattctggaagcactggacttcctgttgaatgtatggtgagaatattgacttttatagaagaattaatgttgatgtaaccatttctggtggacttatattgttttctcagtttctactgcaggacaaactgcttctcagtttctactgctttagagtgacccagttctccctttctt

SEQ ID NO: 902914 - DNA, 587 bp, Homo sapiens
aattacttttaaaaatttatacactgaataaaatctaaaaaatatataaacagccagagagaataaatattatctttttgggccaggtgcggtggctcatgcctgtaatcccagcactttgggaggccaaggtgggtggatcaccagaggtcaggagttcgagaccagcctgaccaacatgatgaaactctgtctatattaaaaatataaaaattagctgggcatggtggcaggtgcctgtaatcccagctacttgggaggctgaggcaggagaatcacctgaaccgaggaggtggaggttgtagtgagccgagatcatgccactgcactccagcctgggcaacagagggagactctgtctcaaaaaaaaaaaaaaaaaaaaaaaaggttatctttttggtgatttttatttgtaaaaatgtgataattctcaatacaattttgaacacagcatttttaaaaattattcaatagcatcaatatattttaaatgcattattttaayggttgcagaataatttctgtctgtggtataatttatttataaatgtccttatatatattttcatattaataatgctgagata

SEQ ID NO: 902915 - DNA, 596 bp, Homo sapiens
catacgtatctaaagttaaatttatagattaagcacaataagaaattcacaagtaataacaaaataaaacaattataacaataatcaaagttatgtgaacgcgggacttcctgtctctcactcacacacacaatgtcttatcgtgctgtactcacctattttcagaacttagttgaacatgggtcagtaaaactgcagaaagcaaaattgcagataataagggactactgtataggtatgtatatctttgggtgtgtatagagagagatcttcatatatatatgccttctgtatatgtgtgagtatatttaggtgtgtgtgtatatatatatgtatacttatgtgaagatatatgtatatgaagatacagacacacacacagagatacacacacatatacagtagtccctcatacacaaagatacatatatatctttgtatatatgtgtatatacaaagatgtatatatgtatatataaggatgtatatatgtgtacatgcaaagwtgtatatatgtatatacaaagatatatttgtatatatgtgtatcattgtacatatatatacacacacacaaagttacacacacatacaca

SEQ ID NO: 902916 - DNA, 651 bp, Homo sapiens
ggggagagagccagaccatatcattccacccctggtctctcccaaatctcatgccctcacatttcaaaaccaatcatrccaccccaacagtcccccaaagtcttaactcatttcatcactaactcaaaagtccacaattcaaagtctcatccaagacagggcaagtctattttgcctatgagcacgtaaaatcaaaagcaagttagttacttcctagattcaatggtggtataggcattgggtaaatatagccatttcaaatgtgagaaattggccaaaacaaagggattacaggccccaagcaagtctgaaatccagcagggcaggcaaatcttaaagaacaaatgatttccttttattgcatgtctcacatttgggtcatgctgatgcaagtggtgggttcccattgtcttgggcagctccacctctgtgactttgaaggatatagcccctcctggctgatttcacaagctggcatggagtgtctgtggcttttccaggtgcacggtgcaagctgttggtggatctgccgtattctgggagctggaaaatggtggccctcttctcacagctccactagtcagtgtcccagtagggactctgcatgggggcttcaaccccacatttccctttaacactccctaacaaagg

SEQ ID NO: 902917 - DNA, 788 bp, Homo sapiens
tatttcaaaaactaaaagaaacaatacttaaagaagaaaggtatgatgacaatgtgtcatcaattaagagaatatcaataaaaagacagaaattatgttttcaaagaaccaaatgaaaattgtgcagcaaaaatgtacattaactgaaatgaaatattcactagagggacccaatagtagatttcagatgacagaagaaagaaatctgaaaatttgatgacagagcaatagagattatgcaatctaaaaaacagagagaaaaggtaatgaataaaaatgagcagaaactcatagaaatgcagggacaccattaagctcaccaacatacatgaaatgggaataacagaagaagagaggggaaatgatggagcataaaaaatattcaaagaataatggctgaaaaattcccaaatgtgatgaaaaacatttatttatacatctacaaaacccaacaaaatctaattaggataagtgcaaggggatctacaccaggaaacaccatagcaaaaatgttgaatgttaaagacaaagggaaaatcttgaaagcagcaagtgagaaataactcatcccatacaagagaacctcattcaaattaacaattgactttccatcagaaacaatgaagacagaaggtaggagaatgacatactcaaaatgctgaaagatcaaaaagtaattgtcaacygaagaccttatttctaacaaaactatctttctaaaatgatggcaaaataaagacattctcaaatatataaaaatgaagagaatttgttactaacaaacccat

SEQ ID NO: 902918 - DNA, 499 bp, Homo sapiens
cagcagcccttgagtcccagatcttccctctgaaatagtctacacaaatgagaaagaactagaaaaataattctggtaatgtgacaaacaaggttctttaacacccccagaaaatcatactagctcaccagcaatggatccaaaccaagtagaaatctctgaattgccagaaaaaaaacactcaaaaggttgattattaaggcaatcaaggaggcatcagagaaaggtagagtataacttaaaaaaatatatatatatataagatatgaatggaaaaatctctagtaaaatagatagcataagtaaaaaaaaaatcacaacttctggaaatcaaagacacactttgagaaatgcaaaatgcactggaaagtcagcaacagaatcaaacaagtagaagaaagaacttcagagttcaaagataaggcttttgaattaacccaatccaacaaaaacaaamaaaaaataattttaaaaaaatgaacaaagcctccaagaagtg

SEQ ID NO: 902919 - DNA, 655 bp, Homo sapiens
aaaatcagcaagataaaaccttagaaaaggaagattgcttactagtccttaacatattaagcaatgatataacaaaatgtaacatctrctgtaaacaattttttccctatttcttaaatggtattttaataataatttttgggtattaaaacatcaagaacatttcaagaagatttacaagctacgcagtagaaagtaagtgctgcttgtgaccagccagaaaatgtgtgtcataatgatatcccagaaaagtcttggaatcagggcatgatgtttctgagccaaaagtctacctgtgatatctaaggatgaaacaaaataaatatgcatacttaacataatctaaatatcattgtattttattcatctatttgcatgttggttaccttcactagtctatgagctctttgggaacaataaatgtctttttaattaatgaaaacagtgttaccctgacatgacaaaaattttaaattgtatcctgaatttgagacgtagttgaatattagtatcaagacaaaggtgcatttatctcagaaatataaaactaatttatcattaaaaaaatcaagcaacatgattcatatattaatatattttaaaagaagaatataactatctcaagagatataaaaaagtgataaattcaacttga

SEQ ID NO: 902920 - DNA, 565 bp, Homo sapiens
gctgcataaaagtctaaaacgtgaaaactaggggaataattcagaaaaactattaaaagatatactctgtaagaatatattcttcaaggtccttgtaaaaagaaagttatttttaaatgtagcaacttttatcattttatttaagtttagagaaaactttgcctttgattggaaaattatttttccccatgccttaggctgtatagaatattaacaatagtcactgtaatgcaaagggaagcatgaaaaggatttgcctttttgtcctgctttataatcttccacattatttgaataaaataaaatgacaatgagtttgagaggttttcaaactgactacagattacagacaaacacaagactggcgtgtgtgtacctctctgcctgctggtgttgaattctgtcaaacaaactccaaagatgaaagttcaattttgagtgtcagctttaaatctaaactcctacttatgtgacagttctactcagcttggacctccagattgaagtccactggttagtacactgcrctatgagcagcacagcctggtggtaaaagcccagatct

SEQ ID NO: 902921 - DNA, 717 bp, Homo sapiens
acttcaattaatcaaaaaaagaataaacctgaaaatcaatgtttcaaatatttgacacttagagaaccccctaaaacagcaatcttgttgcaaaaaaaaaaaaactggactttgtgcttttagtagcaatatcctaaaagtccacaagagggcagtcctccttacagcagagggccccagaaccgtaggtgggtggaagggaattgtgggtgatgaggtaagctaataataccatcaatgggagccattattaagatacttttgagtgataacgcatactatgaagaaaataaagcagagtaattagacagagaatgcctcgaggggaaagttaatgggaacattaactgagtggagaactgacctttggataaaaaagggttagccatcagtagactggggggaagagtattacactggaaaaaataggagggaccaaattggacatggtcttggtctacttgggggacagaaagaagggcagtgaaagaaagtgaagaaagaggtgaggagggaacattagatcatgcaagtaatgagcagctcccaggcctttctgatcctggagtttgttcactgaatcactatgctactttgaactctgaagaaaaagccaaagggcactgatcaagacaktaaaagtggtattttttggaaataatgaaaataatttaggaaatgtctcagtgcttctcagtaaagaattgatcagaaatc

SEQ ID NO: 902922 - DNA, 636 bp, Homo sapiens
atccagagaatgctggtgcaaagggtgggtttccaaagccttgtgcagctctgcccctatggctttgtagggttcagcccctggtgctaattttaaggcctgatctagagtgcctgtggcttttccaggtgcaggaatgcaaactgtcagtgaatctaccactttgtggtctgcaggacagtgccttcttctcatagctccactaggcagtgccccagtgggaactctgtgtaggggctcaaatcccatatttcccctcttcactgctctagtagaggttctccatgagggctctgctcctgcagcaggcttctgcctgggcacccagtatttttcatacatcctctaaaatctaggtgaaggctcccaaacctcatctcttgtattctatgcacccacaagcttaataccacgtggaagctgccaaggcttatgtcttgcactttctgaagcagtggcctgagaggcacctggacccctttgagcctggactggagctggagtgactgggatgcaagragcaatgtcctgagactgcacagggtggcagggccctgggcctggtacaagaaaccattcagtcctcttagcactctgggcctgtgataggaggggctggcctgaaggtctctgaaa

SEQ ID NO: 902923 - DNA, 619 bp, Homo sapiens
catataaaagaatagcagagactaaagtaaataatatttatacccagaaaatgacattgttcttcttttatcaaactgttagtgtgtgaggggtggcagggtgtgttggagcaatttagttgtagtctataggtgagctggctctgagatttgctgttgctttagttaaattcagctttttagaagcatcaaattaattgtgggtggagtcatttttttttttttttaattcagagtttgggttctgactacctaggaggaatgtctcatttctcgtatttggccatcagactttaacaagacctatgcacctgaaaatcagtgtaaatctttctcatttctcttgcccatctctcagtcatagatgattagttcttaattatatgtaaggttcaaaatgcctgccgggtttttgaaattctctttctctacccttatacctcagtaagttttgcaaatctgtatcacagtgtggttttgtttagctctcctgaatcttccctaggttcagaatgtcacttcttcaagctcagtgtaaggcccccatgacctgtagggttyctctcagttctcttgctttgccctcagaattaaacaggtacatgagcctgtgccttca

SEQ ID NO: 902924 - DNA, 655 bp, Homo sapiens
gacaaaagaaggggttccagtcctactttctgaaaaaacaaacttaagccaataaagatgaaaaaagacaaagaarggcattacataatggtaaagaaatcaactcaacaagaagagctaactattctaaatatatatacacccaatataggagcacccagattcataaaacaagttcttagagacccacagagagacttaaactcccacacaataatagtgggagactttaacaacccattgtcaatattagagagatcattgagacagaaaattaacaaggtttttcaggacttgaactcagctctggatcaagtgaacctgatagatatctacagaactctgcaaccaaaaagacagcatatacattcttcttggcaccacatggcacttactctaaaaattatcacataattggaagtaaaacactatttagcaaatgtgggagagctgaaattataacagtatctcagaccacagcacaattatattagaactcaagattaagaaattcactcaaagcacacaactacatggaaatttaacaacctgttcctgaatgactcctgggtaaataaaaaattaaggcagaaataaagaagttctttgaaaccaataagaaaaaagagacaacatgctagaatctctgggacac

SEQ ID NO: 902925 - DNA, 694 bp, Homo sapiens
ctcatgtctgtgaaaggatagataaatctagtaaccttacttaataatgatgattgtggtttttcctaagtatacakatatcagggagagctggttcataatagttaatctgtccataagatgttggattatccctgggtggttaggcagaaggaaagaattactaggaagtatcatatgtaccttcatctgaacaagaaacgtcattacctttgatcctgcctcattggggaaagaaaaaaatggactgctgaaaaacttggtataattggggcaggatcagagctccacagctcagagtcattattcataaggagaaatgaataatttctatctccctctccttctctctctttctctctctatccatctcattctgagccaatcactgttctaagtgctttgaaatatttactcataggtgaaagaagtgaattcacaatgggaataaacactgttttgttttacattttagccttaaaaatgccaacagtaacacaataaatttaaaaatcagggagacatggggtctaggtagagagtctctaaccattcttgaaataattggcagaacctactttctgctatgagcataatatattgtctctggcaaagtactagacagcttctgggaacagctgataaggagtaaggggaatgaataaaacccaaatttttctactttgctttattg

SEQ ID NO: 902926 - DNA, 601 bp, Homo sapiens
gaagaccacatatccagtagcagtggaatctgaagcagctcatcctgcaataccctagtcayacaccaagtcagatcagttcctcaactccagaacacagtttcctattatgcactggcttttaattccattgcagtggataactcttagaacaatttttttttattttcagtttttttaaaccataatatgaaactgagttgattcaactcacttactatagatgtgctattttttaaaagtcattaaacggacagaaccttcttgatatcccaggaactctttgtttccttttattccaaagaagacctggtccaggaaacacaaaacatgggaaaacgttgaattcaaatatgccaaatactactactgacggaaaaaggttattcatcatatgaggataatgcacatccagtttttttcttttttaggtaatagagtatccacctacattgatgtgaaaatgtgcctcactcattcagatttgtgtatttgatggcctcagttccccagaacatagtaatgggccagagagtaaggcagtggtgatataaaggaattttattaaagtttctaagcttaactacttcaagagttattt

SEQ ID NO: 902927 - DNA, 581 bp, Homo sapiens
ctggcataatcctttaaccatgctttgagtgtacactttttctccttctacccccataacctgccatagaaaaactgattttatttttgaaaatttctttccctttttcagctattattttcacttaaatatataatgtttttatgttacaaagtttgattctcttttgatgatatatacatacacacacatatatgaaaatcttatgttcacggaagcgttatgttgtgatatttataatcacttcaataaagtcatttttagaaaaaaaaatgtaggctgggtgcggtggcacacgcctgtaatcccagcactttgggagactgaggtgggggcatatcacgaggtcaggagatcaagaccatcctagccaacatggtgaaaccttatctctactaaaaatacaaaaattagccaggcgtggcagtgcacgcctgtagtcccagctactaaggaggctgaggygggagaattgcttgaacctgggaggcagaggctgcagtgagctgagatcatgccactgcactccatcctgggcaacagagcaagactccctttaaagaaaaaaaataagaaagaaa

SEQ ID NO: 902928 - DNA, 581 bp, Homo sapiens
ctggcataatcctttaaccatgctttgagtgtacactttttctccttctacccccataacctgccatagaaaaactgattttatttttgaaaatttctttccctttttcagctattattttcacttaaatatataatgtttttatgttacaaagtttgattctcttttgatgatatatacatacacacacatatatgaaaatcttatgttcacggaagcgttatgttgtgatatttataatcacttcaataaagtcatttttagaaaaaaaaatgtaggctgggtgcggtggcacacgcctgtaatcccagcactttgggagactgaggtgggggcatatcacgaggtcaggagatcaagaccatcctagccaacatggtgaaaccttatctctactaaaaatacaaaaattagccaggcgtggcagtgcacgcctgtagtcccagctactaaggaggctgaggcggragaattgcttgaacctgggaggcagaggctgcagtgagctgagatcatgccactgcactccatcctgggcaacagagcaagactccctttaaagaaaaaaaataagaaagaaa

SEQ ID NO: 902929 - DNA, 660 bp, Homo sapiens
cagtggtaagtctcctctatgcctcttcttcagctggaggagttcaacccctgtatgtgtttttcttctcccctttcactctcctgaccctagaacaatttatctcagccaaggaagctctgctccytctggctgatctctcagctcatcctgatgggtgtttcttaggggtgggaaagaacttggagtccacattgagcaggacggagacactaatcatcctcctgcacaagaggctcgcaagaatggtagggctaatgtctaacattgtgcaatgtccagtttttcctccattttttaactaaaattggctctttcccaaaacctcacactgcttattctcgtgttttctctgtgtgtatcctgaaatggccttatgcacccaccagactgtccaccttggatgtgagtctgcctctttgcttttgctttgcatgacatgtgactttgtaaactcacaatccctgttatttttgtacacacagctcttgtgtttgtgcagcagcaaagacaaagcttcccttaaaatatccactgagatttatacttatttttaccctacaggctcagatgaccttcaacacttcccctgtctgctggcacattgctgggactgacactaattggaaccccagctctgccagcttcttatgacttacc

SEQ ID NO: 902930 - DNA, 595 bp, Homo sapiens
ccagttttaaacaccagacaacattcwtttttataatataagatttctagcagctttgttttggaagaaatttctagagatttaaatttattaattcctacatgggtgagtccatcctcatgtgtaggggctgcaggcagttgctcctggtatgatccaagtttcaccatgaaatttccatcaatattcagtttctctctaagtggcttgctagagtactagccttctttctaggttttgcttgatattcttatgctaattgagtcaatattgcagtatggtgatgtcggtaggctctggaatcaagctgccagggttcaaatctcagctctgctacttattcacttcatgaccttgagcaacacttaatccttctaaacctgcatattccatttgtaaaatggaggctcacaggagctaggcctgaattgaagggcaggtcagcaaactgggataaagccattctgcagccaggtcaatctgtaaagtttaaaagaggaagaaccccttctggagcacaacaagagttttgtttggctctgaaagtgacaggggaactgttcaattatagaccaagttagaatcagctaaagtt

SEQ ID NO: 902931 - DNA, 545 bp, Homo sapiens
gttaccataccacagatcctgtccaggccactgcttcccaaggaagtgcgactaagcccatcagtgtatcaggtaatccatttagataatacctagcctgatatgttctaagcactatgcctttttttttttttttttaattgagacagagtctcactctgttgcccagactggaatgcagtggtgtgatcttggctcactgcaacctccatcctgggttcaagcgattctcctgcctcagcctcccaagtagctgggattatagacatgcaccaccatgcctggctaatttttgtatttttagtagagagtattttgtattttagtttcgccatgttggccaggctggtctggaactcctggcctcatgtgatccacccgcctcagcctcgcaaagtgctgggattacatatgtgagccactgtgcctgtcmtaagcactgtgctttttaatccccaacttgtgaaatggaaaacatttccctccatttaacaaccatgggaaactcagaattaggtgtttaaccagcatcatatggctagtgg

SEQ ID NO: 902932 - DNA, 651 bp, Homo sapiens
ttctagcagcctgaatgaactaagacacacattttctgtgtgtgcttatgattaattcctattaataacaaarttattagtaaaatgagaggtattcactctcttctctaaaatctcacatactcagttaagacctctactatgtcattttcctgttatatttaaaatctgtaattctctatctctgtactcactaggatatgatatcttcaaaggtcatgatcatgtttcattattcttcattcctccagtttctaccactgcccttggaagatagtaaatattcagtaactctttattgggttacttttcttgggtggaaaagtaaacatgtttctgtctgaatttcttagtgtatgaattcaaccagagttgatttataatttcagttttcttcacagtgttcaaaaaatacaggcaattttatcaagaacttcttgtgtcctttcaattttcatatttcttgttacctatctactttttgggatattatttctttccaggcatccaagttccaggtatacttagcattacctaaactcagttataacaagtgagtagcaaatttctagtaaatttctaaagcctatgcaatggttttccctttctagaattctcataaacatgttcttaaatatttctttgtgtggc

SEQ ID NO: 902933 - DNA, 627 bp, Homo sapiens
ttgctgccaacatgtctcgtctcccaccatacggtggtttttctcctatctcagaattgaacaaatrtacaatcgggttttataccaagacattcagttcccaggggcaggcaggagacagtggccttcctgtatctcaactgcaagaggctttcctcttttactaatccacctcagcacagaccctttacgggtgtctgtaaagtcaggtctctctcatcccacgaggccatatttcagactatcacatggggagaaaccttggacaatacccagcttttcagggcagaggtccctgtggcttttcacagtgcattgtgcccctggtttattgagactagagaatggcgatgacttttaccaagcatactgtttgtaaacattttgttaacaaggcacgtcctgcacagccctagatcccttaaaccttgattccatacaacacatgtttttgtgagctcaaaattggggcaaaatggctggggcaaagtggctggggcaaagttacaaattaacaacatctcagcaaagcaattgtttaaggtacaggtcgaaatggaatctcttatgtcttccctttatacatagacacagtaacagtctgatctctctttcttttccctacaa

SEQ ID NO: 902934 - DNA, 627 bp, Homo sapiens
ttgctgccaacatgtctcgtctcccaccatacggtggtttttctcctatctcagaattgaacaaatatacaatcgggttttataccaagacattcagttcccaggggcaggsaggagacagtggccttcctgtatctcaactgcaagaggctttcctcttttactaatccacctcagcacagaccctttacgggtgtctgtaaagtcaggtctctctcatcccacgaggccatatttcagactatcacatggggagaaaccttggacaatacccagcttttcagggcagaggtccctgtggcttttcacagtgcattgtgcccctggtttattgagactagagaatggcgatgacttttaccaagcatactgtttgtaaacattttgttaacaaggcacgtcctgcacagccctagatcccttaaaccttgattccatacaacacatgtttttgtgagctcaaaattggggcaaaatggctggggcaaagtggctggggcaaagttacaaattaacaacatctcagcaaagcaattgtttaaggtacaggtcgaaatggaatctcttatgtcttccctttatacatagacacagtaacagtctgatctctctttcttttccctacaa

SEQ ID NO: 902935 - DNA, 633 bp, Homo sapiens
gataatgtgaaagttatagttccttccttttyttccctccaaattcactttctagagctgactactatttgcacttcagtttcatgtttccagaaaactcaccatatacagaaataaagtgaggagaacttaataactgcattcagtataaagttgtggcagcatggatgcagggaaaatgcagtaccctagggctttcacagtgggtgcccttacctccctaggactgagggtgttgttaccaggcctgaagacagacagggtatgtagagatggatgcttcacaggaacctaaatcaagggacacagccagcttacagggttggggtcagggaaataaaactctgcccttactccttttttctagactccttctgggctccaaccagatgtagtttgacatagtctgagtggctcagccttcaggaccatagagcagaatggagaaggtggggtcaatgaaagattcccagcctatttgacttactgttttgcaacttgtttctcacctattgataaacgatgcgcattttgctatatcaatttatgaaaattcacctcattctttgttcattatgtcatagaatttcatttcgtggaattattaaatgatagctagaacctgagacggga

SEQ ID NO: 902936 - DNA, 598 bp, Homo sapiens
cttatatatcaagaaaagttatttacctrataaatcagtttgcatttgtatatgtataatacaaattatgcatttgactagattttctttggccaccaggaagtttagagtgaaatttgtggctcagatcttataattacatagaaacttatgatttgcatgactacatcctcactttcaacctggtcttgagctgccattttaggtattatttacctaattctgatttttgtttacttttcttcatgttattgggttatgttagaatttttgtgttagttattaaaaaacaaatattgctagcatcagtagaaaaggataatttataataaaaaactcaggtaagtatggaatcttttaatttgttaagcttatttatttatttatttatttatttggtctcttattcctgctcctctctatgtatttgctgaattttgcctagctgtggcaggaagaatatgcccccctcataaagccaaaacattcatgctacaggtcttatcatgtgaaaaatgcatcattttgtctacttgtgttgtttgtctttctctctttctctctctctcccttacctacccttgcttcacacttactt

SEQ ID NO: 902937 - DNA, 593 bp, Homo sapiens
atccagtggtatacttcttccaaactgaatgtcttataactctcttactatgaacagtaagaaattgcacagaaatatagttactttatattcaaaacctacctatttctttcttggtttatgacttttcatatcctgagtatccatccatgaaacaggatagccgaggaaggttgaagagggcatcaggatatggcagaatacctccattttaattgtagataaactgctcattagatgtgtgcctgtttcaggttacccaaaatttctgtttctcactttcttcatcattaagctactaggtagtaaagcttaaatgaactaaagcatgtaaagcatctagcacttcatgagtgttcagttaaactaaaaaaaatgtattttcacagacttagcctgtggatgtgagtattcaggaaggaagtttagagtgattttgggtgtcagagagagaaggcaattgtctcagaagaggatattagaaggggttaatagaaatgaaggctataattytctaaagtagaatttgatctacagatttattttatgtaagggatgaatcttattgttggatgagtcttaccttaatgtgt

SEQ ID NO: 902938 - DNA, 688 bp, Homo sapiens
gttattgtcttgcagaagtatatattccctatggagcaaatatgcttccattctgttcccactgagatgatttgctgattctgatcaacccccagtcctgagtcaggcagagaattattcagatgattgccctaatttcaggctgttcctagcctaggaaaactcgactttaagtgatcttcctgcaaattactcttgcctccaacttattcaccagctcagtggtccctaatccaccattctttgtcattgcataatcgaagcatattcttctccattactgtcatacaatatcaatgttgtaatctgtttgtaattaggaccactcgaaaaatccatcttttctttatcccctttccccatgaactttatagaagaataaacatgccagtattattctctcccacaaacagaaatcaatccataccaaattctctggtgtgatgtgtattagcttgtcaccgaagataaatttatatttacttaaagacatgtcactccacacaaactttctcagacctgcagtaaattaaaatgcacacttgcttaggcattaaaaaaaaggaatcattttgagaaatgtaatccactgrctcaagaagtcatggaatgaacatgccatacgccaataacattgtgcctcaaagaataatgagtcttattgtatcgagcttgctttaaagttctt

SEQ ID NO: 902939 - DNA, 694 bp, Homo sapiens
atttacctggtgaccctggaaacagttacacaaattgacgctaatgttttgaaccagaaaattagaaatgtcgccttcataaaagatcttatggaaaagaaatggatgataaatsgtttcttcacgcacataactactagcaacctgcaaggcaaataagtctgtaaaatgttgaaataacaaatgcattcctttttttttcttaggcttaaaacgcttagggtgaaaataaatttggagtttttcctgagccttcttattcattttctttaaaaaaatttatgccataaatttaccaggtcctaaactataagttagagtaatttttaaagtggtagaccaaattgtatgtatgctatgtagaagcatttttttctgaaaacactaatattgctctaagtagtgtcaaaattggctatttctgaaaaagcagagaagaaatgttgtgagcatttttaatagcatttgatagtactctggctgaagactcaaattgggattattctggataataaaaataagtgaaagcaaacaaacatcaccttgtaggtatcttccctttctctcctcttactccttagtagcagcaaatatgcagaagacattgaaaatttcaactgcgggcttttattgagttttaaatcactggagacgatgcctaatgaaaatcattgcaccatgcaactataggaaa

SEQ ID NO: 902940 - DNA, 666 bp, Homo sapiens
tcaaattcaacaatgaaaaactaaaagcttttcctctaagatcaggaacaagtaaataatgcctactcttgtctcttctatgaacataasactgaaagtcctggtcagaactactagggaagcaaaataaataaaaggcatccaaattggaaaggaagaaaaaaaattatctgtgttcacaaatggcatgatttcatagttagaaatatacatacatgtttctatattttaacaatgaagtatctgaaaaggaaattcagaaaataattctacttagaatagcattaaaaataacaaaatagaaataaacttagccaaggaggtaaaagacttgtacactaaaaactgcaaaacactgatgaaagaaattaaagaagacacaaataaatgtaaagacatcctaggtttatgaattggaagacttaatattgttaaaatgtccattttccacaaagtgatctacagattcaatgctatttccatcagaatcccaaaaagtattacgtataaaaataggaaaaaaatcctaaaagtcacatgaaacaacaaaaggcccttaatggccatagcaatcttgagaaagaagaaaaaagctgtagggattacactacctgatttcaaaatacatcaaaaagctacagtaattaaaacatatggtactggcat

SEQ ID NO: 902941 - DNA, 632 bp, Homo sapiens
taatactcaacattcctggtaggaaaaagaataagtagcaagacctagaggtgcatttgagcatgcccagtttgaagaggcaaaagtaattcagcacacctggggggatagattgaggaggggtgaacattcccatgggcttggggagacaaccacttattgagtttttgcctgaattagagttcctttcttttgtttatcttaacttaatttatatcaactcttaaaccacactgattttacttcaccagttatttctcacatctgtccccctctttatatcttaactcctattatactggttgagtgcatatcactttcaatgtcaatgcaaagtgttcctgactgatccccttgcctctgcgcttgctatcttcccctctccatcacaagtataaaaataaccaaaggaattttttttaaataaggaaagaaagaaagaaagaggaaggaaggaaggaaaaaataaaaaataaaatttggttctgacacttaaacatgatctaattttgagtactagatgtctgggaagcatgcttgacaggatcaggtaactccaagcataattaaataaatcaacaataacaacaaaatactcactactcaactacacartgtcttacagtatctac

SEQ ID NO: 902942 - DNA, 587 bp, Homo sapiens
ctcaatgcacttttattattctctcttcactgaatatatggtaattcctctatagtgattgaaacttttccttctttgtggaaaatggccataaatcagagacaacttttcaataggattttaaaggttagcagrcattgtgaggatatgcagaaatgaaaccaaaataaaacatgattccagaggaattcaggaatctgtacaaaactagcactcacaaagtaacaatttctgaagatcaagacatactcatccagaattgtaaaagtttaattcaagaaaaaaaggcaagtttcaactctaacagcaactctgactgatttttgaggctgtgcatttactatgttacatcttaggttatagttatatgtatgtttttcttgcatttttctctatcgctacacaaaaaataaattgcaaaataaatgtggaagatattgtcagttgcttttacaacattcatatttattactcctacttcctaacagaaccgcaaactttatccagtcttcccctaaacgtacgtatttttttggcttgggtaggggatattgattattcttttttttaatttttatttattatta

SEQ ID NO: 902943 - DNA, 691 bp, Homo sapiens
aatcacaaggttacacataaatcattgggaggaaatctatgtcctttcatcttccagggtttcatcataatgttcagctatcatggtagaatcaaattttggtcaaagtgcagcctgagacagaatattatagtgagcacaggtggcttctaacttgaatccaggtcctccaagtcagaaaaatggaatgttctcagcttctgagaatgcaaaaagccttaaaatttgagtcaaagtggggcataactttgatcttgccttctatactctataagcagtctttatacttggctgtttaaagagaagaaaataagttttgatctagtaaaatacatcttccaaggactcctggctgatttgtttctgtgaaaagctttagaaactatattattttccattttaattaactttgaaatgaaaaggagccttaaataaaacatcttccgaataaaagtggagacttggttctaggaaaagaatcactttccaaggcacttgctctctcattttttcctgttcacccatattccactaatttttaaggtctatctcgaaacattctctacagagtccttgcagccatgacaagctctgtaaagcaggttaatggctgtgaccgtatctctcaagtagtacaggaccgcacgttggtaggttaatycacattgtgttgaaagtggcctaatggtgg

SEQ ID NO: 902944 - DNA, 573 bp, Homo sapiens
ttctttgcaatgggttcgaacatccttctttagctcggagaagttcgttattaccgatcttctgaagcctacttctgtcaactcgtcaaagtcattctccgtccaggtttgttccattgctggtgaggagctgtgatcctttggaggagaagaggcgctctgatttttagaattttcagcttttctgctctggattctccccacctttgtggttttatctacctttggtctttgatgatggtgtcctacagatggggttttggtgtggatgtcctttttgttgatgttgatgctattcctttctgtttgttagttttctttctaacagtcaggtccctcagctgcaggtctgttggattttgctggaggtccactcccgaccctgtttgcctgggtatcagcagcagaggctgcagaacagcaaatattgcagaacagcaaatgttgctgcctgatccttcctctggaagcttcgtctcagagggtcacccggctttatgaggtgtcagtctgcrcctactgggaggtgtctcccagttaggatactcagggggcaggggcccacttaaggaa

SEQ ID NO: 902945 - DNA, 438 bp, Homo sapiens
aataaaaaataataaagggggtatcaccactgatcccccagaaatacaaactaccatcagagaacactataaacatctctacgcaaataaactaggaaatctagaagaaatggataaattcctggacrcatacaccctccaaaactaaaccaggaagaagttgaatccctgaatagaccaataacaagttctgaaattgaggcagaaattaataacctaccaaacaaaaaaagcccgaccaaacggattcacagccgaattaattctaccagaggtacaaagaggagctggtaccattccttctgaaactattccaaacaacagaaaaagagggactcctccctaactcattttatgaggccagtatcatcctgataccaaaacctggaagagacacaacaaaaaaagaaaatttcaggccaatatccctgatgaaca

SEQ ID NO: 902946 - DNA, 596 bp, Homo sapiens
gggaccggctggagccgcggcagaggagcataacttgtgaagatttcaaggacatttatcagttcccaaataatactcttataatttattacgcctatctttactttaatctcttaatcccattatcttcrtaagctgaggatgtacgtcaccacaggaccactgtgataattctgttaactgtacaaattgattgtaaaacatgtgtgtttgaacaatatgaaatcagtgcaccttgaaaaagaacagaacagcagcaatttttagggaacaagggaagacaatcataaggtctgactgcctgcggggtcaggcaaaacagccatatttttcttcttgcagagagcgtataaacagatgtgcaagtaggagagatatcgccaagttcttttcctagcaaggaatattaatattaatacctcggggaaggaatgcattcctggggggaggtctataaacagccgctctgggaatgtctgtcttatgtggttgagataaggactgagatacgccctggtctcctgcagtaccctcaggcttactagagtggggaaaaactccaccctggtacatttgtggtcagactggttctctgc

SEQ ID NO: 902947 - DNA, 599 bp, Homo sapiens
aaaaacaattcctctacaaattgtgtgtcacttccttgacccattacctccccaatgtatatatcatgtgaatatcaaacaattgaatgttttgttggtacaattggattcaytcacacggaaacgtggagtctatttcttccttcaaatcctcatcctccaattaattagctgaaaaactgactgcatctctgattctctaagaagcatggaagagaaagaaatgggaaaccagctagcagctcattacatgaattcaaacagttccctttgaagggaaactttttcctggcatagatgatgtcattgatgagattgcaagggtaggcattgtataaagatgagatcctttttaattctgttttcaaaactataaagctaaaatttttagaattgaaatttcagttaacatgacccatgtattagataaaatgtctctttaaagcctgggagctctccaaggtgtggtgtgtttcctatttgctaggtacatgattacgatgcatatggatagatgtttctgaagtgtttccttctaagtgcactattgccagtcagatttacacccaagtagcaaagatgttaatgccatgcaatcc

SEQ ID NO: 902948 - DNA, 645 bp, Homo sapiens
ctgtgggacataatatctctgaaggccgatgttccttgaaagactgtgtgaaatattgaactatatgatctctgaaagttcttgaattctccattatcatcagaatacctggcmcttccaagcccttgaccttcgtctgtggagtattgactctagctgccttccagacattgtcatctatgcttcttttcctctgaggacgatgaaccccggctgttctctcagtacccctgaaaaatgggaaattgtatttttttcttctttgtacccaggagtctatgtataatgcataattctcagtcaaaaggaacttgcttacttaagtgctcaaaggtttttgtcctgtggtttttgtaaggtaatcccacaacatccagataaacaaataatcacaagacataaccttccagagtgttccataacattgatcacaatcaaataatgaggcacgattccatgaaacattaggaaaattataaaggcatcaggcagaaaaccagcaactagcaaatggtttctccatgatgattttgggttcacatttcacttccatatataatacaacttatgtgcccatatttcatcctctggaagcctgccacattatcctctgaatgaatattaacactccttgtactctgaagt

SEQ ID NO: 902949 - DNA, 524 bp, Homo sapiens
gaaatgcaaatcaaaaccacaatgagataccatctcatgccagttaggatggggatcattaaaaagtcaggaaatggccrggtgtggtggctcatgcctgtaatcccagcattttgggaggccgaggcaggcagatcatgaggtcaggagatcgagaccagcctggctaacatgatgaaaccctgtctttactaaaaatacaaaaattagctgggtgtggtggcatgcacctgtagtcccagctacttgggagtctgaggcaggagaattgcttgaacccaagaggcagaggttgcagtgagccaagatcctgccactgcactctaggctgggtgacagagtgaggctccatctcaaaaaaaaaaaaaaaaaaaaaaattcaggaaacaacaggtgctggagaggatgtggagaaataggaacgcttttatactgttggtgggagtgtaaattagtgaaaccattgtggaagtcagcaggtaatctttttacggtctgagtaatgaggaacctggctaatagtt

SEQ ID NO: 902950 - DNA, 540 bp, Homo sapiens
cagctctgtaactttgaattataacattatatttttaaattatattcatcttttaacttttagacattctgtgtgataccttgatttcctaacctatattcttggctttacctgtagttttctgcatggcatgtagtatgaaagctccttaataccatagctggggaaaactttccttttcatatcttcatcatttgtacaatgagagatttgagtgagatgatctctccaaatgttttccagcactggaactgcatgagtctctgatttgtatgtctttaaagacaccactgtgcatcttaaacctatctgagttccacaagtctgccagtattttataggtctattttcttgactatcataataacttatgccaaagccataagccaggttttctcttttcccctcagacagaagcagcataatgtaccmgagtggcacactgtgatgttataaagcccacaatccaacttcagtgcagtcacgctgagatgggaagaatgcagctttcatttaaacacaccttaataatgctagaaa

SEQ ID NO: 902951 - DNA, 594 bp, Homo sapiens
catattaaatttttatttcttaatttcttgcctcattactcccatttgcattggctgcagactctctaagtattactttcccttccttgtggttcataccctaatcattgaatattgatgttctatttatttctatgcactcactttgtttttgaccaagttatatagttatttggttttcaggtaatgctttcttacagttactcaagaatgtatgctagaaaatgttgcccataactgcttaaacataaaagaggatatgttttcttgttttccatctatgttacagtctgtttctgaaatatcctttattatgagtagaataaaatctactggacttggaatccacattcccttttaaattaaaagtattcccagactttcaaattttacattccttagcatgatctcttctctataaagacagaagaggggacagaaaattctgactgatcatttcttgagctagaagcagctataatattcctgttctccatcctttataattactttctcataaatactaaactacwcccccctgagcatctagaagatttaaacactgatcaaaggcaggtttagctgtatcctcag

SEQ ID NO: 902952 - DNA, 574 bp, Homo sapiens
cagtaacgtttcacttagaaaatgaaacttttattttggctaaacgagtatggtgtcctggtcctttcccaaaaacataccttcaattttaccctagctggctgattgactgtttcctttacagatgcagtctagggatgctaagggcaacatcctttgtgataatgaaagccttataatgtattttttccagtaacttaggatgctgtatattaagctgtatattggtaaatattttgtctatgtggagaaatgtaaatgagatttttttttcttttcatcattcttctctacaaatgtgcattgaaaagacactgaactttggtcccatgcttatgcacaaggtataaaagttgcttatattcctaacctctccacagagttgtctagattcacaggactatttggtcaaatgttctgcaattcagttccactgcttgactgtaattcacctataaacccagaaaaatactgctggagttcagaggccctgactgytattagacagagaaaacctatagcacactggaacaatcacatttaaaagatttgcctcaagctttctatggtcact

SEQ ID NO: 902953 - DNA, 657 bp, Homo sapiens
ttaagcttgattaaattcagtaaagggctatgaatgttgtaaaatagctttagaaaattttttttttatttcttctaagtattagctctttccagatgactataaatgcctagaatttgggaagacacatttgtgttctatcaggaaagcctttcaaagtcatctttgatgtgtagatcaaaactattgcttcctagttataacacacaaaaatctagtttatgaatagaaacatttaaaaaaaaacaaaacatcatttgtataactatctagctctggaaatcatttgccaggaaaacgagggcagaaagttagcaagaacaaaaatgtctaaatagcgtttctgactttaagagccagttgttagaagacaccaatatctatggacaattgggaaatgatagcaacttttattttattaagcatttaataacacataaatgagtaggtatgacatataatccattagaaacaatgacattaaattaatggtagtgtgctctacccagctgactatatatttaatataacttggaatattacaaatcttaaaagaaaacagaaggaaratggaggtggtgacaatgtagattttttaacattcttaaatccctctgaaaatgagaagagtggtttatacataaaatattaaaatat

SEQ ID NO: 902954 - DNA, 602 bp, Homo sapiens
aaaaaataggccattagcgatgtggtggtcaggtgtcaagggagaggaagcattccgtagtcycatgacagggtctcagtctttcagtaagtctgtgcctttggactggaactgttgtcaccattgcttctcagccctccctcccttgggtgggagagaatggctggaaggggctagagatgagtatttccctccccccaggtagattaggctctgacaaaattccagcaagttaggatctggtaaaagtttctcctgagggcggaacttgttaagaaaaacaaaatgctccgatgtatttcgaaatggctccttttcctctctccctgccgaagcacaaagaaatatttctcctatctacaccaggaagaactggtagagctcttaaaactcacaaaagtgtgaaggccccccgactgagtctccgtggagtttttatctctcagacttggccacacggagccttcagcaattcatcaattacggttccggtttacctccctggcactggttccagcagaggtttctgcaggtgggtttctgctccacggatacagagaattgtgattctatgtatctgcccatttatctctccaaatttg

SEQ ID NO: 902955 - DNA, 577 bp, Homo sapiens
tttccttgttcatttccccactgggtggatgtgrataaaaggacactatttgcacatagtcgctatgataaggttagactatgacagaggtcaccaataaatgcaaagtcttgattgctaagtaaaggcaattcgaatcccactaaatttaaaaagttttggagtaggcagaagtggggagccagaataagtgaaggagtccagaatatgcataaatatgattttcagatgagcgactcaattctcataaatctcctttcttggagcaccagggaagatgaactcttatcactagagacaagaagttggcataacaccagacattgtcacaaaactgttgtatctataaaggcccacttgtctttcctaaaagtcattatttttaaaaagtgtgaccccgtctctaccaaaaaaatttaaaaaattaaaaatcagctctgtatggtggtgcccacctgtggtcccagctactcgggaggctaaggcaggaaggttgctggagcccaagaggtcaaggctgcagtgagccataattgtgccactgctctccagcctgggcaacagagcaagaccctgt

SEQ ID NO: 902956 - DNA, 579 bp, Homo sapiens
gggggtgctgaaagaaacagaagctcagaaagtcatatgaggccaagctaayaactggaagtcctaagatcaacccatattctgtatgaacaaacttttaatttgcaatgaaagtcattaagagaaaataattaaatttatagcatttccaaagccagacatatttaatcacatttaactcctaccatattatttcttataaatgctgcttccacagtggggaagtaatagaggtctcaagtcaacttagagtctaacaaaactgagtcaatgacaaaatatacaaaaaatactacattaatttaggaagcaaatccattgagcattcctaactactgcaaatgcagggcattaattactatgtatttgtatattatattttactttacagtatcaaaaatgtaggttgcattttacaaatataaaatctatgaaaattctcatttatagttatttacattaaaatcagaacagaagttttgcatctaattataatcattactaatcagtattgttcgatgaggatttatatggcaggaattttatgtgtactattacatttactactcaaaacctcta

SEQ ID NO: 902957 - DNA, 610 bp, Homo sapiens
aggtaaattcagagttgggactcaaaatcggtatgcccacctccaagttcatacatttggagttgtctgtatggtagaatattatgcatattacttaagatcgtgaattgctaaaagaaaggggttgtgcttattactttggaatatgagctttggaattcattctgaatttgaatgtctaatttcatcatttactaggtgtttgactttgaattgattacttaactttttctctgtaaagtgaaactactaattcttaagccttgggttgtgaagattaaagctgattacatgcagtgtatatgacccagtaccgagcatataggaggcatagaacaacctggatctgttattactgtacaatttatcagagcattcaaagcgcttttgtaataattgactcatttatttttaagacaattaggatgcctaataaaacattgataattgcaatggttttataagttaagtcaattgttttgggacattaagctataaatcaggagagacagcagttacatgataaatacaaaatccaaactcctatatcctctgacttgaagtttratgctatgctcaaaagactagctgtaatgcgcagtggtttgtg

SEQ ID NO: 902958 - DNA, 649 bp, Homo sapiens
gaataagcctcatgatatctgatggttttatataggacagttytcctgcacatgctctcttgcctgctgccgtgtgagatgtgcctttgctcctccttcaccttctaccatgattgtgaggtctccccagccatgtggaaatgtgagttcattaaacctaattttctttatatattacccagtctcaggtatgtcttattagcaacatgaggatggacaaaaacaccatatttgtggatgacatgatactatatccagaaaaccccatagtctctgcccaaaagctttttgattttacaaacaacttcagcaaagtttcaagatacaaaataaatgtaccaaaatcaaaagcatttctatacaccaataacatccaagctcagggccaaatcaagaatgcaatcctatttacaatagccacaaaaacaataaaatacctgggatacagcttaccaaggaggtgaaaaatctctacaacaagaattacaaaacactgctcaaataagagacaacacaaacaagaggaaaaacatccacgcttatagataggaagaatcaatattattaaaatggccatattgcccaaagcaatctacagattcaatgctgtttctctcaaactaccaatgacactcttcacagaattaga

SEQ ID NO: 902959 - DNA, 585 bp, Homo sapiens
aacagatgaaagaagaaccagagaaactccattwtgaagtaaaggtagagctgtgttaaatttgcttaaccacatacttatcattctttttgctctgtgcataataattactggtgcttgccttcttttctgtaaagtaacgcaagtggataccaataacaaaactttcctctcagcataaaacattggtaactttctctatcaatttaatgactgattaatattaaaagcttaagcctaaatcactttgaaatgcagtataaaatgcaatatataatagcaatttatggcaaaaaatcaagttaccacatgcattcttatttatattacaaagtaaggaattcatgaaatggtacagaaggcttgtatgtagtctaaaaaggaaatgtttttataattttaaaggtggatgttttaaacttttaattgagcatgtttaaggaaattttcctttaaacctggaagatttatttacatatttttgtgaagttaacatggagttaagataaatattttagttcagtaaaaatggaaatagctgtaattaaaagattacttatatcttttctaccctttacaatccca

SEQ ID NO: 902960 - DNA, 600 bp, Homo sapiens
cggtaattgttggaaagactatctctttccccaatgatctgccttgatatctgcattatatttcaagtgtctrtatatggatttattgatttatgcagtatggatttatactaatgatattaaaaaaatgattggacctataacattcttactcttgaggctgctataaatggcatctttttcctctctttctcttttcttgagacatggttttgctctgtcacagaggctggagtgtagtggtgtgatcatagctcactgcagcttccaactcctggactcaagcaatcctcctgcctcagcctcccttatagctagaactacaggtgcacctctatgcctggataatttttttttttttaatttagagatggcatcttgctatgttggccaagctggtctctaactcctagcctcaaggaatcctccggcctcaacctcccaaattgctgagattacatgtgtgagctaccacatccagcctaaatggtatcatttaaaatttttctttttttaattatttatttctagtatacaaatattattgatttttatattttaattttgtataaagtgactttttaatttcatatattaatt

SEQ ID NO: 902961 - DNA, 561 bp, Homo sapiens
tacttataaatatatatggggtacatgagatattttgatataggcatctagtgcatttatcctttgtgttgcaaacaatccatgtatactcttttagttatttttaaatgcacaatgaaatattgttaactgaagtgaccctgttgtgctatcaagtactggaccttattcattctatttatagttttgtatccattaaccattcccacttccccaccctcggccacttcactacccttcccagcacatggtaatcatcattccactctctatatacatcaattaaaccacacttgctttttaatttataaatcttccatacacagtcttttgtttctctgccgatgttactgttttccactgtgactgtggatatgtcagcttatccttcaaagtcttagtattactccattaaattcaccatgcccagggacagcgctccattttctatcaacagattttttttttgcctatttttgaactttataaaaatatcatcatacaatacrtactttgctggcatctggcttttttattaaaaatgatttgagaatcatccaa

SEQ ID NO: 902962 - DNA, 635 bp, Homo sapiens
ttgggccttttctctcttttgtacaaacagcatttttatgagttaaaarcctgggaatgagtggtgggcacaaggcagtgttcatttggaagcaataagaatacagtcttaaaagtgaagccacttcattatcatttcatataaaacatggcaatcttggctggactgtgaaactcatttccaagtgtggccaggctccaagtgaatgcttgctatcacagaagctgtatgtttttattaaccccaggacattgcactgatgatgacaaaaatttgcacttcctgactccaactttatttctaaactaattataattatattatatttcattagatcgaagacactatcaactattatttattgctaagaaagaaaatacctctaataaaacttttacatgtcatcaatttcaagatacatctcaatgtctgataaattaaaatctttaaattgacaagaattataagacaaagaaataaagcacataaggcagaaggcaaaaataattcctttactactgaccaaactgttattagcagaagtgtgttatatttgggatgataacatcttaatactaagcctcagaaatagcagaattgtacacagcacaacttgactggtaggattccacata

SEQ ID NO: 902963 - DNA, 640 bp, Homo sapiens
cctaataaaatgtgagatgaatgccttcacccacacaagtgatggaattctcggctttcaaacagtgatacatgaaatcaaacattcagctaagatagctcattccacttctccataaatttatttttcatttccaactttctccaggggctagattaaaggtcatgtggaatcatatggatgaagaaattttcctgccaaattagctcctccaggttgttccacacccttgggtaaatggtaagcttattaggaagctgcatgacatttgtcattacatgggcttttcaattcattgcaaatttcttgttctaagaggaagtctttagtttatgaaattcttaaaagcactcaaattgtgattaacatactaatcataattgtcattagctgaggaggccaggtgcagtagctcatgcctataatcccagaactttgggaggccaaggcaggaggatcgcttgagctcaggagtttgagataagcctgggcaacgcagtgggacctgktctacaaaaaatcaaaaaatcgattaagagggtgtggtgtcatgaaactgtagccccagctacttgggaagctgaggcaagaggattgattgagccagagagtttgaagttgtgaagttgctatgatcttg

SEQ ID NO: 902964 - DNA, 612 bp, Homo sapiens
tagctgttaggatgtggctaggagaccctggggttacttctagcttaccagttctggagacagaagtatcaagatgatatcggggcaactggatcagctggtgcagttgaggttgcttaggctctccctttcctgctcgggcctgccctaccatggtaccaagcctgtctatggaatgggctagattgctaataccagatctgtccaggcaagagattccagggttccacgaacaatctcagacatgttggaaggggtgcaggaactctggcgaggacaagctccaatacctttcatagtcctcagagaggataggccagggcacatctggattgggtctctttaaattctgtgtattagattcacttctgggattcattgcagtgtggcagagagaaatcatagtgcctgatacatagtaggctcctaataaaggttggttaaatgaatgaggaaaattgaataaaataaataggaaaggctgatggctggagaaaagatagattggcagtgatcctgggctagtgggctcagggaaacaggcctgttttcctcatgtgatccttaccaccaacaamtgagcttcaacctttcccctataataagaaaaat

SEQ ID NO: 902965 - DNA, 596 bp, Homo sapiens
aatcaacagatgcataataatgttgtccacttacaaccctctatctctgatatcactatctctgcctgcttccagcatagtacacaacaacckttcattcacaaatgcaagaaatgtttaaggaagagacgctacttgttgggtaccataagcagtgtggagggggcaggatggataagcatacatgcccactaggagcttataatctagtggaggagaaagaagtaacaggctggagagtatcaaggaaagaagataacctgtctggctgaaagagaagccatctgggttgtgatatcactgagcaggtcttgaaacatgacgcttaagtacctcctatcctcccctgcccaccgcagctgcattttctcgcctgccattcgctagtgaccctgaatttccaatcgtgccctacttcagcttgaaccctccagcctgttgtgattggttatttccttttttctattaaatattcccagctagatgtccctctgataaagtcctgtacattccatttgaaagtatgaatgatgggtaaccaatgttgatgctgcccttggagacaatgacacatgaaggattcctatggaggaact

SEQ ID NO: 902966 - DNA, 654 bp, Homo sapiens
actatagaaaaagaagcaatgtaaacctagagcaaacggaagaaataatttaaaaagcagcasagaataaattttaaaaaatgggaaggcaaacgcagcaataataaaagaattcactcacatcctttacagcaatgtcaatggagctggaggccattatcctaatagaactaactcagaagcaggaaaccaaatactgcatgttctcatttatcagtgggagctaaacaatgggtactgatggacataatgatgggaacagaaccggagactccaaaagcagggaggcttagaggacaataagagtttaaaaattacctattaggtacagtgttcactacttgagtactgggtacactaaaagcccaatgcccaccaatatgcaatataaccctgtagcaaacatgcaaatgtactgtctgattcttaaataaatttatttaaatatataataatacactgagaaaacatggcattttagtatgcataatctgaatttaatgatgaggaaacatcagacaatcccaaaataaagagcattttacaaataactgtcctgtactcttcaaaaatgtaaagccatgaaagataaggaaagacagaagcactttcagatcaaaggaaacaaaaaaaaagaaagaaaaacaaaacata

SEQ ID NO: 902967 - DNA, 629 bp, Homo sapiens
ccaaaagatgtgcacatgaatattcatagcaacagtattcataaagccaacctcaaaactactcaaaggcctattaacagttgaatggataaataaattttggtgtagtcatacaatgcaatactatacagcaatgagaatgaacaaaatgtagctactcacaaacatagtattgagggaaacaagccagaatgaaaaaaataactatttaatatgcaatttgcatagagtacaaaaattagcatccatgatgttaaaagtttggctaatggcttccctggggtggaagtaagatcatgattagaagggagtatgaagggcttctatatgttggtgtatgggtgagttccatttgtaaaatgaatcaaactgtacactgaggctatatgcacttatctgtatgtgcattcacatcaaactaaattaaggaatgagtgtgttctaaattgaaagactggctcatgtgataatgcctcatttcagcagtgtatggctaaaaaaatatttagtttcctccactgcccctgacacccatcrtgtttgttattttagtgacaatgctcaacagaacagggggtgtgggatgagagtgtagtatttgaagtaaaggacattatgttcacgattca

SEQ ID NO: 902968 - DNA, 707 bp, Homo sapiens
gtaagtattagcaccttttaaatttacattaacaataacagagaaatggggaggcaggaaatgaaaggagaggggtaaaaatagctcacagatgtcataaycaaagtttagaggaactcaaaaaatcattaatcactattttttaaattttctaaaaaactatactatgcacatcctggttaaaattgtatgagtgataatttgcctctcatcaattaaaaatggggaaataggcaaggtcattaactctgctgtggctgaatcccagactgtgctttctttaaaagggaagagagatagtctacggagactaaccagttcagtggttgagtgatttctacaagagtcatcaccaactcaaaactttcctgaagtccttctgactattttaacgcttgccatctgcagaaggtaaaaatctgctagaggccaagttccaatcgctatccagcccaccactgaccctctttgatttcattctccatcaacaaggaggacatggacagggtcaatggtctaatgcgttttagtgacagccctgatttttcattggaaagaggagaaagatcgtttcccatttttctccttgacccacggatttgaccaactcaggcacattaaaagtctgcaaaagcaggtagcctgcaggaagttcaccctagggggtgagttcctagttgggctgaaacgggtttccaggcatgttt

SEQ ID NO: 902969 - DNA, 602 bp, Homo sapiens
aaagtttcataaatatccctgtaaagatagatacctgggcaaactgaaatgtatataatttacacacacacacacacacacacacacacacacayacacatattacaaacctcactctctgctaacttgtataactacacagcaactgatacattattttgggaaagattcctgtttgggtaataaaatgaaactattttgaagcataaatgaattgtattaggttggtacacaagtaattgtggttttcgccattgaaggtaatttcaaaaaaacacaattacttgtggaccaatccgatatatgtaacacattgtatctgtgtgtgattttttttcttttggtgtctgcaaaatgtgctgagtttattgcagccacagtactccataggattgctttgtgtatttcaagtctttacccccatctgggctggatacactgagtgctaaattcacttccttgtcattttattcttctcctgtcagcttcccatccgttgatcaaaaaatatccagaatccccagagtcacaaataagttctacatttggccattacattgatctttcttatttagcatatacttaaaaaccattttctattg

SEQ ID NO: 902970 - DNA, 637 bp, Homo sapiens
tcccccacagacatccccctaatccggggcattttctggrtggttttttgcccccatcttacagccattaatccactctgtataatgaagctagagggatctttccaaagtgtagaccccaagggagtcacaccttgattaaagccttcagtggtgacccattgtcctcaggacagtttaaattccccaggtgattagagaggccatgcccaaacaagttcctatttaattctccacctcctcttcccccatcccacacattattgattaacatcggtaataatatgagtaatcatggccccatgcagaggacttactctatgccaggccaactctaagcgtttttcttgcattatatctttctttgaatcctcataaccatcttgtaagatagatatagtaaccccccatttacagattaggaaactgacgtgtgacttgcccagggtcacctagctcataagcaacagagaaaggatgaaagcccacggtcacctctaacgtgagccaagctgctctgggggaacgacatctccagagatgttagccactcctcagggaaacttcctttctgctctgcctctggcctcaggcccaggccccacttgggcctcactctagaaggcacaggaggatg

SEQ ID NO: 902971 - DNA, 628 bp, Homo sapiens
atttgggatctgtcccccaaagctcagwgcagccacagcagacctcaggacaaagtaagtgccccagaagcttcaggctgggcaagagaggggcctgctcagccatcttcccagccatgattaagctatcctggctggggtgtgcgcggtgaaggtagccaaggcaaagaatcaagggggagcagagtggatgcaaaggagcagtgtgctgagggcccaggcccagcactggccctccagggttcaggtgccccacctgaaagtgaggcgtaggcatcaattccccaacttcagacattcaagttccagcttcctgacgtcgctctattcatgcactattatttcctcaccatttctcctggcttaattaaatgtctttcaaaaggaaactttgtatcaagtggatatttggaaatagaaagccagtatcctttgtcctaaatagaagccacctaaagagtcaatttaattttttaaaataatgttattaaagtctggttagacaccattgcttactaaagcctctgtgcctgaagcctgttctgtctttgttttttgtttctaattttagtttttagtgtggaaaatatacataatataaaatttaccattctatttttaattgtac

SEQ ID NO: 902972 - DNA, 585 bp, Homo sapiens
ataaaaggaagtaccaggaaagaaaattgaatggaaactgattccacagaatgggtcccagaycactttcattgctagggaccacaccttcctacacacccacacccaatatgcccaccagacaaagaaacatgaatctaataatattcctggcaattatattctgcttatcattgtacaaaatgacacactatgatcatagcggaacctcacagagaccttgtgaagttagcagaggaggttaagaagagactcagaaggatgcatgacctgtcctgagatgtggcacacagaaacagcaagccggagcttgaatccagggctcccggcttaccctgctgtctctcctctggggcctagccttggactcctggtggcctcccctgaaatcttgaaataaatgtctctttctcgtctttcaggtgtcagctcaaatgtccctttcacagagaatttctccctaaccactgccttccgatgcaattctctacaccactgcacccttttcacttctaaaatagcactcttcactattcctcattacatactatttgttgcctgttccatttaatgccttttttcacc

SEQ ID NO: 902973 - DNA, 680 bp, Homo sapiens
agtaggtgacttcctcattatacttcacgtttatactaagaaacatatccctatcaacagtttctctttactacagttgattcccatacttacacaggagctacctttgcaaaacacaaatttacgtgttattcccttgttataaacatttgggtgggctccacatttcgtataagatagcatccctaaacagtgatctctttcatgcctagatgtttttgtgtgtgtttcttctttggaatgccttacagtctctaatgaaaagtgacagatgattgatagcatccctcccatcaagatccagctaagtgccacctcctcagtgaggcagtaaacctctctcaagcaaaactattgctgcatcctatcccactctgagaagagttttctttgtatctcttatagcattgccatgtcgtgttccattatttccatctgcataccctttgtttgcaagcatgagggttatattcccagagttactaaatatcttagtagtagctgaatatttaaatcaagcttatgaatcaaactcattaaaatattagaggcttttaccagcaggttccagatgtattgcaaatgtgaatgtctgaaatrctcatggctcgtgattgatggtgttaccaatgttccgtggaacagatgacaaagagtttcctataggaaacgttactggg

SEQ ID NO: 902974 - DNA, 511 bp, Homo sapiens
ttgtatgcttttctcagaaggaaagaaaacaagaaggcttttgaggggacacttgctgggacaggcactaagccttctacagtttgatagctctaaccagcagatacagacttctcagtaggaaggggtgaggcagctgtcctgagccaggagctccaccatatcgtgtcccatcctgttaaggcaattttgagaggctgctctggaatatgtctcaatggtggatgtagggaaacttcacaggctttgatgggactgaggtggtgtctgttgtgtgaagacaggagctgaatgctcaggatctaggctgcttttcttgtggtcagttgggttacctgtttgggaccaagtccatgtttactaaggaggctgaataaattctacagaggaaagtggagctcccaggatgaccraggaagggtaagaaaaggggtaagtttctctctccacctagactttttgctacctcaggaatcaggcgctgattaagttagcatctgctctaattaaa

SEQ ID NO: 902975 - DNA, 594 bp, Homo sapiens
ttccttagcaacttcacttttaacgctactatgaaatgaataaaatagtgtgcttccatatttaatattatagttggaaaataatttacaataaatggaagctataccagcagtgtccacagttaccattatcacttcatagaagagatttttcccatcaaaattttagcatgctttaccaaatatttattttgtagtgagtatggaatgactaatgacaaaaagattttgaaaatgtcttattctttctctcatacaataagatgttctatacaaaaaggaaagtaaaaaatttgagaagacgacaatgtgaaatacctgatagacctcaatcatctgtttaagagcatgtttagtgcattttgtgcagctgtaaactaagggggagtcaattgagatgcgtgaggagaaggtggtcaggagaatggtgaaacaaaaccaggagaaccacacatggaagactcaatataattgccattctgccacttctttgcttttgtaattgtgcatattgtytatcttctctcaatttattttatttaattaataaatgcaacaaaatattttttgtctcatgaggttttgtacatagtt

SEQ ID NO: 902976 - DNA, 614 bp, Homo sapiens
ttctaattatcagcaaaaagtattgaattgagaccaaagtaaaattaattagaggaccaaaaaaggtgatgaacatgtacaacagtcagacacgtgtgataaacaatacaaataaacaaccaatcaaaataacataaaaatgagagcaatattatttataaatccccaaaattgagatgaagagagaaaataaaatcagatatatgaggaatataagaaatgttaagggcattcatgaatgcatacagagcttaaaacatttacccacaaaagacatcatgaattgtatgaaaggaacacccgtcaaaaaagaacacgggacgtatttctcaacatagttttcttaaaattatcacagaatagaaaatactagtcttatttgaattgggcataacataaaggtttttttctcatatttcattcaaaataacacaatatatgaaagtattatctgtgttggcaagaacaagcaccttaaaaaaggtggcgaaaataccgccaagataaaagcagttcatgcatgttctaagaaagaytggtttgatgtgaaagcaccagttatggtgagtataagaaatattggataaaacactagtcgcaaggactcaagaagc

SEQ ID NO: 902977 - DNA, 614 bp, Homo sapiens
ttctaattatcagcaaaaagtattgaattgagaccaaagtaaaattaattagaggaccaaaaaaggtgatgaacatgtacaacagtcagacacgtgtgataaacaatacaaataaacaaccaatcaaaataacataaaaatgagagcaatattatttataaatccccaaaattgagatgaagagagaaaataaaatcagatatatgaggaatataagaaatgttaagggcattcatgaatgcatacagagcttaaaacatttacccacaaaagacatcatgaattgtatgaaaggaacacccgtcaaaaaagaacacgggacgtatttctcaacatagttttcttaaaattatcacagaatagaaaatactagtcttatttgaattgggcataacataaaggtttttttctcatatttcattcaaaataacacaatatatgaaagtattatctgtgttggcaagaacaagcaccttaaaaaaggtggcgaaaataccgccaagataaaagcagttcatgcatgttctaagaaagactggtwtgatgtgaaagcaccagttatggtgagtataagaaatattggataaaacactagtcgcaaggactcaagaagc

SEQ ID NO: 902978 - DNA, 614 bp, Homo sapiens
ttctaattatcagcaaaaagtattgaattgagaccaaagtaaaattaattagaggaccaaaaaaggtgatgaacatgtacaacagtcagacacgtgtgataaacaatacaaataaacaaccaatcaaaataacataaaaatgagagcaatattatttataaatccccaaaattgagatgaagagagaaaataaaatcagatatatgaggaatataagaaatgttaagggcattcatgaatgcatacagagcttaaaacatttacccacaaaagacatcatgaattgtatgaaaggaacacccgtcaaaaaagaacacgggacgtatttctcaacatagttttcttaaaattatcacagaatagaaaatactagtcttatttgaattgggcataacataaaggtttttttctcatatttcattcaaaataacacaatatatgaaagtattatctgtgttggcaagaacaagcaccttaaaaaaggtggcgaaaataccgccaagataaaagcagttcatgcatgttctaagaaagactggtttgatgtgaaagcaccagttatggtgaktataagaaatattggataaaacactagtcgcaaggactcaagaagc

SEQ ID NO: 902979 - DNA, 614 bp, Homo sapiens
ttctaattatcagcaaaaagtattgaattgagaccaaagtaaaattaattagaggaccaaaaaaggtgatgaacatgtacaacagtcagacacgtgtgataaacaatacaaataaacaaccaatcaaaataacataaaaatgagagcaatattatttataaatccccaaaattgagatgaagagagaaaataaaatcagatatatgaggaatataagaaatgttaagggcattcatgaatgcatacagagcttaaaacatttacccacaaaagacatcatgaattgtatgaaaggaacacccgtcaaaaaagaacacgggacgtatttctcaacatagttttcttaaaattatcacagaatagaaaatactagtcttatttgaattgggcataacataaaggtttttttctcatatttcattcaaaataacacaatatatgaaagtattatctgtgttggcaagaacaagcaccttaaaaaaggtggcgaaaataccgccaagataaaagcagttcatgcatgttctaagaaagactggtttgatgtgaaagcaccagttatggtgagtatargaaatattggataaaacactagtcgcaaggactcaagaagc

SEQ ID NO: 902980 - DNA, 585 bp, Homo sapiens
acagaaaatgtgaagtatttgtaatcttctctagactcttctgtcagtcttgcagtatttatatttttaatttatagtataattcctaatgggtttttactttctgctcctattcctggaattaaactaaaagyttctccctttctgactttctaaactcagtcttagttttcccactctcacaggttgttagtcgtgaagcaccctttcaaatctttttgctctaagtagcaatgttttgctcaatgagtaatttaacttcagccttacatacaggatgataagccaatgttggttttcacaggtgtctacccgcctccccctaaattcatgtgtggaaatccaatccctctgaagagctaattaagctaaaatggggtcattaggttagggccctcctccaatatgactggggtccttataagaagaggacaataggatgtagacacacgcagagggaagactgtgtgaaggcacatggaaaagatggtcatcttgcaagccaaggatagaggcttccgaaagaaccacctccactgacaacttgatctgggatttatgccctcctgagctacacagtctgtg

SEQ ID NO: 902981 - DNA, 513 bp, Homo sapiens
atttattttatacaacatgaatctttgtaagtattagaacaacttgtataatgctaatatatattataaatgtagaataaaattattagcaattagactaccaagataatctgttgattaaaattaacaaagggtatctctaagttcttgtaaatggtctataatagtagtgatttattatcttgattaacataaaaatccactgccctgttctttttaaacaaacaaagaataaacatttatctagtgttctttcaaaaaaaaaaaaaaaaaaaaaaactaagacacattaacttagacctacacagggtaaagatcgtcaatatcactgtcttccaccactacatcttgtcccactgaaaggtcttcaggggaaataacatgcatggagctgtcatctcctatgacaacaatgctgtctcctggaatacctcctaaaggacctccytaaggctgttttacagttgacctttttttataagtagaagtagtaagctctaagtaacaattaat

SEQ ID NO: 902982 - DNA, 577 bp, Homo sapiens
ttttaaggattgtttgctgttggcatatgtaagtgctactgtatattgattttgtatcctaaaactttactgaattggtttgttaattataacagctttttagtagtagggtcttcagatttttctaaatatgatatcatttgtgaacaataataatttatttttttttcagttgggatgcctttatttctttctcttgtccaattcctctggctagggcttccagtaaactatggactacttttgccattttcatctctagttgttttgtgcctcaataaaacactgttgaatattgctgatagcaacagcccctatttagttattgattttaactgaaatggctttagtgggtcaatatttatagttgtgtttatttaactggattttagcaaatataatttgtcatatttaagtaataaccctccattagttatttaggaacggctgctgtgatggttaatactgagtgtcagcttgcttggattraaggatgcaagtattgatcctgggtgtgtctgtgagggtattggcaaaggagattaacatttgagtcagtgggcttgaaaaggcagac

SEQ ID NO: 902983 - DNA, 621 bp, Homo sapiens
tagcatattcttaaatggaattaatattcratctagcatttgttaagtacatatttatgtaaggtaattaaacttaaggaacttgccaaaattataaattctgtattctgtagttttaaatgttatttcttcatcaacattcatgacctccctgtagaaatttaacctcatgaccacctccttgaaactcttctcactaggcttttgtgattttgtgttattttcctttttcatctttctgttttctgtttgtttttgttttcttgctatttttattgtggaaaaatttaaacacatacaaagatagaataataaaatgaaccttcatgtacctttaaccaactttattagttaacaacttttggccactcttgttttatccaatctctcccacctctgattctttcttttcctttctctttttttttttctttctttcttttatttttttgagacaaagtcttgctctgatgtgggctggctagagtgtagtagtatgatcatggctcactgcagcctcaaactcctgggctcaaatgatcctcctgcctcagcctcctgaatagctgagattgcaggtgtgcaccaccatacccagctaatttttaaagtttttataga

SEQ ID NO: 902984 - DNA, 655 bp, Homo sapiens
ttagggtttcagtccttttgcatttgctgaggagtgttttacttccaattrtgtgattgattttagggtaagtgccacgtggcactgagaagaatttacattctgttgttttgaggtggagagttctgtagatatctatgaggtccacttgatccagagctgagtttaagtcctgaatatccctgttaattttctgtctcaatgatctgtctaatattgagagtggggtgttaaagtcccccactattcttgtgtgggggtctaagtctctttgtaggcctctaggaacttgttttttgaatctgggttctcccgtattgagtgcatatacatttaggatagttagctcttcttgttgaattgatccctttaccattatgtaatgcctttgtcttttttgatctttgttggtttaaagtctgttttgtgagaaactagtcactgagtcactgacttcactctgttgtgcccctgcagatcatggtgactactggggcattaattcttccccaggagcacatgactctttcagctctaggagaaaaactgggggtggaaatggtcatctgtctggacagagctttataactttaaaatactgaggtgtatggcatatgggcctgctttcatactgctgaatctgatcaagcatcaa

SEQ ID NO: 902985 - DNA, 577 bp, Homo sapiens
taaatatgaattcatttaatcttcacaatcctcctatgaaatccattctttttcaggtaaggaaactgagacacagatatgttaggtaagtaaccccaaggttacacagctagtaagtggtaggaccggcagtggaacccacatagatagtctggctcctagtctgtgcttttgatcactccactctgaagcttcattgtctaacaaattagtgcaaacttctcaccagactttgcatttctctgcagtatggccccaactaaccttttccaggattatctcatatcaccatgacattacaccatctattcagtatccattcatccaaaaaaaaaaaaaaaaaaacaaaaaacctaacgaacaccttgtgaagccacagcctaatgaaaagacagacattaagaaagaattggcagctcaattggccaaggcaagatgggtgaaagtcagagtgggggttatggtcctggagtttgcaagaagaatggmaggacaagaaaaataaatatgaacctcctgtaccaactagagtggagaagaagaaaacaaagggaccagatgctgccagcaaactgcc

SEQ ID NO: 902986 - DNA, 617 bp, Homo sapiens
attaccctacataactgagcttaatataaaatacaaggaaaaaatgaccacttgtaaattacaggtaatttattattcttaatgatgaggccagcaaaacacaaacaaatcctaagaaagarcacttggagctatgattctggagataagaattaagtggcattgcatatatttttaaaacatcgattttcaaaaggtcctatgtgaatattaagaacaggtattaaaaaaagaaggaaagggtataataaagcactgataataagtgcggtaggggtagccaaaagagttagggagttaaaacaagccattggataaagggtagtatctgcttaatgcttagctttctcattatctcaactcagttgtgactgaaaccaaacaggtagaaattagagaaagacatggagagaaagggttcagagaagtggcaggctcaaggaacatgagccttccctattgcatcaaggatggtcatatcataaaagcatactgttgtaaggttggggacccactggggaatatagtctgctttaatgatctgaaaatgcacatagcagatgtgcaaaaaatttggctggctcacaaattttacaagggtttcatagattctacaa

SEQ ID NO: 902987 - DNA, 576 bp, Homo sapiens
ttcctactggggcttggcttagaataaatcctgcctgagtaccctgaaattccgagtttaaataatcaattgctattgatttttcacttttgttcygccaacacttggttattccctgagtcacatagccttgccacttgagccaaagtcaataaagaatttattcattcattagaatctgtagaggtagaatataatgctgaaaaatcacatttaagattttccatagtaagtatcaaacattttgtgtgggattttaatgtccatgacaaatctgtattaagaacaccagcaagataaacttagatcttgtgagggactgttttggatgacctgaattacattagggaaacacttttttttttttttttttttaagttttagggtacacgtgcacattgtgcaggttagttacatatgtatacatgtgccatgctggtgcgctgcacccactaactcgtcatctagcattaggtatctctcccgatgctatccctcccccctgcccccaccccacaacagtccccagagtgtgatattccccttcctgtgtccatgtgatctcattgttcaatt

SEQ ID NO: 902988 - DNA, 631 bp, Homo sapiens
cgggggaactctgctgtataaaaccatcagatctcgtgagacttattcactatcacaagcacagcatggaaaagaccgacccgcatgatttaattacctcccactgggtccctcccaygacacatgggaaatatgggagctaccattcaagatgacatttgggtggggacacagccaaaccatatcatatcacgttgtccgagtgcttgagacagggtactacaaccagactcctcggagaaggttgtgtttggtctaaggctcgtcaagctcacccttttaaaaagaattgttcaggaatataggcctagccaggcagcctgaatcagttcctccgtcaggcagggatatgggatatatatggggttggtgaatgcaatggagcagggttgtttggaactttaaggaattagttttctgacccagaagagatgtgggtcttcttttagatttcaagttgtgtgaaataaagctgaaaaatgtcatagccatttttttctgtcaccaaggaagctattttgaaccaactcagaggagggaatagtgaaggggagtccagagaaataaaactgaaatactgggttcagcctaacctgaggcctaacgtgcctcatggcttgcacttaagaga

SEQ ID NO: 902989 - DNA, 640 bp, Homo sapiens
ttaagtgtttaatccattttgatttgatttttgtgtatggtgagagatagggatttagtttcattcttctacatattgttatgcagtttctcattacatttagtgaagagactgtcctttccccattgtatgttcttggcacttttgttgaaaatgagttggctgtagtggagagaggcagagcaagatggaggaaaagaatgctccactgatcgttccctacacaaggacaacaatttatctacacgaaaaacaaaacaaacaaaacagacagacaaacaaaaaaacacctttagaagaaccagaagttagatgagccctcacagtagctagttttatctttgtatcactgagagaggcactgaagagataagaaaaacagacctgaactgccacccctccccgacccctgcagcagcagtatggtgcagagagcacagaaattgtgaggccatgaactcagtgctatcctgttagagcagaaagaaaaacctggaccaaactcagctgacgtctgcccatggagagagcattgtaacaattcctagccagaggggaatcccagcagytggaacttgagttcctgcaaaccttgccactgagggatacagtcctctctgtctgtaaatgaatttgaaag

SEQ ID NO: 902990 - DNA, 577 bp, Homo sapiens
aattcactcaaaaccacacaactacatggaaacttaacaacctgttcctgaatgactactgggtaaacaatgaaattaaggtagaaataaataagttctttgaaaccaatgggaacaaagacagtgtaccaaaacctctgggacacagctaaaacagtgtttagatggaaatttatagcattaaatgcccacaggagaaagcaggaaagatctaaaatcgacaccctaacatcacaattaaaagaactagagaatcaagagcaaacaaattgaaaacctagaagaagacaagaaattactaagatcagagcagaactgaaggagacagaggcacgaaaaacacttcaaaaaatcaacaaatccaggagctgtttttttgaaaagattaacaaaatagatagactgttagccagactaataaagaagaaaagagagaagaatcaaatagacacaataaaaaaagataaagrgggtatcaccactgatcccacagaaatacaaagtaccatcagagaatactataaacacctctatgcaaataaacaagaaaacccagaagaaatggataaatttctgg

SEQ ID NO: 902991 - DNA, 642 bp, Homo sapiens
tttggtcaaacattggctcatacccttagtttcctgaaatatggcaaaagtcacgtaagcagtctcttcatctgtccatctcaactcaagcctcgcatcattactttatcccttcaaagcatcttattacctagaacacccaggagagtgtactgagaactgcataataaaaaaagtgaataaaatccccatttgttgtgtgcttatataggcatacctcattttattgcacttcactttatagcacttcatagatactgttattttttacactgaatatttgtggcaaccttgcatcgagcaaatccataggcatcattttttccaacaatgtgatcacttgggtctctgttacacttttgtaatttttgcaatccttcaagtttttcattattattatatctgttatggggatctgtgatcagtgatctttgtggttaccattgtgactgttttgtggataccatgaaccggactcagataagacagtgaacttaattgatgaatgttgtgtgtgttctgactgattcattgactggccattcacccatctctctccttctcagcccttgctattttctgagacataataatattgaaattaggccrattaataatcctaccatgacttctaagggttca

SEQ ID NO: 902992 - DNA, 404 bp, Homo sapiens
gcccaaggaatgcttcagtgagccatgatcatgccctccaacaartaaataaaataattaatttatttagagactctgtctctaaattaaaattggtattgcattgaatctttagatcaataaataaaataaataaaaagtcatcaccaaacccaaggtcatctagattttcagctgttgttatcttttagggttttttttttatcattttatgttttacatttaggcctatgatccattttgagtaagttttcatgaagaatgtgaagtctgtgtctagattcactttctttgcatgtggatgtcccgctgttccagcaccattttttgaaaatactatcttttctccattgtattgcccttgtccctttgtcaaacatcaatctgctatattttggagtctt

SEQ ID NO: 902993 - DNA, 639 bp, Homo sapiens
tttgtctcagcatcctgaatggactaacatatttagtcagataataataatcaaattattatcctgatyttacagttgtggaaattgaagtacagagaggttaagtggtttttcgaagtcaaatggctagtaagtggtggaaccaggatttgtgagaaagagagtcttagaacaaggtgaatctaagataagggtttagacagttaaaggtttcagaggcaatgtgtgttttgtgtggccattctacctactttcgatcaatcaatctatgagaaaggccctatgctgcatgccaggaagggggctgtggtggagatatacaaatacccaacaaattcctatgtgagtgaatttacactcctgtcgaggatgtcctatagttctgtagtggctcaacccaaattctattaatactttttgccctacattctgaaactgtcctgtgaaataccataattactagctatacatgactatttaaatttctgttaattaaaattaattaaatattaggtttgatttttaaaaattgataaataataaaataattaaaattagataaaattaaaaattgaattcctcaactacctacatttcaaatgctcagttgatacacatggctagtgactaccatgttgg

SEQ ID NO: 902994 - DNA, 645 bp, Homo sapiens
acaagcgagaccttgtctcaaaaaaaaaaaaaaarcacacttctctttaaaatggtattatcctaaatgcaacgtagtaccctgaactggaccctagaacataaaagagacattagtggtaaaacatgaggtatttgaataaagtgtatagtttagtcaatagcattgtactaatattaattttttagttttaaccaagttgtgttatgtaagatgttaatattaaggaagatgggtgaagggtgtgtagaaattatatctgtgactttgctgaaatctaaaattattccaaaatgaaattttttaaaaatggtattatctacatcagtgcttctcaaccaggggcagttttgtcccccaggggacatctggaaatcactagggacatctttggtttttacaactgcagaatgttattgacataggaggatgctactgttgggtagagaccagggatgctgctaagcaccctgcaatgcacagaagaggctcccatagcaaagaattattagacctaaaattccaatagcgttgaggttgagaagccttaatctagatgtaccaaaacttaaggtcaatgatcaagccatgtaaattagttctgcactgtggttaaaaatttactttaggacaaatcctgaaatt

SEQ ID NO: 902995 - DNA, 645 bp, Homo sapiens
acaagcgagaccttgtctcaaaaaaaaaaaaaaagmacacttctctttaaaatggtattatcctaaatgcaacgtagtaccctgaactggaccctagaacataaaagagacattagtggtaaaacatgaggtatttgaataaagtgtatagtttagtcaatagcattgtactaatattaattttttagttttaaccaagttgtgttatgtaagatgttaatattaaggaagatgggtgaagggtgtgtagaaattatatctgtgactttgctgaaatctaaaattattccaaaatgaaattttttaaaaatggtattatctacatcagtgcttctcaaccaggggcagttttgtcccccaggggacatctggaaatcactagggacatctttggtttttacaactgcagaatgttattgacataggaggatgctactgttgggtagagaccagggatgctgctaagcaccctgcaatgcacagaagaggctcccatagcaaagaattattagacctaaaattccaatagcgttgaggttgagaagccttaatctagatgtaccaaaacttaaggtcaatgatcaagccatgtaaattagttctgcactgtggttaaaaatttactttaggacaaatcctgaaatt

SEQ ID NO: 902996 - DNA, 599 bp, Homo sapiens
ctcaacatttgggaagataccacaataaagcaactgaaaaaaataaaaagaagaaaagaaagccataagcttttgtgaataagagagaataataaaactggagagatttaaaaaaccattgtggatatatatttttaaaagacaggatgcttcatagctaagattggagaagaaacaattagaagaaaactgggatattattagtcaacatttatttatttatttatttttatttatttatttttgagatggagtcttgctctgttgcccaggctggagtgcagtggcacaatctcagctcactgcaacctccacctcccaggttcaagcaattctcctgcctcagcctcctgcatagctgggattacaggtgcccgccaccacacccagctaatttttatatttttagtagagatagggtttcaccatgttggccaggcaggtctcaaactcctgacctcaggtgatctgcccacctcagcctcccaaagtgmtgagattataggcatgagccacagtgcacgacctattagtcaaaaatttaaattgtaaaacaggttggatgacaaaaatgaaaaagacgtctcagaaagtagaag

SEQ ID NO: 902997 - DNA, 611 bp, Homo sapiens
gaagtcatgtggctcaacttgtacaaagaaaaaagatttttaaaaaagtactgcatggaccattctgatataccagtgtccyatactcaacagtttgcaactatgatggtattggcatttgaaatgtgtagggacatttggtagttacaatgctaagagatgcgactagaatttagtatttggtgccagggatgctaaacatcctgtagttattggcacagtctcaaacaactaagaattgtctcactcaaaaagccaatactcctgttgaaaaacatgacaccaactgatgatggctatcagggcagagataagtgatgggtaaaggtatccgaagggccattgcaaattagaattcccaagaacacaagggagaacagtactggggagcaggatgcactagcaccttgccttctggaggaccaaaagaattgatgatcaagcttcagcttgcaagatttttctgacatattacgcccaagatgcaaaaagaatctacatttagctcttgaagctaatcctttttgtaggatttatggttcatgattcctaaaaaatagtttttaaaaataacattcctctcctttctttgccttccattttgatggttt

SEQ ID NO: 902998 - DNA, 644 bp, Homo sapiens
ccaaatgtccatcagttgatgaattgatgaataaaatgtggcatatccatacaatgaaatattatccaaaagaaatgaagtgctgatacatactacaacatagataacccttgagaacattatgctaagtgaaagaaaccaggcacaaaagactaggtattatataattccatttatataaaatgtccagaataggcaaatctataaaaacaaagtggattagtggttgcctagagtgggaaagggggaggatgagggagtttctgctagtgggtgtggtaggcagaagatgtccacattttatttctagaacctgtgaatatgttaccttacatgacaaaaagaactttacagatgtgggggggggtacaggcaaagaaagaaaagatttcttgaattatccacttgaatatttaatcacatgaattgttaaaaactagagaacttctcccaggatttgtcagagagaaaaatgttaataattagatacagtgttcctggctttgcagatggaggaagtgggggtcatcagcccagaaatgtgggtgccttctagaaactaggaaaggcaaggaaatgagtctttytctatagcctccagaaaggaatgcagccttgcagacactttggtatttgcccagtgg

SEQ ID NO: 902999 - DNA, 644 bp, Homo sapiens
tttttttttagcatactctgaaattataacatacagttcaaatttttcatgagcaatgcagaactggaaactcgttcatacrttttgctccctgacacttgttcagtaatctgcaatgagagacagattagatagttgaatcagaaaagtcacagaagtttttaaaaactgacaaaaaaaaaggaatgataatctagcaaagttttgtttattcactggagtacaaggaccaagcttaatggacagatgaaaaggttaatagatgaagacttagatggggtgctgtgaataggttgctaagcaacagcatttgtagaatgttcaactaagtatcaatctatgaaacaaatgaaataggagtgtttttcctaaagataggtaaggaggaaaaggcagagagcaataaggtctataaattaagacatccaaacttttttgtggtgaaagtttgttgtgtttatgggaatcagcatatcggaggattaagtgaggtaatttgtgaaatattttgagatgtaagatttattttcatttttacttatttatttttgttttctttcctgggcataaaatacaaagtgttactaatatttagcaattgctatttgtgtgtttgactgataagaaaaagaagcagtaaattc

SEQ ID NO: 903000 - DNA, 696 bp, Homo sapiens
ttataagtagggcaaggacaatagagtatgataaaggtcagcatagaggtaagccatgttttaatgaaagtccatagaagaagctttcagttcatctttgcctgtaatcaagaccttgctttaattgtgaatatctcaaattaattttaagtgattatctgttgttggaagtaaaggtagaatggaaagcaagaaagtaattcatgtaaaggaaatagcatgtacatatgtccagggtaataatgactcatactgacaaatgcaaaagtttcattatgaacagaggacagagtacaaagagtagaatgatgaaatgaggctagtgcagctatcagacttacaaatcagggaaggcctatgtgacacattaaagagttggaactttgctctgagaatactggctaaacattttaagcatgaaagctactgcttaaacttgtcatttaaaagaatcaccctgactgtagagtagatagtagatttctaacaggcaagatagtcagcaggaaggttagttaagagatcgtacaataattcatactagggaaaataatgtcctgawttgagatagcagcagagttgctggagaaaggtgtttatattcaccttaaattgagaaaaataagaatatccaattttacaattgatgagatttgtgaaaggtggcagtgaatgaaaaaggagtcaagcaagatt

SEQ ID NO: 903001 - DNA, 593 bp, Homo sapiens
aaaatcaagcacatctcaggctactccacagaactaggcagtgccagaaaacagttgcacaatgttgacaaatgtgatgcaagaatataatgcccagccaagaagttatccaagtaaaaaggcaacagacagatatttttaaacatgaaaaaaactcaggaaatgcagcagccataaatcaatggctaaaacttcaaaggactcaatggcaaaacctaatcatttaagaaaggaagctcaagagtgattaatcatcactgaatgtatctactgaaatttacaatttaaaaacaaatttttaactctaattcctggtcttttttaatgctgcattcaaatcttcatagattctcttattttttttctgttgttgctgtcaaaattatctatctctacctgttttctggcactgcatgttgttaccacagagaaaataaggccttcctggttttcttctaaagatttttcttattctttctctgcatgctgagcacccataaagtgcacttctaggtgaattgcrttttctgtttggaatcttacagtaaagtttaaatggctgtggttagacagagcagatctgagtcactatc

SEQ ID NO: 903002 - DNA, 721 bp, Homo sapiens
attcaaattttgatgtttcaaattcatattagcattaagaaggtggatttacagttcttgcttatcttcttttttaattaatttaagaaaacttttgggccaggtgtggtggctcataactgtaatcccaccattttaggaggctgaggcaggtggattgcctgagcacaggagttcaagaccagcttgggcaacatggcaaaatcccatctctaccaaaaatagaaaaaattagcagggcgtggtggtgcacgcctgttgtcctagctactctggaggctgaactgagagaatcacttcagcccgggtggcagaggttgcattgagccgcgattgcacttgtgcactccagcctggacaacagagcaagaccctgtctcaaaataaaaaaagttttaaattttaacttgtatttcttagtaccataatgctctattctcctttattcagcaaaaactctaattacaatggtatctatgagaatatgctgtatcaccctgaatttatacgtagaaatgtacttatgtttttgcttttttaacatttttttattggggaatataacatacagagagtaataaaacctaaaaacagtaagaaaaaattataacattaacattgatgttaccaaaccttggtcagaaaatagaatttgccagcaatccagatactcccaatatacgtcttcttgttgrtatttcccttttatttcctccctcct

SEQ ID NO: 903003 - DNA, 646 bp, Homo sapiens
  misc_feature 24: n = A,T,C or G
atttagaaatcaagttcaagacanaaatggcaaggayatgtggaaattgagacaggaacaaatgtgaaacaatgtgtggtgatgtctggtatgactgctggcagccacttcacagtgaggtgagagagacagcatggtggtcatcagatgcatgcacttgactcccagaacttttccagaagggctacaaagggaaaccacagctggcattagtccatggaagagagagagaggagggagaatgtatctgctcagctgtcgttagtcttctgtttccccttggccagggtttccctgagttagaactaccatctctgttgttctgtcttacatcatccagtcccttggtggtggtcatgaaagtcagacctcatgcccacagtgtggtgatgcattcaagtcccaaatggaaggatgatctggatcaggcaaggtgctgaccaggggaacaggagatagtgaagggaatctgagaaagcacatgtttgtgtccaataccaccactccttgtgccactgagacgtgctcataccctccagtcatggctggctttatgagcatatgacttgcacagttgtacagggttttgtgcttataggggcttgtgcttagagtgactctatgcttggattaatgttctgcactt

SEQ ID NO: 903004 - DNA, 687 bp, Homo sapiens
atgcctattacaaaacaaacaaacaaacaaacaaacaaacaaaaacagactctgtcaaggttgtgatgaaagggaatgctttyatactgctggtgggaatgtaaaacagaaacagcaaagcaagtaccacatgttctcacttacaagtgggagctaaacattaaatacatatggacacaaagaagggagctacagacaccagggcccacttgaagacggagggcaggaggggggtgaggatcaaaaagttacctatcaggtactctgcttatcaccccagtgatgaaataatctatacagcaagttcccatgccatgcaatttacttatataacaaacctgcacatatacctctgaacctaaaataaaatctaaaaaaaatttaaaactgcagagagaagtgagatttctctttaaataaggcaggattgatttagtgatttagtgatatttgaggagtggtagtgtttagtgttgatatctgagaaagagcattccaagaagaaaggacacaagtatgaagtccctgaggcaatgcttggcatattcaagaagtgacacaaaggccaatgttgctagcatgggatgagccaggtgtgttttaggacagacaggcagacaaaaacagatcattcaaatgattataggacttcgtaaggattttggccttactctgaatgagttgaga

SEQ ID NO: 903005 - DNA, 608 bp, Homo sapiens
tagcttttagaaaagggaatttcccttgctacattcaaataactcataacctttacacacttgacatttgcacacttgattccaataactgcctataggaaacttgttataggagaaaagagaattccctagaggcaagtaaggaactgcctaatgcagttcttagctgacagtatttcaacaagtaatattgaacaaacaactacagtgagcatgatttaacaagtccctagccacatcattgaagcatactttctacacaggtcctgagtcatcttacaccccgccctccctcatccccagacattcagattcacggattctgctttcatgtttcttaactctctctctctctctcttcctttccacccctactttcccagctcaagtattcataacctcttgcctagagaggctccctacctctggtctcctcccttccaagccaccccacactccatcagaactccactggttcaatcaatgagtatttattgagcccttactaggtgccctgcagacactacttactagggaccatagacactatgttgagycctcggaagtcaatcttgaacaaggcagacacgtaccctgaaggtgatagt

SEQ ID NO: 903006 - DNA, 611 bp, Homo sapiens
ccccaaccaagaaagaaacctgtagcccagtagcctttaggaatgtaggccctgcttatccaacctgggccagcttcatgagaaagacagcttctttctttctcacaaacttctgcttcacttcacagctgctatcggttttgtgggaggggagggcctcatggattatggaaaataacacactctccttaattctctccttttccttgttccagaaacaagccaaaagcatcccttaccttgaaagaaagaaacacaagaagaggccttgtgctttaccagtcttgactgcaattgtcagggtccacttattatttatgataatactttgtggggttctttttataaaatatttttgcaactgaaggatctctcctcttggagtgaggactctctgcaatgtcttttttctttttctttttttttttagacggagtcttgttctgttgcgcagactggagtgcagtagtgcaatctcagctcactgcaacctccgcctcccgggttcaagtgattcttgtgcctcagcctcctgagtagttggsattacaggcctccaccaccacacccagctaatttttgtatttttgatagagacggggctttgccat

SEQ ID NO: 903007 - DNA, 611 bp, Homo sapiens
ccccaaccaagaaagaaacctgtagcccagtagcctttaggaatgtaggccctgcttatccaacctgggccagcttcatgagaaagacagcttctttctttctcacaaacttctgcttcacttcacagctgctatcggttttgtgggaggggagggcctcatggattatggaaaataacacactctccttaattctctccttttccttgttccagaaacaagccaaaagcatcccttaccttgaaagaaagaaacacaagaagaggccttgtgctttaccagtcttgactgcaattgtcagggtccacttattatttatgataatactttgtggggttctttttataaaatatttttgcaactgaaggatctctcctcttggagtgaggactctctgcaatgtcttttttctttttctttttttttttagacggagtcttgttctgttgcgcagactggagtgcagtagtgcaatctcagctcactgcaacctccgcctcccgggttcaagtgattcttgtgcctcagcctcctgagtagttggcattacaggcctccaccaccacrcccagctaatttttgtatttttgatagagacggggctttgccat

SEQ ID NO: 903008 - DNA, 628 bp, Homo sapiens
cttgtattcattaaaatataacattttaaaaggtgaaaaaataagtcacaacctggaaaaagatctttgtaatatgcwtaattaacaaaaaattattaaccagaatatataaatacatcaaaccaataagaaaaagataataactcaatttaaaattgggcaaaacatataaacaggcaattcacagaagagaactgtaggtggccaataagcttatttaaaaggttcaactttacttgacaattggagaaattcaaactaaacacttaacaccacaatgagattacattaacatttattggattagcaataaaaagactattaatgccacttgctgaaaatgtgaaaaaatgagcaccctcttacgtgttggtgagagcatattacagcaaccactatagtaatatctgatagttaaatatttgtatacctataacacagcaattccacccctacacaagaatgtttttagctgcatcctttgtaataacaaacatgtagaaacaaatttagtgttcaccaacagaaaagtgaataaattaccatatattcttacagtgtgatattatatagcaataaaaattacaaaactgcaataataaaaactatgtggattaatcttacaaac

SEQ ID NO: 903009 - DNA, 628 bp, Homo sapiens
cttgtattcattaaaatataacattttaaaaggtgaaaaaataagtcacaacctggaaaaagatctttgtaatatgcataattaacaaaaaattattaaccagaatatataaatacatcaaaccaataagaaaaagataataactcaatttaaaattgggcaaaacatataaacaggcaattcacagaagagaactgtaggtggccaataagcttatttaaaaggttcaactttacttgacaattggagaaattcaaactaaacacttaacaccacaatgagattacattaacatttattggattagcaataaaaagactattaatgccacttgctgaaaatgtgaaaaaatgagcaccctcttacgtgttggtgagagcatattacagcaaccactatagtaatatctgatagttaaatatttgtatacctataacacagcaattccacccctacacaagaatgtttttagctgcatcctttgtaataacaaacatgtagaaacaaatttagygttcaccaacagaaaagtgaataaattaccatatattcttacagtgtgatattatatagcaataaaaattacaaaactgcaataataaaaactatgtggattaatcttacaaac

SEQ ID NO: 903010 - DNA, 628 bp, Homo sapiens
cttgtattcattaaaatataacattttaaaaggtgaaaaaataagtcacaacctggaaaaagatctttgtaatatgcataattaacaaaaaattattaaccagaatatataaatacatcaaaccaataagaaaaagataataactcaatttaaaattgggcaaaacatataaacaggcaattcacagaagagaactgtaggtggccaataagcttatttaaaaggttcaactttacttgacaattggagaaattcaaactaaacacttaacaccacaatgagattacattaacatttattggattagcaataaaaagactattaatgccacttgctgaaaatgtgaaaaaatgagcaccctcttacgtgttggtgagagcatattacagcaaccactatagtaatatctgatagttaaatatttgtatacctataacacagcaattccacccctacacaagaatgtttttagctgcatcctttgtaataacaaacatgtagaaacaaatttagtrttcaccaacagaaaagtgaataaattaccatatattcttacagtgtgatattatatagcaataaaaattacaaaactgcaataataaaaactatgtggattaatcttacaaac

SEQ ID NO: 903011 - DNA, 591 bp, Homo sapiens
ctaattctttcttatgagatacacaaaacacatagctactgtaacatatggcaagawctcaagagcttattaaggaacagaggtgggacatctgacccaattctataaattttatagagattctgttcctctcagataacatttttaaaattaaggctgtgtgggaagtcctgggccactccgtaaaaggcatcttggtaccacaagattttttggcagaaatcacttcactttgaaaaatcttagctgctgcctccaaacttggctccgaccctgccacacaaacctgttgtcttgcggccaattcctctcttggagatcctgtcttggctttggcccctacctaggcctttgccttggattccttaatattaacttccgtgtctatttggccaaatgtttgccagcctggctctgctgcagttggctctatacctgtgaactcagccagccacccacatgccttgtgtctgagtattccttggtaacacctgtcatcctgaaagccttgcttgcgccttctgggtagagacagaatcaatctcttctttagtaattgcctggattgatttttaatacctttccatgcca

SEQ ID NO: 903012 - DNA, 631 bp, Homo sapiens
tgtaatttatgatcctttaaagtcttaaaaagaaatgtcagttaaatccagtgcaaatctgacattctgraagcttgttaacagctcatccagtgctgcctccaagatcagaaacctctgagaaaactaaaattcatcagtagccctgacatatcagaaggaagctaataatgttgggatgtactgctggtcaacagtcccctggtttctcttaaatcattcaaaatatgtcactatcagtcactcagccagccttggagagccacatgacagaactggctctgcttgcagctgttgattcaaacatgggtttcatggataagcaaaatgtgtgtttcaataatgtgaagctcttgttcaaaatgaaaagaaagccagaatttcatttgctgcaatgcttcactcactgcccctggatacctccaaacatttgatgtggcagagctgaattttttaaacatccagttttatacacatccttcatctcctttcacatgtcatcaggttttaacttccacatgaaaatgctttctcctgggacatgaagttgtcacacctttaattgccggtatgctggtttgcagagttgtttctgcagtactaataaactgccacaggaggggacaagcct

SEQ ID NO: 903013 - DNA, 650 bp, Homo sapiens
tgcatatttaataagaaatttgtattaaatttatgctttcaaaaaatagatgatacatgtatgtcttacagaaaagttgatcaaaagttgccatcctttgtgggttgcatatcattactatccttgtgaaacccagaagacactaatctgttggtcaagaatcagcaattactttaaaagttaaaagttatttttaagaacactgtattcaaagatggcaatactagctgtgcaggtgcaaaagatgcattaatatacaactcttgggcattatttttcatttagatcaaatgaatgaccttttaagttaattatgctaattcttggttagaaattttgtgtgtgtagagaaaaagcacacaagtacataagcacacacttagatattgctaagttaaatatctcaagtgaaatagctgacattatgaatgctattataaatttagctaaaagttcaatgttaattttgtttcagtgatattatgaatattaatttcattgtggtataactccatggtcaaaacaattttstaaccaaagaaaagaaaccagggagcagagatgtactttgtggtacaaacaaaccaatatgtggtacagaaactcgatataattcataattatgctcaaacaaaatgcaatattctacc

SEQ ID NO: 903014 - DNA, 620 bp, Homo sapiens
ctgtgaaatggataacattaacatgctcattttgcaaaggaaactgaatcacagacygtttaagtcaaacctgccaatgaatgctgagagttaggattcaaaactcggcactgtggctcctgagtttatgctcttaaccaccgttaggaagcaagaaggtctttgatgagggcactcggtgacaatgtgacatttaaatagaccaatgttttaaagctagacctacttcttattaattatcattaggaagactggttatttaatctgagactcagttttttttatttttttatatatttgtaagttttcatttatttattttgtattatactttaagttttagggtacatgtacacaatgtgcaggcttgttacatatgtatacatgtgccatgttggtgtgctgcacacattaactcatcatttacattaggtatatctcctaatgctatccctcccccctccccccaccccacaacaggccctggtgtgtgatgttccccctcctgtgtccatgtgttctcattgttcaattcccacctatgagtgagaacatgtggtgtttggtattttgtccttgtgatagcttgctgagaatgatggtttccagcttcatccatg

SEQ ID NO: 903015 - DNA, 625 bp, Homo sapiens
aaaaaaaaaaaaaaaagagctgagattaagagaaatgaccaagaaaagttctccatgtgtgttgagttttctatgtggaatcccccggagagtggrgatcctgacttatttttctcagtctcccttatgggtagccacagtgctcaattcatatcattaaatgattgtgaaagggaagtaaatataggtttctggatttgtcattttatcaggtgagctgggaggaatattcttcagcaagaggccacatgctttacctcacaggggacagagggatcagggataaagatggctactctggttgtctggtagagctgatgatgttgctgatgcgttgggtcagaggttgtgaatgctgtggttattgctattgagcttggggctgagagagtttggagaaaatgctggaccacctcagatacatcagaattatatttctaaagtttagaaaatgcaaacaaccaaaaataaaaaataaaacttatgcacagtctcatattttggagtatattcttctagtcttctttcttcttatatgtaaacttttttaatacaagtgagttcagggagaaatgctctagcataacttgcctttttcactcaacattgtaatagaaatattttt

SEQ ID NO: 903016 - DNA, 625 bp, Homo sapiens
aaaaaaaaaaaaaaaagagctgagattaagagaaatgaccaagaaaagttctccatgtgtgttgagttttctatgtggaatcccccggagagtggggatcctgacttatttttctcagtctcccttrtgggtagccacagtgctcaattcatatcattaaatgattgtgaaagggaagtaaatataggtttctggatttgtcattttatcaggtgagctgggaggaatattcttcagcaagaggccacatgctttacctcacaggggacagagggatcagggataaagatggctactctggttgtctggtagagctgatgatgttgctgatgcgttgggtcagaggttgtgaatgctgtggttattgctattgagcttggggctgagagagtttggagaaaatgctggaccacctcagatacatcagaattatatttctaaagtttagaaaatgcaaacaaccaaaaataaaaaataaaacttatgcacagtctcatattttggagtatattcttctagtcttctttcttcttatatgtaaacttttttaatacaagtgagttcagggagaaatgctctagcataacttgcctttttcactcaacattgtaatagaaatattttt

SEQ ID NO: 903017 - DNA, 625 bp, Homo sapiens
aaaaaaaaaaaaaaaagagctgagattaagagaaatgaccaagaaaagttctccatgtgtgttgagttttctatgtggaatcccccggagagtggggatcctgacttatttttctcagtctcccttatgggtagccacagtgctcaattcatatcattaaatgattgtgaaagggaagtaaatataggtttctggatttgtcattttatcaggtgagctgggaggaatattcttcagcaagaggccacatgctttacctcacaggggacagagggatcagggataaagatggctactctggttgtctggtagagctgatgatgttgctgatgcgttgggtcagaggttgtgaatgctgtggttattgctattgagcttggggctgagagagtttggagaaaatgctggaccacctcagatacatcagaattatatttctaaagtttagaaaatgcaaacaaccaaaaataaaaaataaaacttatgcacagtctcatattttggagtatattcttctagtcttctttcttcttatatgtaaayttttttaatacaagtgagttcagggagaaatgctctagcataacttgcctttttcactcaacattgtaatagaaatattttt

SEQ ID NO: 903018 - DNA, 627 bp, Homo sapiens
gcctcatgattcacccgcctccacttcccaaagtgttgggatcacaggcgtgagccactgkgcctggccaggaaggttgatttaaaaaaaaaagagaaaaagaatgaaaaaaggacaaaaatagtgtaatataagcattataaacaacaattcttaaataaattgacaaacctaaatgaaatggatacatttttagaaccagatcatctcactatactgaccaggaaaaagacacctgactagaccattatgcttgacctacgtaaaaacaatcttggctgcaaagcctagatggctgtacaggttaattctactagactttgatgaacagttaattcctatattgtactagctgttccaaaaaccagaaaaaggataaagcatctcagcttgttttatgactctaatctttattccaaactaagataatgaaaatataaaaaacttacaaaaccatttcacttatgaatgaaattgtaacaaccctaaataaatctgactgaatccaactgtgtgtctaaaaatatataatgataagtaggatatatccaaggaatgtaaatactgttcaacagaaaaatcaactgcttgcagagtgtcgagtgttagagccatcctggggggtgg

SEQ ID NO: 903019 - DNA, 562 bp, Homo sapiens
gcatgtgtgcattcaactaacagtgttgaacstatcttttgattgagcagcttagaatctctctttttgtagaaaatgcaagtagatatttggagccccattttgccctatggtagaaaacaaaacatcttcacataaaatctacacagaagcattctgagaaacttctttgtgatgtttgcattgaactcccagagtcgaacctatcttttgatagagcacttttgtatctctctttttgcggaatctgcaagtggatatttggaaagcttgaggcctattgtgaaaaaggaaatatcttcacataaaaactacagagaagcattctgagaaacttctttgtgaggcatggattcaacccacagagttggacttatcattgagcagttttgaatctctctttttgtcgaatctgcaagtggatatttggagccctttgtaacctagggtggaaaaggaaataccttcaaataaaaactatatagaagcattccgtaaaacttctttgtgacgtgtgcattcgtctcacagagttgaacctatctaatgattgagcggtttt

SEQ ID NO: 903020 - DNA, 587 bp, Homo sapiens
cttcacataaaaactacacagaagcattytgagaaacttctttgtggtatgtgcattcatctcacacagttgaactttcttttgattgagcagttttgtaacactctttttgtagaatctgcaagaagatatttggagcgctttggggcctacagtggaataggaaatatcttcacataaagactacacagaagcattctgagaagcttttttgtgatgtgtgcattcaactcagagttgaacctttcttttgattgagtagttttgaaacactccatttgtagaatatgcaagtggatatttggagcactttgaggccaacagttgaacagcaaatattttacataaaaactacagagaagaattctgagaaacttctttttgatgtgtgcatttatctcacacagttgaacttctcttttgtttgagcagttttgaaacactctctttgtagaatctgcaagtggctatttggaaggctttgaggcctattttggaaaatgaaatattttcacataaaaagtatacagaagcattctgagaaacttctttgtgatgtgtgcattcaactcactgatgtgaatcta

SEQ ID NO: 903021 - DNA, 634 bp, Homo sapiens
gtagtttttatatgaagatagttccctttccaccacagggtgcaaagagctccaaatatccacttgcagattctacagaaaatgagataygaaagtgctcaaggaaaagataagttcaactctgtgagttgaatgcacacctcacaaagaagaatctcaaaatgcttctgcatagtttatatgtgaagatatttccttttccaaataggcctccaagttctccagatatccactcgcagattctgcaaaaagagagactcaaaactgctgaatcaaaacatagtttcaactctgtgacttcattgcacacctcacaaagatgtttctcagaatgcttctgtgcagttttcatataaagatatctccttctccaaaatagatctcaaggttctccaaatattcacttccagattctatggaaagattgtctcaaaactgctcaatcaaaccaaaggttcaaccctgtgagatgaatgcacacatcacaaggaagtttctcggaatacttctgtgtagtttttatttgaggatagttccttttccaccacagaccacaaagggctccaaatatccattgcagatgttacaaaaagagagattcaaaactgctcaaccaaaaggtagtttcaaccat

SEQ ID NO: 903022 - DNA, 631 bp, Homo sapiens
aatctcaaaatgcttctgcatagtttatatgtgaagatatttccttttccaaataggcctccaagttctccagatatccactcgcagattctgcaaaaagagagactcaaaactgctkaatcaaaacatagtttcaactctgtgacttcattgcacacctcacaaagatgtttctcagaatgcttctgtgcagttttcatataaagatatctccttctccaaaatagatctcaaggttctccaaatattcacttccagattctatggaaagattgtctcaaaactgctcaatcaaaccaaaggttcaaccctgtgagatgaatgcacacatcacaaggaagtttctcggaatacttctgtgtagtttttatttgaggatagttccttttccaccacagaccacaaagggctccaaatatccattgcagatgttacaaaaagagagattcaaaactgctcaaccaaaaggtagtttcaaccatgtgatatgaatgcacacagcacagagaaatttctcaaaatgcttctgtctagtgtttatttgaagatattgccttttctaccataggccacaaacgtctccaaatatccacatgcagcttctacaaaaagagagattcaaagcttctca

SEQ ID NO: 903023 - DNA, 621 bp, Homo sapiens
ggaagtttctcggaatacttctgtgtagtttttatttgaggatagttccttttccaccacagaccacaaagggctccaaatatccattgcagatgttacaaaaagagagattcaaaactgctcaaycaaaaggtagtttcaaccatgtgatatgaatgcacacagcacagagaaatttctcaaaatgcttctgtctagtgtttatttgaagatattgccttttctaccataggccacaaacgtctccaaatatccacatgcagcttctacaaaaagagagattcaaagcttctcaatcaaaagataggttcaactctgtgagttgaatgcacacttcacaaagaagtttctcagagtgcttctgtgtgtttttatgtgaagatgattccttttccacaataggcctcaaagctctccaaatatctgcaagcagagtctacaaaaagagagattcaaaactgctcaatgaaaagataggttcaactctgtgagttgaatgcacacctccaaagaagtttctcagaatgcttccgtgtagtttctatgtgaagatatttacttttccacaattgtcccaaagctctaaaatatccacttgcagaccctctgaaagagtgtttc

SEQ ID NO: 903024 - DNA, 673 bp, Homo sapiens
aaaacaccaaaagcaatgacaacaaaagccaaaattgacaaatgggatctaattaaactcaagagattctgcacagcaaaacaaactactatcagagtgaacaggcaacctacagaatgggagaaaatttttgcaacctactcatctgacaaagggctaatatttagaatctacaaagaactcaaacaaatttacaaagaaaaaaacaaacaaccccatcaaaaagtcagtgaaggatatgaacagacagttctcaaaagaagacatttatgcagccaaaagacacatgaaaaaatgctcaccatcactggccatcagagaaatgcaaatcaaaaccacaatgagatatcatctcacaccagttagaatggcaatcattaaaaagtcaggaaacaacaggtgctggagaggatgtggagaaataggaacacttttacatggttggtgggactgtgaactatttcaaccattgtggaagacagtgtggaaattcgtcagggatctagaactagaaataccatttgacccagcaatcccattactgggtrtatacccaaaggattataaatcctgctgctataaagacacatgcacacgtatatttattgcagcactgctcacaatagcaaagacttgcaatcaacccaaatgtccaacaatgatagactggatt

SEQ ID NO: 903025 - DNA, 633 bp, Homo sapiens
tgaaaatgcaagattccatgttcaaaaagaaggaaaaagtgtcattataggtactaaaatatcataccttttctacttgtcatgatggcttttaatttgctgttgaagtctgtgccatctttatcatgacaatactgctggggcaggtgcagatcctcagatgcccccacatggacctactctgtaacttgaaatgcacacacatacacagcccactgattgccagctttctcctcctgccagcgactagttaacacccttggcaatccccttccccaagttctcactgccccaaccagggtgatccagtgaaccctaatggattatattgttaaagctggacacattcagtaatttgatgagagtcagttgagtggtttttccatgatgagcctgtaaacatcctgtggtgctgtacaagggcaggcaaatacattaatagaatagcgtacagagtacaggaacagattcacacatatacaattacttgagttatgaaagaagtcactacamttcaggggaaaaagtatagtctttttatactttttcagatcaactgactgcaatgtagtctaccctccatatctggaggttttgaacctgagaattcatctaacagctaataaaaaatat

SEQ ID NO: 903026 - DNA, 669 bp, Homo sapiens
aatccagcagctcaattacatcatcgaaattccattttcttcttttttctactccaatcttcatagggtcagtttcatccaaaaaaaaaaatcttgttactggttgtagcatttttttttttcatgtgcagtagagagaaaaaaatgtatcatcatctgtgaattttcttaataaaggtctgaaagtcctatctctacttttgtaattcatttttctcgtattaagttattctgtatatataaaatatccttttcacatgaattaaaaaaatagttaaaaattagttttccaccacagattatttctttaggtcacaaactaaattcagaaaaccaagctctgaggtagaatggatgagatgtgctgttgttttgtccttcatcatctgcctcacttacgtgctttcataattttttgaagggggcgtaaaatactgtaataatggaaattatttagcctttaaaacatgtaactttttgttagttacctcaattgctatagcagtcaacaatatgctcaataaattgccaaatcatctggtcaaaaatataaaattgccagttgactttttctttgtttctaaagcattagtatgcttttctcaattgtttaagttatctcaatattttratatcatatttagttcaatgtgtggtaaagagaaagat

SEQ ID NO: 903027 - DNA, 552 bp, Homo sapiens
tcacctaacagaagaaaatggactgcccrtggcttactgatgtgcttattaatgtaacaggatccgtagggtgtcagttcaccagctggaaacctcttaggtccgcagtgcctctgcctgggttttgctcctgccctttgggcttgttctacccactcggcccagcaggctgtgctcagctcatgctaccagcttggatcctacacctgccgatggcgagccaggcactgaatagcgagaggtgtatgagcgagcaagcatggagtccggccaatgcacacagccaggcacaatggctgctgtagtggggaggcagctctagccactggcacaggcattggctccatgcgaggctgcagctggaccagatctgctgcaagcagcttccactatgggcactggtgtgtggatgaggggaatgtggtggttccagaaagcttagagatgccaggaactgcagagtcccaaagagggggttagagtgtgtcatagccctggcttggggagctccgaggtctgagctcccagaaggtggccacagctcttctcccc

SEQ ID NO: 903028 - DNA, 610 bp, Homo sapiens
acagcaggcctaagtgctaagaaaacataaatgagaaaaacagacatggtgtttgcctcctgaagcaaagtctcctgagagacaaatctattaatcaaagaatcaactgaatagtgagtatgatgaaggagttactggatgttatgagagtatgtaatggtggcctgatctagtctagaagagtaaggcaaggcttcttgggccttctagctgagatctgaggatgatttgcggtgaactaggtgaagatggcagagggagttccaggcaaagagaagaatgagtgcaaaggccctcaggtggaagagagcacacgaccttccaagaagtaataagaggccagagtgactgagctcagggagcaaggagaagagccctgagaggtgaagtgggcaggaactacattgagcagggccttggggtctgtgctgctactaccactgggaaagttttggaaggatatgggcagaaaagaaatgatctaatttacattaatggctaaagtttggagaacaggttagatgactccaggttttttgctatgctaggaacacaggagagctgtttggggagccattcaagtakacatgctgagtcggcagatgcatgt

SEQ ID NO: 903029 - DNA, 595 bp, Homo sapiens
gggaaacaaggaatgacttgttctcctctgtgttcactacaagttgggtccttgtagtgaacatagtactcaataagtagttgaaccttgtagttgaacctaatctttagtagtacccaactacttattgagtactaggtttactaccaaggtgattggatcatttgtaccccacacctcagcatcagcaatatatctatgtaacaaatttacatatgtactccaaattggataaaaatgtttaaattattttaaaaagagaattttggtttaaaccaccatacctcaataatatgactccgggggatattcattggagctattcaacaaacattgaaatgaatcacaaactccttatgtttcttgaaacactttatacttcccagtatcagagcaatcactgaaatgtactcagagaagaaatctcagtgtgacaactctggttcattgccacttcctaaatgcctttcccatttayatctgctttggaattctagactgccagctcaatacccctgccaccaaagggcctgcaatggctgctgcatcaggcaatatgccgtaaatactagcccaagctgcagcaaatttcctg

SEQ ID NO: 903030 - DNA, 589 bp, Homo sapiens
tgactgaaggcagctgaattctyttaaaagcttagtacgtagatgcataggaatgtagaggagtttatctaaatagcttgttgactcatgtggtcctaagaccgagctttgatcatctttgggcgtgcaactgctctctaatcagaagtttggcaatgttaattaccctctagtggtgtttacttgagacctttgtcatttaatctgtactaaataaatgtgaacttcgccggcttattgaggccgatgctgcagatgttgtaaccaagagagttatagagaaatgtcacactctgagactaattcaggagtcctttattgccagttaccaaaaccagctagagctcaaaaattctcttggccccaaagaaggggctagattttcttttatactttggtttaggaaggggagggggagcctagcggaagcaatcttacagaagcaaaacaggccaaaaagttaaaaagataaatggttacaggaaaacaaatagttccaggtgcaggggctttaagtctatcacaaggtgatagatgcaggggcattgggtgctatcaaccagacacaaacgcgggggctttgggtgct

SEQ ID NO: 903031 - DNA, 638 bp, Homo sapiens
ataataactgcatgtataatatatttatacatgcatacaatgtttagtgaccaaatcagggtaattaagatacccatcatctcaaatatttagaatttctttgtgttgagaacattctaaatcctctctgctagctattttggaatttataagttattgataacaatggtcaccctactgtgctgttgaaccctagaactcactccttctatataactgtatatgtgtagctctcctcatcctccttttcacctatctttcctggcctctggcaatcattttactctctacctccttgagatccattcttttagctcccacatatgagacagtacttgagatatttgtctttttctgtgtgtcttacttaatttaacataatgtcctttagtctcatccatgtagctacaaacgaaggattatcattatttttatggctaatatttcattatgcatatatactgcatttttttcatccattcatctgttgaatggatggaatcaacttaggttgactccatattttggttattgcaaatagtgctacaataaacatggaagtgcrgatacattgatttcctttgttttggatatatacacagtagtgaaattggtaattctatttttaattttatgag

SEQ ID NO: 903032 - DNA, 389 bp, Homo sapiens
cagtttttttttgcccattttctcttattatttcttcaggaaaaatgaaaagcaattatatttatgaaaatcttacaggtcctcttcgaaatggttaagtcatgggaggattccgttaaggggtggaaaaaaaaaaacagccttccctagttcaatacaagaagaggagctttcccaggatttctgcctcttctggagtttaaggcccctgtcttgccattctctcagtagcaagcttctctatggggtattttaaatgtaagaagcagaagggctrttataccaaccgctgtcatacaaataaaacttcagccatccatatcactgacaccagctgtttctgttaagagaaaaagtgtaatcatttttcttgtaaggattcttgcatg

SEQ ID NO: 903033 - DNA, 598 bp, Homo sapiens
caaacctgctatgttgatgataaagacattttaaggaacaggttaatagttytttaaaaagtattgtacaaggatggctgtggttttgacttgcataaaacaactgcaaaataattgtttgcataaaaattgattttgacccaattaaataataactaactagcccttgtctgtcagtgatccagtaactttcctttttcttttttcttccacttcacaaagtttaaaataagaatgtcatatgctagttaaagttttattactcaacttcattttatgaaataaataattagttatataagctaagttgtttatgtttttaaaaaatcaattgtgaaggaggtatccaagagatggctaaatgtgtttcattaaacctcattaagacagaagttaacttttcttgtctttaaaaagtgttgcctggatttgcctccaagaacaagggtcttctgagcagcatttacctttagtgccgagttagtttgtttccatctggaatgaaacgaggccttcaacactttaattcaaattctttacagatgaggcaatggaaatgtttttaaaatttgtaaatatattatttaaaactgctagt

SEQ ID NO: 903034 - DNA, 652 bp, Homo sapiens
actggaggtagatggatttaagtagcccastttcctggcaaaggccaggatattgggagtgtttgacttaggcaaaatgggtctagcaatatgtttatgtgaaaagaggcatagcacaggacacctggcctggatcaatgctgggaagcacctaaactaatcagccagagtacaagaggtggtcgtggactgggaggaatcaacctgggggcttcaggatacagcagactggccattcgtgggtggctaggcctggagtcatggcagacagacctcagggcagacgaagtgctctcacactgggtagcaagcaagacaggaggtgaggaccaagtggattgttttggggcagacaaagaatcttgaagagcatcaaaagatttctcagtccacagcaggacccttctgacagaggcagtggctgaagcgatacgtggcctctctgtgaagctaacatttccaaacccacgagagacttttccaagaagaattatagtcatccattcagagcagcaggagcttcagaagatctgggacttcaggtgtgagagtgacagacaggacactgaggagcagttgcatgaaaggggagaggtgggaggagatccatgtgtatacatttcagctttgttctctgacctcatctcccatt

SEQ ID NO: 903035 - DNA, 581 bp, Homo sapiens
acaccaataatttacagccccttctatcttatttctaacacacatgcttggtttaatgaaagtaaataccttttaaatattagatagtttttttaaaaaattcatgtaatgggtataggataaacaatgaatagacttaactggtgatcatcccccccatcatctcttgctagaaagactcctttatgtctgggttggctttttctcctgatttatgtggctgagagagaacacagtgattattgttcctcctggattgaggtctactgcacaaggtctcacctcttttctggacaaggagtcttgagttctatcctaagatacatctataacatgaaatgcaccagctcagcctatttccaacctgaagccattctaccatacccttccccatattcacatttctgtcttcagagcaaagccagcttcccataggctcctcttaccaaggaggctacatcagatggagatatatcaagctgagctgtgattcatggggagctgtcatgtcagaatgggtcttattcatttgctygtttatcctataatgccaccaaaagagaagttgtccagatcctctt

SEQ ID NO: 903036 - DNA, 588 bp, Homo sapiens
aaatacaaaaaaattagccgggcgtggtggckggagcctgtagtcccagctacttcggaggctgcggcaggagaatggtgtgaacccaggaggtggagcttgcagtgagccgagattgcgccactgcactccaacctgggcaacagagtgaggcactgtctcaaaaaaagaaaaataataataatgacgagttaacaggtgcagcacaccaacatggcacatgtatacatatgtaacaaacctgcatgttgtgtacatataccctagaacttaaagtataataataaaaaaaacaggattaccaaatgttacatttactctttctattatttatttattcatgcattcattttacaagcagttgagaactctaccaaaaataaatttgttagtgtgaggataatattgtaacaagtaaataaaagtaggttggatctggagtaaaaattgtacgtacagtaaaagcgagatcagagcctggagaaggaagctgacagtagatggcaatttgaggaattaatatttatgaagggatgccttccacatgcactcctccccagctaaaggaaaaatgctcaatgtagtcta

SEQ ID NO: 903037 - DNA, 631 bp, Homo sapiens
ataataatgtttcttaaaaaaatcattatacatttgcatcatgcctggaaattttaaggcagcatatactgagaagtcacatttttaacttcactttgcttcccacactcctggttgtagacccatattatgtggatattctctagactttattgcctcagctatatgtgtgaagagttcatcactgaaggttaaaataattgcaagagccagattataaggctacaggtcagagtaagaatttgggatccttctctcacagcaataggtatctataaactttcttaatcagggtaacttaatcaaaggcataatttttaataagtaatgtaagtatgtagaatcagtggaaacattaaaaacagtatggtaggcaaataagtgcatgaaaagatgttgaacgtaattagctaacagtgattttcaaaataatgagatatcactacccacttattcaaaatgactgacaaataagtaaataaataatgacaattccaaatgctgacaaggatgtaaagaaaccagatcaatcatccattgctggtggaaacggaaaatgatasagccgttttggaaaacatgttggcagtttcttacaaaattagatatacaattactatacaatccagtg

SEQ ID NO: 903038 - DNA, 607 bp, Homo sapiens
ttcttgtaagcgctttgtacatttcagtcttcccatactgtactgtctatatcaatattggtgtctctccccaccccacactgtatgaatccaaggtgtatctcattcatgtttgcacatagcacagtactcaactaacatttattgaataaacagtcaaaaataaaaggcacatgacattttattccaggagctcaaggaccatgtttattttggtgtcctcattttattcatattgtgtatcagcttcatcagctaatttctacttattttcaggccatataccttcttcaaaataatgacatgtaaatttcacaactattcctggaaccctgcattataaaaatatcacagcctctctaaaaaactcttcatcagagcccatccatactttaaattgctttaagttacttttcaatgagatttatgccatgaaacataacattcataattgaaggcctttaattatgggaggagcatattcatgtgttgttaaatgaagctgtccactcagatccaggtaaatattaatttatttacagttagatccagattcccstctctgtagaaagagacaacttggttatttgggaagcatgtagtgaaa

SEQ ID NO: 903039 - DNA, 640 bp, Homo sapiens
cttgagtttgaccatcagtttaagaaaattctctgcattatctctctctctctttttttttttttttttttttggacagagcctcactctgtcacccaggctggagtgcaatggcgcgatctcagytcactgcaacctatgcctcctgggttcaagaaattctcgtgcctctgcctcatgagtagctgggattacaggctcccaccaccacacccagctaacttttatatttttagtagagacaggtttccccatgttggccaggctggtctagaactcctggcctcaagagatctgcccgcctcagccttccaaagcgctgggattacaggcgtgagccacagcacccggctcagcattgtccctttaattctcctttccaccttctgtcttacttcccgtgctggtattccaaccacagctaaactttccactatgttccacatgcctggtgcttgtcctgcgttttccttccctctgcttagaccgggttattttctactaactcatcatgccataatccaatcctgtcttccaggttgctgttaaacttaaaaattaagttcttagtttcgatgactgaaattttactgataaaataattagttgacttcttttgtagatctaagttttctgatta

SEQ ID NO: 903040 - DNA, 565 bp, Homo sapiens
aaaattattttcaacctaatattctacatccaacgaaactatcaatctaaaatcatggaaactggcaggcacgctggtaggatgaattactggctcatgcctggaatcccagcacttcgggaggctgaggagggtgggttgcttgagcctaggagttcgagaccagcctgggcaacatggtgaaacccattctccacaaaaaatacaagaattagctgggtgtggtgttgcatgcttgttgtccatgctacttgggggctgaggtgggaggatcgcttgagcccaggaagtgaaggctgcagtgagtccgatcacaccctgccctccagcctgggtgagacagcaagactctgtcttaaaaaaataataaaataaaaaaaattaagttttaaaaatagaatctggtggctcatgcctgtaatcccaacgctttgggtgggtgaggtgggaggactgcttgagcccaggagtttgagaccagcctgggcaacatagtgagattccatctmcaccaaaattaaaaactcaaaaagaaaaaaaaagaatctgtaactaaaactcaggt

SEQ ID NO: 903041 - DNA, 604 bp, Homo sapiens
tttcaaggccagacaaaaagaataaagaaacacattaagagtgtatggatcatgaacagtgctataaataagtaattaagatgatttgatatgaagtatcagaacaggctaggagattatattacagtaacaaacaaccccctccccctacccaaaagaaagaggtttatttctcatgttacttggacattgtgggttagcttgggagctctgctcatgtggtcacccagcaacaggctgggagagacgctatctccaaactccacaattaccttgccaagaagaaagagtgtcgaagttctggcaagtaaatacttccacctagaagcaatacatcaacacataccacatctgcccacacttcacattagttatgtatgagttgaggagatgtgttccacgcagaggaaacactagtaggaaaatgagttggtctgatggagaagcagcaatacatcctctatcttgcaactggagagtccggccccttacccttcacaggcacctctttaaggtcactgatgatactcctcrccccacaattggatatgctgattagggttttgtttgggatatttgtctataaacacagaaataatatcac

SEQ ID NO: 903042 - DNA, 614 bp, Homo sapiens
taatttttctttattgttctgtggttactggtgcattgctgtttttgtaaagaaattgtgaaacttgctataccctacaggtttttgttctgatttataatcatttttatgaaatgttactaaagcagaattaattttaaattggctaatttgaagcatttcaaggcccacattctaaaactggaattgaagacaagtatttcatttaaacaagtagaaacaaatagaacaataattttcatgttccattaatgaaatgccaatggattcattttgtcctaaaaagaatcattttggctttcgatattcgcagtatgactcactagttgatattcctggctcagtgatatggttccacctgaatgaaatattgctatttgcccacccaatagttattctccacttttcttacagaacccaattacactctagtggacaatatgcccatctagaaactacatttcccagctccctttgttgctagaataaccatgtagcccaggtttgtccaagggaaataagtggtagtcactggacaagacttctgggaaacctacttaaagagtaagcccatttaagtggsctgtgtgattcccttctcttgagtatggtca

SEQ ID NO: 903043 - DNA, 640 bp, Homo sapiens
cctcaaatcttcccagagttaaatatgtttatgccagggaaaatagtcacatctagctccttgaagttttggatgacagtagatttgggcyacagatagcgtagactgtagatatcagaaggtccctctccctgacttttctgtcataccaagcccttttttaatgtcactgtatcatgagcttcaaaacttttaaataaagagcccttgttcaggagtgtaggttatacatattatctgctttattacctactcaaaatagtctccaattcacctcttcaacttaatttgattttttattactttggctctgagatagaaagctatatgtatttttcagtataactctaaagacatttgaattagatatcacaaaatatataaattttcttttttaaaattatttttaaaatttgtgtgggtatgtaacaggtatgtttatgggctatatgagatattttggtacaggcatgcattgtataattacataataaaaattggatatgcacccccttgagcatttatcctttgtgttacaaacaagttatgctcttttagttatgtttaaatgcataattaaattacgattgactgttgtcaccctattgtgctatcaaatactagatcttattcattctaa

SEQ ID NO: 903044 - DNA, 593 bp, Homo sapiens
aataatattaaaggaaatctaatttatgactcatggagacactactaaaatataaagctctttccccttctaaccaattctctcacactccagttttctccctaactttcctcttcctcakttctcacactctgcacagcaggtatcgtttttccaccttccctagtctatagccactttcctactggaagtggccccttgcaattctgctcttactcaccagccatgctgggtccctctggaagctccaagcccggtccccactgactcctcacagacagaagacctctgaacagcctcagcagtctagttctctcaagctgaccacttttctaccagaaatcctcgtggagaattttcaataagtaataatatctaccttgttacacatttgatcattcacgtatgctttcattcattcatccgtagcatggagaaaaataaaagttgctttaaaaaccaaaaacagatttccttttaaaggaaaagcaaatgaactttatttagaaaaatacagtatgttgggccattttggttgaaggaaaatagtcctgatgtgggcctcgtgttagccacaagaaccacaatgcttt

SEQ ID NO: 903045 - DNA, 640 bp, Homo sapiens
cctcaaatcttcccagagttaaatatgtttatgccagggaaaatagtcacatctagctccttgaagttttggatgacagtagatttgggctacagatagcgtagactgtagatatcagaaggtccctctccctgacttttctgtcataccaagcccttttttaatgtcactgtatcatgagcttcaaaacttttaaataaagagcccttgttcaggagtgtaggttatacatattatctgctttattacctactcaaaatagtctccaattcacctcttcaacttaatttgattttttattactttggctctgagatagaaagctatatgtatttttcagtataactctaaagacatttgaattagatatcacaaaatatataaattttcttttttaaaattatttttaaaatttgtgtgggtatgtaacaggtatgtttatgggctatatgagatattttggtacaggcatgcattgtataattacataataaaaattggatatgcacccccttgagcatttatcctttgtgttacaaacaagttatgctcttttagttatgtttaaatgcataattaaattacgattgactgttgtcaccctattgtgctatsaaatactagatcttattcattctaa

SEQ ID NO: 903046 - DNA, 576 bp, Homo sapiens
aagatggtctaaccctgaaaggtcttggtacttgtgtcaccctgggtgaacgcccagcacttttactttgtagggtttccaaaaccattataagaatgcagaaargagcaaccaatccagattgaagagtgcctccctgaaagacataacctccgagctgagtctcaaagcacatgtaggggttactaaaggaaaaaagcagggggaagggagaagaggactagtggaagacacagtctaagtagaggcaatgacatatttaaaggtacatgcacatgaaagatgatgttttatttggagacttaaaacttatagaaaaagaataacaaagaataagctttctttccatggcatccatctgtcacatagggcgtatactttgtgtgcctcacttcctgtcattagattacaagctctaaggggacaaaaagtgcctcacttcttgccattagattacaagctccaaggggacctctcctatcttcatattccacagagcccttcacagattaggtgctcaataaatttgatgaataggacaatcagcagtatgatttaaacaagtcattaactcca

SEQ ID NO: 903047 - DNA, 654 bp, Homo sapiens
tatgttgtttagcatatcagactgtgatacactagaaacagacagcaaggaaacctaaatatgactggttcaaaytttaaatatttttctaagcccttttgtttcccaaaaccattatctggaatttgaattataatctagatttcatgacaaaatctcaggcagaattcatgaaatgccaaatctgctggagtccctgatgactaattattaacttctcaacttagcaaaatattttgctatcttattagtttcctagggttttaataatacgtcatcatgaacttagcttaaaacaacagaaatttataccctgatagttcaggaggctagaagttcaaaatcaagccatgagcagggttggttccttctagaaacgccaagggaaaaattagtcccatctctcctctagcttatggtgacccctgacaatctttcgtgttgcttggtgttacttcactccaatctttgcctttgtctttatatagttctgtctgtctctgtgtgtcctttcctcttcttataaagaaaccaattattagatttaaagtctaccctaatccagtgtgatctcatcttgttttctctatttatctagcaaaaaatgacttcattttaacttaactaaatatatcagcaaaaactatttccaga

SEQ ID NO: 903048 - DNA, 610 bp, Homo sapiens
cgaccctcgttggtcaggaattccttctgtagttttaacttttccacgcttctgacctgtcccacttgtggactaagacactagatgtccatcaaattccctgaagcagaaagacacaggaaacatttcagcytgaaagggaactgaccagaggtgacctccaggatggactgagggaatgcagacagggcagcgaacgtgtctgccacacatgcaggtggtccgagaggaaaatccactgctgtcagcatgttattacaccactcgtctaattatctccacttcagacctcaaatttatgcaggatttgtagactcacctatttcccacatcctacaacccagctagtcttcttgatgggttatttttatgtacatagttttattcactcattggttcagcaaatatttgtgaagcctcttatttgtgtccattcaagggataggaactcaatgatgaatagagcagttttgtcctcgagaattctgctcgcaggttatagaagagacataagtaggccaacaattttgataaagtttggggagactatgagatggaaatgggtagaaagggaagcaatggtaaacatttgtcacaacccattgaattt

SEQ ID NO: 903049 - DNA, 558 bp, Homo sapiens
ccatctgtgcacttcctggtaaaatccagttttagccatccttgctaagtcaatttaacaagaatcccctatctccaatatctgatcatcctggatatcttcagcaagaatcctattaggtcatataatasgttcatttgcctgatgcacagcaagtgaatatactgagacactggggactgcagcagagagagtttaataatcatagggcagccaaatgaagaaacagtaggaaacctcaaaactgccgccctaaaaaaaatttgggacaggaattttaggtgggccaaagtgtggcagagtggtacagtttgcagagtgcagggtgaagtcatgggttgagagatgaaaaaactacattgtcatgctgattcagtttctctgtggaggtcctcaaactggttgacatcagtcattccattggaattccagatctaaagaacatcttaagcaattcttaaacaaaagcctatgactctaacatcagaattcctatctgtaggaacaatggggatgtaagtggtcagtatctagtgctacatgattcagttacaagga

SEQ ID NO: 903050 - DNA, 568 bp, Homo sapiens
cgtgctgggagaaccactactctcctcaaagttgtcagacagggacatttaagtctgcagaggttactgctgactttttgtgtgtctgtgccctgcccccagaggtggagcctacagaggcaggcaggcctcctggagctgttgtgggctccacccagttccagctgcctggctgctttgtttacctaagaaagcctgggcaatgacgggtcccactccaccagcctcgctgctgccttgcagtttgatctcagagtgctgtgctagcaatcagcaagactccattggcataagaccctctgagccaggtgcgggacacaatctcctggtgtgttgttttccaagcctgttggaaaagtacagtattaggttgagagtgaccctattttccaggtgcagtctgtcacccctttctttgactaggaaagggaactccctgaccccttgtgctttctgagtgaggcaatgcctckccctgcttcggctcccacatggtgcactgcatccactgtcctgcacccactgtttggcactcccttagtgagatgaacccagtacctcagatgga

SEQ ID NO: 903051 - DNA, 665 bp, Homo sapiens
tcctctagtctgcaggtagcatacaaatgtaagaaactactmattaatgtcacatctatttattttctgctttataccaagcttgtgggattctcttaaatacaacatttttatacttacacctatgaaatacccattaacatcgccttcctaaatcagtggaaattgagtctctgtaaggtgcagtaacttactaagatacaaaactcagcatttaagtctgtatacttcaatatcctgccctcttctcatttgtctttactgccttttatgtatgtgttagatgttcaataaattctcttttttaaactgaatttaagccgtggagcagtgttttgttgaacaataaatatgatattggacactcttcctccctttcatttacgatcctgttcaagaaaaagagaaaatctttcattgtgctagaagcttaaaataatgaaaatgccactttctacattaaacagaaactgaagggaatcaaggtgaattggatgagacatagaaaacaagtgggaaataaatctagtataatttcccctttgtgtacctttgttatttagcatttgagaaaatttttcccccaaatatcttcccatcttaattcatgtctataaagtagacatttatgcctcaccttgtcaagaagggcaaactctaacata

SEQ ID NO: 903052 - DNA, 600 bp, Homo sapiens
agagcaaagaaaaaggcatctggtagaccacttggaagccagccaatgacgaagacttcaattaaaataaagaacgtgtcctcaggagagcatctccgagctcaagaagttataagtccagtgagctacttgaaagccaactactagaaaaagccattttcaaataaaacaaccaaagtgagcaggctttgaattcttccaagaaacctctttctgcatgtctgtcctaactaatgatttaataggagttagacaggccactactcaatgctggaaacaggctgttatacaagaagagaagctataggtctgcctgtaatgtttctggggaaattcaaatattagcatcaagttacagggggtgctatggtgtggcagagggtgagctggactaggaattagcagacctgggttccagttccagctttgccactttttacttgtgagccttaggcaggagacttcatccttgtgggtctcagtttcctcagctgaaaatgaggttactaaaacctgcatcatagaaataaagggagaagtacatgaaatattccatggagagatgcttaacastagtgcctggcatataaaatgcttaca

SEQ ID NO: 903053 - DNA, 617 bp, Homo sapiens
ttatatttgcctagttttatttgamggtgaggggctgtgcaaatacatataaaggctattacttagactttaagatgctacttatccctcagccttctccacacttcacggtcagggagcacctgttgttcagatgtgtaaaacttgccaagatgctccatcatctccatccaaagcctgccacacaaccccataaactagtaacaagactgatcttgttactaggtgcaggtgtgccgagaatgcacacagaggtcaagcaatctgtgagggggtcctcggagacacctatctatggctgtatctaaaaagttagctcatcctgctcatccttggaggggaagaatccataccaaaccttgactctggattctacatcaggctctatgagatcacgggggatctgttattaactgtgatttgctcagtgtgcatgtgtggagtttcttaaatgaataaattaagtgtggctgggggaacatcttcagtgaagccctgtctgtgtctacttctgctctaggatactgtcagatctggggcagttctatgtactcaagggatgctaagtgggtctctaaaatacatatgtgcagctactttgccagctaatgaggcag

SEQ ID NO: 903054 - DNA, 618 bp, Homo sapiens
tggagctagattgcaaaagccttgggaaagcaggaagagttttgagcagtatttctgagatggagtctcctgtagtcaacaactgattgcatatggggtttgacagcgaggagtkgggggtaacttctagccttctggcattgacgacgtggcaaatggtgtggcacttcaccaatatgaagtttacaggaaggaaccaggttggggtggaggaggagggacattagtatgtgattttttgaggggaaagatattgaatttttgttcatctctgtctattgcattctatccatctttggcatgccactgtgttttgaagcaaacactcaaaacacagtctttaaggcactgtgagaattgcacatttcatgggaggcctctttggatttcatcaagaggaccaccctcatcaggcagtgtggggacttagatcctaaaactaatcagtgtagatggtttggtccctacagttacaacaggaataagagaacaaatggaatagaaatcccctccctcctcctctgtgttccattctcgctcattttcatgacaatctgaacttgcagtggctctcaggggatggtttagaaggaggattttctttgcccctcttttccc

SEQ ID NO: 903055 - DNA, 690 bp, Homo sapiens
cctattctaactaacttctcttccataggtaacttaaaggaaataatacagttataggaataagctttcagcaggaacttgaaagaaatgacaataagtggctttgtaggtattaaatctacttatgtcaaaactgaaagagtccagagaatataagggagacatgaggaaaggaggaacgtggtgacacaagtagcttagagagcaaagtagaaaatagaacagagactatgaaaaaggtgttggcaaattgttttgtttgcatgttatgttggaaaagaagctcttgaaagcaaccaagaaaaaaggtaaaagtaaaaaatctgcttcagaaaactgtgtaaagatttgactggggtagcagtattttgtatgtatcaaaaaaaaaaagtgagtaaaagaaagtcctagaagccagaaaaacaatctgcaaattgactctgacattctgagaataggaaaaacaaaaacccaaagtattatttttcctaacctctactctctattcaacactgaatgtttctgtgtccctacatgtgtggagggttttcctcatacrctaaccaagcaattctgcagtggacaccagctgggtgtcctctcattcaattcattctgacaccatctacctggaaacagtgtaaggtcccataggttgagggcttggtcccacaagattgccccccactc

SEQ ID NO: 903056 - DNA, 690 bp, Homo sapiens
cctattctaactaacttctcttccataggtaacttaaaggaaataatacagttataggaataagctttcagcaggaacttgaaagaaatgacaataagtggctttgtaggtattaaatctacttatgtcaaaactgaaagagtccagagaatataagggagacatgaggaaaggaggaacgtggtgacacaagtagcttagagagcaaagtagaaaatagaacagagactatgaaaaaggtgttggcaaattgttttgtttgcatgttatgttggaaaagaagctcttgaaagcaaccaagaaaaaaggtaaaagtaaaaaatctgcttcagaaaactgtgtaaagatttgactggggtagcagtattttgtatgtatcaaaaaaaaaaagtgagtaaaagaaagtcctagaagccagaaaaacaatctgcaaattgactctgacattctgagaataggaaaaacaaaaacccaaagtattatttttcctaacctctactctctattcaacactgaatgtttctgtgtccctacatgtgtggagggttttcctcatacgctaaccaagcaattctgcagtggacaccagctgggtgtcctctmattcaattcattctgacaccatctacctggaaacagtgtaaggtcccataggttgagggcttggtcccacaagattgccccccactc

SEQ ID NO: 903057 - DNA, 602 bp, Homo sapiens
aaaaatggtaactttagtaagtaattcagcagcatctaggaaaatagaaaatgtatttaccctaagactcagcaaacccatatctaggtaaatatctcagagacttaaatatgcacacrgtagatagacccttttaagtatggcattgcagcattatgccagtagtgaaaatgtgattcattctcaatgactttcaatagaggaataagtaaatacaatatcaatatcataaagcagctaaaatgaactttatcaacattagtagatctcaaaaacacaatgttgtatggaaaaagcaagctgtagtttcagattaacatatacagcatgatgcatattatatgtattttaaaagccataatattcaaaacagtgtggtattagcataaagacagatgtatagaccagagaaatagaagagagagcccagaaaacccccacatatatttttataaaggtgattttttataaaggtgccaagagcattcagcggggaaatggaccatctcttcaacaaatggtgctgagtaaactggatatccacatatggaagattaaagttggacccttatctatcaccatacatgaaaattaattcaaaa

SEQ ID NO: 903058 - DNA, 603 bp, Homo sapiens
tttctaattattataactcttataggacaattagaataccactgggcttcaagagagcagtgtccatccctggactctagaatggcctgattaattttccagtcttattgaggttaaaattcacattacactgttcaaactctacttggaattatttctacagtgaaataatgacattttaaactatcataattggtcatgcctttgcttctttcacacacatgctgctacatttttcccccaactatgtttggagtatgaaatttgggaaagaataagaaacaccctaggatgttcggccatccttgatagtgatacaaatagctaaagtggtagtacaaatcatttcctaacgtatgtggctccaaagttctgacagggcagatgttcacccagaaatgggtcaacttagttgacaagtatggttgaagattattagttaaataagcctaaaaaagtccccaatttccctctctgattttgcttctgtacatagtcatgtttggggkgtgtgtgtgtgtgtgtgtgtgtgtgtgtggatcttcagatgttctcaaagtcaaatgtcaactgctttatcctgttcccgttaagtttattcca

SEQ ID NO: 903059 - DNA, 551 bp, Homo sapiens
aaagagcaccgcatgggcaaccagacacgtggttcttcattcccacckcctgccccatccccaccaccatccttgactagctatgtggtcccaggtaagtctcttatcactctggccttccatatcatcatccgtttttcttattaactcctcaaagcaatatgaaataatcataatttggccacctaaagacaggaacgtggaaggatttaattttatcattctcttctcctcctctttcccttcccataaatccctacatgcgcatccccccaacccctgcaagccgagacaaggtgggggaatatcctctgtctgcaggctccggctccagcgtaagactctactagtttgttttgccccaacactgtcatagccaatccgtggccagtgtgggtctccaaggagagattactgctgatattgggattatttatatgcaaatagcccctttcatgtaggaaaagagaaggtttctcttcaatctccatttctaaaagctgtacacccagttgggccatcgctaagaatggttaagggagcctgaattc

SEQ ID NO: 903060 - DNA, 692 bp, Homo sapiens
tcaaagatatgtgatatagcaaggacctggactcttgctgtrtaatagacatgattaggactaatagcccacttcttttaaaactcttcctatgaaaaatatgttaaaaaaaaaaaaaaaaaaaagcagacctaggcggctatgtttatatcacatgacccagaccttatttgaatgtacagtggaaaatctgcccaagagtgtggctggcctgttgacccaagtttattctctggagaattttaaccaaaaaacacaagtaccatggtcagtctggtggtgagaacttgaactgactacttatgtatgtttgtgggctagtggccatgttgaggcaccatagaaacagagaaagttagtttaaagaaggacggaaagaatcagagtgaagcagagctgagttggaccctgataccccagagacatgagaatgaagctttggttcccagtagctcctggagtctagttcccatgaggcctcacagccgttcagcttccttatccttgaaattgactactttagctttacaaaaaaactctcactctgctgagctagtttgaatagatttctatttgccatagccaacaatccctgactaagagagcctgagaaggtgtcaaataaggagtgaagcctaaggagtgggagaaagtctcatctgccatttagctgaagtgctcagaaaagcatc

SEQ ID NO: 903061 - DNA, 609 bp, Homo sapiens
cttatataaaggtctctgttttgtaaacagtgggacaagtatattcataaaagacaacagaacatctgaaatgagaccattccaagacaaaagatgttcactgtgccaagcctttgaagaaagacattgcttttcagaaggtgttacaaatttgctgtgaacaagaccagcatgaagttttagatcacttcctatatacaagttctcaaccagcatgtaagaaagcaaaataaagaacacttgagaaaatctgaactagctacctgaaaactatatgtttaaagaaagtgtcactaagaaagggcatgccttcttgctgctcaacttcactagatgccaggtctaatgacagagatttttaaatgggtcctgatctctctaaccatttgtcatctcttctacctactctgatattcgccatcctgtctagaagtgtatcccctactcatctttcaggattgagctcagaggtcaactccacttggaagctttctctggctcttctgcwcacagcctcccatcataagcactgtccttggccaagtgtccttcccttggcactgagctgaagtacttaatactctccattctctttgttggtttactttt

SEQ ID NO: 903062 - DNA, 643 bp, Homo sapiens
acaaaatgagatggaatagaataatcaacattttaatgttacatttgccagtgatcctactggttaaatgaccatttattttgtctgtgtggtgtttgaagggttatacaagtaggagttaatttggttgatctagtaatgtattgtgcctatgtatgtaaatgcttttctgttctgcttgaaaatgtaagcagttggccattcagtgtgactcatcaggcttttaaaattcggggtgagaagcattagtaaaattgctgtgaaaaatgattcagcttgcacagctggatcaccttccaaaatgctattctcaagtacatttgttcagtaggagactgttgtgatctggtgcctaacttatctccctcctccttggatttacagacccaaggcaatactcacttcccttggaaaaatcctgtgttatgctgggtaaagagcagatcagaggagatgctgcagatgttcacagctaacaatgtcaatgcctaattggctttaaaaattccagaagagaggaagaatgccattaaaaataaatttckgctgggcatgatagctcatgcctacaatcccagcactttggaaagccaaggatcacttgagtccaggaattcaagactaacctgggcaacatagcgag

SEQ ID NO: 903063 - DNA, 693 bp, Homo sapiens
cttttagaaatagaatcttgttctgttgcccaggttggagtacactggctcagtcatagctcactgcagcctcaaacggcaggrctcaagcaattctcccatcttagcctcctaagtagctgggagaacaggtgcacaccactattcctggctactatttttttccattttttggagccaggatctcattacattgcccaagctggtctcaaactcctgggcttaagcaatcctcctgcctcagcctcccatgtagaaagatatgtttcttatacaactgtgtttgtgggctaagattatagctgctatgcatattattatataaaagtaatgaattcacagttatgataatcactaaaattgggtactgtgattgtatataaaatgaggacttagtatgagattagaaaaaccttcctaaggaatgggaattctaactccctaaggaagagggaattgcttgtgcaaaggctttgaggaggaagagcttgaccacaaaacaaaataatacacaacacaacacaacacaacacaacaaacacactgtgtttggagcatattgagccaagttataaagaagcaagacttgagaggtgaatgtgaaccagatcctgaagggacttttagaatgttttaaaggttttgatctttatccttagaacaacaggctgtatgtacagaattctaagcagg

SEQ ID NO: 903064 - DNA, 508 bp, Homo sapiens
ttctaggtgtatatgtttaaagttttcattttaggacagttgtagattgagagagaatttgtgatgatagtacagagaatttccatataacctacactaagattcttgtattattgacatattacattaatatggtgtattcactacaactaatgaactgatgggatacattatttgtaactaaagtctatgtcttattcagaatgtcttcatgtttacttgctgtactttttctgtcaaagttcccgttcagcaaaccacattacgtttagtggtcgtgtagcttaagcttcccttgacagtgacagattctcagacttttcatgattttcatttctttcaaagtgtgaaaagtactggtcagcttttttctagaatgccactcaattggatttttctgatacattgggttatgcgtgtttgggaggaagatcayattggtgaactgccattctcacaatgtatgaaaagatgttccctttcttgagtaataagaaaaatggaagta

SEQ ID NO: 903065 - DNA, 663 bp, Homo sapiens
ctagtgtcaaagggtggtgctgtaagttataatgctttaaaaccaaattggctcctaagaaatatgtcattagattatcaagttgttgataaaatactggtggtaacatttattaagctcggaacataaacttatgaatcttatttttacagctttttccttccttccatttattgtgtaggcagtctcttcttgccatcatattttaagtaacaaattggaatacactatttattgactcagatgttctcagtgagtgctacagctattcccacaaaagcacgttttccagagaatctatgttaattctttatacacctcagatatttagatagtccagcaaaataaccacatcaaacgatcccatgactgatggatgaatttaaattataagattgctttcataactactgaattcttctatctggatatgaaaatagatattttctataaatcagagttagtatacatttcttagccaaatggctttccatttgttctgtgtcatctacaaataacatgttatcaaaaatctcactctactgaaatgaaagttttatgtctttagagagaatttttwaaaaaatatcagtcaaagtacaaactccatgttaaaataaaatgttgttgaacaacaaatatttcttattataatagtaattt

SEQ ID NO: 903066 - DNA, 703 bp, Homo sapiens
gctgcaggtctgttggagtttgctggaggtccactccaggtgctgtttgcctgggtatcaccagcagaagctgcagaacagcaaatattgcagaacggcagatgttgctgcctgatccttcctctggaagcttcgtctcagaggggcatccagctgtatgaggtggcagtcagcccctactgggaggtgtctcccagttaggctacttgggggtcagggacccacttgaggaggcagtctgtccattctcagatctcaaactccgtgctgggagaaccactactctcttcaaagctgtcagacagggatgtttaagtctgtagaagtttctgctgccttttgttcagctatgccctgcccccagaggtggagtctacagaggcaggcaggcctccttaagctgcggtgggcttcacccagttcgagcttcctggcagctttgtttacctactcaagcctcagcaatggaagacgcccctcccccagcctcgctgtggccttgtagttcaatctcagactgctgtgctagcagtgagagaggctccatgggcatgggaccctccgagccaggcgcgggatataatctcctggtgcaccatttgctaaggccattggaaaagckcagtattaggatgggagtgtcctgattttccaggtaccatctgtcatggcttccctttgctaggaaagggaattccctgac

SEQ ID NO: 903067 - DNA, 635 bp, Homo sapiens
caaatataatctttcaaatatcttgaattctgtcatcktcatcactcctccatcatcttttctttggttctgcaatagcttcatcatcttcttgtttcctcccttttccccatatatcctgctttccactctatagcaggaatggactttgaaaaatatgaattatattttatcaaatgccatataattatctataaggttcttcatgatctggctcctgcctgcttctcccatgttattgtattagttactctgttctttgttatccctcaaacacagagagctcatgtcctcttcaggggtcatgacattggctagctcagcctggcatatgcttcactaatgtatacattctaatagccccttctcagatttgggtgtcttcaaatatcagctcatctagagagtctttcctggctacattatttgaaaaaagaagctcttagtgactatcacccaaccttgctttgtgttcttaatgttacttagcaataacaaattttttaaaaatatgcatactttcttaaaataatgtctggtccatgtgaatgtaaacatcatgatggcaaggacatcatatatcttgtacatataatccaagtgtctgggacagtggcacgattagaggaaaattt

SEQ ID NO: 903068 - DNA, 648 bp, Homo sapiens
ctcttgatgctaattgaatcttttcttacacactggctcacaattacaaccacaaaacccaaccaaaayatctaataatcactgtgacagaatatccaatctggaacagggaaaatagattgtagcaatcatagaaaatctgttttatgttacttatttctttatcaagacactactaagtagtccctctcataaaaaaaagagaagcaattgaaaattaatcaactacacctataaatacctactgcttatctgatctgtgcagatccttcaccaggtgctatgcaggataaaggaatcatgtgatgatccacaccttcaagaactaagctaacttaaggcgtgaatgcacagatgtgcttcttggagtcatttccaaaatggggtttttctctgaagctccatctgtataagatgttactaaaaacatttaagctctcacactgtcttccttcctgcaatagctacctcataaccaatgtcacaattttgtaaggcagtgatactattcaattatagtggacaaaagggcatgggcaaaacaaacaaaaatgtacttatttaagtgaaaaagaagaaaaaagccctgttatttccttaaaggtaatatcagcaggaatgacagcggtgataaaaacgttatcattt

SEQ ID NO: 903069 - DNA, 631 bp, Homo sapiens
tattaagatactctgcaaaatgatcactcccaagacacataatcatcagattctccaaggttgaaataaaggaaaaactgttaagggcagccagagagaaaggccagatcwcctacaaaggaaagcccttcagactaatagttggcttctcagcagaaacgctacaagccaaaagagattgggggccaaatttcaacattcttttttttttttttttttttgagacggagtcttgctctgtcacctaggctagagtgcaagggcacaatcttggctcactgcaacctctgccttccaggttcaagtgagtctcctgccttagcttcctgcacatgccaccatgcccagctaattttttgtatttttagtagagacagagatttactgtgttagtcaggatggtctcaatctcctgacctcgtgatccacctgcctcgaccttccaaagtgctgggattacaggcgtgagccaccatgcctggccaacatcttaaagaaaagaattttcaacctagaatttcatatccggccaagctaagcttcataagtgatggagaaatgaaatcctttcctgacaagcaaatgttaagggacttcgttaccaccaggcctgccatgcaaaagctcctga

SEQ ID NO: 903070 - DNA, 674 bp, Homo sapiens
ggaccattaccaatctggtccatgcctattagggactgggcctcgcaacaggaggtgagctgcatttgagcaagaattactggctgagctccacctcctgtcagatcagcagtgacattagattcccataggagtgtgaaccctactgtgagatgcacatacaagggatccaggttgtgttccccttatgagaatgtaactaatgcctgatgatctgagatggaaccagtttcatactgaaaccttctgctaacacccctcaatctctgcaaaaattgtcttccacaaaaccagtccctggtgccaaaaagtttggggaccactgctctacagtacttagattctattttcatggttatttcattatcctaaggagctgttgaaactagaggcatcatctttgcatttcagacagtaagaggaagggtcaaaagagagagtattagttatctgcaaattacacttcttggacaccccacacaagacccttactgtcctctcaccaagcaaaacttatcacatgatctacctatgaaagaaattaggagaggagaggagaggtagaggttataatcttttagctaaattgtagtatgcctagatttttataaaaatcagatttattttactaaagaaaaagggaaaataagtakcagtctgtcctatactatgtg

SEQ ID NO: 903071 - DNA, 562 bp, Homo sapiens
gacttcataaaatgactgggaaggcttccctcttacttaattttctgggagagtttctatagaactgatattatctcttccttaaatgtatggtacaatttaccaatgaaggcatctaagccttgatttctttgtgagaaagtctttaacaacaaattcagtttctctaatagatttagggctgttccagttatttacttattcttgagtgaactttggtagtttatgcctttcaaggaatttgtccatttcatctaggttgtcaaatattgttcataatatcctttattatctttctaatgcctatgtgacctgtagtaataccctaaaaaaaattcctaatgttggtacatttttttttcttggtctggctagctaaaagtttgttaattttattgatcatccagcctcaatgattttctctgttgtcgtcttcaatctcattgatttctgytcatatcttcattattttatagcatctacctacttaggcttagtttgttcttctttttctattttttcaattggaagcttatatctttcatttaagacctttcttatt

SEQ ID NO: 903072 - DNA, 655 bp, Homo sapiens
gggatttccatcctctgtccccgccctggrctgcacttgccagtgactaatgggtccaggctgtgaaagcccagcatcctgccctcaggtggagacacgctctgaggtgtaagttaacacttcagagctctcctggctgaagctaccctctgaggaacatggcctggcttctttgatatcttttcctgtttcgccaactccctcaccgggttctcccagaagcactttcttaagaaatcacttgcacgggaatgctcatgtcggtcggcttctaggggagctggcctgagacaccccctttccacagtaatgtcgtttgtatccacccattgccaggcagccttttgtgtcagtgatgctggaagccacctctggtgtgtgatctgaaagacccagggctccataagctcttcctggttgctgctgctgtgcctgaaaacccacctttgagattcgttcccttggaatgtgtctctcacttctcttaaaatgcaggtgcttctgaggtcaggagatcaagaccatcctggctaacacagtgaaaccccgtctctactaaaaatacaaaaaaaaaaaaaaaaaaattagccgggcgtggtggtgggcgcctgtagtcccagctactcgggaggctgaggcaggagaatgacgtgga

SEQ ID NO: 903073 - DNA, 587 bp, Homo sapiens
  misc_feature 208: n = A,T,C or G
ctgtgagattctgtaaggaaggtgaagaaaatatagactggaaaaaaaatttgcaaatcacatatctgacaaataattagaatctagaatatataaagaactctcaaaattcaacattaaaaaacaaacaggccaggcgcagtggctcacacctataatcccaactactcgggagggtgaggtgggaggattgcttgagtccaggagnttgaggttgcagagaagtataatcatgccattgtactccagcctgggcgacagggtgagaccctgtctcttaaaaaataataattttaaaaatccaactagaaaataggtaaaagaattacaagacatttcactaaagagaatatacagacagcaaataaggaaataaaagatgcctaacattattagtcattagggaagtacaaattaaaaccaccatgagatatcactatacatctatctaaatggcaaaaattaaaaaaatagtaataaaaccattttctggagagcatatggagaaattagatcactcatacactgctggtggaaatttaaaatgatacaattactgyggaaaagtttggaaattctttttgaaa

SEQ ID NO: 903074 - DNA, 633 bp, Homo sapiens
tctctaaaaaattaaagccatattattttccatttccaagagctctttctcattattctttttatttctgtgaagatgtttattataggttttgattttctttcatgtttatgtgatcctgtttgtgttgtcttttttatgttggagactgtcaaatgtttggtgatgtgtggctgttggtataagagtgaaatggctctaagtggactggcacgacttgtcaacagagggtgactgggttgcaagtaagccttaatttttttaaaattgatgcataacaaatgtatatagtttcaggccatttgtgataatttaatacattcatataatttgcaaagattaaaccagcgtaattgggatatgcatcaccataaatatttatattttctttctgctaaaaccattcctattcttctctcctagctattttgaaatgtgcaatagattactgtaacccatagataccttactgatctacaagcaagtctttttcagtgggggcacacccacatgtcagcatcctgaaaactcttctccagagcagagtaattcctcaagaggagagttctatagtttmccaggagaaggagatatcacatgtatactccaaactagctttcacatataaagata

SEQ ID NO: 903075 - DNA, 589 bp, Homo sapiens
accatatttttactatatcttttcaataattagacatgttcagatacacaaatacctatcattgtgttacaataacctacagtattcagtrcagtaacatgctgtatagatttgcagcctaggagcaatcggctataccttacagcctaggggcacagtaggctacacatctacacttgtataagtgcaccctatgatgttcacacgagaatgaaatcacctaaggatacatttcttagaacatatccctgttgttaagtgacacatgactgtaattaaactcatattttgaaaaccactgattttcctcatgactgcaatgccctttactgatcactataaaaattccctttcctataattctcatgtttgaaataaggcagaaaaatgacatcaaaagagaacaaaacctggaactgactccactaccagaaaacggaatggacatgcataagtcattgattttctctgtcctcatttgttatgtggatattagatcagacattaggcaaggtccccagaagctcaaccctttaaagcttctagacataaagattcatctaataaatgtgaccagcgttgcatgggt

SEQ ID NO: 903076 - DNA, 589 bp, Homo sapiens
gggcaacagagcaacaccctgtctctaaaaataaaaaataagtaaaaacgtggaaaatgtatcattaaatagacctcgaaaaagacagttgtttacaataagagagctgaaataggaaggccacacctgggaacatacaggtggctcaaattttttgccattttgtgcacatggagtgggggttactgataaatgtttgcaagtaagccgacatataaatatggaatctgtgaataatgagggccaactttgtaagaggagagggctctgtccctaaagatgcacgttgctgggagcaggcctacctcgctgtgtaatgaacactgctgagtctaactgggcagactcttcttttttcacctgtagaaagtacagccatcagcgatggccacaggacttggtcagcatgatgacaaggactgcactaaaatgacagacaactggagacaatttgttaaacaggatgggttcccgtggcaaactrggcaagtttaacaggtttctttcctttaggcctgacaccctctgctgagtaagtatccctaggagttagagagagagagagttaaaaaaaaaagaaaaagaaaaa

SEQ ID NO: 903077 - DNA, 624 bp, Homo sapiens
tcagtttggatgagaatttctctgatatatacaaccaggtgtgtgaatgctaggatatctattcttaattttactaaatgttgctgatgctttccacaacaactatgttaattacacccccawcaacactcaatgaagtttctcatttcttgtagttttcaccaaaatttgctaaaaccctacttttagatttttgttagtcaaatgggtctaacctggcatctcattgcttttaattttcttctctctgattcctactaaggcatatgtggaaatcttgataaccagttagacttttcctcctatgacatgtttatttatatttttactcacgtttattttgagtttcctggtttttgtagttaatttttataagtttgtgatatattctagattaggtctgtttcatagagctttctctgattatggaaatgttctatatcaaactgtttaacatggtccccccagccatctggctagggagtacttaaaatatggttagttcagttgagggactgaaatataattctatgtaattgatttaaattcaaatgtaaataaccatatgtgaccagtgactatgtattgaacagtttagttctaggtgatactcttgtgagtttt

SEQ ID NO: 903078 - DNA, 616 bp, Homo sapiens
aaggagatgttaggagaatatggtaaatacataatgccaaaatcagcttctattgagaatttttttccaattgagcttaccacaggacatagatgagctaaaatttgacacatatataaggatctcaggaattaaggcatttaaaatatatgagaagttaatagtgagcagctggtgatattgaagttctctggaaatccgttcaagtagcagatctagttactcatgcaagcattggtagagcaattggtaacaagtgaccagcattagccaaaagtaacatcttgttaaaaagcatctccttagttttcctatgaattataggcaactgaaatcaactttttgacatcctagatggtaggaaatagtgggacaccaagggttgaagggaggcaggatgtatttgattcaaaacacaaatggtttactgaaaggggtcctagaaaaatgttttacatggagataattgctctaggaggcaggaattaccttgttttcataattctattatttgagatcaatgttatgtttttatctcccacaattaaaaaaaaygaaacacataggagaatggaattgaactaatacaaatctgaaagcatctaggctttatcta

SEQ ID NO: 903079 - DNA, 596 bp, Homo sapiens
aactaagttaagtaagtaaagtagaaagatggacttttaagacaagtgaaaaagcaattacttgggagccaaatagacagtgattttaaccccggatctactaccacgtattagctgtgacctggtctgaatttactaatcattcagaagcttaattttcacaaaagcaaataggtattgtcacatgatttggaaactgagaaatcttctgtgcttccaagtcagagctgagaaaaaaaggatcccagggaatcaccaaaagttggaatcagtgtatccaggtaagaagtgctactaatagaaatgacaggcaccagcaaacccatcgttcactgaagtcaaaataaagaatatccaagtattggtgaagagagatcattatcccctgccatgctgaggtgggtatcctctgcttgtacatcagaccctccctccacagttcttcactctgctcaaggctctgagatggtggcatctgtgaattgcaacaccaggatcccctgccctctggattctggttgttttctgctattgtgagacaccagcaggaaatggaagggcaaaraagagagaggtcaaagtagttatccccctgg

SEQ ID NO: 903080 - DNA, 671 bp, Homo sapiens
tcattactgaagaatttagtgtcatctccctgtattggacaaaacaaatagatraataaaagcaaataagggtatcaagaattaaataaaacaaccacattgcaaatagaaagtcttaccctgaaaaataaagcaccataccctgcaaatggaaaataaacattcattcaaatacacatgaaacatattctcatatatgatggcttaaaaaagagctcagtaaattataaccatattcttcaagtgcaggcagccaaaaaaatacaaattaaacataaattagactaccatagaatctattaacttgggaagttttacactgtcttttaaataactattgagttgaaaaggcaatataaaaagcaatctggttagaaagggagcttcaaaactctatttgtaaagcactttatttaagaaggagaaaaatctctgcctatgtcaaatagaaggtttgaagaccctgaaggggtttacgggaatctagatttctgctctctcttacactttccatcacatatgctctaaaaccaaacaaataaaacccccaaaactaacctatgataatcaactactgatcagctttgaagaaaggaacacttttatgcactaatgataagactttacattggtaattctttaagaaggtcaactctgtatcggcaataatt

SEQ ID NO: 903081 - DNA, 386 bp, Homo sapiens
ccaattaaatgagggagaaaactgtaatagatgaagaggtgagagctaagtaacagsaaatctaacccaggattgtaacaggaaaatgaaatacctgaaatgcttaaatgacagcttttcaactgttcaagaaagcaactgattcaacttggaactcgaaatgtaacaagcaagcaacattcctacaatttgcagccaaagggaattacagcttttataattctgaatcctgtaggaccaaaaacactcctaaaaagaattaagtattcattatcaatctgttctctgtttttgactatgttttgactgagagcttcttattagcagcccacactctctcttctcaattgtatcagtttgttaaagtaggtgtcagcacatttcac

SEQ ID NO: 903082 - DNA, 386 bp, Homo sapiens
ccaattaaatgagggagaaaactgtaatagatgaagaggtgagagctaagtaacaggaaatctaacccaggattgtaacaggaaaatgaaatacctgaaatgcttaaatgacascttttcaactgttcaagaaagcaactgattcaacttggaactcgaaatgtaacaagcaagcaacattcctacaatttgcagccaaagggaattacagcttttataattctgaatcctgtaggaccaaaaacactcctaaaaagaattaagtattcattatcaatctgttctctgtttttgactatgttttgactgagagcttcttattagcagcccacactctctcttctcaattgtatcagtttgttaaagtaggtgtcagcacatttcac

SEQ ID NO: 903083 - DNA, 610 bp, Homo sapiens
actgagctcatattatgatttgtgcacttcatattttgcctcaattaattttttttacaaaagattcatggaagcctggtgtgtaattgtgtaaaaaagtggaaacttgcctatcagtagaagaatggatgaattacggtattgttacacagtgggattatgtataacagtgaaaatgaatgatctaaaactacgtttatttttgggtaactctataaaaccatccacaatatggtatgaaaaaaagtcatacaaggacacaaatgacattcctatgtcaaatatgttaagaaaattgtatgctcatgaattctacctatggtaaaaataatatgtgcatgggattagtaaacactaaattcaggataatggttatctctggttgagaagaggaatggattagagcaaaaggcatagttcaaccatatctgtaatattttcttagtctgcatggtgggtgtgcatgggtgtttattaaattttatgcctttctctatatttgaaatatttaatttgcaaaagaaataattataagaactctagttaaatatagcaaattaaaatttcacatttaccctcctrtccccttgcaactgtatcataatgagag

SEQ ID NO: 903084 - DNA, 618 bp, Homo sapiens
tcaataatatttttgtttcagatctccatcttaacaacaaagtgatcagaaaatatactttttgtgatataaatcccttaaactgtgttgagattttctcaatggctcagtctctgatcaagttgtacaaatattctgtgtgtgctttaataatgcatgtattgttgctgttgtgagtgtactgttttgtcttttgtttaagtcaatttgttgatgatgttgtgtagattttcttcatcttcactgacttttttcatgtttaatttactcattaatgaaagagatatgttaaaaaatttcccactatgattatgaatttggacattttctgtagttctgacaactttggatttatatattttgaggctgcattatttagtgcatactaattaggtttttaaatgttctgatgaaattattatcattgtgatatgatcatcattactggtaagtattttgcctaaacactttgcctaaataaattttactttagctgatgtcaatatatctacccaggtttattttggktagtatttgctgcattatatataaattttcatcttttttctttgacattcctgtatcactatgttttagatgtgtctcttgtaaatggca

SEQ ID NO: 903085 - DNA, 598 bp, Homo sapiens
caaggctaggtcaaaaaaggctaggaagcatcttctggttctcctgggacacgtgttctggaggaaggcagccattgtcctgggactttgattcctctgagaccaccatgctggaaaggctgcctgtaggcacttggtgcaataccagcctagttcagcatttgagtcattccaacccaggcatctgacatgtgaatgaaggagctctagatgactccaattcacagtcttctagtcaccccccagacctttgagttttgggtggcagagacaagcatctctgtgccttatcctaattcccaacccacataatccatgaacgtaatgaaatggttgttttacatgctatgatttgggtggttatacagcaattatgaattatgaatgtgggcttcataaagacccttcatgcttcctcattctccagagccatttggtctccaagctcagtctaccaagcctggaaatctctccctaaactacacctcctctctagcacactactccagcacaggcaattattcracaagttcaccttgatctctggcaacttcttaccctttaagatctctgcctccaactgggagcattctcagag

SEQ ID NO: 903086 - DNA, 587 bp, Homo sapiens
gctgaagtcaggtgctgtagctccccaagggtggtattgcacacaggtggctacacygttctgaggtctcaggggcagcctcacccccagggttccactggacattgccctagtggaggcactctgtggtggccccatccccgctgctgtactgggcattctcttaatgccatcatattgggggagggactctctgtggagagacagagagtctctggagacagccctctccctgagttgcatgcctgcgactccaggtagcaccttccttcaaaatctaaggggaggcagccacaaccccgcagctcatgcactctgtgccctggtggagatgacaccacacagatgtagccttggcttacagcctgtgccatccagagaagtggcctgagccgcagtctggcgtgcttgagccaaagcttggaaggccaaggagtgctatactggaatatggggaatacaatcttgaaattgtttgccgccaaaaccttgaaattgtttgcattctgtgcctgtgatgggcagggaagatgtgaagatctgtgagatgccttcagagtcattcttccattgtcttgatgaatact

SEQ ID NO: 903087 - DNA, 582 bp, Homo sapiens
tgcacaaagggtgcataagactatgcttagtcacagtagagtgacgctgtcacctctttacctgggtagtcggcatctccagggtaaggcacatgtctgtttaagctctatgtctgcaggagccagcaagggagcacctcttcagaggcctcatgcaatacccaccaccctttattatactgataagtaaattccattttaatcaggtggcaggtagcaatgtgccactgtcctaggaaagcaatcatgattggcctaagccaatatgagcaacttgtcttttttttttttttttttttttttgaggtaaggtattgctcattgcccaggctcgagggcagtggcatcatcatggctcactgcagcctcaacttccctgacaaagcagtcctcccacttcacctcctgagtagctggaactacaggtccacaccaccacacccagctaatatttttttggttttagagatggggtctcactatgttgcccaggctggtcttgaactcctgagctcaagcaatcytcctgtcttggcctccccaaattctggcattacaggcgtgagccactgtccctgacct

SEQ ID NO: 903088 - DNA, 523 bp, Homo sapiens
tgctccttaacttatggtggagtttcatcctgataaatctgtcataaattgaaaatatagtaagtcagaagtaattttctacttaatattttccatgtatgatgggattatactgaatgtgtactcagtatactgagtactgaatgtgtatggcttttgcactatcgtaaagatgaaaaattataacttgaatcatcataagtcagggatggtctgtatgtaagtgtgtgtatatatctcctacttcagtagataatgctaaaaaattttcccaaacaattgcatgaatttacactcccaaaagtgtacaatatgagagttaccattgccccacatccttgccaacccttggtactttccatttttagcaatctgatgagtatgtaatggtatccactatgayactgattggtttctacctctaaagaggtcgaggaccttttcttatacaattggagttcattggattttcttcttgtaaagtcacttttgaagtgattggccaattttgctattggattgc

SEQ ID NO: 903089 - DNA, 523 bp, Homo sapiens
ataataataaaaaaaaaaaaaaaaagaaattcccttctgctatcctagagacaacggccagccaatcagcttggctttgttgaatccttgctgcaggctgtgagaacctagcmccaaaaaaaaaaaaaaaaaaaaaaaaaaaaagaatctaggtttaaagaatagctctcctgtgttctggttttgaggtgtctcttgagcaattccttgaccagctggtatcatgggtcactccaaggggcgaggaacaggtttcaatgaggctttcgtatctccacatccacaggtcacaaactatttcttgaaagatcctaatactgatttggctaatgtagaagtatccattttggccagcgatggagaacatttcaagcacaagaaattctcaaccaggccaaaattgctcttagagccatggggtcgggattaagactcctgttctgaaaccataatcaggcccagcatattagtgtttacaaaaccaaattctattttgaccccagataagagaagaacacagata

SEQ ID NO: 903090 - DNA, 662 bp, Homo sapiens
tcccgaggccctcatcagaagcagatgctggtgccatgcttcttgtacagcctgaagaactgtgagtcaaataaacctctttcttttaaattactcagcctcagatattcctttatagcaacacaaaatggactaagacaccttcccttcagggtgacaaactggcctccagcagcactaagctttctctaatggagaaagagtgcttctctcccaatagtcttaagactggccctcattagctctgattggatcacttttggttatatattcactcctccacttatcactgtgcccagggagatatcatattacccttggccaacattgggtcatatgtccatgtctagaatcctgagttccaaattggctctactctacccagataatggactgatagcggagaaaggagtattcaaagaaaatcaagatgctcttatagattaaagggggaacggatactgggcatggcaagacagcagacatcatgtcaagaaagcagacatcaataaacatgtgtaggggttaattttcaaccaatgctattatcttcatcaatrtcatcatcattattatcattgttataataattaacatcattatcaccatcatcatcacaggcgaataatacattgtaactgtatgttcctgttatctactgc

SEQ ID NO: 903091 - DNA, 610 bp, Homo sapiens
atgtattaattaaaagcaaatcacaggtcctgcccatacccatgaggatagtttttaatcaggagggaktattatgggaaacaacatggaatcttttccccagactgtagaaataatacaaatctaaaattttaagtgaaatttcaggggagtaacaataaggtgtgaggtgctctagacctttgaatctttgagccacttgaattttcatcctaatattttcataatgaggattttgaaatatcatagtttatccaaaagcagttatttaaggaataaataaaggaaggatcgtatgtctaggttagtcttacacatccactggaatcaattatctctttctataaacaaaccaaataaaggtaataagtaaaggaaaatataaacataatagcttttcttttgtatgtgtttgataaaattggcactctttttaaaaaataattagccccaaatgccctttttgagaatgtgcaccagatgtactttctaatttctgatacgttcaccaaggctctagctctatgtcaccaagatttttttaaaaatgttcctaatacaataaattcaaatggattgttgataaaaggcagagatgtttataaaatta

SEQ ID NO: 903092 - DNA, 650 bp, Homo sapiens
aatatgaggaaatatttatgattattttaaactcatatatgtaatttatttgattgacataaagttttgtaatgcattttgaaatagctgccaatgtgtgaacaacaagcttttcattaaaattctgttttcgtgttcattgttctttgtttgtatgcaaactcttagttgcctgaaaagtaaatttcaatattacatatatctgataaaaagtaattaggtagaatttgaacagaccagctatggtacctgcatttagcacatatctagatgagatactttcagagcttactctcaagttcaagtgattctcccacctcagccttctgagatgctgggattacagacatgagccactgtgcccagcccttcagtcactcttttgtgctttgtaacttatacacatgtcatatatatatgtcaaatatctcaaaataagaacataaaactaaaaagaaatacattggttttagagcctaatataaaataaaatactgtttcataaactaacctgagtacaaargtaccccaatgtctaaatccttgtctctcagggagccatatgttcctaaagtttctgaaagtttcctcttccttcttcttttacctccccttctttctctctccttctcttcttcttcctttttatc

SEQ ID NO: 903093 - DNA, 586 bp, Homo sapiens
gtcactggcagtggaagacagcaacgaagacactaccttatcttgtttccacagactcctctccctgcagtcagtggttgctatatactttgaagtttakcaaaatttacagaagatgcaggaggaaaaaaagtgttttaaagaagggagcccttgtgaatgacgttgtgaatgtctcccactactttgaagttaggtatggccctgtgactcttctggctgataaaatgtgagtggaaatcatctgtgtaactttaaagctgaaccatgacatttctagtgcttggtttccaagctgtttcttgacctgccatggtgattgaagaacctttgatttccagatgatgcagttacatgatcccatcgtggagtttcatgagtcctgatatgaagaactgatactcgctaacttgctttgaatatgtaggatgaggtgatgtgtgtgtgtgtgtgtgtgtgtgtgtgcgcgcgcgcgcattgtttggtcttagcttaacagaattaatacaccaagttctgaaacaaatggatattatgggaattaaatgtgaggaggtgaggaggaggtcaaaagattaaatttatt

SEQ ID NO: 903094 - DNA, 629 bp, Homo sapiens
caacagcgtagaagagctccctttttctgcatattcaccagcattttttaatttttgtctttttgataatagcaattttaactaggatgagatgatatctatttttggctttaatttgtatttttctgattattactgatgtcgaacattttttatatacccattggccatttgtatgtatttttaaagagatatctattcacttaatttacccatttttatatcaggttatttgcttttgtgttttctttgctgttgagttgtttgagttccttctgtattctggatattaatcctttgtcagatgaatagtttgtagataatttctttctgtctgcagatgtctttacactctgatgattattctctttgttgtgtgtgcagaagcttttcagagtgatataatcccatttcttttgttttgcttttgtaccaggagacattacaactgataccacagatatgcaaaggattgttagaaattattgcagagaccyatacaccaacaaattatcaaacataattgtaactgatatatttctagacatatacaacttactaagaagaaatagaaaacctaaacagaccaattaccagtaacaagattcaatttttaataaaaattctcc

SEQ ID NO: 903095 - DNA, 401 bp, Homo sapiens
atgtgaacaagaccatgtagcgtgtgtctcacctgggagtcaaactctggtccttataactctagctgcatcatggtgactatcatgacttctgaggacactgggtggtggtaataggttctcaggttagacacagagaatgtgatgccagcaaaatctgtgaccctctcctctgggcaaagcaacgcccacacagtcctcttaggacagagacaataacgaaattacaattccaaccctagtaacctactccacattcatcatttccctaggttacataagaattccacgggttgtcatgggcagtgattctcatttttgaagatgaggggtctgaagtgtagagagctcttgaaactcaagtaagatcgcaatgctkttaagtaatgaagctgcccaat

SEQ ID NO: 903096 - DNA, 643 bp, Homo sapiens
aaaaatgaattttcacaatatattttatttaacccagttatccaaaatattgtcatctcaacattggagcagtattcaacattattcatgagatattttacattatttccttcatattaggttttaaaattccgcatgtgttctacactgatggcaaccccaattcaggttggccgtgtttgaagtgcccagtggccacatgtggctcgtggtggatgtgttagacaggacaggtctggagggcaacctcccagctcacaagtcagcccctagaaagcctttcctggcaccctaaccagagcagcaaacccactcccctccataccttctatatcacgtcatatatcgtcatatgcatatcacttcctgttcctcttgttactattgttgtttatttttatttttatctgtctctcctaacaaaatgtaagttcccaaaggaatttattgctctgtcctttgcatgtagaacagtggctggtgcacagaaggagctcagtaaacataactaygttttgaacagatgaaatgaatggatttctgcataaagggatgtctgaatgcacagctaataataaggcttatgtaaaggacataggggtacaggaaatctcttacttaggatttccttggcctccccagg

SEQ ID NO: 903097 - DNA, 643 bp, Homo sapiens
aaaaatgaattttcacaatatattttatttaacccagttatccaaaatattgtcatctcaacattggagcagtattcaacattattcatgagatattttacattatttccttcatattaggttttaaaattccgcatgtgttctacactgatggcaaccccaattcaggttggccgtgtttgaagtgcccagtggccacatgtggctcgtggtggatgtgttagacaggacaggtctggagggcaacctcccagctcacaagtcagcccctagaaagcctttcctggcaccctaaccagagcagcaaacccactcccctccataccttctatatcacgtcatatatcgtcatatgcatatcacttcctgttcctcttgttactattgttgtttatttttatttttatctgtctctcctaacaaaatgtaagttcccaaaggaatttattgctctgtcctttgcatgtagaacagtggctggtgcacagaaggagctcagtaaacataactatgttttgaacagrtgaaatgaatggatttctgcataaagggatgtctgaatgcacagctaataataaggcttatgtaaaggacataggggtacaggaaatctcttacttaggatttccttggcctccccagg

SEQ ID NO: 903098 - DNA, 590 bp, Homo sapiens
caaaaatgacaatttctgcacacccatgttcacagcagcactactcacaatagtcaagaggtggaagtaagccragtatccatcaacagatgaatgggtaaacaaaaggaagtatgtacataaaatggaatattattcagccttaaaaaggcaggaggttctgacacatgctacaacatgaaggaaccttcaggacattatgctaagtgaaataagtcagtcacaaaaggacaaatattgtatgattccacttttacaagttacctagtaaaaatcataagacagttacccagttaaaatcataagacagaaagtaaatggtggttgcaggtgccaggatggggaacgaaggggaaacagggagttgtttaatgagtatagagttttggttttacaggatgaaaaagttctggagattggttgcccaacaatgggaatgtacctaacactattgaactgtactttcatttaattttatttatttatttttttcagagatgaggtctcactatgttgcccaggctggtttcaaactcctgagctcaattaatcccttggcctcccaaagtgctgggattatagatgtaagc

SEQ ID NO: 903099 - DNA, 571 bp, Homo sapiens
aacgtttccatatgccgctctccatctgaaatgtgcttcctccctgcactgctctagctacttcctgcccctcattccggtytcagccgctatctcctctgagaggctatccctgatctcacagttgaaattgggatcctcctgttcttttccttcaagatgcgctgttcttatactggttaccattactaagaatataattagtgagaatataattgtttacttaatttctgacttgtccattacagtgtaaatttcatgaaagcagatgtcatgtccatcttgtttatgaacagtgcatggcccatagcagatgttcaagaaacatttgatacaaaataaacgaataaactatttttctgacctcaaatagtctgtcctcttcaacaaataatgtctcttcaaagttagcttttcatgttaaacctaagcctgaacccacaaagatcttgaacccaagacactccagcagttacttagcactaatatatagtttaactccgctgtgcttttgcgttatttgtcctgtgttaccccaccagatggtttgtttctcagcacagggcttact

SEQ ID NO: 903100 - DNA, 683 bp, Homo sapiens
gaaccagctcacaatctgacctctctaaaactctcagtagaatagtagaataatagggtttggtttgattattttttggttggcttttcaaaggtagaaaatgttagtcttttcaaaaggacaaactcaggataccaagccaagagttttatatctgcactaatctggaattttatgatcaaagaccactgtaatttcttcagtggagactcacccagatatatcacttcagtgaaaggattaaatgactcaccagacagtaagccagtgccacctaaacccatcgatctatctaaatcctcaagtatacaatgaaaaaatagtcatgactatttactatctggaatataagagccctcttgttttttgtatttaagtcaccttaaataatttattttttaaaataggatggcaataaacattatgagaaactttaataagaatttaaggataataaactcaagaagttttactccatattttcctggttttgaaggtatatacatatactccaaatgagcattatcttttagataaaactaaatgctcatgatgaatctgaaacacaaccatcttgaaaayactaagtcgaaatttcaaatacatgtttaataggctctagcttatcataaattctggttttccttcctgaatttatatcatccaatccaacattttggaaa

SEQ ID NO: 903101 - DNA, 615 bp, Homo sapiens
tgggtgctcctgtattgggcrcatatatatttatgatagtaggctcatcttgttgcattgattcctttaccatcatgtaatgcccttctttgtcttttttgatctttgctggtttaaagtctgttttattagagactatgattgcaacccctgctttttttttttttctttccatttgcttggccaatatttctccatccctttattttgagccaatgtgtgtctttgcacattagatgggtcttctgaacacagcacactggtgggagttgcctctttatccaatttgccagtctgtgtcttttaattggggcatttagcccgtttatatttcaggttattattgttatgtgtgaatgtgatcctgtcattatgatgctagttggttattttgcattagttgattcagtttcttcatactgttgatggtctttaaaatttggtatgtttttgtggctggtaccagtttttctttccatatttagtgcttccttcagaatcagaaaaaaaaaaaactattttaaatttcatatggaaccaaaaaagagcccgtatagccaagacaatcctaagcactaagaacaaagctggaggcgtcacgctacctgacttcaa

SEQ ID NO: 903102 - DNA, 590 bp, Homo sapiens
tcctttctttgtttatgtgattactctgaacttcccacccttctttactgcctacctgtcgaatgctttttctaatagttctagtcatcgataatcatccttgggtttgactcacgttgtgattratgaaatcttttttttgaactacaaataggaaaagcatccacttttttctttgaacacttaaatcacatgatagcattatttattataaaatcactaatactctctaaatgtcttgctgaaataatttagttcagtagtccctttcctttcatgtgtatttagactagattccttaaagaaatcataatttcttttagaagaatacttgtcacacacaccaaaaaacaacccaaagtgattgtgttgagtgaaaagaacaaggtgagaaattgtgaatgtatttaatagtattgcatcttcattcgttctctcaaaagaatatttgctgaatatttactatgtgacagttactgccgtaggagctggtgatatgacaaggaacatacaagatgggatctttgccatcaagttgcacgcatgtatacgtacatgcatatgtgcatatgcatagacatagagtaaaa

SEQ ID NO: 903103 - DNA, 579 bp, Homo sapiens
aagttttcccgcacttagctagtctgactctaaggatagtaacaagcagggcccaggaaaggtcgtggtgaccctgcctgagaagccagagcccacaggtatgggctccagacatcccasagcaaggttaagaaaacaaaatcctttactgtctccccttcccctcagcattcactcagagctgtttttacaaatgcatactattcgcaagttcctgttgaccttcaatgcagctgcaaggtcataagctttgctgaggttgcaaaactgtcactatatgattaactgcctttgttctgcttctgtaagcttgcctacataagccaagccctgtctttgttcagggctcagctttcggatgcaaatctgctgagctgttgcgaacctaaatgaaatcctcctgtttcacccacttggtctctcctgcctcctgctttctgcaacaatagtaccttacaaatgatttcaaaaattactactgacacctttattagtgtacaatgtcttcccaatatctaaaatgttttcctccactattctgacacatttattttcatttttctttctttcttttttttt

SEQ ID NO: 903104 - DNA, 640 bp, Homo sapiens
aataaatagagagaaattaagggaaaaaatatatacaaataaacaagaaaataatacaataacaggagtaagtcctcacttatcaataataaccttgaatgaaaatggrttcaattcctcaatcaaaaaatatagaaatggatcaaagaacaagacccaactatatactgcccacaaaaaaactaccctcatctgtaaagacacacagactgaaagtgaagagatggaaaaagatattccacacaaagagaaaccaaaagcaagcagaaatagctatagttatatcagataaaaatacttcaagtaaaaactctaaaaagagaaaaggaatgacattatacaataataaagggatcggtttagcaaaagtatataacaattctaaatatatatgcacccaacatctgagtaactagatataaaaggcaaatatgagatgtaaaaggagacacagactgcaatgcaataatagttgggggcttcaacatctcgttctcagcactggaaagatcatctagacagaaaatcaacaaagaaacattggatttaaacagacaaaatagacctaatagatatgtacagaaaatcccactaaacagttgcagaatacacattcttttcatcagcacatggaacattc

SEQ ID NO: 903105 - DNA, 496 bp, Homo sapiens
tattcaggacctgaactcaacattggaccagatgtatctgtttgacatctacagaactctccactagaaaataacggaatatacattcttytcattgccacatggcacatactctaaagtcaaccacgtaattggacataaagcaattcttagcaaatgcaaaaaaaaaaaaaaaaaacaaattataccaaacacactctcagaccacagtgcaataaaaatataagtcaagactaagaaaaccactcaaaaccatgcaattacatgaaaattaaacatgctcatgaatgacatttgggtaaataataaaattaaggcagaaatcaagaagttctttgaaacaaatgagaacaaagatacagtgatacggtttggctgtgcccacccaaatcttgaattgtagctcccataattcccatgcgtcatgagagggacctggtgagaggtaattgaatcatgggggtgggtatttcttgtgctgttctcatgatagtga

SEQ ID NO: 903106 - DNA, 630 bp, Homo sapiens
gtcttctgaaaatgaatgagtggatgattaaataaataaaactaaaattcagaaaagtaaatgtctcccaaaccctagttctatgaaagtaagccagcagcacttgatgaagaggtcacaagaagtataaagtggttttgatcaaaaggccttaatattcccctaagcttggctaaatttgagacaagcttcttcctgacttgaagctcctgacctctcttttcttagagcatttagtttagataattttacattgtaaattatttatctggtcgtttgagatgtaaatcttctcccagccacctgccaggtttataacccaggaatgcttttcccaaggacctgggccctttctttgtgtgtgtgtgtgtgtgtgtgtgtgtgtgtgtgtgtgtgtgtgtgtttccgtaggctttagattttttttattttcataggttttttgaggaacaggtggtatttggttacatgagcaagttctttactggtgatttgtgagattttagtgcacctatcacccgagcagtatacrccgaacccgatttatagtcatttttccctcatcctcttcacatcccttccccctgagtccccagagtccactgtgtaatcttatgcctttgcgttctc

SEQ ID NO: 903107 - DNA, 630 bp, Homo sapiens
gtcttctgaaaatgaatgagtggatgattaaataaataaaactaaaattcagaaaagtaaatgtctcccaaaccctagttctatgaaagtaagccagcagcacttgatgaagaggtcacaagaagtataaagtggttttgatcaaaaggccttaatattcccctaagcttggctaaatttgagacaagcttcttcctgacttgaagctcctgacctctcttttcttagagcatttagtttagataattttacattgtaaattatttatctggtcgtttgagatgtaaatcttctcccagccacctgccaggtttataacccaggaatgcttttcccaaggacctgggccctttctttgtgtgtgtgtgtgtgtgtgtgtgtgtgtgtgtgtgtgtgtgtgtgtttccgtaggctttagattttttttattttcataggttttttgaggaacaggtggtatttggttacatgagcaagttctttactggtgatttgtgagattttagtgcacctatcacccgagcagtatacgccgaacccgatttatagtcwtttttccctcatcctcttcacatcccttccccctgagtccccagagtccactgtgtaatcttatgcctttgcgttctc

SEQ ID NO: 903108 - DNA, 615 bp, Homo sapiens
acacacacacgccagcttaacatctgccattatagataagggaatagtaagtgtctcaatacaggatatcaaaaataaggataaattgtacactgaaagcactctcgtttttggtraagataacatctaatctgccatgcttgcttgtgatgccaactaaagtggcaaatggcatcaactaacccccagtcctcctggtagcttcatatttggccaacacttggtttcgccacaacttcctggcttgccagcaattagaggaggaaatatgccatggtgcttggacagattaatcaataaatggccagcagtcattctgagtagtagctgtccagtcagtaaccatcaattctgatcacttcatatcataacccaagcctctgcactgattctcttcactgcattctagggaccagattatttacctttgaaagcaacaatggggtagaactatgagttaaaaggagaagaccctgagagcctgagtctgtcacaggctggatatttttcctgctgtcaagaatatctttttaaatagtgttataacacatcttacttaagtatttggcagtgcagatggtagattttgtttcagcacacttgaaagaaaaagtg

SEQ ID NO: 903109 - DNA, 592 bp, Homo sapiens
tgtatttttagtagagacatggtttcactaagttggccaggcaggtcttgaactccygacctcaggtgatccgcccacctcggcctcccaaagggctgggattacgggcatgagccaccgcgcctggccaacgattcctattctttctaaatcaccctggataagcattttgttatagcagcagaactagactaagacacttccaatagggacataattcatgacagtcatcacggtagccaagtcagaccagaatcaccacatggcttcatttggttctaaaccccattcatccaccaacatgtaagggtgcagctcagccagagcatcaggtttggcagtgtctgtcaaaatgaaaggcatgtttcctttgacctaacaatttcacctctaagaatgtatcctacagacatgtgtgggaagtggtggcggttgaagatattccatgtagcgcttcaaaaatggaaacaacataaatatccatcaaaaggaggccaattaaataatgtaagcatgtgcaatggaatactatatatccattaacaaaggtggagcagaaaaaatacacgtgcgtgtgcacacacacacacac

SEQ ID NO: 903110 - DNA, 669 bp, Homo sapiens
ataataatctccaattccatccgtattgctgcaaatgacaggatctcrttttttaaatggctgaatagtactccactgtgtatatgtaccacattctctctccctcttttttttttttttttttttgagatggagtctcgctctgtctccaggctggagtgcagtggcgcaatctcagctcactgcaacttcagcctcccaggttcaagtggttctcctgcctcagcctcctgagtcgctgggactacaggcgccagccaccacgcccagctaatttttttgtatttttagtagcgatggggtttcaccatgttggccaggatggtctcaatctcttgacctcatgatccacccacctcggcctcccaaagtgctgggattaccggtgtcagccaccgcccccggccataccaccttctctttatctattcatctgttgctggacactttgattgcttccaaatcttggctattgtgaacagtgctacaacaaacatgggagtgtggatacctgtttgatacacttacttcctttcttttgggtatatacccaccagtgagattgctggatcatatggtaactctaattttagtcttttgagaaacctttaaactgttttccatagtggttttactaatttatattcccacctgcggtgtacagtggtt

SEQ ID NO: 903111 - DNA, 553 bp, Homo sapiens
ttctcaaatcatttttaataaaaaagccagatgccagcaaagtaygtattgtatgatgatatttttataaagttcaaaaataggcaaaaaaaaaatctgttgatagaaaatggagcgctgtccctgggcatggtgaatttaatggagtaatactaagactttgaaggataagctgacatatccacagtcacagtggaaaacagtaacatcggcagagaaacaaaagactgtgtatggaagatttataaattaaaaagcaagtgtggtttaattgatgtatatagagagtggaatgatgattaccatgtgctgggaagggtagtgaagtggccgagggtggggaagtgggaatggttaatggatacaaaactataaatagaatgaataaggtccagtacttgatagcacaacagggtcacttcagttaacaatatttcattgtgcatttaaaaataactaaaagagtatacatggattgtttgcaacacaaaggataaatgcactagatgcctatatcaaaatatctcatgtaccccatatatatttataagta

SEQ ID NO: 903112 - DNA, 597 bp, Homo sapiens
ttaatatatgaaattaaaaagtcactttatacaaaattaaaatataaaaatcaataatatttgtatactagaaataaataattaaaaaaagaaaaattttaaatgataccatttaggctggatgtggtagctcacacatgtaatctcagcaatttgggaggttgaggccggaggattccttgaggctaggagttagagaccagcttggccaacatagcaagatgccatctctaaattaaaaaaaaaaaaattatccaggcatagaggtgcacctgtagttctagctataagggaggctgaggcaggaggattgcttgagtccaggagttggaagctgcagtgagctatgatcacaccactacactccagcctctgtgacagagcaaaaccatgtctcaagaaaagagaaagagaggaaaaagatgccatttatagcagcctcaagagtaagaatgttataggtccaatcatttttttaatatcattagtataaatccatactgcataaatcaataaatccatatayagacacttgaaatataatgcagatatcaaggcagatcattggggaaagagatagtctttccaacaattacc

SEQ ID NO: 903113 - DNA, 636 bp, Homo sapiens
atatgtggaatcctaccagtcaagttgtgctgtgtacaattctgctatttctgaggcttagtattaagatgttatcatcccaaatataacacacttctgctaataacagtttggtcagtagtaaaggaattatttttgccttctgccttatgtgctttatttctttgtcttataattcttgtcaatttaaagattttaatttatcagacattgagatgtatcttgaaattgatgacatgtaaaagttttattagaggtattttctttcttagcaataaataatagttgatagtgtcttcgatctaatgaaatataatataattataattagtttagaaataaagttggagtcaggaagtgcaaatttttgtcatcatcagtgcaatgtcctggggttaataaaaacatacagcttctgtgatagcaagcattcacttggagcctggccacacttggaaatgagtttcacagtccagccaagattgccatgttttatatgaaatgataatgaagtggcttcacttttaagactgtattcttattgcttccaaatgaacactgccttgtgcccaccactcattcccaggyttttaactcataaaaatgctgtttgtacaaaagagagaaaaggcccaa

SEQ ID NO: 903114 - DNA, 533 bp, Homo sapiens
tcataagtggtagttgaacaatgagaacacatggacaaagggaggggaacagcacacactggggcccgtgasggtgggaggaggggagggagagcatcgggacaaacagctgatgcatgcaggacttaaaacctagacgaagggttaataggtgcagcaaaccaccatggcatgtgtatacctgtgtaacaaacctgcacgttctgcacatgtatcccggaacttacagtaaaataagtatttttcaataagacagaaaagaaagaaataatacacagtggagggatgtcaaataatttaaatttcagagtttttataaaatcagatctcacagcacagggtctccattcttctaagacagtaatcagcttgataaaggtggaagccagcattccctcttcttgaaagcttcctttgttttggggggcaccacaccttctttgttttcttcttgattcactggtggttcttctcccatcattttgccaacttcttccacctttaaatgttgttactcctcaggactctgttct

SEQ ID NO: 903115 - DNA, 635 bp, Homo sapiens
acagaatgacaggaaaggttacatttttcattctaaatggagtgtttttctctgtcgtcttctgcatagaactcatgcattcttcttatggtcagataaatgaatgaaatgtatacattactccattcttttcaataaaactgtggaatggttgccatttcagcttactctgtatttcttagagttggggattggtgatattaaagttctcttgattgatctacaagataattcctctatcatattttttatattatgataggacacaacttattttagacacaaatgaatatttacgtcatgacaatttccctttgttttcttcccattttatatatacatgccatgtagatggtaagcaatagtaaaaattgttcttaaaaagtaataacaccttacacaagcagaataagtaagaaaaaggtaataaaatctacatgagaaacaggacacattttactttacttttttatccttctgaaaatatttatagtgattatcaaaggcatacaaagtattttactcctaccaaagtatttttacacacacctttaaactggaattgctcaatgtatgtaaaagaaaactgtcaattaacttatcaccaytcactttagtaagcataaacagtctaa

SEQ ID NO: 903116 - DNA, 574 bp, Homo sapiens
tggttcatatgaatttttaaatagtttttttctaattctgtgaagaatgtcaatggcagtttgatgggaataacactgaatctaytactttgggcagtatggccgtttttgcagtattgattgtttctatccatgagcatggaatgtttttccattttgtgtcctctcttatttccttcagcagtggtttgtagttcttgaacaggtccttcacttcccttgttagctgttttcctaggtattttattctctttgtaacaattgtgaatgggaggtcacttattatttgcttctctacttgtctgttgtcggggcacaggaatgcttgggatttttgcacattgattttgtatccaaagactttgctgaagttgattatcatcttaagaaggctttgggctgaaacaatggggttttctaaatataggatcatgttatctgcaaagacaatttgacttcctctctttctacttgaataccctttatttctttctcttgcctgattgccctggccagaacttccaatactatgttgaataggtatgatgagagagggcatccttttcctgtgcca

SEQ ID NO: 903117 - DNA, 653 bp, Homo sapiens
tctagacctaactacctgtttacaaggcaattcagctcataggggatctagataacatcacaagaatacaattaaccatttccaaactgtggaaaattctagaagataaattactyagttttttccaacaggtgaatgccttaaaaagggagggagaactgttatagactaaaagatgtatcaaccaatcacaatgtgtggactttgtttggatcttgatctcaacaatacagttatacaaagatattttagcatatttggaggaaattgagtatggcttggttatgaaattatataaaagaattatgattaaattcatttggtgagataatgatatttctgttatgctttttaaaagttcatatctttgtaggtacatactgctgcattcaaggagaaatgacataatgtctggaatttgctttaaaatacagcaagtcccccactcctctatctcaaacacctaaataaaaagaaatgaacaaaagactaaaagtctgtgtgtgtggtggttggaacaagaatggcagaatactgataactgttgaaactggattatgtgtacatgaagctgcattcctattatacaattctctctactttagtctgaaaatttctaccacccaaaaaaatgctctttggcccctcttttt

SEQ ID NO: 903118 - DNA, 600 bp, Homo sapiens
aagattacagttggagtttttgtgcttctaatggtaatggggaacacaataagtaataataataaacagcaactttcaacttgacttttgtccaaaccaaatagaatttgaaatgtagatgttttgacatttgcaaaatgaagaatcattgtacttttgcatgatcctaaaaagttccccattcctaacacagcgtgtgttaggaatacaatactactagattgcatcatttttactgttattggtcaatgcagcttgggtacattcaatcactattcgttgactagctctttacccacaggaatagactgaactacccacaggaatagactgaactgaccttgttctctgtgggtgagggagcctgttcctaagacaaaaaagcatgcagcttctgccaagacccacttccttcctgagtcattttggatgcaaacatccttggcttcatctgatggacagaggatgagaaatctatttgtcaaataaacagggtaaagagatgataaagaaaaaaatcacaaccactattttgtagcaagctgggaaggatgagcattaccttagttttctsttttatgggagagaaaaagagactgg

SEQ ID NO: 903119 - DNA, 602 bp, Homo sapiens
ataaagtacaagagtttgtgaaaattggttgctggctagaactccagctgacaaaacatttgaatcacgctcattttctacctcctgggtagctttccttccttcctgaaagtactgagcatatgtttgaatatcggggggctgagggaagatgggtagaaaacgactgtgaaaaaaatactgttttaaatgcccatggcagaattatactttcttaaatgtccatagcagaattcctcccctttctgttcacattgaagtgaccttaaccggcaaacacagttgcaggctgagacaatagatcctgcggcatttgagttttcagggactgtccagtgaaatgagaaacccagtgcctatctcctggtattttgtttttagtgaattacttaattatatcacgtctatggttgatggatttccatctttaattgtaagaatcattcttattttgaaaactttggggttttaaaccaagactatatttagaatttttaaaacayattgaatgggtcctacacaaaaattagtttggaaactattatgtagattattaactaatggaccagagctcatagtattcccatacttgacaattatgg

SEQ ID NO: 903120 - DNA, 628 bp, Homo sapiens
aatgagttcctaatcttgaaacaaaaccttgaaatacaacaaaatagatcctccwtaaagcataaatctcacagggcctataaaacaataacacaatgggaaaaaaatgcagtgtattcaggcaacaactagcatgatgaataaaagagtacctcacatttcaacactaatgtttaatgtaaatggcctaaatgctccatttgaaagatacagaatggcagaatggataaaaatctaccaatcaagtatctgctgtcttcaagagactcacctaatgcatagggactcacataaacttaaggtaaagggatgggaaaagagaattcatgcaaatggacaccaaaagcaaaaaggagtagctattcctatatcagacaaaacacattaaagaaacaacagttaaaaaaagacaaagagggatgttatataagaggatcagtccagcaggaaaatattatcatcctaaatatatatgcacctaacactggagctcccaatttatgaaacaatattattagacctaagaaatgagatagacagcaacaaaataatactgggggacttctgtactctactgacagcactagacaggtcatcaagatagaaaggcaacaaataaaaaatggcc

SEQ ID NO: 903121 - DNA, 628 bp, Homo sapiens
aatgagttcctaatcttgaaacaaaaccttgaaatacaacaaaatagatcctccttaaagcataaatctcacagggcctataaaacaataacacaatgggaaaaaaatgcagtgtattcaggcaacaactagcatgatgaataaaagagtacctcacatttcaacactaatgtttaatgtaaatggcctaaatgctccatttgaaagatacagaatggcagaatggataaaaatctaccaatcaagtatctgctgtcttcaagagactcacctaatgcatagggactcacataaacttaaggtaaagggatgggaaaagagaattcatgcaaatggacaccaaaagcaaaaaggagtagctattcctatatcagacaaaacacattaaagaaacaacagttaaaaaaagacaaagagggatgttatataagaggatcagtccagcaggaaaatattatcatcctaaatatatatgcacctaacactggagctcccratttatgaaacaatattattagacctaagaaatgagatagacagcaacaaaataatactgggggacttctgtactctactgacagcactagacaggtcatcaagatagaaaggcaacaaataaaaaatggcc

SEQ ID NO: 903122 - DNA, 595 bp, Homo sapiens
ccaagattacttaagccactacactgtaattatctcactattgattacttactgattttctgtctcttttattttgattctatgcataggtaggccctcgacgggactggttagtgtataatccagctttgtctggtcttcgaatgctatagttttacatgaaacaaaaataacagcatcataatagacagctcaaagcatattatcacctttctaagtatctgcatgtctaactctgtcaagattaatctctctctgttccccagctgcttctgaaacaggcctggtcttaaatctcaaccctatgacttcattgcttactcctagagccatctctacaaaaatttatttgccaaacctaaggagtaaggaaagctataaaaagaaagttatataagatggaccatgtgtaaataatcacgctaagtatataatgtttacaagaaagtggtaaggcattttaagaataaaatcacatcaaaacctatttgtccatgggaaccagactgcagagtaatgtgtgtttgggtttggaggtgatagayccaaccctatgacaacagtgaataaaggttgttggtaatttagtaccaga

SEQ ID NO: 903123 - DNA, 666 bp, Homo sapiens
taggcatatttgcattcctaccccaggtgccttccttcctaagtccttttacttggagtgtttagctgaaatgtccttcggctatctcttccaaagcctccttatgtggggaaggggagagaaaaaccttgaagatatattttccactctttctcagtacctagtacttctgcagtcctagcccttcccccttgcccctctcccctggccctcaggatccataaaattgaagacccctttgtttggagatcccttgtcagtgggatgagccccacatctatgccagtccacctgactcttgaaatgcacgggttccatggaaagaaatgacacagagtggggttggcactttctccaagtttctcttgtttatattatcacagtaagtgatgagagatttcactgttatttttattttggcttattgttcctctgatacctaacaactcactcttgttccacctcagctgagttcctaacaagagtgatttgtttgtattttctaactttttgaaatatattaaaaaattggatgaaacaggctttcccttctgatttggatttagaaacccactagtgacttttattcktgttcttatgatcaaaacaaggcataaaagctaaaaacatttcatagttaaaacaagtcagagagctgaagtggtt

SEQ ID NO: 903124 - DNA, 617 bp, Homo sapiens
cctgtgtccatgtgttattgttcaattcccacctatcagtgagaacrtgcagtgtttgcttttttgtccctgctatagtttgctgagaatgatggtttccagtttcatccatgtccctacaaagggcatgaactgttcatttctatggctgcatagtattccatggtgtatatgtgccacattttcttaatccagtctatcgttgttggccatttgggttagttccaagtctttgctgttgtgaatagtgccacaataaacatacgtgtgcatgtgtctttatagcagcatgatttataatcctttgggtatatacccagtaatgggatggctgggtcaaatggtatttctagttctagatttctcagtataattttttaatgtgtagtgtagatggagaattgtctgatctgaaattctctttgtgagtctagactttggtatttcttttcttatttatatgtttattctttcatattctgttgaaatagggctttcctagagtccacatattctcaggaacctgtaagtatcttatgcttcattatctgtaaatataataggtttctatgatagttctaagattgatatttctctccaatacagtcttttgtttt

SEQ ID NO: 903125 - DNA, 617 bp, Homo sapiens
cctgtgtccatgtgttattgttcaattcccacctatcagtgagaacatgcagtgtttgcttttttgtccctgckatagtttgctgagaatgatggtttccagtttcatccatgtccctacaaagggcatgaactgttcatttctatggctgcatagtattccatggtgtatatgtgccacattttcttaatccagtctatcgttgttggccatttgggttagttccaagtctttgctgttgtgaatagtgccacaataaacatacgtgtgcatgtgtctttatagcagcatgatttataatcctttgggtatatacccagtaatgggatggctgggtcaaatggtatttctagttctagatttctcagtataattttttaatgtgtagtgtagatggagaattgtctgatctgaaattctctttgtgagtctagactttggtatttcttttcttatttatatgtttattctttcatattctgttgaaatagggctttcctagagtccacatattctcaggaacctgtaagtatcttatgcttcattatctgtaaatataataggtttctatgatagttctaagattgatatttctctccaatacagtcttttgtttt

SEQ ID NO: 903126 - DNA, 666 bp, Homo sapiens
aaatgacttttaacgtttatttcttctgtgattgcaaattttccttatgtgtatggtagcaaaataatgtagaaaataaaattaaacagtctcacacttttagtagaacatcatgccttcaaaaaagctcagatcaacagtgttataaggctttaaactataccttatgtaaatctcttggtttctgggataaatgccaaaagcaatttagatacagtcatacttccccataacattaacacccttcatgtttgctcatttgaagatcagttaatcactagtattcatcagtctaggcaagagcttagttacatatagagaggttaaatactctttagtaaactaataacaatcatcacggaaaaaaaaatgatcatcttaatgtaaagagacaaaagaaaaatcatagcccttaaaatccagggtcatgaatttcagcaactctttgaactgaaaaatttcatgacagaggagtatcttatatattaagtagtcttccttacttaaatgctaaattattctgccatccatagcacatggtcatccaggctttacaaaaatactcaggccttagatgctcacaagcaaagaggctgcacagcaaagtgcatattaaaggtctrtcaagtatattgggtctaggaattgtagaaagataaatctaat

SEQ ID NO: 903127 - DNA, 546 bp, Homo sapiens
tctacctgagggctttctcttctcataagggtttgcttgtctccctcacgcctgtaatcccagcactttgggaggccaaggtgggcggatcacgatgtcaggagatcgagaccatagtggctaacacggtgaaaccatgtatctactgaaaatacaaaaaaaaaaaaaaattagcctggcgtggtggcgggcacctgtagtcccagctactctggaggctgaggcaggagaatggtgtgaacccgggaggcagagcttgcagtaagccgagatcgcgccactgcactccagcctaggtgacagagcgagaaaaaaaaattaaaaaaaaaaaaatcaagggatgggcagagaaattgatgtgcttgggggcagctctcagtcaaaggggaatgggagaggaggataaatgcctcgccttcccgcccttcattggagaatgctgaggagaattccctctggcttttcagactcccctargcccatccagacctagttgctcccagctctctttaagacatggtttattctcttttctcctttccctgt

SEQ ID NO: 903128 - DNA, 566 bp, Homo sapiens
ggggcaccagaatttcaatctaaatcttaaaaaattttagggcaatcatttttcttcctccttgaaagccacagacaatgatgtgcactatttaccccataagaagaacacgtattaaccagggcacagcttctcggtgtctccaaaaagccttatttgtttaagagattcatctttgacagtttaacaaataataataatgttagtcaatattattagtagatatagtactttcacctctagaaacagaaattgaccgcaaccttccaaacggtagctcttctaaaaaaggttttttaaattaaagttactttacattgggcaacttgctacacatgtatgtttagaacttcagtaaataagtacattaaattattgaaatatctctaattaataacagctaacatttattgatgttagcatacactacgctaagcactttatttaatcctcatggcaaatctataagattgatacarttatcatcatccccattttacagagaaggatattgagacataaaaggtgtaattgtccttggtcacatggtgaggacgtagaacatg

SEQ ID NO: 903129 - DNA, 683 bp, Homo sapiens
actcttagatccaatcctgacctctgaatcagaatctgcatttgaagaagatccacagatgatttgattactcattaacgtttggaaagcactgcccagaactttgagatcatcttctaatacactgcatcaataaataaaatgttgaaagagaaaattgtagatgttgatgatgacaattttaaccgaacttggtggtgttctgtttcacctgatgctaacaatttttaggttaggggacctaggaaaaatgtccttttgtctctaccagttgctggttaagtggaacagtgaagtgtccttttcctcctttttaaaatttccggggtacttgactaactgatttctgcatgtttaaacttacattaaatgacctaagagatgacttttgctttaatttgatggagacaatccagtggcagttatctgtcactgatttcatcttaacttccttttcatttaagatctctgaatgattatgttaagtatgcttaaaaaccagagaaaacaaaatgatctcaactatttttcaaaaatgcataggagatagtattttaggaaaatacagtggtaacaatattcaccagaattttggatgatttctctttcttcattttaattttctgtctacaccagcatgtagtactcttatagtcggwaaatcatattacagtatttaaaac

SEQ ID NO: 903130 - DNA, 694 bp, Homo sapiens
attcctcaattcccctttcccccagctcctaacaaccaccattctcctctctacttctgtgagtttgactattttagatacttcatatacatggaatcatgcagtatttgtcctgtgagtktgttatctcacttagcataatgtccttcaggttatccataatttttgcatctaaatctaattcatctctgtttgttaaacttctcctcactgaatggtttattaatccactctacaaatgaatattgagtaccaaccatattccaagtgctattgtaggtgttgagcatagcgcaatgaaaaaaacaggcacaggtttctgctcttataaagctgacattctagtgtgggagtggtaggcaataagcaggataaataaagaagatttatagaatattaatgaatacatgttacagaaaacatgtaaaggaaagggagacaggaaatctaggggaagaggaaaggtgcttgaattttacacggggtaagcaagtaaagtttcaccaggtaaaggtaataaaatagtgagccatttagttttttggagttgatcattccaggtagaagaatgggataagtcttgagggcaaaatatgcctggtatgttcaagggacaaaaagaagatagtgtaactaaagtggaattagcaaagaggaggttaggatgagatcagagaaaaaaagctggttttgc

SEQ ID NO: 903131 - DNA, 611 bp, Homo sapiens
gctgattattatgatctgatactttagcagatggcaagtatatgatacatgttagtctgtctactgcagtctctatgctgtacattagcggtccaggactgtttcctcctgcatggctggaagcttgtactgtttgaccaacacctccccactttcccacctgtgttgttcaaaccctggcccagtgtccatctgtgccctggcattgtcctgcagcccgaatgacagtcttgaatgaggcaattcaaatctctgcttccactgacccgttaaaggggggtctgcagattttactcaagaaaaaaatagaaaataccatttcagatgtgaataaactaaccagggcatatggcagaaggaggaagggttacttcagtggtcatggagtgctgctctggggaggggccatttgtgttgagactggatgaggtgaaagagctcaagctgcaaggggcctggggatgggcactccaggtcaggaaacagccagtgcaaaggcyccggggcgaggactgagttcagtgcacgtgaggaagaggatgaagagcagtgtggttggagggaggtaggcaagggcaggatgcacagtcagaggtgcttcctcccgtgga

SEQ ID NO: 903132 - DNA, 643 bp, Homo sapiens
ttttttttctggaattcctagttaaatgagtgcactgtgtgtgtgtgtgtgtgtgtgtgtktttttttttttttttttttttacctgagcctctacttggagtggacacttggtaaggtctggagacatttgtggttgtgacagctgggctgggggtggcagctgctggcacctaggcaggggtcagggagaccgataggcattcagcaaggcacaggacgcccccatgaccaaggctggtcttcagcagtgctgaggttgagaatccctcacagagggtgtgtggtttccactttaatttccaggctttgtatttagctggtgaagggtcaggactcacaaaggctaaataggattagtgtgtttgggaatatatcactcccctcttcctgtctcaagttggtcttcagcttatttgattggctagataactttttatcctctcaccctgttttctttttcttttttctgtttttgagacgaggtcttgctctgtcatccaagctggagtgcactggtgcgatctcagctcactgcaacctctgcctcctgggttcaagccattctcccacctcagcctcctgactagctgggattacaggtgcatgccaccacgcccagctgatctttgtgtttttagtag

SEQ ID NO: 903133 - DNA, 643 bp, Homo sapiens
ttttttttctggaattcctagttaaatgagtgcactgtgtgtgtgtgtgtgtgtgtgtgtgtttttttttttttttttttttacctgagcctctacttggagtggacacttggtaaggtctggagacatttgtggttgtgacagctgggctgggggtggcagctgctggcacctaggcaggggtcagggagaccgataggcattcagcaaggcacaggacgcccccatgaccaaggctggtcttcagcagtgctgaggttgagaatccctcacagagggtgtgtggtttccactttaatttccaggctttgtatttagctggtgaagggtcaggactcacaaaggctaaataggattagtgtgtttgggaatatatcactcccctcttcctgtctcaagttggtcttcagcttatttgattggctagataactttttatcctctcaccctgttttctttttcttttttctgtttttgagacgaggtcttgctctgtcatccaagctggagtgcactggtgcgatctcagctcactgcaacctctgcctcctgggttcaagcsattctcccacctcagcctcctgactagctgggattacaggtgcatgccaccacgcccagctgatctttgtgtttttagtag

SEQ ID NO: 903134 - DNA, 616 bp, Homo sapiens
gcaggagtggtcaatagtcactaccatttgactgaaaaaggtgggaaagagaatgggatactgaggccagaagagagaggccacattaggagaggggccagtccatgggagctgcagccatacactgaagaacatggtttcggccacaacagcaactaacaaggagatatgatcattaagacaaaggctcattatttttagggttctttagaatgaaagaaggcccaggagaaaagtaggtactcctcgagcacagtagtgccagagatgttaattaccaatggagaagggtcaatgccatcttaatagtagaacctgcttgcattttgctagatgacttcatctgtagaagacctcatatttcctgccagcgcctcccactgcctgaactcagccagaagccagaggatgaggaagcccagttggtgcagtccatggggaccaggcctctgaggaatgaacgtgaatgcacagaatatccatctcattcaktgggatgcatttaccaagtgcagctttctaaagcagcaactcactataccttgccataaaggaattttgattagataccattataggtgtgacccagcagtccaggaaatcccatttgtgtccc

SEQ ID NO: 903135 - DNA, 588 bp, Homo sapiens
ctggagtacagcagtgcaatcatagctcactgctgccttgaagtcctgggcccaagaaattctcctacctcagtcctctgagcagctgggactacaagtatgcatcaccatgcctggttaattaaaaamaaaaatttgtagacgagtgtcttgctttgtttcccaggctggtcttgaactcctggcttcaagcagtcctcccattttggcctcccaaagtgctgagatgataggtttgattattcagcatctggccaaaatctgaatcttaatgcataaaattcataaagtatttctacccatatgatctaattcctagtgggtcctcatgccactttgaaaaacagcttaatcaagtgtcagtaatgatttcacatcggttaaaagtggaaatcaaatataccatcctatgtgccaagacattagaaaccaatataaaaggagaaatctgtgtattatagaatggatatgagaattataagttcatttatcaaaaaagattacctgttcacgattcctaatgagagatcccatttggtgaacatttggctaataactcagcagctgcggaacattattacttaatct

SEQ ID NO: 903136 - DNA, 683 bp, Homo sapiens
taacttttgcagtttaagatctgtcagcaaaactagcawgggtttccttttccttcttcacaatttcacagataaacgatcagtcttaccatagaacttagcagccccaccatgtgattgtcgtctttccttattgagaatgtgtaccttttcacaaaaaaggaaacgttttacagtttctctttgacataagcaaattgccagcatcactactcttgtgctttggggccattattaagtaaaataagggttacttgaacagaagcactgtaataccacaacttttttttttccttgagacagggtctcactctgtcacccaggctggagtacagtgtttgtgaatgcagcccactgcaacctcaacctcctgcgatcctcctgcctcagcctgccgtgcagctgggaccacagcgtaccctacacacctggctaattttttgattttttgaacagaagaggtctcactttgttgcccaggctggtctcaaacccctggcctcaagcaatcctccagccttggcctcccaaagtgttgggattgcagacatgagccaccatgcctggccaatatcacaacatttgatctgataactgagatgaatactaactgactcatttgtgggtagcatatacagcatggatatgctggacaaagggatgattgatgtcccaggcagggt

SEQ ID NO: 903137 - DNA, 603 bp, Homo sapiens
atctttcatggtggtaggcaaaagagcatgtgcaggggaactcccctttataaaaccatcagaccttgtgagacttattcactatcatgagaaaaacatgggaaagaccttccctcatgattcaattacttcccactgggtccctctcacaacacatgggaattgtgagagctacaattcaagatgagatttgggtggggacacagccaaactatatcattctgcccctgccccctcccaaatttcatgtcttcacattttaaaaccaatcatgccttcccaacagtcccccaaagtcttaactcatttcagcattaactcaaaagtccacaatccaaagtgtcatctgagacaaggctagtcccttccacctatgagcctgtaaaataaaaaaaaagtcacttcctagatataatgagggtacaggcattgggtaaatagacacattccaaatgggagaaagtggccaaaatgaaggagctacaggatctatgcaagtctgaartccagcaggacagccagatcttaaagctctgaaatgatctcctttgacttcatgtctcacatcccagtcatgctgatgcaagaggtgggctctcttgg

SEQ ID NO: 903138 - DNA, 611 bp, Homo sapiens
gaagataatgaatactgatttacccaaagatgtgtaggggtgygtgtgtgtgtgtgtgtgtattacacataaatatgcatgaatatatatatatatatatatatatatatatattttgggatacagaaaacttacatgtatacgacggtaaatggacagaggcagtaaaagtttactaaatactaatttcccaaggtaggtagtcaagaatcagtgccagaagctgaaaatataagatatgtcatatatatttcttagatatatgaacacaaatatggaagtaagcagcttaaataattgaatttgatcatttttggtaatagagaaatggtacctagtgctgggaggaggatgagctacagaatatagtagactatatacaatgcaattttatcttctagatgttctgagctattttccaactaagacgtctctttaacctgtaacagttaactactttaaggtggagcttttaagagtatgttttcagaatctaagtgaaaatgtcaggttaattttttgctaactatatggtccttaaaaatctacttcatgattctacaaccattgttattattgtgattgttatttaacctgcaaaacagggatag

SEQ ID NO: 903139 - DNA, 645 bp, Homo sapiens
taataatgaaaaattaaaaagatattctcaaggaggttatattccagttgaagacagacaatacattttwaaaatacatatgtaaatgcattacatatcacaggataatgaacaccaaagataaaaataaagcaagagacagaattaggatgtaataagaaagatacattgcttactaatagagaattgtcaggaatgggtgcacttacaagtggtatttaagtagagataccacagtggccagaaaggctacaatggaatggaatgaatggggtggccagaaaatgaaaacttcaatatgaatagatgtggaacacgcaggataggacaaagcgtggatccacaacttgccattacttcccttgatattggctagtctcccagtacagcactggcagggatcattattgctacctcttgatatcctaggaactttgtagtcatcctcagaaatgttgccaagctcatggattgctttgctaatattgcttcccagatctttgcaaatgacgaatcagccttgtaggggcacaaagaattgaaaatcattttcatagcatgtatacgcatcctaaagtgttaaaattattgaaacatatccctagtcaggagccaatggattgtactatattgttctggtcattg

SEQ ID NO: 903140 - DNA, 645 bp, Homo sapiens
taataatgaaaaattaaaaagatattctcaaggaggttatattccagttgaagacagacaatacattttaaaaatacatatgtaaatgcattacatatcayaggataatgaacaccaaagataaaaataaagcaagagacagaattaggatgtaataagaaagatacattgcttactaatagagaattgtcaggaatgggtgcacttacaagtggtatttaagtagagataccacagtggccagaaaggctacaatggaatggaatgaatggggtggccagaaaatgaaaacttcaatatgaatagatgtggaacacgcaggataggacaaagcgtggatccacaacttgccattacttcccttgatattggctagtctcccagtacagcactggcagggatcattattgctacctcttgatatcctaggaactttgtagtcatcctcagaaatgttgccaagctcatggattgctttgctaatattgcttcccagatctttgcaaatgacgaatcagccttgtaggggcacaaagaattgaaaatcattttcatagcatgtatacgcatcctaaagtgttaaaattattgaaacatatccctagtcaggagccaatggattgtactatattgttctggtcattg

SEQ ID NO: 903141 - DNA, 645 bp, Homo sapiens
taataatgaaaaattaaaaagatattctcaaggaggttatattccagttgaagacagacaatacattttaaaaatacatatgtaaatgcattacatatcacaggataatgaacaccaaagataaaaataaagcaagagacagaattaggatgtaataagaaagatacattgcttactaatagagaattgtcaggaatgggtgcacttacaagtggtatttaagtagagataccacagtggccagaaaggctacaatggaatggaatgaatggggtggccagaaaatgaaaacttcaatatgaatagatgtggaacacgcaggataggacaaagcgtggatccacaacttgccattacttcccttgatattggctagtctcccagtacagcactggcagggatcattattgctacctcttgatatcctaggaactttgtagtcatcctcagaaatgttgccaagctcatggattgctttgctaatattgcttcccagatctttgcaaatgacgaatcagccttgtaggggcacaaagaattgaaaatcattttcatagcatgtatacrcatcctaaagtgttaaaattattgaaacatatccctagtcaggagccaatggattgtactatattgttctggtcattg

SEQ ID NO: 903142 - DNA, 578 bp, Homo sapiens
aattcactcaaaaccacacaactacatggaaacttaacaacctgttcctgaatgactactgggtaaacaatgaaattaaggtagaaataaataagttctttgaaaccaatgggaacaaagacagtgtaccaaaacctctgggacacagctaaaacagtgtttagatggaaatttatagcattaaatgcccacaggagaaagcaggaaagatctaaaatcgacaccctaacatcacaattaaaagaactagagaatcaagagcaaacaaattgaaaacctagaagaagacaagaaattactaagatcagagcagaactgaaggagacagaggcacgaaaaacacttcaaaaaatcaacaaatccaggagctgtttttttgaaaagattaacaaaatagatagactgttagccagactaataaagaagaaaagagagaagaatcaaatagacacaataaaaaaagataaagrgggtatcaccactgatcccacagaaatacaaagtaccatcagagaatactataaacacctctatgcaaataaacaagaaaacccagaagaaatggataaatttctgga

SEQ ID NO: 903143 - DNA, 606 bp, Homo sapiens
atgaccagtgatgatgagctttttttcatatgtttcttggctgcataaatatcttcttttgagaagtgtctgttcatatcctttgcccacattttcatggggttgtttgctttttttcttgtgaattygtttaagtttcttgtagatttttaatatgagatttttgtcagatgggtacactgcaaaaattttctcccattctgtaggttgcctgttcactctgatgatagtttcaggcaggaactggttatttggaaaaattaacaatataggcagctagccagactaataaggaagaaaagagagaagaatcaaatagacacaataaaaaatgataaaggggtatcaccactgatcccacagaaatacaaaccaccatcagagaattctataaacacctctatgcaaataaactagaaaatctagaagaaacgtgtacattcctggacacacacactctcccaggactaaaccaggaagaagtcgaatcccttaatagaccaataacaagttctgaaattgaggcaataattaatagcctattaaccaaaaaagcccagagccagacagattcacagccgaattctaccagaggtacaaagagga

SEQ ID NO: 903144 - DNA, 607 bp, Homo sapiens
gagatgtagaagcctgaactgctttggcatagaggtatcgccctcagaaatcagatcaggcttgtgcagaggagggagcagggctatggagcctgggctgccaggaggctcaggtagacttcattctggatagtctcctttcagggaggacactctgctaccccagctgagaaaggcatcctgtaaggaagggctgctcttcagctgcaggaagagagtcagaacctggttcctagaatgatcatcttgactgcaacattgtttagtagatgctgttggttatcttctcccaagaaaagacaaagaggggccagttatctttcttttattgtctgagtggagggttatatggggcagaaagataatgagaagctctctcttagttcatgtctcttttggagcccaggaatgtgttctcttttaaccagccagcaagaggcctgggaggtttcagtctgtcctcttgttactatggaaactggaatccacattgtttttaccccatgcagtggtgtgcctggttcctcagtgtttatattttcaaggcktttatcattgtgcacttagagccgctgtgattgggactgattgttgggaaccagcctta

SEQ ID NO: 903145 - DNA, 616 bp, Homo sapiens
  misc_feature 15: n = A,T,C or G
gtgtgtgtatctttntctcttctgaaaactgtaaatagaataattctcattacaaatgaaaatatttctgttccatatttatttcctgtctcatggcactctgctcttcttggatctagtaaggatctcagcgtgtcttatttgtacctgcaaaaaattacaccattcttcatttttcatgtcaattactgacatgttttcaagtcttcacaagttatttctgaagatgttggtgcattgaggagaggcagtgtcattggagttaaagaagtttttaaataggttatgttcaataacatttcagaacccatttctctggaaggcatagacatagtggttttatgtgtagttaaacataaaatagctccacaaagtcttacgtatgtgaaagtgttcatatcctggaagattctaatttactactcagtgctgtctgctggagaggaaaataggtaagataggctgctgagcctatgataataactcataatatgatgggaaagcatagagacaaaataagagaygatagatactcaaaccaatgtgagtgaagaacagctgtgaaagagtgtctatgggagagaggaagccatggggctgcttttgtgaagaagga

SEQ ID NO: 903146 - DNA, 633 bp, Homo sapiens
ctgctatatttcatctgcatttatagcacacagattagtaattctaaattgtgttttctggttcctacctgaagttaaaaatgtgtatctgatttataataaaagagttttttaaaaaatagaagatgcaactgtatgcatttttttattatactttaagttctcgggtacatgtgcacaatgtgcaggtttgttacatatgtatacatgatgcaactatatgtattaaaaaggttgtttatttttgtctagaggtaatcccacctcctcttggaagttcccagggcagtctacaacaatgcctggcaataggccaataattttctgttttgagcctctcatgcctaaacaaatacttatttgacaattcagttacctgccagagaactaaaagttattcttgtatatcaggctagcttttaaaggtaagttgttgtcatttgaccaagtcaattgtagatgaactttagtgtgaatctgttacatgaatgagtaaaagatgacccttagctggtttatttcttcacagcagtctacaatmtgtgagctcaaaagcctaccagtggcaaactcaaatttttacatatccagttgttttcaacatagcccaaataaatgtttagccaattagag

SEQ ID NO: 903147 - DNA, 609 bp, Homo sapiens
cacagtcagaacccagcctcgatgtagaattttggcctttttatttcaccagtgtcaaattctgtgaagttttccaaacttgctacatggcttatgccttctatatctgcccataattttctctctttcctaaacttacattttttcatacttctgaaaattccaaaattccttcaaagctctcatcaggtaacattgcttaaaacgtctgttagcttattcctttctattgttttgtctttttttactttatgtgagtttattttacacttattgcatttcattagaatactgtggttgttgctgtttttgtttatgtatttttagcacagatactttaatcttttaatgtcagcagatttgaaagtttgttttgttttttccaggcctagatgaaattagatgttagggtatagaaaactgaaacgagaacattttatacttttccttttagtttagagagccaaagctgcgcgcgtgcacgcrcacacacacacacacacacaattttctttcaaagttcaaaagtatttttctagcctgaagtaaccaacctggaaacagaaaaaaatagaaagaaaaaaataagaatatattaagttcatgtca

SEQ ID NO: 903148 - DNA, 648 bp, Homo sapiens
cttattcctttctattgttttgtctttttttactttatgtgagtttattttacacttattgcatttcattagaatactgtggttgttgctgtttttgtttatgtatttttagcacagatactttaatcttttaatgtcagcagatttgaaagtttgttttgttttttccaggcctagatgaaattagatgttagggtatagaaaactgaaacgagaacattttatacttttccttttagtttagagagccaaagctgcgcgcgtgcacgcacacacacacacacacacacaattttctttcaaagttcaaaagtatttttctagcctgaagtaaccaacctggaaacagaaaaaaatagaaagaaaaaaataagaatatattaagttcatgtcactatgctagatctcattactcaaattatctcattttatctttagaatgatcctgtgaggctagttacactagttctgggcaacactcaatctctaccttttggaaaccctagggatcaatttagaaacctttgcaktggtgctcacaagaaactaaacgacattgctcattgttctccccagtgcagaccccaaatgacttcttccttgtttgatattctacgttacagggaatgacatcattaagctggcact

SEQ ID NO: 903149 - DNA, 516 bp, Homo sapiens
tcctgagatctggttgtttaaaagtgtgtggcacctcccggctctccctcttcctcctgctcagacaagatgaagtgatggctcctcctttgccttctgtcactaagtttcctgagccttccctgaagctgatgctgccatgattcctgtacagcccacagaacagtgagccaattaaacctcctttcttaaacctcctattactttatagcagtgtgagaaaaaacaaatacagaaaattggtaccaggagttgtgtattgctataaagatacctgaaaatgtggaagcacctttggaattgggtaatgggcagaggttggaagagtgtggagggctcagaaggtgacaggaagataagagaaaatttggaacttctagagatttgttgaatggttgtaatcaaaatgctaatagtcagtgaaggccaggatgaggaggtctcagatggagatgaggaacttattggcaayggagcaaaggtcacatttggcaaaaagcttgtttggattatgcc

SEQ ID NO: 903150 - DNA, 576 bp, Homo sapiens
acattaattaatgaatggagaaattaattcttccttgacccagtgattattcaggagcattctgtttaattcccatgtatttgtataatttctagtgttcctctttgtattgatttctagytttatccaactgtggactgagaagatacttgatattattttgattcctgttaaaaatgagttaagacttgtttgttgcctcacatggtttatattggagaatattccaagttctgataaaaataatgtatatcctgtagttggtaggtagaatgttccataaacatcttttaggtccatttgttttaaagtttaattttcattgttaattttccatctcagtgacctatctagtgctgtgagtttggggtgaatgtcctcccactattactgtattgctgtctgtctttatttagatctggtaatatttgtttttcaatttgggttcttctatataggtacatatatgtttaggattgttatatcctctcactgaattgatctttttatgattatataatgaccttctttgtcttttatgattatatatattatatatgtcatttattattgtat

SEQ ID NO: 903151 - DNA, 616 bp, Homo sapiens
ggcaaaccaaatccagcagcacataaaaaagcttatccaccacgatcaagtcagcttcatccctgggatgcaaggctgattcaacatatgcaaatcaataaatgtaatccatcacataaacagaaccaatgacraaaaccacatgattatctcaatagctgcagaaaagccctttgataaaattcaacaccccttcatgctaaaaactctcaataaactaagtattaatggaaagtatctcaaaataataagagctatttttgacaaacccacagccaatatcatactgaatgggcaaaagctggaagcattccatttgaaaacaggcacaagacaaggatgccctctctcatcactcctattcaacacagtattggaaattctggctggggcaatcagtcaagagaaagcaataaagggtattcaaataggaagaaaggaagtcaaattgtctctgtttgcagatgacatgattgtatatttagaaaactccatcatctcagcccaaaatctccttaaactgataagcaactttagcaaagtctcaggatacaaaatcaatgtgcaaaaattacaaacattcagatacaccaataatagacaaacagagagccaa

SEQ ID NO: 903152 - DNA, 674 bp, Homo sapiens
ttttactctgatatttgaagaagtaagagattcattcttggcacatacmttcagttgtttctgtgaggttggtaaatccattttccatgttgttattataacagatctgaggacattaattgatatgtttcactagaatgtgagttctgataaggatgtcagagatgaatacaacacattctcctgcaaatgcactttggaaatgccttgtctcacatatggtataaattctaattgatatctttcaccaagtattcatttacaccatgctgtttatggcagaaattccctatatactataactgttgtccaaatataagacttctcatgataaatttctcttggctttgaatgtcaggggaagtttatgtcttctacacaactggtctatgtgttttcgtctgacaataataactagacaaaccattggatttccctttttctgtcttgtcttttaagaatttcaaagtttgagcattaggctccatttcattacccctcactccagactcctagtatatattcctactgctgacactgcatgatttctgatcttcatttagctttatttcagcttttccattgttttgagctttacactgaggtttggagaagtttgagggatgcctccatgagaaacaggaagaatatatattgttagcaaagagatacgt

SEQ ID NO: 903153 - DNA, 624 bp, Homo sapiens
caattattagtgattgagtcctctgagttctatcttcaaaaatatttataatgtagccaaacaattctgatctcttatgtggaagataaaatagtagagcctgtcaactagtctcagtatgttcactctcaacacaatctgtctagtcaattccctgttaagtcttttcccttcagtagatacaacaatcaaaggagcttgaatatcaggtcttgttagaatccttcctaaaattctgcaatgactgttcaaggtactttggctaaatctaggggcatttttttttctatagcccaaattataaacttctgccttccttttaaaatatttctcctgttctcaaaatccttctttcagtttctgggaatggccagctctctcctatcacagggcctttgcacagacccctgttcctagaacacttttcaccttacctgccttttgctcagatataaaatatcagcttacattcaattattttttaccatttgctttagatatcaacttacacttcacctcttgtgaaacattttctctcactccatgatttacactaggttccatctcaaaacacatcyttattatttgtttcttcataggtttataacattttggaattattta

SEQ ID NO: 903154 - DNA, 609 bp, Homo sapiens
catgtgaccacaactgcccatcttgcactgtatatatgttattttcacaagctccaaagtcaagaaggcctagcaacaatgcattttaagaagaaagcaatatatatgggatcaggcacaaagaatcttggagggtgagattaatctacacagcgggtcgcccagaccatttcattcttccttgttgcacccagcatctctcttttggtatgggggaaattttttacagccatctgacagaggaggaaaaaggttgagtttgtttcccaagggcctcacctttgtaagcgggttcaaactgaaaatcagttattgttatacaatagtcccactcatagatgttgcaaaacgactggtgattatacatttatcccaataggcagatcttagggtggtataagttgtcatccactttacatggaaatagaaagtccatggtaggagtatgtacagacacatttacagaagctaatggtttgattggtttgatagagcttgaaggaaaaagattggaagaactgggacacgcagatgaacttacagtaatgggaacaaagtataaagatctatgtatgacattttaakacccaccacagaacattcacaaag

SEQ ID NO: 903155 - DNA, 634 bp, Homo sapiens
aatgccatgcaagacgtttttgataaagaaaactgtgttgatttgcattttaacaaaagcaccatatctgggtaaccattcaagaatgttttctgtaatagatattatgccacagaaacatgcatgtgaaacgtaatctctaaactacaccagttgacagttcatatcatagggttcagatctagtcagtttacatgagcgatgaagaaaaaagttccataatatcaatataatgttgaaaatggactacactaaaagagttgccatgttagcagtatcagtgcattagtctaatcacaatgaaaaacactttactagttttacttgttcagtgagttggtcttctagatcatcactcagctcctgagtatacagtgttactgcaaagtggtatttgattgactttgtaatacagattcacattgcatttccaaacaagtatctttgataccatacttcactgtctcagcaattgtatacattttctttagttagcaacccaaagtgctgttttacaataagacacatagcatcaatattcatatgtgaaatgttgagcatctgcttctgtaggcttttcaattaaatactcttatacagagaawgtggttttgaacacttttatttatatctt

SEQ ID NO: 903156 - DNA, 662 bp, Homo sapiens
aaaaaataataatggagttccrgtttgatcctgagatcatctaggtgtgaatgcttggggatacttaaattggtatgtaaatgtgagattttcattttgttctgtcttgttttccctcttacaaacactggtacctgatggagaaaatatctaacttaacaaatcaagcagttctttgatgtgtagaaacttagaatggaaggagggatctcatccaaccagattagtctgcattagtcctttggctcccattttgaaattgacaataggccaaatatctgttgatgttcatcccattataaattccaagatataattgaaaaaaaaatgctgaactcaccagagtggcaaaaagatgatagagaatgaaatagatggcaaccacgggtgcccacatatgtcccacagcatttagagtttggtccattacgtccacccatccttcctgggtgaggatctggaacatggacataaatgcctaagaggaaaagaacaaaggtattacacactagctttaggcttgcatacaacttcaaattagcatgtgatgtttgaagactttgatctcaatattattgatttttatctgatcagggcaagaacagtcttgattcaacacataggaaagatataagaataaagatcttaaaaatgtgatattt

SEQ ID NO: 903157 - DNA, 570 bp, Homo sapiens
gacccaaatgacaaggagccagaaaaacaattctgttaatatgagaaaacaaggttcttcaacacctgcaaaagatcataccagctcaccagcaatggatccaaaccaagacaaaatctctgaattgccamaaaaataattcagaagatcaattattaagctaatcaaggaggcaccagagaaaggtgaagtccaacttaaagaaatcaaaaacatgatacagaatatgaaagaaaaattcttcagtgaaataaatagcataaataaaaaacaatcacaacttctggaaatcaaggacacacttagggaaatacaaaatacagtgaaaagtctcagcaatagaatcgaacaagcagaagaaagaacttcagacacagaatacaaggctttcgaattaacccaatccatcaaagacaaagaaagaagaattttaaaaaatgaacaaagcctgcaagaagttagggactacgttaaatgtccaaacctaagaataattagtgttcccaaagaagaagagaaatccaaaagtttggaaacatagttgagagaataattgaggaaaccttccct

SEQ ID NO: 903158 - DNA, 570 bp, Homo sapiens
gacccaaatgacaaggagccagaaaaacaattctgttaatatgagaaaacaaggttcttcaacacctgcaaaagatcataccagctcaccagcaatggatccaaaccaagacaaaatctctgaattgccacaaaaataattcagaagatcaattattaagctaatcaaggaggcaccagagaaaggtgaagtccaacttaaagaaatcaaaaacatgatacagaatatgaaagaaaaattcttcagtgaaataaatagcataaataaaaaacaatcacaacttctggaaatcaaggacacacttagggaaatacaaaatacagtgaaaagtctcagcaatagaatcgaacaagcagaagaaagaacttcagacacagaatacaaggctttcgaattaacccaatccatcaaagacaaagaaagaagaattttaaaaaatgaacaaagcctgcaagaagttagggactaygttaaatgtccaaacctaagaataattagtgttcccaaagaagaagagaaatccaaaagtttggaaacatagttgagagaataattgaggaaaccttccct

SEQ ID NO: 903159 - DNA, 592 bp, Homo sapiens
tgttttcttagcattgtacatttgtttggaagtgggtttttttttacatctctactgatgtttctgtattttctgatctttagagaaagtggcctatgtttgcacaatattaggtttggaattggatgctgcataaatttattcaacacattgatctgacaaaataaaagtgacaaccacagtttatctaatttcagtttgttagatcaaggttttcttgcctgtaagacattaagagtaagaaaatagaaagcttgctctgcaaagggcatttcctgagtcatgtttttctttttttgaaaaaacaccctatgtaaagtaacttaagaatccttcccaaataattcttgaaaatgacttgttcccctaaattgtcctgtgtgcttcctttgccattagtttttgggacctcaggcaaaaatagcaatttctcatggaagacagaaagtagatgcaaggaaaaagtcatttcatagtcagggaatccatttttatgccaagatatctggtgttttgcttgttttackcgttgggaggagcctaaaagtagctgtgatatgtcatttctttattcatcaatgtcttattttgt

SEQ ID NO: 903160 - DNA, 644 bp, Homo sapiens
ctggcagagctggggttccaattagtgtcagtcccagcaatgtgccagcagacaggggaagtgttgaaggtcatctgagcctgtagggtaaaaataagtataaatctcagtggatattttaagggaagctttgtctttgctgctgcacaaacacaagagctgtgtgtacaaaaataacagggattgtgagtttacaaagtcacatgtcatgcaaagcaaaagcaaagaggcagactcacatccaaggtggacagtctggtgggtgcataaggccatttcaggatacacacagagaaaacacgagaataagcagtgtgaggttttgggaaagagccaattttagttaaaaaatggaggaaaaactggacattgcacaatgttagacattagccctaccattcttgcgagcctcttgtgcaggaggatgattagtgtctccgtcctgctcaatgtggactccaagttctttcccacccctaagaaacacccatcaggatgagctgagagatcagccagarggagcagagcttccttggctgagataaattgttctagggtcaggagagtgaaaggggagaagaaaaacacatacaggggttgaactcctccagctgaagaagaggcatagaggagacttaccactg

SEQ ID NO: 903161 - DNA, 605 bp, Homo sapiens
aaatttgggagtccagaagtggaatgttataatattygtgttgccgaaaatttttatgttgaaatcctaatctctaaggttataatatttggaggtggggcttttgagaggttagttggtcctgagggtaaagacttcagaatggaataactgccttgtaaaagaggtccaagagagatctgtcactgctttcatcacttatgaggaagaagcccctcaccagacatcaaatctgccagggccatgatgttagtgttctcagcttccaaaactctgaaaaattaaattatgttgtttataaaccacccaatttatgatatttttgttatagtagcccaaatagactgtattagtccattctcacactgctaataaagatatacctgagactgggtaatttataagaaaagaggtttaattgacttgcagttcagcatggctggcgagggctcaggaaacttacaatcatggcagaagagtaagcaaacaggtccttcacatggtggcagcaaggagaaatgctgagcaaaaggggaaaaagtcccttataaaaccatcagatctagtgaaaactcactcactgttatgagaacagtataagacta

SEQ ID NO: 903162 - DNA, 667 bp, Homo sapiens
ggtgtcacataaaatttaaaaacatgcaaaacttattacttaaatattacatataagttcagcagaataccacaaaataggagtggtttgtatttctggacagtcaagttagctggaaaaatagatttgatgttagaattttaaactgatttcacagtttttgttcatatacatatatgctaaatgtctaatgtctgttttaaattaaaaaatgatcatgacaaagtttatactattgttttaaaaatttttgaatgttaaatatttatgttaattgatttaaaataaacaaaaaaattgacttgtgatttatattttcttaatttttaaaattttgaacaggtctgcctttccttcacatataaaaactgataacttggcttagtcaaaataattgtagcttttggctggacatggtagctcatgcctgtaatcccatcactttgggaggtcaagctgggtgatcacctgaggtcaggagtttgagaccagcctgaccaacatggtgaaaccccatctctgctaaaaatacaaaacttagtcaggcgtgatggtgagcrcctgtaatccaaactacttgggaggctgaggcaagagaattgcttaaactcaggaggcagaggttgcagtgatctgagatcacgccattgcactctagcctagagac

SEQ ID NO: 903163 - DNA, 667 bp, Homo sapiens
ggtgtcacataaaatttaaaaacatgcaaaacttattacttaaatattacatataagttcagcagaataccacaaaataggagtggtttgtatttctggacagtcaagttagctggaaaaatagatttgatgttagaattttaaactgatttcacagtttttgttcatatacatatatgctaaatgtctaatgtctgttttaaattaaaaaatgatcatgacaaagtttatactattgttttaaaaatttttgaatgttaaatatttatgttaattgatttaaaataaacaaaaaaattgacttgtgatttatattttcttaatttttaaaattttgaacaggtctgcctttccttcacatataaaaactgataacttggcttagtcaaaataattgtagcttttggctggacatggtagctcatgcctgtaatcccatcactttgggaggtcaagctgggtgatcacctgaggtcaggagtttgagaccagcctgaccaacatggtgaaaccccatctctgctaaaaatacaaaacttagtcaggcgtgatggtgagcacctgtaatccaaactacttgggaggctgaggcaagagaattgcttaaacycaggaggcagaggttgcagtgatctgagatcacgccattgcactctagcctagagac

SEQ ID NO: 903164 - DNA, 554 bp, Homo sapiens
ccttgtttaataaatggtgctgggagaactgactagccatatgcagaaaactgaaactggaccccttccttacaccttatacaaaaattaactcaaggtggattaaagacttaaatgtaaaatcaaaaccataaaaaccctagaagaaaacctaggcaataccattcaggacataggtatgggcaaagatttcatgacaaaaatgccaaaagcacttgcaacaaaaactaacattgacaaattggaattaaactaaagagcttctgcacagtcaatgaaactatcatcagagtgaacaggcaacctacagaatgggagaaaatttctgcaatctaaccatctgacaaaggtccaatatccagaatctacaaggaacttaaacaaatttacaagaatgaaacaaaaaaccccatcaaaaagtgggcaaaggacatgaacagacacttctcraaagaagacatctatgctaccaagaaacatatgaaaaaaagttcaacatcacagaaatacctcaggtctccagtgttgtgaggcacgactaactccctagtagt

SEQ ID NO: 903165 - DNA, 554 bp, Homo sapiens
ccttgtttaataaatggtgctgggagaactgactagccatatgcagaaaactgaaactggaccccttccttacaccttatacaaaaattaactcaaggtggattaaagacttaaatgtaaaatcaaaaccataaaaaccctagaagaaaacctaggcaataccattcaggacataggtatgggcaaagatttcatgacaaaaatgccaaaagcacttgcaacaaaaactaacattgacaaattggaattaaactaaagagcttctgcacagtcaatgaaactatcatcagagtgaacaggcaacctacagaatgggagaaaatttctgcaatctaaccatctgacaaaggtccaatatccagaatctacaaggaacttaaacaaatttacaagaatgaaacaaaaaaccccatcaaaaagtgggcaaaggacatgaacagacacttctcaaaagaagacatytatgctaccaagaaacatatgaaaaaaagttcaacatcacagaaatacctcaggtctccagtgttgtgaggcacgactaactccctagtagt

SEQ ID NO: 903166 - DNA, 614 bp, Homo sapiens
gagattacaaaactctgctcaaagaaatgaaagatgacataaacaaatggagaaacattcgatgctcatgggtaggaagmatcaatatcattaaaatggtcatactgcccaaagcaatttatagagttaatgctattcctgttaaactacctatgacattcttcacagaactagaaaaattgactttaaggttcacaaagaaccaaaaaagagccagaatagccaaaacagtcccaaccaaaaagaacaaagctgtgggcatcatgttcccaatttccaactatactactacagggctacataaccaaacagcatggtactgttgcaaaaacagacacatagaccaatggaacagaatagacagcccggaaataaagctgcacaactacaaccatctgatcttcaacaaagctgaccaaaacaagcaatggggaaaagagtccctatgcaataaatggtgctggagtaattggatagccatatgcagaagattgaaactggacacattccttacaccatataccaaaatcaactaaagatagattaaatacttaaagatgaaacctaaaaagtgtaaaattcctggaagacaacctaagcaaaatgtaagactt

SEQ ID NO: 903167 - DNA, 584 bp, Homo sapiens
ttaatataaaacaaaattaacagggccgggcgtggtggctcacacccgtaatcccagcactttgggaggccaaggcgggcrgatcacgaggtcaggagattgagaccattctggttaacacagtgaagccctgtccctactaaaaatacaaaaaaattagccgggcttggtgcaggtgcctgtagtcctagctactggggaggctgaggcaggagaatggagtgaacctgggaggtggaggttgcagtgagctgagattgcgccactgcactacagcctgggcgacagagcgagagtccatctcaaaaaaaaaaaaaaaaaaaaaaaaagaaaagaaaaaaaattaacagatctctcatatatgaaatacgtaatatttctccccaaacccccaatatcatattgctttatggtgtcaggctcagcattttgtcatctaaatcaggtttaggtgcaaatgaggatccttagatgcagttctacctccaaacacccaatatttaatgatgtaacagtaatagtaaaattacagtatacaagctagttaaaaagtggggaacatatggcacataacaaccactgac

SEQ ID NO: 903168 - DNA, 519 bp, Homo sapiens
atctgatgacttgtttcttaaagttttatattttccacttaagtttgtaattcattttgaattaatttttgtataagataygagatttaggttcagggttatacttttgcctagggatgtccaattatttcccgaacaatttgttgaaagagctatttttttctccattgaaattgctttggtacttttatcaaaaattagttaggcatattgtgtgcacttctttctgggtagcctcttctgttacattcatttttgtctatcctttcaccaacctcacatagacttcattactgtagctatataataagtcacaaaattcgatagaatcattcctcccacttcattcttctgtttaaaattgttgtagctcctctaattttttgcctgttcatataaattttgaaataatcttctttgtagaaaaatgtcactgatattttgataggaattcatttaaccatatatcaatttagggaaatttgacatctttcttatgttgagttttctaatccatga

SEQ ID NO: 903169 - DNA, 527 bp, Homo sapiens
aactaaagataaaacatttatcttcacctgactagaatgacagttgctgaataatagccattaatttggatactgagcttaaagaagaaataacaccaatccacctgtattagacattgtttgctaattctcagtatcatccctatccttcaaatctctccccaaaactgcaggggaagaaagctaaaggccccatttccctaatcccctgtcagtagggccgtgagaaacactcatataagtttgggaggtaggagatgagaaggagtattctgcgacagctgtgggcaagtgtgagggcatctgcaggcaagcagcagatgaagggtattttggacaggaattccacctgaggagtcccacattagtattctatgacttgagatcattagtagaggctccctgaggctttctgggatccttcagaaaatgacccaccctcgtactgcaggcagctgaggtcactggcaactacttttctgctctatttccatttctcratttcctaaaagtgcctttctcagccc

SEQ ID NO: 903170 - DNA, 659 bp, Homo sapiens
gacaagaggaaggcagaaaggcaaaatgaaaaggatttgcagttatcaaaatatagctggctcaagtagcctccagggcctctaggacagattgatcaagttgacggtgactcactaatgctcctgcttctctgtcttctaacttggtctctgcattctccatcctccacgcgcaatccaaaataataaactaaatgaaaatgattactttgaaagtgagacgtgaccattatggaaagttccagatcagtgaaaaacagaataatggaatcataatgtgaaactcttgagaaacataattttctaaaagagaagatgacaaatatatatatatgtgtgtgtatatatatatatatatatatatatatatatatatatttctgaacaagtgaatgttggggaaagtacactactgatgttaattatagatttattttggggataggaaagtcctcttttttaaaatatttactctctgtcactacttcaggactttcatgactcagcatatttgcctaaactgtttccttagactgctgtgcattcctttatcatgrtattgaacaccctgcatggcagttgtatatttgcctaccaacctttgcttctaggtgatgactgccttcattataaagatgtgtttcatttttataccctta

SEQ ID NO: 903171 - DNA, 445 bp, Homo sapiens
cacatttgaagctattgggatgaaacgaacrtattttgcatgtgagaaggacataaatttgtggggccatggatggaatgctatgggccgattgtttctgtcctctcctaaattcctgttgaaacttaatccccattgcaacagtattaagagttggggccgttcaagaggtgattaggccatgagggcttcttcctcaggaaaggaaaagtgcttcataaaagggctggagaaaactagctaggcttcttttttttttttttttcctttttgtcccttctatccttctgccatgtaaagactcagtattcaaggcattatcttggaagcagacaccgggccttcactagatatctaacatgctggtgccttaatcttgggctttccagcctttagaactgtgaaaaataaatttccatggtttataagcagaaagggactgaga

SEQ ID NO: 903172 - DNA, 637 bp, Homo sapiens
gagaccagcctgggcaacacggcaaaaccctgtctctagtaaaaatacaaaaaattagccagatgtggtggtagcacacctgcagtctcaggtacttgggaggctgaggtgggaggatcacctgagcctgggagkctgaggctgcagtgagttttgattatgccactgcattccagcctggatgacagagtgagaccctgtcttaaaaacaaacaaacaaacaaacaaaactcctttgtctatttgcacataaacaaaatagataagcccttgtggcttcaactaaacttcatgtaatccacgaaaaccattacttacagcctcaatcccgaccttgctgcaaaggccgtcttgtctcaggatgatagctgcaaactgccaaatttgttgatgcttctggtgaactagtcctctgttctctacttggttcctcagacattatagacattcctactgactgagattttgttactgtcactctcttatattacagttcactgttatatcaccctgcatcctgccactctactatctctaccagaagaaggggaatttcacagttcttttccttttcctaacctttgttaggaaactttctgttcctcactaagatttattagagactctcattgagaac

SEQ ID NO: 903173 - DNA, 557 bp, Homo sapiens
cacacacacacacacacacacacacacacacactggtgcccccaaaacaatcctctttagcctctgccctccggaggtgargcccgatgtctctgcacaggcagcagtgatcacaggggccagcacgacctgacagattcatatgggaagccaccagaagcagcaggagtagacacatggctaaatttgtgaaaaaccaggaaatgctaacggaaatagagggagatgaagaggaagaactgcagaaaaattaaggattgaatttagggattctgtagtgatgaaaccggttccagtcagctagacttaacaattcataggcccagggcaaaagtaaaaatggaggcccatacttcatatgtccaaatattataaaaatagaactcaagccaaaatgctgtcaaataaaatatgttctatcctactatctcaataaatatgcattcataacaacaaaattttaaaaagtatgtgaagctatatctagaatatgactaaggatgactgaatttaattgttattgcacaaatctgggtgttctgtagatggtggctcaa

SEQ ID NO: 903174 - DNA, 652 bp, Homo sapiens
aatatatataggtaaagtaataaggtgtttccagaattccttagtaagtytatcctctaagagaaaagcaataaaaccaacacacgaaattagttgtatgtcatgtttccttaaagtaagtatttttaagtagagaaaaaaaattagtaaaggattttgttactgctagatctggatttgaatcctagttgcaagttatgtagcaatgggtaagattctgatgtcacttttctataaaaacttcataggattttttgttgttgttcaggattaaataacatatttcatgtccatagcaaagggtctggctcagaaaaaaaatggtagataattgttttcaaagaaattaattacctcattaattgtatttacatatctgaagaaagactaggttaactaatgaaaagattgaaagagaatctcagtgtatattagtaattggctatcattgacttaaggagataattccctgattcctttattgtggggattttgagttgattgacagaactatcccaactcttgatgattccatcgggtaggttaaggatgctagccctttatgtcccattaatttcattgatctggctccctgtttgccaagtaaacctctactattatttttgtttgtttgttttgcctgtttatgatc

SEQ ID NO: 903175 - DNA, 633 bp, Homo sapiens
gtaataatccacagaagaaactcgggaaacacattgccccaactaaatctataaatacagaaagcctctactaagtgaaaacattgtaattaaattttttgtataacaataactaaaattcagaaggaaatctcaaagtgaaaaagctgggtaagccaatgacatgaacatcaaaattacataaatattaataaacaaataccgaggaaacactatcccaaatggaacctgaagatacctttagtcacctattaaaaaagcaaatggattaagaaatattgtattcattgccagtgaaagtaaggaatccatttatttatttatagtgatcttataaattggcatacctcttttggacagtaattaagcataataatttatagactgattcggtaattttattctctagaatttctaattattcaacaaacaatatatgcacagaacacttatctacgatgccaaaaggctgaaaatagcataaatgtccaagattaaaggaaaagatttaataaattcaacctagaaaaatatgtaatcattaaaatgataattatgaaggatatatagaaatgttaaaagtaccacaatcgatgaaaatagcaacatatrtatgtaactatatatatatgt

SEQ ID NO: 903176 - DNA, 606 bp, Homo sapiens
caatcagaactacattcctgatccaagaacctgcgtggtccytgggccagcacaacatgatgccaataaagtcagaagctggtctttctgatgctgcaggggtcaagatttattttgttgtcatttgtttgttttttgagacagagtctcactttgttgcccaggctggtcttggactcctggcctaaagcaatcctcccacctcagcctcccagtgtagggattataggcatgaaccactgtgcccaactggtttcaagaactttaataggactttgcattgcaagatttcagtttataaggtctggcctgcctttgccagaatatactaggcgtactgaaccttttcaccaaagaaacactaaaatatttacattcgacaattatcatctgtggtcatggtgatgttagcccctagttttgaggtaatggcctcccccagcttcagaacatgctctaagcctgtttggaacatatctcaggctagggacagcttgagactaagtcagcccaggcaatacagtgatgcttctcatctgtttggtcagtgctgagtggagacagagtggatcagacgatcctaggagaccccttcctcatactgct

SEQ ID NO: 903177 - DNA, 629 bp, Homo sapiens
atcatgagaacaggatgggggaaactgtgccccacgattcaattatctccacctggtccttcccatgacacatggggattatgggacctacaattcacgatgagatagccataacatatcaatgatgatgatgaaattgacccagcatcctttgttggagtcctcattgtacaagaggtactgtgatgtgccctgggtatgcattatttcattggtgacagcctcacgacaaccctttggaggcagcatcttgttattccctcattttttcccagaggtgccatctgaagcttggaaaggttaagtagcttgccccaattacggagtggagacaggaaggcttcctggagaaatggcttttaagggatgggaagatggcaggaaggccacagtggagatggaggagagggcagagggcaggtgggtgctaagagtagcaggcagtccagacagagtgaggctggtgatgcggggaggggccagcagggaatgttgcagcagatcctggaggtgatagggagccatcgaatgtttcagagcacaaaagtaatggaaaaatgcgttagggacagtgttgtagggtggggagaaggagctrgaatatagcagtgccaggagggtggtctagc

SEQ ID NO: 903178 - DNA, 669 bp, Homo sapiens
agagcagagatttcatctaaattgagctgctctcaccttttagggccatgttacttgaagtagttaatatgtttatgaataatgtcttgtgacagccttttaagtcacattccaggccccctrtatcacctcgataatcacacacctgttggtgtgactcacgcagcatgcaccctctccgaggctgtcgcaggcttctctttaaacagcctccatggccatctgcctctgtgctgatatgatggtgccataaaacacggtggtgtctggagctcctgctcccctccccacctaccatccagcccagtctctgcagcttccaggactgtctggcaggtgctccaccttcacacagttggcccaacctgtggctgaggagggcaagggctcggctggagtcagtgaagtcagtgccccctgccttggcttcagtgcctggtttagaagttttattacgcagcaatggtgtggctcaggggtttgggaaagggatggtaaaggatgcctcagggtctcatgctgagcctgggtgtctgcccacttcggccaaagtccagccctgctgggtaatagctggatattattagcagttgcaggaggctgtgtaaagaaggaatagtgaaataaaactgaaggctccatgcacatcctggtgaacaagtgtcttcc

SEQ ID NO: 903179 - DNA, 490 bp, Homo sapiens
tcatcatcaaaataacaatttgggcttatacacagcagattgaatatatatgcatttacctcttcttcctcctgaagcaatgagaaaatggcattaaatgaataaaaataaacattgtatgagagtttttttttttgttgagactgagtctcaccctgtcacccaggctggagtgcagtggtgtgatcttggcttactgcaacctctgcctcctgggttcaagcgattcttctgcctcagcctcccaagtagctgggactacaggtgtatgccaccacgccaggctaatttttgtatttttagtagagatggggttttgccttgttggccaggctggtcttgaacttctgacctcaggtgatccacccacctyggcctcctaaagtgctgggattacaggctggagccaccgcgtccggccagattttttgttttgttttgagatggagtctcactctatagcccaggctggagtgcaacggcactgtta

SEQ ID NO: 903180 - DNA, 490 bp, Homo sapiens
tcatcatcaaaataacaatttgggcttatacacagcagattgaatatatatgcatttacctcttcttcctcctgaagcaatgagaaaatggcattaaatgaataaaaataaacattgtatgagagtttttttttttgttgagactgagtctcaccctgtcacccaggctggagtgcagtggtgtgatcttggcttactgcaacctctgcctcctgggttcaagcgattcttctgcctcagcctcccaagtagctgggactacaggtgtatgccaccacgccaggctaatttttgtatttttagtagagatggggttttgccttgttggccaggctggtcttgaacttctgacctcaggtgatccacccacctcggcctcctaaagtgctgggattacaggctggagccaccgcgyccggccagattttttgttttgttttgagatggagtctcactctatagcccaggctggagtgcaacggcactgtta

SEQ ID NO: 903181 - DNA, 608 bp, Homo sapiens
ataaagaaaaagacccaatggtatactgaatttaagagccccatcctacatgcaaggacacccataggctcaaaatgaatggatggaaaaaaaatctaccatgcgaaaggagaacataaaaaagcagaggtggcaatcctaatttcagacaaaacacactttgaaccaacaaaactcaacaaacacaaggaaggtcattacataatggtaaaaggttgaattaaacaaaaagacctaattatcctaaatatacatgcacccaacacaggagcacatagatttgtaaaacaagttcttagagacctacaaagagacttagatttctacaaaataatagtggaagacttcaacaccctactaacagtattagacagatcattaaggaagaaaattaatgaagatattcagaacttgaactcaatacttgatcaaatggacctaatagacttctacagaacgctctatccaaaaatgacaaaatrtactttcttctcattaccacatgacacatactgtaaaatggaacacacaatcagacataaaccaatcttcagcaaatttaaaaaaaaaacactgaaatcatacaaacgacactctcagacaacagt

SEQ ID NO: 903182 - DNA, 616 bp, Homo sapiens
ccaacgagcatatgtaaaaaccttaacatccactcattagataaatgcaaatcaaaaccacagcaagataycatttcacacctgtcagaatggctattattaaaaaatcagaaagcaacagattttggcaatgtggtggagaaaagggaacacttacacactgctggtgggtgtgtaaattagttcagctattgtggaacgcagtgtagtgattcctcagagaactaaaaacacaattaccatttgacccaacaccattactggatatatattcaaaagaaaacaaattgttctaccataaagatacatgcacacatatgtccattgcagcactattcaaaataacaaatacatggatcaacctaaaggcccatcaacagtatattggataaggaaaatgtggtacatatacaccacggaatatatgcagccataaaaagaatggaatcatgtcctttgcagcaagatggatggaactggagaccattattcttagcaaactaatgcgggaacagaaaaccaaagactgcatgttctcacttataagtgggagctaaataaggagaacacgtggacagaaacaaccaacaatggggcctactagaaggtggaaggc

SEQ ID NO: 903183 - DNA, 638 bp, Homo sapiens
  misc_feature 114: n = A,T,C or G
acgtactcaaattgcccaaatgccagctgtttaaacagccaaagaacgaagtcatcattgatactttagtaaaggtcatcgaaggcttctttgcattttacagcttttactacnttagggagttaaaggagtacctgcccaggcttgtgcatgctaatgtgacaattttctttttgtagttgaaccgtattttgtgggaagatactttgaggctctgtaaatatccagttactcccagaacccactagatttagcatttcatggatgacttgtgtttgaacaattattactatgatggttgccagatgattattttcttctcttctttgctgtacctggagaagtaaaaccaataaataactgagaagggaaagctcatgattctggtgctccaattccccaagattaggccagtggtagacatttcaagctgacttcttgtcttttttatttgtcttcgttactctgtcagcacttttttagtttcaggaacaagatgttctaagctaatgttgtattttctctgytccagccatggaatgagtgatttttcttagaagcagaggtggagccactgaggaagcacaggcgagccctccccagcacgtgctcactggtccccaacagaacaaccgctg

SEQ ID NO: 903184 - DNA, 533 bp, Homo sapiens
tggcagaggaatatgagtggggggggyctcatctctatataaaaagtatgagcgtatttgtgctcttttgtacattcatttgtatagtcactgggaaaaaaatgagaaaaacccaaacacggctttctatatgcctctgtgctttgttttcaacactgagctgtgagaaatctagttactaaaatgaaactttgaaaaaatacaacaatttgggacaatggggacacttagctgatgcagcacaggtgaacagttcttcttttgtgcccaagaggacacaattcccaggaggctgcatgtggtctcctaggacaagcctgtgggcacccactggctgcagttccacctttccttccctggactctcaggaagacatgagttctggattcagctgaactgagctcaagttcaagttctgtgactcactggctctgtaattctgggtaagtctcttgctctccttgagtctcatatcctccttggtaaaatggagaggtagagctattgttagattttgaaggcaaggcaagggt

SEQ ID NO: 903185 - DNA, 646 bp, Homo sapiens
gtcctagtcagagcaatcagacaagagaaagaaataaatggcatccaaatcagtaaagaaaaagtcaaactattgctgtttgctgatgatgtgatcgtatacctacaaaaccctaaagactccatcaaaaagctcctagaactaatatacgagttcagcaaagtttcaggatacaaaattaatgtacacaaatcagtagctctgctatacaccaacaaggaccaagctgagaatcaaatcagtaactcaacaccctttacgttagctgcaaaaaaaattaaatacttaggaatatatctaaccaaggaggtgaaagactgctacaaggaaaactccaaaacactgctgaaagaaaacatagaagacacaaacaaatggaaacacatcccatgctcctggaggggtaaaatcaatattgtgaaaatgaccatattgccaaaagcaagctacaaattcaatgcaattcccaccaaatattcccatcattcttcacagaactagaaaaaacaatcctaaaaytcatatggaaccaaaaaagagcctgcatagccaaagcaagactaagcaaaaagaacacatctggaagcatcacattacctgacttcaaactatactataaggccatagtcaccaaaatatcatggtg

SEQ ID NO: 903186 - DNA, 545 bp, Homo sapiens
gctgggccagactctgcctgccacagagctcaggcagagatgactgcaatatcacagagcaggtttcaaaggtttgatttattagagtgaaattgatctatctgaggagctcagagtccagtataaaggttttcagtgattcctataccaccatttcaataaaagctttccagttcttaaaagcaaaaacactcaaggcaggtgaagttgcactttttttttttttttaatatcgatggctgaggactcatgcccttcctgaagaatgaacacttaaatctttcacactctcaatgagaactagcaaagcaaagcagtttcctctaggtaagaatttagattgtatttttttcttctgcaagatccagagtttcagaatcttctaccacccacatactcatccatccatccaccttaatgtgccttgtcttcattgtctaatatgagccagactctgttaattgstttattccactttacagatgaagaaatgtagtctgagaattcttaaataacttgttcaggtcccatatttaataagtggt

SEQ ID NO: 903187 - DNA, 672 bp, Homo sapiens
ggttcatgccattctcctgcctcagccttgagagttttttttttatatatattcttttctacataatggaatctttatacacaaataaatcttgaaaaccatagcttaactcttaagtttatttgtcttcattcttgaagacatagaaatcttcatcccactcttgaacctgtctcacatctcttcctaaaggatcctgtactatccaagtgtgtgatgtactactctctctaactagcatgcccttccttccttctctagcaaagttttattctttcttcaaggcatctcctttgaaataattaactgcatctgctggttttcaacccaatacttctcttttatcaggcatcctagtatattgttatgatttatgcttacattattctttttcactagaattaaagttcttgaggaacagaatgcaaagcgtttttgttgttgaatctctcatatccagcaaagtgcctgacacatgggtagtgttaaaaatatttttgtcacacctgtagtcccagctacttgggaggctgaggcatgagaatcgtttgaacccaggaggcagaggttgccgtgagccgagatcgcaccagtgtattccagcctgggtgacagagcgagactccatctcaaaaatrtgtatatatatttttgttagatgatcaaacgtcc

SEQ ID NO: 903188 - DNA, 419 bp, Homo sapiens
ttaatattttcaataaatattagatatatggaaaagttgcaaaaattatgcagactgttcttgcmtacttctgaccttgcttctccttatgttaacatgttatgaaatcataggacaatcaatgaaggctaggaagtgaacattggttcaatatcattcactaatcttcagaccactttgattttcacattttctttctctctctttctttcttttctttctttccttctttctttctttctttctttctttcttctttctttctttctctttctttctttcttttttctttcttttctttcctttctctctctctttcctttctttctttctttcttttcttttcttttcctttctttttactgatatactctttttctgttccaggatcttatccaggatcccacattgcctttact

SEQ ID NO: 903189 - DNA, 553 bp, Homo sapiens
aggcactaaaatggcactactttgggctcgagaaacacagagtgaacacaacacacaaaagttgctatcatggagtttacaagctagtgtcgggaggcaatcaacaaaaagaagaaaaaaatttagtgttatggaaaaataaagcaggaaaggtgaatggaaagtgctggggtggagagcaattttaaattgggaggccaagtaaagactcaataaacagatgtcacttacaccattacctgacaaaggtgaggggatgtaccatgtggagatctagggaaaagacagttcgaggcaagagagaacaagttcaaggggcaacggtgtggccagggcatggcgcagaatggactaacggaaggataccaagaatgaggtcagagaggcctgggctagattgtgcaggaccttgccactataaagagttctgctttcactmtgagtgacatgggaagccactgaaaggttctgagcagtggaatgacatgaaatgacattttaaaagtctcacagtggccactgtgttaataatggggaggggggagtggaagca

SEQ ID NO: 903190 - DNA, 576 bp, Homo sapiens
catgatagtgaatgagttctcacaagacctgatgattttatacagagcttttccctcttttgctcagcacttttccttgctgccgccatrtgaagaaagacatgtttgcttcacctttcaccatgattataagtttcctgaggcttccccagccatactgaacagtgagacaattaaacttctttcctttataaattacctagcttggcccggtgtgggcagatcacaaggtgaggagattgagaccatccgggctaacatggtgaaaccccatctctactaaaaatacagaaaattagccaggcatggtgatgggcacctatagtcccagctactcgggaggctgaggcaggagaatggtgtgaacatgggaggcggagcttgcagtgagccaagatggcgccactgcactccagcctgggtgacagagtgagactccatctcaaaaaaaaaaaaaaaaattgcctagtcttaggtatgtctttattagcagtgtaagaatggactaatacacggaacaagatcctgtctaaaaaaatgtttaaacataataataaagccaagaaaaagagtctg

SEQ ID NO: 903191 - DNA, 628 bp, Homo sapiens
tggaggtccccaaaatcttttacttatttatgtatttatcatttattatacttcaagttctgggataccagtgcagaatgtgcaggtttgttacataggtatacatatgccatggtggtttgctgcacccatcaacccgccatctatattaggtatttctcctaatgttatccctacccttgccccctcccctgcaacagaccctggtgtctgatgttcccctccctgtgttaatgtgttctcattgttcaactcccatttatgagtgagaatatgtggtgtttggttttctgttcctgtgttagttttctgagaatgatgatttccagcttcatccatgtccctgcaaaggacatgaactcatccattttcatggctgcatagtatttcatgatgtatatgtgccacattttctttatccagtcagtcattgatgggcatttgggttggtttcaagtctttgctattgtgttggtttcaagtctttgctattgtgaatagtgctgaaataaacatacrtatgcatgcgtctttatagtataattatttataatcctttgggtgtaaacccagtaatgggattgctgggtcaaatggtatttctggttctagatccttgagggatcac

SEQ ID NO: 903192 - DNA, 618 bp, Homo sapiens
agcagtatggccattttcccaatattgattcttcctatccatgrgcatcaaaggtttttccatctgtttgtgtcctctcttatttccttgagcagtggtttgtagatctctttgaagaggtccttcacatcccttgtaagttgtattccaaggtatcttattctctttgtagcaattgtgaatgagcattcactcatgatttggctctctgtttgtctattattgttatatagtaatgcttgtgatttttgcgcattgatattgtacctgagactttgctgaagttgcttattagtttaaggagttttggggctaagatgatggggttttctaaatatatagtcacgtcatttgcaaacagagacaatttgactttatctcttcctatttgaatatcctttatttctttatcttgcctgattgccctggccagaactttcaatactttgttgaataggagtggtgagagagggcatcattatcttgtgccatttttcaagggaatgcttccagattttgcccattcagtatgatatcggctgtgggtttatcttaaatagctcttattattttgagatacgttccatcaatacctagtttattgagtgtttttaacat

SEQ ID NO: 903193 - DNA, 622 bp, Homo sapiens
ttcttctagcttttgaatttgtttgctcttgcttctctagttcttttaattgtgaagttaggatgctgattttagatctttcctgctttctcatgtgggmatttagtgctataaatttctctctaaacacagctttagctatgtcccagagattctggtacatcatgtattttttctcattggtttcaaagaactcattcatttctgtcttaatttcattatttgtccagtagtcattcaggagcaggttgttcagtttccatatagttgtgtggttttgagtgagtttcttaatcctgagttctaatttgattgcactgtggtctgagagactgtttgttatgatttccattcttttgcatttggtaaggagtgttttacttccaattctgtggtcaattttagaataagtgctgtgtggtgttgagaagaatgttgatttggagtggagagttctgtagatgtctattaggtccacttggtccagagctgacttcaagtcctgaatatccttgttaatattctgtctcattgatctgtctaatattgacagtgaggtgttaaagtctctcactattattgtgtgggagtctaagtctctttgaatcagggtgctccagta

SEQ ID NO: 903194 - DNA, 710 bp, Homo sapiens
tgataatgacactccctgtctcctgttgctgggacatcagtcacgacctcttcgctgcctgttccctctcttgttgctagactcaaggtcaaactaattaaagctaaacttctacccaattctaagataattgggatgcacagcaaactctccctgacatctacagatggatgggtgacagttactcagccagggagaggctccctggaactgcagacttgtcagaaataaaacttgactactccagcaagcaacaaatgcatgctggcctgtatatcacaacattattattcctgaaatattctgacatttaacacaattacctatgttacgttatttgacatttaattttctattttctcttcagggaactaaagttgccaggacaaattataaaatacaaggtaactaaagacatatagtttttacacgcttgcttactcaaaggaaaccttgtaactaaaaagttacaaatgcatttattttgctcagtaaaataggtacaaggcacttgtttacattatacctaaccctcaaaaaaccttttaaggtagggattattgagggtccctttacacagaaagaaattggagacggaggttaaataacttgcytaaggccacacagctaagtagtagcagacccaggacctgagtgcatgctcttaataatttccagtgcctctcaaatggtgtgaaactaacgataga

SEQ ID NO: 903195 - DNA, 563 bp, Homo sapiens
tgccggattcggtttgccagtattttattgaggatattttcatcgatgttcatcagggatattggtctaaaattctctttttttgttgtgtctctgcccggctttggtatcaggatgatgctgacctcataaaatgagtttgggaggatcccctatttttctattgattggaatagtttcagaaggaatggtaccagctcctccttgtacctctggtagaattcggctatgaatccatctggtcccggacttttttttgttggtaggctactaattattgcctcaatttcagagcctgttattagtctattcagggattcaacttcttcctggtttagtcttgggaggctgtatgtgtccaggaatttatccatttcttctagattctctagtttctttgcatagaggtgtttatagtattttctgatggtagtttgcatttctgtgggatcggtgatactgaccaaggtaatttatagattcaatgccatccccatcaarctaccaatgactttcttcactgaattggaaaaaactactttaaagttcatttggaaccaaaa

SEQ ID NO: 903196 - DNA, 578 bp, Homo sapiens
gttaactcaatttatagtatttaaatcattaatggctaattcattatgagtgttatgattacgcttccttttgaccatttttctctctgaagttagtaactgcctcatgtttcatatgctgttttctacatacctgaaaataagttgttttaaatactccaccataaatgtaaatctcagtgtctatagacccacaggtaattgatctgtttcattagtatttttctgtatacactctcccttcctggcgccttatattctcctattccagttaggactggttatactctaggccttcagggatcttaattcactattctcagggaattcacttacttaagtattcactattgatatggtttggcagtgtccccaccaaatttcatcttgaattgtagctaccatcattcccacatgttgtgggagggaaccactgggagataattgaatcatgggggcgtgttyccccatacttttctcgtggtaatgaataagtctcaccagatctgatgattttataagtggttttcccttttgcttggctctcaatctctcttgtctgccgccatgtaagatgt

SEQ ID NO: 903197 - DNA, 641 bp, Homo sapiens
gtacatatagacacacagaagggaacaatagatactgggcctggagcagggtgggaagagggtgaggaytgaaaagctaccaatcaggtactatgcttattacctgggtgataaaataatccatacgcaaaatcccctcgacatgcaaattacctatataacaaacttgcatatgtacccctggaactaaaagaaaacaacaaaaatagagttaggtttgagtccaaatattaataatccagctggagaggcaaagtatcacgttcctgtctgtttttaggataaagacatttttcagcctgatggatgagaggtttcatctatgaatagcatgtggatcacagaaaggttctgacaaaaatgcccaaatgcaaatggtgatgtctgggtaaattaagatgaagatgaaggccaggcatggtggttcatgcctgtaatcccagcattttgtgaggccaaggtgggaggatcacttgaggccaggagttcaagaccagcctgggaaacacagcgaaaccccatctctactaaaaatacaaaaattagccaggtgtggtaacatgtgcttctagtctcagctactcaggaggctgaggcaggagaattgtttgtacccgggaggcagaggttgcagttagtca

SEQ ID NO: 903198 - DNA, 655 bp, Homo sapiens
gctgcacagctcacagctccaaaagagactccttccttctgcttgaagagaaaagaggaaagagtggggagaatttgtcctgcatcttggatacgagctgagccacagtggcatagggtatgggtcagcgtcataaggcctcctttccaggccttagctcctggatgacatatttagatgcatcctgcgcccagagggaactcactatcctgaagggaaggaccccttcctggcagcattcatcagctgctaattgaagaaactttgagccatgaataaccagcagccatcgtcaggtactatgtcaagggcagtgggtgaaaccctgagacttgtaggcttcaggtgagactcagcacatctccagctgtagtgtcaagaccgctgcttcttgagaaaagcagagagaaaagtaaaggggactttgtcttgcactgtaggtaccagcttggccactgagggtagaacaccaagcaaactcttggagcccccgattacagcacttagctcttggaggcatttctggacctgctctgtgcctgagaggagcccgtttccctgatgggtgagtcacaggccaagcagcattcgccacaagctgacttaaaagaccttagttcttaatagaayattggcaatagtttggcagtattcc

SEQ ID NO: 903199 - DNA, 635 bp, Homo sapiens
gtgtgagatggtatctcattgtggttttgatttgcatttctctaatgatcagtgatactgagattttttcataggcttgttggtagcataaatgtcttttaggaagtgactgttcatgtcctttgccccctttttaaaggaaatggtttttttttttttttttttgtaaatttgtttaagttccttgtagactctagatattagacttttgtcagctggacaaattgcaaaaattttctcccattctgtagattgtctgttcaatgtgatgatagcttctcttgctgtgcagaagctctttagtttaattagatcctgtttgtcaatttttgcttttgttgcaattgcttttagtgttttcatcttgaaatctttgcccatgcctatgtcttgaatggtattgcctagattttctttgagggtttgtatagttttgggttttacatttaagtatttaatccatcttgagttaatttttgtataagaaacaggcccagttttaattttctccttatggctagctagttctcccagcaccatttattaaatagggaatcctttacacattgcttgtaccttttttgataaaacactaaagwcacaattcatgaaagaaataattgaccagatgaatt

SEQ ID NO: 903200 - DNA, 568 bp, Homo sapiens
aaatattgggtttcaatttgttgggagggtattgtatgaattaattcaagtattcaacaaatttgtactgggtatctaccatgtgctataaaatatctagaaactgtgctggtagctgtatacacacacacayacacacacacacacacacaaaatccttaatgtcacgaagcttacattctcacgaacataggcagaatgtaaataaccatttcatccaaatacatagaattatttctaagttgtctaatatcctagaaatctatttatccaattcaagcaagacattgtataggtgaacaaaataaaatgcaatctcttaaagagagaaaaaaacacagaactgacatttcccaaacccgagcttaagagagaatacacaaaccaaaccagaagattctggttttttttttccagttttccagcctttaactttaactccccaacattattctccaaagattagtgatgaggcaacacaagctaatgtgaatttattacatcctggtctctatttcaagttgttttaaagattatcatacattttctctttcttttattctttgag

SEQ ID NO: 903201 - DNA, 602 bp, Homo sapiens
tggctatgtgggctcttatttgtttccatatgaattttaaaatagtgtttactactcctatgaagaatctcagtggtaattttataggaatagcattaaatctattaattgctttggacagtatagccatttttacgatatagattcttcctatccatgagcatgagatgtttttccatttgtttgtgtcatctctgatttgagcagtgttttttagttctcattgtagagatctatcacctccatagttacctgtattcgtaggttttttattctttttgtggcaattgtgaatgggatagcatttctgatttggctcttggcttgactgttgtttgtgtataggaatggtactaattttggcacattggttgtgtatccttagactttgctgaatttgtttatcagcttcaggagcttttggaccaagactatggggttttctagatataggatcatgtcgtctccaaacagagatagttygatttcctctcttcctatttggatgtactttcttttttctcttgcttgatttgccctggccaggacatccaatactatacctaataggagtggtgagagagggcatccctgtctcatgc

SEQ ID NO: 903202 - DNA, 599 bp, Homo sapiens
gtttaaaactcagaatgcaaatctgttggaagtcatgcttgtcagaaagttccaaagtcccaaattcccacttttagattattatttctcttttttttattatactttaaagttttagggtacatgtgcacaacgtgcaggttagttacatatgtatacatgtgctatgttggtgtgctgaacccagcaactcgtcatttaacattaggtatatctccaaatgctatccctcccccctcccctcacccacaacaggccccaggtgtgatgttccccttcctgtgtccatgtgttctcattgttcaattctctcctatgagtgagaacatgtggtgtttggttttttgtccttgcgatagtttactgagaatgatggtttttagcttcatccatgtccctgcaaaggacatgaactcatcattttttgtgtctgcatagttttccatggtgtatatgtgccacattttcttaatccagtctatcattgttggacatttattaaaaactaacttcttgagaaatatgtcttattggcccaagaayaaaacatcagttttatagtcgacaacctgtgtttgagtcccaactctgccacattc

SEQ ID NO: 903203 - DNA, 615 bp, Homo sapiens
tgaagggttctacccagggtgtaacaagaataaatttgaattttagcatcattaaaagtcctttatagttttcarattacttccacatgacttatttggtttttatagcaaccagagagttgggtactattatctctcttctttgcatcaaagagagaatgaagttgcaataagccaagtgatttcttttttagtgggaaatagctaataaatggcagaaaaagtatcagagaccaggtcttctgatttcttgcacattgctcctccaatacctcatgcagtgagaggaaaacctgagatgtaggaaactagagaagaaactgcgtggcttctatgtcagaaacagtagcaaattgtttcagctttctacatgaaaacacctacagacattcaactctatgctcagatccatcactattcatatttcacagtagatccacatgagaaaaaaagaggtagcccacccagaacacagtatgtctggaagtagttctcacctacagttaagaatttacaggttcacaaatgcatgtagctgcagacgcatgtgctgtcattgaagcgaatctgaagcttggaatcgtcagatgaccaataacaagaaaaaaagtatgc

SEQ ID NO: 903204 - DNA, 636 bp, Homo sapiens
accatttggaaatgcttttagaaattcaaatacaaagacttatgattgcctgacattgatttcatacccccatygaccaagtcccactttcatctttgttccttgttttcttcattttaatgtattccatcctacaattgtaataaggtacccaagctgtgcatttcagggtcattattgcatttcttaggaagttaaagcccccatcctttgaccttatgctttctgataccacccaaggtgtgacataattgcccgcaaatgcgctgtctgtcatgtcttattgctcaaatgaaacccacttccacagtaggacgaaaagagaggtgggtagagctcctgctatttgcatcagcacttgtcctcaggaaatgcggaatcttggcactgaacgaaagtgtaaaaatgacaaatttgccatctaatatggaccactgcactcacaagactgcaactccttacattaatggagattaggatataacttttttaatttggagcctcattacacagtataaataaaaatacagccccaactatatcatctttaattgcctctagacagaatgctgattatctactgaggatcttggccatgtgtttctgaggaaccagcagagtttgttccctgctttg

SEQ ID NO: 903205 - DNA, 576 bp, Homo sapiens
tcttagatttatatccaaatacttcactttttcagaatgatcattagtagcattttttgtttccaatttatttatgtagaaatatagttaatttttgtgtgttgaccttayagcctgcaatcttgatgtattattgtgaattcttcagaatttatcatttgtgaaatagtgagagtcttatttcttactttctagtctggcctccatgaatcctcacaataaatctacaattgtttcattgttgttctgtctttaacttgtagcactttgaataggatgcatttgaatgtggaattttttgttatatcttgtttggggtccacagaactatttgaatctatcatttatgtctttcatcaaatttgttttattataagctgttatttctttaaatattttttctgcacctccctttgctccttctggaattctgataatatggatattagaactcttggcgttgtctcataacccccaagactttttcatcttttcaatcttctttctgttgtccggattggataatatctattcctctatcataagttcattgaattttattctgtcatatccatt

SEQ ID NO: 903206 - DNA, 614 bp, Homo sapiens
cagctgcaatggaattctttctcccccatggcttcctactccttggcctttatacatgaatctgtccatataaactttatcgaagaagtcagggaagaaggaagraggagaaatgagaataaactgagctggcagcacactcagctttcatcatgaggtaagcctgctctcggacctgcttcctcatagcagtgcctattgcctcagaatcatacagacactgtcacaacgttatagttccctttaactgtactgtagatagcaacctgaacattgtgaaatgttaagctttccctctgagattcgctttcagagcctgcataatggtgaaactactgactcagctggtctgaggaaccccacaaggagctggctcacaagctgaaatgctcacatttcatctcccttactctgaccactcaacgactacaatttttcagcccctcaccctccatgatcccctttaaaaactccagtccagaacttcttggggagataaatttgagagtctaaccctatttcctcacttggctaccctgcaatcattaaactctttttctgttgcaaaccctgctgtctcagtgtaattggtttgttactgtgctgagggcata

SEQ ID NO: 903207 - DNA, 629 bp, Homo sapiens
cacttctgcctttgtgtgcctcttccttcacaaaacayatatataaaaagatattttacaacctcataggtgtaaagatgaatataatccaggctggatacgttattctacattctttattattgtgttttttcttatgattctaaagtgaagttaaaacatttaggaagagtcctaaaactagtatgtgcccaagacactgtgccccaccactaggactaatgaaaacatctgctctggtcattgactttaaggtactggggaaacccactgcagctgagaataagtcacagaaaaatagtcctctgctctcccaggagcagcaaatctgcagctggggatgcaccaggaccactgagaaagcagcatcagagacccaggaacaggtgccacctgagactgagccttcatcagaaccacagaactcccccacttcacactattgggctaacaatctagctagcaacagtggcatgcaggcaagtgcatggaacgaaaccttttctgagagaaaaggcgcaatgataggagggagaaaagatcagtagttgtcacgggttgtgagtcgggggagatgttgaccccaaaagagcagcatgcacgagctcctcgtgggtggtggaaactgt

SEQ ID NO: 903208 - DNA, 609 bp, Homo sapiens
atcccccagttcttataaagtccctcatgaaaaccactccttttgattctccttaaaattctgtctactggatcaagtccaaaacaaatgagatgctacactttttatccccaaaaccctccctccaacccaggacttcgacaaacctctctctccctctttcaaccaagaccaaaaacctaaagcaaaatgactcctccaagtctgtccaacagttcaccaaccacatctaaatctcatccgggacccaagaaaggatatatgagagacagagagagagagaaagggaaagaaagaaacacacacagagggccattagttttcaaagctaacttcccctcaaatacctttcccagtgccagttaaatagtcccaccactttctaccttattcacagttttatttggaaggtgactgagcatacggtacttgagacaatcagtggtagcacagcatattttattctctctagagttcttcttttgtagaattcagcctcactgttttatagcctagctatgtaatttctaattctcatgtcctactattttatagcatattcacaaggatcctctgacagaagcctyaccaccaacctataaaataagg

SEQ ID NO: 903209 - DNA, 526 bp, Homo sapiens
gccactacataatggtaaagggatcaattcaacaagaagagctaactatcctaaatatatatgcacccaatacaggagcacccagattcataaagcaagcccttagagacctacaatgagacttagacwcccacacaataataatgggagattttaacaccccactgtcaatattagacagatcaatgagacagaaggttaacaagggtatccaggacttgaactcagctctgcaccaagcagacctaatagacatctgtagaactctccaccccaaatcaacagaatatacactcttctcagcaccacatcacacttattccaaaattgaccacatagttggaagtaaagcactcctcagcaaacgtaaaagaaccgaaatcacaacaaactgtctctcagaccacagtgcaatcaaagtagaactcacgattaagaaactcacgcaaaaccgcacaactacatggaaactgaacaacctgctcctgaatgactactgggtaaaacgaaatgaaggcagaaataa

SEQ ID NO: 903210 - DNA, 526 bp, Homo sapiens
gccactacataatggtaaagggatcaattcaacaagaagagctaactatcctaaatatatatgcacccaatacaggagcacccagattcataaagcaagcccttagagacctacaatgagacttagactcccacacaataataatgggagattttaacaccccactgtcaatattagacagatcaatgagacagaaggttaacaagggtatccaggacttgaactcagctctgcaccaagcagacctaatagacatctgtagaactctccaccccaaatcaacagaatatacactcttctcagcaccacatcacacttattccaaaattgaccacatagttggaagtaaagcactcctcagcaaacgtaaaagaaccgaaatcacaacaaactgtctctcagaccacagtgcaatcaaagtagarctcacgattaagaaactcacgcaaaaccgcacaactacatggaaactgaacaacctgctcctgaatgactactgggtaaaacgaaatgaaggcagaaataa

SEQ ID NO: 903211 - DNA, 585 bp, Homo sapiens
gcaaaagaaactgccatcagcatgaacaggcaacctacagaatgggagaaaatttttgcaatctacccatctgacaaagggctaatatccagaatctacaaagaacttaaacaaatttacaagaaaaaatcaaacaaccccatcaacaagtgggcaaaggatatgaacagacgcttttcaaaagaagacatttatgtggccaacagacacatgaaaaaatgctcatcatcacttgtcatcagagaaatgcaaatcaaaaccacaatgagataccatctcacaccagttagaatggcgatcattaaaaagtcaggaaacaacaggtactggagaggatgaggagaaataggaacatttttacactgttggtgggagtgtaaacttgttcaaccattgtggaagacagtgtgacgattcctcaaggatctaggactagaaataccatttgacccagccatcctattactgggtatatayccaaagggttataaatcatgctactataaagacacatgcacacatatgtttattattgcagcactattcacaatagcaaggacttggaaccaacccaaatgtccatca

SEQ ID NO: 903212 - DNA, 636 bp, Homo sapiens
aacccataaaaaaccacgttcccctgaaagartctgtaagaacaaatgtaaattatttcttcctctaagaatgctaataaagaaaatttttctgatttgcagtcatcaattagaaaatatatctgataactgttataaatccatctcattcaaatgttaagcaatatatacattcctgactttttccttgccaaaaaaaaaataagctgaaggtattctagaagtcagtatcttctaggaaaactgttaactataaaaagaagaagcatgcacacttcttccatgagctgcctctaggccctaggtgggacagggatcatgatgtctttggactcctcacctgatacttaggtcatagctcccgcttaggagaaagttttcctcctcacacaggaagagggcccggacactcccagcatggcctcggaattcaacgggtatcgctttcacttgtatgatgtccagaagatggatctttcgattagatgacacagctatcagatctcccccggaatagtggatgactcggttttgatcccacctgagtgccaggggaaaaggattatccatgaaagaagagtcagtgtccctcctgggactgacttagccccatgacttttgcctacagcagtggtg

SEQ ID NO: 903213 - DNA, 672 bp, Homo sapiens
ctattgagcagtctaataaatctgaaaytatattagtaaataaaagaacaaaccacataggatataagaacttaaaaaaaaaacagtaatccctggatatcagcaaaattttactaagaaagagttataccaaactacatttatttatcatttgatgaccaagatggcagcttgctctttgttcccagaaatagtcaagtggaagatagaagatgaatcgtttgttagggatacagaagaaattctgcctgcagggagaagttcaactggtttctaggtttcttttaattttcacatcttgagtttataattctaacattttgtacatagcagatatgaactttcccccaaattaattactatcttctcatctctttaccatgttgtcctcccccctcacttatcattcatgattatcatttcattactttgaattgcatttatttgaacctgaaaaaattaaattttgttttcaaaaaagtataacaacctgaattgtttccagttttagcccaaagctaagttcctgttgctgtttttatttgaatatacaagaacagaggatttagatatgaatgaaaattaagagaaactgcaattcattttttctagttcctgttctttgttattcttggctgcaccattgtcataccttaggagattgaaaagaaa

SEQ ID NO: 903214 - DNA, 658 bp, Homo sapiens
atctcaatattatggttctagggaaatcctaaatgtaaggcaaagcagttctcacrgaaaaaatttagatattactagttgagttttttgaaacacattgaaggtgcctaagtttgaatttgagtctctcttagatttccttcaaaatttaaaaaaatagaaaaactctaagattttattgtgtttttaaatcagagattctccaatttaggaggagaaagaggactttgcattaggttgaagtatcagtaatctgtgaagccttttgtgaaccatgtatgtttcttcccaagaaagtataatctctgatggaagcgcttgccattattgggaagagcccctgccttgtcaggtatgtaggatttagtggtcgtaaagtgagaaaaaggatggacagatcttgagctccagtgataacatcaaaacacttcagtgcttctatttcctcattgtctctccttagatgaaattaaataaaaaatcaaaacaatgtcaagatgaatttagtccactaagtgactggctgctggatctttgaatggggtaataatcttgatatcggtattttaagatattctcaattttgtttcactaataaagccaatactggattattctttacacagtatttgagaagacattctcaaaccattatgaa

SEQ ID NO: 903215 - DNA, 494 bp, Homo sapiens
gaatatgaataccaaagaagtgaagagcctttcttagcatgaaggttcatgaagtcaatattttttattactggtgacatttaacttgatcacttaaggtgatctgctgagtttttctgaagaaagttactacttttacttggaggaaatatttttagactacataaattactaatttctactgaaaactttttcgcacttattttggtatctattagggaatcccgacttcaacaatttttacattgggattctaacgatgaattcctatttccatcatccttctacattattaattgtaatttttctgtatgggtgagctgtctctgcttccctatttatctatctgtatatctttctttctatctgttcagttacttgtttatatctctatgggttcatagatgtttattttactcttttggttataatcmaatgacatatctattagttttgttgctcaatttgatctagttctggcccttggaagtttt

SEQ ID NO: 903216 - DNA, 494 bp, Homo sapiens
gaatatgaataccaaagaagtgaagagcctttcttagcatgaaggttcatgaagtcaatattttttattactggtgacatttaacttgatcacttaaggtgatctgctgagtttttctgaagaaagttactacttttacttggaggaaatatttttagactacataaattactaatttctactgaaaactttttcgcacttattttggtatctattagggaatcccgacttcaacaatttttacattgggattctaacgatgaattcctatttccatcatccttctacattattaattgtaatttttctgtatgggtgagctgtctctgcttccctatttatctatctgtatatctttctttctatctgttcagttacttgtttatatctctatgggttcatagatgtttattttactcttttggttataatcaaatgacatatctrttagttttgttgctcaatttgatctagttctggcccttggaagtttt

SEQ ID NO: 903217 - DNA, 494 bp, Homo sapiens
gaatatgaataccaaagaagtgaagagcctttcttagcatgaaggttcatgaagtcaatattttttattactggtgacatttaacttgatcacttaaggtgatctgctgagtttttctgaagaaagttactacttttacttggaggaaatatttttagactacataaattactaatttctactgaaaactttttcgcacttattttggtatctattagggaatcccgacttcaacaatttttacattgggattctaacgatgaattcctatttccatcatccttctacattattaattgtaatttttctgtatgggtgagctgtctctgcttccctatttatctatctgtatatctttctttctatctgttcagttacttgtttatatctctatgggttcatagatgtttattttactcttttggttataatcaaatgacatatctattwgttttgttgctcaatttgatctagttctggcccttggaagtttt

SEQ ID NO: 903218 - DNA, 649 bp, Homo sapiens
aaatactaagaagatgtagtaaagaaaaaataccgtgtcatagaagccacaagagaagggtgcataaaaatttaaggagtggagtaatcaacagtgtgcaatgcagtgtcagaacatataaaatgacagaaatagtatgcatgaaatttaacagcatggaacttggtaagtgatattagccagagtcgttttgatggagaagtgcaactggaagccaagcttttaattgaataaagaacgaatgaaaactgataaaatagcagcaatcacatatgaacaactctttcaagaagtttggtcttaaaggagagtgaggataggtcaataattaagaaaaatagagtaatgaagaagtaaatgccgatgatattaacacaaatgatgatagatgtcagaatcctaatgagaataatcaattataaagcaaaaattttgagcctaacaagatttaaaggatcctaatttaaaggatctcagtgatgataaaggggaaaatcaagggtttccaagcaaacagaaagagttgtcttgggtaggtgagaaagtttcctccattattaatggattaaaggaaaagatgagcacagatgaccataggcttgcagatttgatggagaaaccatgagraagttcccatctaatggcttct

SEQ ID NO: 903219 - DNA, 579 bp, Homo sapiens
ataatataaatttggaaaaggtaaatgtaagctcctttacttggatttctctcgcctgctccaattgcccaagtatgagactgtagaaraggagtgtttattaactgtaatggtcaatagtgtctttgtctgccaaaagaaaaagtaaaatctctggaattcactgatttggaacatcatggaatatgtatttctcttcaccctgtcagattaaacttgggtaccttggtctatttctaaatatggcaattacaaaaggacataggctaactaaaatatactctaagaatggtagttatattgcaaatgaccttgataatagataattattcaactagtatttatgagcacttatgatgaatcagttactcaggaaagttatcaaaggtaataagactgcatccttgttcctgcaatctgttctgtgtccaaaaaccttcctttgacttctgccttatatagcttaaacatcaaagccttcaccatggctacaagacactacagcattacttctataatgcctttctgaccccacgatctttccttttgctggtcccctctgctccagccgcactggac

SEQ ID NO: 903220 - DNA, 570 bp, Homo sapiens
cagactgaaacattcagtttttatagtttccacagcttataaagacaaaggcatttggctgcttgcattttaattttcttgaagacctaaaaatggttggcagatcagaatgaataaacaggcttcagtagtaagtccccaaaccctcacacttttttttactcaagctatttatgtagcacaattcatccgatttttaaaaaatatattatgaaacatttgttatgcagaaaagtatggataacataacaaagacctttgaactcaccattcagtataagaaataaaacatgacccatccagttgaagtcccctctatacctaccccatccccagataactacttttttaaatttgatatcattcccatgctcttcttattttactatggttttgttttgcatgttttaaaacttcatattaaattataatacatattatatgcattcatctgtcrttttctttttccccttgactttgtaatcatgagattcatctatgtggttatatatacacatacatatatcaaacatttatatatcacatacatatataatatatacatatcac

SEQ ID NO: 903221 - DNA, 614 bp, Homo sapiens
aaatgagaccaccataccacatggagaggaagggaagccctccagctccccgccattgtatcatacaaatagattaaatctcaaactgtcctgcaaagtaacaaggaacctggaagaacacaagcacagtccccmggaggaagtccttggtgaatgagaattcctccaccagataggagaaatctttgttcccagtgggtggcatgaagcctggctcctcgtccaggtgggtgtagcatagcggggatgcccttctcatcagtgcagtggctgatggcaggagccttcctcctgatgcccttttgaatatacatgaggatgggtaccttttttgtgtgtgtgtgatggagttttgctcttgttgcccaggctggagtgcaatggtgcaatcttggctcactgcaacctccgcctcccgagttccagcaagcctcctgcctcagcctcccaagtagctgggattacaggcgcccaccaccacgcctggttatttttttttgtatttttagtagagacggggtttccccatgttggccaggctggtctcaaactcctgacctcaggtcatccgtccgccttggcctcccaaagtgctgggattacatgcacgagcc

SEQ ID NO: 903222 - DNA, 614 bp, Homo sapiens
aaatgagaccaccataccacatggagaggaagggaagccctccagctccccgccattgtatcatacaaatagattaaatctcaaactgtcctgcaaagtaacaaggaacctggaagaacacaagcacagtcccccggaggaagtccttggtgaatgagaattcctccaccagataggagaaatctttgttcccagtgggtggcatgaagcctggctcctcgtccaggtgggtgtagcatagcggggatgcccttctcatcagtgcagtggctgatggcaggagccttcctcctgatgcccttttgaatatacatgaggatgggtaccttttttgtgtgtgtgtgatggagttttgctcttgttgcccaggctggagtgcaatggtgcaatcttggctcactgcaacctccgcctcccgagttccagcaagcctcctgcctcagcctcccaagtagctgggattacaggcgcccaccaccacrcctggttatttttttttgtatttttagtagagacggggtttccccatgttggccaggctggtctcaaactcctgacctcaggtcatccgtccgccttggcctcccaaagtgctgggattacatgcacgagcc

SEQ ID NO: 903223 - DNA, 624 bp, Homo sapiens
catttatgacagtacgtatagtttatttccctctaaatgttctcttcccttttcttgatgagggtcaatatcagcctatttcttccacatataaggaaaactttttgtctactaaatcatcactctttaaccttctgcttttcccgtagtatacccaaagttgagcttcacctgaatgtcagtatgctaaaggtttcctcatttataataactttaatagcattatatgtcactattaattcacgtagcttgcttacattcctaaaaacgttttaattttagtgttgcctcactcacatctgtcttcattcctccggctactatccctacccttcatcatttactctacggcataatatcacctacatcctaatcaaaataaagcaatggcctcaatgctatggccccttcctgacaggtaaatttgtgggttcagcaacctttgaaatgcccccataaaagcaacttcaaacatttaaaaatgtgtattcacaaactcacataaattytttggtggtgtgatgctgagacccaaatgcaatgatttaatgttgcacagttaatctgtgagaaactgtatctattacttaggtactgactataacaatgctaataccaagcttt

SEQ ID NO: 903224 - DNA, 605 bp, Homo sapiens
cctgtgaggcaggtgcaatcagatagcctttgaattgcartctctgttttattgctttaaaaaaatctctacattcatgagaaagaaaaattccatgatcacaattttctttttgaaaagagtttagtgccttaaagtaggccttaattactcatctgttcttattttatacaaaccctgttctgggtccattttactttggattgaatattttctgagctgtgaaatatactcagaatccttagtcatttaagttctgccttgaatgtagattttatcataaagctatctttaattccttttcccttaagccatctccatgtatttttaaaagctcatcaatataaatgtttgtgtctgtcttatttgtttctcatgtttagaaggggaaaaaggagattgattacaaggatcataaaagtaatgatgcatttaatgaaagcatgtattttatagataaaataaactttaaaaaataacttgaagctagtacccaaattaatgtaatgaaatgaccttcagaaagtaatttctttatacttgggtcattttagcccttttcttgtttttatttatttacttttaatttgattttctgttttaat

SEQ ID NO: 903225 - DNA, 653 bp, Homo sapiens
ttctgacttttcctgggcaggcagtaagatatttttggcacaaatgttattaatttttgacaagtgaatcactctgtccttaaacatagttgtttaaatagttttactggtttcttttcactctaataagatcaataatttgttctgctgctatgatgttattgctttttaatttgatacttttaacaataaaagtctttgagtatttttatgtatcaatgggttacaaagacttgaaatggatttgtatgaagcagtgtaattacagttattgtaaatcatttaaaagaaaagtgatacatccattcagcagttttttgcttaaaatatttgacatttggagtataactaacaaataataccctgttttttcttttgtttttcagggaagaactgcagattttcctccttcaaaattaaagtcaggttatggagaacatgtatgctatgttcttgattgcttcgctgaagaagcattgaaatatattggtttcacctggaaaaggtaaaaattacccaccctgatgatagtaattttatgggcatagcatttgcctctgagggtacagagctgttcaattgaacataaaagaattattcyttttgactattctaaattgaaaatgccacagataattaagaaaagccagtat

SEQ ID NO: 903226 - DNA, 627 bp, Homo sapiens
ttacttttggagagacaacttctacttgatcctccaagtcttaacattgcattttttaaagctccagttagtatatatttaattttcaagaactttttattcctctctggatatccttttgtaatcactgtggccctattttatagatgaaatattctctcaaatctatttgagaatgttaattagaaatatttttggttctgttctgtcaattatctctatttcttttttttttcttttttttttttttttgagatggagtctcactttgtctcccaggctggagtgcagtggcgtgatctcggctcactgcaagctctgcctcctgggttcacaccattctcctgcctcagcctcccgagtagctgggactacaggcagccaccaccacacctggctaattttttttctactttttttcagtagagatgggttttcactgtgttagccaggatggtctcgatctcctgacctcgtgatccacccacctcagcctcccaaagygttgggattacaggtgtgagccaccgcgcccggccaattatctctatttctttcaggttcagtttttctgatactgtatcttggctattctcttaaatgttatagacttttcttgattatcca

SEQ ID NO: 903227 - DNA, 647 bp, Homo sapiens
aaaatgaaacacatctttataatgaaggcagtcatcacctagaagcaaaggttggtaggcaaatatacaactgccatgcagggtgttcaataycatgataaaggaatgcacagcagtctaaggaaacagtttaggcaaatatgctgagtcatgaaagtcctgaagtagtgacagagagtaaatattttaaaaaagaggactttcctatccccaaaataaatctataattaacatcagtagtgtactttccccaacattcacttgttcagaaatatatatatatatatatatatatatatatatatatacacacacatatatatatatttgtcatcttctcttttagaaaattatgtttctcaagagtttcacattatgattccattattctgtttttcactgatctggaactttccataatggtcacgtctcactttcaaagtaatcattttcatttagtttattattttggattgcgcgtggaggatggagaatgcagagaccaagttagaagacagagaagcaggagcattagtgagtcaccgtcaacttgatcaatctgtcctagaggccctggaggctacttgagccagctatattttgataactgcaaatccttttcattttgcctttctgccttcctcttg

SEQ ID NO: 903228 - DNA, 591 bp, Homo sapiens
caaaatatagagaccagggacactatgaagaaactgcattaactaatgtgcaaaataaccagctarcatcatgatgacaagatcaaattcacacataacaatattaaccttaaatgtaaatgggctaagtgccccaaaaggcacagactgccaaattggataaagagtcaagacccattggtgtgctatattcaggagacccatctcatgtgcaaagacacacatacgctcaaaataaagggatggaggaatatttaccaagcaaatggaaagcaaaaaacaaacaaacaacaaaacttaggggttgcaatcgtagtctctgataaaacaggctttaagccaaaaaagatcaaaaaagacaaagaagggcattacataatggtaaagggatcaatgcaacaagaagagctaactatcctaaatatatatgcacccaatacaggagcacccagatttataaaacaagttcttagagacttacaaagagacttagactcccacacagtaatagtgggagactttaacaccccactgtcaatattagacagatcaacgagacagaaaattaacaaggatattcacaacttgaac

SEQ ID NO: 903229 - DNA, 687 bp, Homo sapiens
caccccaaattaacagaatatacattcttctgagcaccacgtagcacttactctaaaatcgatcacataattggaagtaaaacactccttagcaaatgcaaaagaatggaaatcataacagtctctcagaccacagtgcaatcaaattagaactcaggatgaagaaactcactcaaaaccatgtatgtggaaactgaacaacctgctcctgaatgactacttgggtaaataacgaaattaaggcagaagtaaagttctttgaaacctatgagaacaaagacaaaacatactggaatctctgggacacagctaaagcagtgtttagagggaaatttatagcactcaatgcccaaaggagaaagcgggaaagatctaaaattgataccctaacatcacaattaaaagaactagagaagcgagagcaaacaaatttaaaagctagcagaagaaaagaaataactaagatcagagcagaactgccctcactcagcaatgaggagcctgagcaaatgtgcaaggctgtgagagagagagagagagagagagagagagagagagagagagagagaaggagatagagacacgaaaaacccttcaaaaaatcaatgattgcgrgagctggttttttgaaaagattaacaaaatacattgactgctagccagaccaatatagaagaaaagagagaa

SEQ ID NO: 903230 - DNA, 628 bp, Homo sapiens
attgaacaatctgctggaaaccgtcagttgagttcctaaatggtacaggaaaacagaagccagtgaagatgtgacatgggatagtagtccatgtcacccacaatggaaaatatgaacattggaagaatttcctattctaaacaatgtggggtttaaaatacactctggagactctcctgaatgtacaggcttgtagctgctatttatagtgaccgatgtgtactttactgagatttttatcccaacaaaggaactgtatgtgatgtagggagttattaaaatggaaaataagccctcacattctaacctagtcattggtacacatctcaaatgcaatgtcaggtctcactaaaatagatcaactagaagtaagcccagtaaaaattataaaataccttaaaagaaatttaattttgaaaaatgtttaagtctacctacctggtaacttccatcatgctggcaaaacattagaagcttattcaaatggtgaatacatacaaatgatttataattaacaaattaagctgttcartgtcagtgaatgtttttaaagttatttaaaaggtttaaaaaaaagttgtactctccagtacttaaaaactaagccatggaatgtagcttacatatt

SEQ ID NO: 903231 - DNA, 655 bp, Homo sapiens
tcatctttctttatttttcactttattcactgtaatctgaccgaatctcctttatttagaaayattatccataaacggtttttaagttttagaaagcactctacatgcagtacattgtagaatacactcttttccaaaatatgctttattttcctaatcaatagccatagacttttttacatatagcaagatcaggatggctttgtttgtccaggggcccacactatgcaaacagcttaactgggtgatcttaaggggatatgtctcctaggcttgagtttcttaatatttaacaggcagttttaaaattcattagatcagggattcttggccagaaggcatcggcccccaggaggtctgcggacggaggttcatgatgccactgaatgtaagtgccaagtttggtgggtgcatatgtgcatttttcttggaggagggtccagagctttcatcagtgcctcaaaaatagtgtgtggtccaaaactgaatacataatgttcccctgcggaagatgattcataaggtcagagacagccttaagtttttaagagtgatgatgtgactaagtccctgtcctaatgatgtacagtcttgttgaaaaaagtccagtgaaaagtcaagaatagtcatatcaacagccttctttgccttaagc

SEQ ID NO: 903232 - DNA, 692 bp, Homo sapiens
aatactatcaggggggtgttaaagtcttccactattattgtatgggagttaaagtctttttgaaggtttctaagaacttgctttatgaatctgggtattyctgtgttgggtgcatatatatttaggacagttagaccttcttgttgaattgagctctttacccttctgtattgcccttctttgtcttttttgatctttgttgttttaaagtctgttttgtctgaaactaggattacaacccttacttttttttctgtttcccatttgcttggtgggcttttcaccatcttttatttgaagctatatgtgtgtcactgcatgttagatgggtctcttgaagacagcattccaatgggtcttagtttgttatccagcttgccactctgtgtctttgaattgggacatttagcccatttatattcaaggttagtattggtatgtgatatggtttagctgtgtctccactcaaatctcattcttgaattccaacatgttgtgggacagacctggtgggaggtaattgaatcatgggggcaggtctttcccatgctcttcttgtaatagtgaataagtctcacaagatctaatggttctataagggaaagtttccttgcacaagctctttctttgcctgctgccatccatgtaagacgtgacttgctcctccttgccttccaccatgattgtgagcc

SEQ ID NO: 903233 - DNA, 488 bp, Homo sapiens
gggaggtaattgaatcatgggggcaggtctttcccatgctcttcttgtaatagtgaataagtctcacaagatctaatggttctatamgggaaagtttccttgcacaagctctttctttgcctgctgccatccatgtaagacgtgacttgctcctccttgccttccaccatgattgtgagccttccccagccacctgaaactgtaagtccaataaaacctttcttttgtaaattgcccggtcttgggtatatctttatcagcagcatgaaaacggactaataaaatatgtgtaaatttgatcctgtcatcatgatgttggctggttattttgcagacttatttatgtggttgctttattgtgtcactgatctgtgtgcttcagtgtgtttttgtagtggctgggaatggtcttcccttgttatatttagtgcttcactcaggattttttgtaaggcaagcctagtggtaatgaattccctcagcatttg

SEQ ID NO: 903234 - DNA, 630 bp, Homo sapiens
aataattaagcaaaatacttctgcaatggaaactctctgtccaatatttcagttagaaggtgctaccatgtataaccctatagcaaacagtagagcgagcatagcaattcccacaagtgtggtgtagtagataatttccatctaaaattttacttgccaagatacagaattcccctttgggggtctatgaagctccttggttttattttcccaaacaaagaaacctcggggttatgggcaccttacttactttcattacctggcagaatttgcaagataattacccagaactattatattgattcacatttttacattactcatccttttctttttttttcaagctgcagaagatcaccacttgattcacaggaataagcagggttagtctaaaatgtaggcaaaaagctaaaaaacaattaatgagactaggatttaatgacaatgtgtatgaaaagttttggagcaaagccttttctctccagtcctcattttgtgtaaaaactaattatgaataaactttagtcttatactagtcctgattatttgcataaagtrcagcaagaatggttatttttacacaggccttttggattggctttgatgaaactctgttccatgaggaatttc

SEQ ID NO: 903235 - DNA, 570 bp, Homo sapiens
ttgtgcagcacctgcttgtggtaagctcttacattagaggctacgggtggcagcagggggcaggggggcagtggtgacagtcaaagtgatctttgttgattcctgtctcaggtttgactcctgttgggcgttgagtcccgtgccaggagggactgtgtctgtctcctttgtgagctccctgtgttttaggtgggggtccctaaaagcaggacctgagtgaggatggttatccaggtgaactagtgaaggaggattctcaggagagctctgcaaaccagcaagggaagcagaaggcagaagaagtagctaagcaagggtgaggtttaagagcaggctagcctcagcctggtctctggggcatgaatggcctctcagacattgcccccaacagaggcaagggggctggactgttatagccccatgtcagcctgtcagtggctacgggctaggcctgggggtgcagatgggggtgtggcctcccagggatctctgagcaaggtggcttcacagccaacagcagttcccctggagaaggttgcagcccrtggcactgctgcagttgggatgggt

SEQ ID NO: 903236 - DNA, 589 bp, Homo sapiens
tgctgcaaataatagagaacagcaatgaaaytttcaggggtggctggggggtgtaggcttttagttccaaaaatacaccataggcggcctacctcacctagaaataccatcaaacccacacagtggccatgcctgacttctccataacctgaatcaagccaagtatatataatgacctccgccggatacattctctacaggtgagtggggtaaactggcactgcggtcctggcatggtggagagtgcaatcaccaaggtgtctggagccttggagtcttagctatcaagaggtgtagctagctccagctacatcacgctcttcaggcctggtgtcttctctgtaaaacgagagggatgaaacagattttctataaggcacctctcggctctaaaatttaagattccaaagtgtactttacatacatgacagaatcttgtgagaggatcaacagctctgccaggacttgagtctcaagagaaagaatgccaaatttaatcccttggggtgatgcgggcgctaactgttgaaacatgctaggtgccgtcaggttccaggtactacgttgtgctatgcgctgcctccgcaac

SEQ ID NO: 903237 - DNA, 457 bp, Homo sapiens
tctctttcctcaagcaggaggagtctcttcccttagccacagctgagaatgtgctgggtgacacctgaaaccacaatggctctgagtcttgyccatggcctacagcaagtactgcctggctaccactgcagattattcagagctgaaaagctctttagttagcaggtaatggatcctgccaggactaattccttcccttcaaggcaatgggttaccttctggcccagggcatgttcagaaatgtcttccaaaaggtagggcctgaaatgggggcctctagactctgcctgatgccctattctactgtggctgagctggtatctaaattccaacaaaaagtcctctttactctcttctctcctcaagcagagaaaagaagtctctcccagagctgtgaggtgtactacctaggtttaggggagcagtgatgcaaacactccctttgcctccccagctg

SEQ ID NO: 903238 - DNA, 615 bp, Homo sapiens
tcaataaacataatccatcacataaacagaaccatgacaaaaaccatataattatctcaataratgcagaaaaggccttcaacaaaattcaacagcccttcattctaaaaactctcaataaactaggtattgatggaacatatatcaaaacaataaaagctatctatgacaaacacacagccaatatcatactgaatgggcaaaaactggaagcattccctttgaaaatgggcaaaagtcaaggatgccctctcttaccactcctattcaacatagtgttggaagttctggccagggcaatcaggaaagagaaagaaataaaggtattcaaataggaaaagaggaagtcaaattgtctctgttgacagatgacacgattgtatatttagaaaacaccactgtctcagtccaaaatctccttaagctgataagcaacttcagcaaaatctcaggatacaaagtcaatgtgcaaatatcacaagcattccaatacaccaataacagacaaacagagagccaaatcaggagtgaactcccattcacaattgctactaacagaataaaataactaggaatacaacttacaagggatgcgaaagacctcttcaaggagaa

SEQ ID NO: 903239 - DNA, 541 bp, Homo sapiens
tcagtgctctgtggggacttagagaacttttgtgtctagctcagggattgtaaacacacaaatcagcaccctgtcaaaacagaccartcagctctctgtaaaacagaccaattagctctccataaaatggaccaatcagcaggatgtgggtggggctagataaaggactaaaagcaggctgcctgagccagcagtggcaacggactccggtccccttccacactgtggaagctttgttcttttgcgctttgcaatatatcttgctgctgctcactctttgggtccacactgcctttatgatctgtaacactcaccacgaaggtctgcagcttctctcctgaggccagtgagaccacgaacccactggggggaatgaacaactccagatgggaggaaggaacaactccagatgcgccgccttaacagctgtaacagtcacggggaaggtctgcagcttcactcatgaagccagtaagaccacaaacccaccagaaggaagaaactcctaacacatctgaacatcagaaggaacaaactccag

SEQ ID NO: 903240 - DNA, 541 bp, Homo sapiens
tcagtgctctgtggggacttagagaacttttgtgtctagctcagggattgtaaacacacaaatcagcaccctgtcaaaacagaccagtcagctctctgtaaaacagaccaattagctctccataaaatggaccaatcagcaggatgtgggtggggctagataaaggactaaaagcaggctgcctgagccagcagtggcaacggactccggtccccttccacactgtggaagctttgttcttttgcgctttgcaatatatcttgctgctgctcactctttgggtccacactgcctttatgatctgtaacactcaccacgaaggtctgcagcttctctcctgaggccagtgagaccacgaacccactggggggaatgaacaactccagatgggaggaaggaacaactccagatgygccgccttaacagctgtaacagtcacggggaaggtctgcagcttcactcatgaagccagtaagaccacaaacccaccagaaggaagaaactcctaacacatctgaacatcagaaggaacaaactccag

SEQ ID NO: 903241 - DNA, 622 bp, Homo sapiens
tatatagtgtgtatatacactgtaattacagtgtatatattgtgtgtatatatactgwaattacagtgtatatatattgtgtatatatatacactgtgattatatatgtaattacagtatatatatacactgattatatatatataatttatatatatacatgtataaagttttttttttgagatgaagtcttgctctgttacccaggctggaagatcagtggtgccatcttggctcactgcaacctctgccccctgggttcaagcaattctctgcctcagcctcctgagtacctgggattacaggtgcttgccaccatgcctggctaatttttttgtattttttgtagagacagggtttcaccatcttggcaaggctggtcttgaactcctgaccttgtgatctgcccgcctcagcctcccaaagtgctgggattacaggcatgagccaccgtgcccagccgaatatatatatatatttgggtacatgtgcaggtttgttacataggtaaattacctgtcatggggttttggtacagattattttgtcacccacgtaataagcatagtactcaataggtagattttcaattctttccctcctcctactctctaccctcagg

SEQ ID NO: 903242 - DNA, 615 bp, Homo sapiens
agtgctatgtaagctgagaccccaaggatgagcaggggttggccatgcaaaaatgagcaagaaatcatgttctaggcaaacacttcaggctgtagtgtttgccttaatggaagagctgaagaagaccagtaaggcaggagctttgggagtaggtatgagggaggtgcaggatgaagctagagtgggctgcaggaaagctgcatggtcctggcaccgaagataggaatcctccgtgcttcttggcccggcctgggccatggctggccttgtctgggaggacagcagttggattttctccaaactctctcaaattactatagttcctgacaaaagaatagaaacatagctaacatttatgagagcttatggcctggcaaattctgtcctaagcacctgacttttcaaccatcctatgagctagctacaaactcttattactcccattaaacctagaaatgagtgaatggctaagggttttacggtcattaggtggtagagctgatcttcaaactcatgcagtctggctgctttacctgtgctcctaaccaccatgctatggggtgtgatayggtttggatttatgtccctgcccaaatctcatgttgaattgtaatc

SEQ ID NO: 903243 - DNA, 544 bp, Homo sapiens
tggcctaaaaaccaagtcttgaaatatgttccttgagaatccataggggccatcagggaattcagctttagggactctcatgcctgagtagggccactgccacrtatggcagctcagccagtaaccactgatagccatcttttccgctcccttctccactgacactaccaggtagtggtggaggaggagggccatcctctacataggccacctgcctaggtggacaccatcagaacaccagactttgctctatgcatcctaagttcttatataaggagtcagtgagacagaaactagaatgtcagtaactcgcccttaggaatttaccctagtgaaattaaaactgatccacataaatacatgcatatgaatgttcagagcagtattattcacgatagctcaaaactggaaacaacccagatgtccatgaactgatgaatgggtaaataggatatggtatttttatgcaacggaatactattcagcagcaaaaaagaaagaactaagacacatgctacagcacaaatgaacttgtgctaagtga

SEQ ID NO: 903244 - DNA, 647 bp, Homo sapiens
attttctctgctctctccagttayaggcagaaaactgggagctgggctgccacctccttcagaccaagaccacactggactgaggagaaggtggagcaagggaacataaaaattccacaaaatctcattctactttgaaggtggctttttcttaactggacatatatttggttgctatggacttttgactattttctcaagctcctttaagattaaatcaaccaatttctgggtatttcttgatgctttcatgggggaaacatggagcttccaagtttatcattttgctaatgtccagcctcatgtctttctaaatataactttatttaatcattattactttatgcaaattaagagagattctctaacggaaacatttatagtgagtaatatatactcttttgtttctaaatctcatcaggatgtgaaagccattgaatacaatatgttactcttctggaagagagccatttactatgctagccccagattaaactcttattgattaagtttataattttatgattagttcttaataaatccaattataaaatcacctgagagttgcatgcctaaagtatttaaacaatctacaacaagtaacactcttttttctatcttactgcccagttttgccattttctctc

SEQ ID NO: 903245 - DNA, 614 bp, Homo sapiens
tgtgctctctgcctgcgatgggcactatgctacttctctttcctcttgctggaagaagtcaaaccctactctccaacccatgcagccctccaccccagcagatgcggctctaatagraagtgtccccagttgtagcaaacagctaactttctatatgcactcaaatgtggtggcatgctcactcgcgaagtgttcctggcatctcagctgagaaaccctgtaaactagacttgcagttccccccagcgttcaaacgctgggatttccagaggtggggggaagatgaacggatcaccccttgaggctgggaggactgctgaaggcttagaggagcaagtgggcaccagggttcagctagaaacattcaccctcctggagacagggggacagtgccaaccattctcagtcttttttttttttgagatagggtctcactctgtcacccaggctggagtgcagtggcacgatctcactacagtctctgcctctggggtttaagcaattcttgtgcctcagcctcctgaatagctgggaccacaggtgtgagccaccacgctccactaatttttgtatttttggggttttgccatgttgccaaggctggtctggaactc

SEQ ID NO: 903246 - DNA, 638 bp, Homo sapiens
gtacaaaaaaataattaaaaagaatgaataagatccagtatttgatagcacaacagggcaactatagtcaataataatttaattgtacatttaaaaataactaaaagagtatagtttgattgtttgtaacacaaaggataaatgcttgatattatggaaaccccgtttaccctcgtgtcagttattacacattgtatacctgtatcaaaatatctcacatactccctaaatgtatatacctactatgtacccacaaaaattaaaaataacaaaggaaaacttttcgtgtttttacttatttgtgggagataaaaattgaaacaattgaacttgtagagatagagagtagaatgatgcttaccagaggctgggaagagtaaggggtgggaagtggggacagttaatggtatgaaaacaaagttagatagaatgaatagggatctagtctttgatagcataacagggtgactacagttaacaataatttactgtatctttaaaagtaactaaaagmgtataattggaatgtttgtaacataaataaatgataaatgcttgatgtgatggataccccatttaccctgataatgattatgacacattgtgcacctgtatcaaaatatctcatgtactccata

SEQ ID NO: 903247 - DNA, 544 bp, Homo sapiens
attttggaagtagatacctgttttgaatttacagctggagggaatttgcctcaaaaggaattgtgcctygagtctcacctatatcttatttagatgagactctgaactttggacttttagttgatgctggaacaagttaggacttttggaactattgggagtgaatgaatatattttgtatgtgagaatgacatgttttgggggccagggtaagaatcctgtgcttgaatatcctcattcaaaactcatgttgaaatttgattgtcattgtaactgtattaaaaggtgaggcctagcggggcatggtggtgcatgcctgtaatcccagcatttggggagccaaggcaggaggatcacttgagctcaagagttcaagactggcctgggcaacagagtgaggccccatctctacaaaaataaattaactgggcatgatggtgcacacctgtggtcccagctagttggcaggctgaggtgagaggatcacttgaacccaggagtttgaggctgcagtgagccatgatcattccattgcactccagcc

SEQ ID NO: 903248 - DNA, 544 bp, Homo sapiens
attttggaagtagatacctgttttgaatttacagctggagggaatttgcctcaaaaggaattgtgccttkagtctcacctatatcttatttagatgagactctgaactttggacttttagttgatgctggaacaagttaggacttttggaactattgggagtgaatgaatatattttgtatgtgagaatgacatgttttgggggccagggtaagaatcctgtgcttgaatatcctcattcaaaactcatgttgaaatttgattgtcattgtaactgtattaaaaggtgaggcctagcggggcatggtggtgcatgcctgtaatcccagcatttggggagccaaggcaggaggatcacttgagctcaagagttcaagactggcctgggcaacagagtgaggccccatctctacaaaaataaattaactgggcatgatggtgcacacctgtggtcccagctagttggcaggctgaggtgagaggatcacttgaacccaggagtttgaggctgcagtgagccatgatcattccattgcactccagcc

SEQ ID NO: 903249 - DNA, 591 bp, Homo sapiens
cttttctgatgagcctaaagggaatttttcctcttctgagccctaaagttttagtgtctaaaacgttttttttttttttttttttttttttgcttgtttgttttgctttgagagggagtctcgctctattgcccaggctggagtgcagtggtgtgatctcggctcactgcaacctccgcctcctgggttcaagcgattctcctaccttgccctccctagtagctgggattacaggcacgtgccaccccacccagctaattttgtgtatttttagtagggatggggtttcaccatgttggccaggatggtgtcaatctcctgacctcgtgatctgcccgcctcggcctcccaaagtgctgggattacaggcatgagccaccatgcctggctttttttttttttttaatggaaaattaatttctgtcctttagatatcttgaggggaaagacagtatgtgacatattgtgtatccctactttatatctgatatggtttggctcggtgtccccaaccaaatctcatctggaattgtaatccccacatgacaagggcacgwccttgatatggcttggctgtgttcccacccaaat

SEQ ID NO: 903250 - DNA, 605 bp, Homo sapiens
gtagctaacttgttagtcctgtaaaagcaatctagtctccaggcaggaagggggtttgttttgggaaagggctgttattgtctttgtttcaaagttaaactataaactaatttcctcccatagttagttcagyctatgcccaggaatgaacaaggacaacttggaggttagaagcaaggtggagtcagttatgtcagatgtctttcactgtcataattttctcagttataatttttgcaaaggcagttttataaacctcactatgtcaaaggagcctccatcctatatatcttgagagtggcacttgcccatcttagcaccagagcctggtgagatagttaggtaaatcttgaaactgggctttttttttttttttttttttttgagacaaagttttgctcttgttgcccaggctggagtgcaatggcgcgatttcagctcaccacaaactcagccttccgggttcaagcgattctcctgcctcagcctcccaggtagctgggattacaggcatgcaccaccatgcccggctaattttttgtatttttagtagagacggggtttctccctgttggtcattctggtctcgaactccccatctcagg

SEQ ID NO: 903251 - DNA, 624 bp, Homo sapiens
acactgcttgggtgtaagtgagaatgaaacagctgaaaacatttgtttagcttttatacacatttgtttgaacgttatttatttttcctctcctgctgtgccttctctaggaacaggcagggaagctagctttttagatctcttctagcattttgcaatggtggtgtgtttgagagtaagtgtgcatttatttaatgagccctaagtattaattttattttcaggaaaaaattcatgaaaatgcaccccctgccaaccaaattcagtggaccaagcactttgcctattttgatgggaggagtagaggttgacagcaagcctcgtgcctggcagaggatgaggattagtgacaggggctctgactgtgtaggaatctccagatatggccagtaggattgtgaattcccctgaaaccatgccagacaaggaccaggtgaaagatttcaggggtggatagcatggagaaacttggggtggcagaaaaaagtgtcatcagtacccaaaaggccctcttgtgaccttctgtgygtggctgtctagtggacagaactaggaccaataggtagactttatgatgtggccagtttcagcttaccataaggacccatttcctcatggagagct

SEQ ID NO: 903252 - DNA, 578 bp, Homo sapiens
cagaatgtacaattttcacagagggatcctcagaagctaatgaacccaagtttgtcattttatagataaggaatctgaggccagaaaaaggagggggaattatttaaaaccatcaggccagagaagaaattagcctagttcttctgacctttagtctagtggaatgtcaggatctcagccttaaaatagaatcttccaaattgccacacctgttgtgtactacttttgatggttattatctttggcagtgcttccttgacatgaatgaattctacatgaattttgaagttgttttagaatatattttatacattattcataacatatttatgtagcttgttttaaagccaagagaaacctagagcaatagcttctgctttttggctgtgaccctacattttatatcttatacacacatatatgtaaaaattgtacattatatgaataattgaaacatgttttctgaaatagtactygtccttactctgtgtgacacactttggtattttctattttcatttactctgttctattttgttaaaaatattctggttatgaaccatctaaattgatttcat

SEQ ID NO: 903253 - DNA, 578 bp, Homo sapiens
cagaatgtacaattttcacagagggatcctcagaagctaatgaacccaagtttgtcattttatagataaggaatctgaggccagaaaaaggagggggaattatttaaaaccatcaggccagagaagaaattagcctagttcttctgacctttagtctagtggaatgtcaggatctcagccttaaaatagaatcttccaaattgccacacctgttgtgtactacttttgatggttattatctttggcagtgcttccttgacatgaatgaattctacatgaattttgaagttgttttagaatatattttatacattattcataacatatttatgtagcttgttttaaagccaagagaaacctagagcaatagcttctgctttttggctgtgaccctacattttatatcttatacacacatatatgtaaaaattgtacattatatgaataattgaaacatgttttctgaaatagtacttgtccttactctgtgtgacacactttggtattttctattytcatttactctgttctattttgttaaaaatattctggttatgaaccatctaaattgatttcat

SEQ ID NO: 903254 - DNA, 597 bp, Homo sapiens
atgtgcatttgagaagaatgtgcattcattctgctaattttgggtggagtgttctgtattaatgttatatctacccagcatcttcattaatcaataggattgacttytaatgccaaaatggaaactctaagctggtctttcctaccttagagtaagagctcaccctttctcactactatgtccattcgaggctccagtctcagcctggattcccactcctgagcaactgtgctttgagaaacagatcttggtgctcttacatattgttaaagtttcctatttttatattgatccttctgtctaggtattctatccattactgaaaataaggtattgaaaattatctatttttatagaactgtttatttcacctttcaaatatgggagctctaatgtttggtgcatacatgtttataagtgttactttttttttttttttttgagacaaagtcttgctgtgttgcccaggctggagtgcagtagtgcaatctcaggtcaccacaacctccgtctccctgctgggattacaggcgtgagccatcatattttttgatgaattgacacttaatatgtaatgtccttttttgtctcttgtca

SEQ ID NO: 903255 - DNA, 366 bp, Homo sapiens
ttggaggtgggggcattgccatggcatgcctggcccagctggggtaaaggctggagggccctgggtggtgaatttcagccctgacccaagctcccctaagtctttgcctttgtragctgggggagcctcagggcaggctcttcggtaccactcaggtgggtgagtgatgaggacgtgggcccggggtcaggcacacgctgcatgctctcaatccacttgtgggtctggctgggggttggggcgggggcactgtccactggagggcactgcagcaccaccttgggccaccctggcagcccctctaccttaagaatagagcttgtctacttcctgcagcaacctcatggtcagctctagagacagaga

SEQ ID NO: 903256 - DNA, 610 bp, Homo sapiens
atggtccagcaatctcattactaggtatataggcaaaggatgcgaaatcagtatgtcaaagagatatctgcacttacatatttaatatggcactatttacaatagctaagatatgatctatcaatggatgaatggatggagaaaatgaggtatatatacatgatggaatacaattcagcctttaaaaagaaggaaatcctgctatttgggataacatggatgaacctggaggacattatgttaagtgaaataagccaggcacaaaaagacaaatttgcatagtgtcactgatatgtggaacctaaaaaagttgatctcataggagcagagaaaagaatggtggttaccaacagctgggacagagggggtgggggtggagtttgaggagatattgttcaaaggatacaaattttttattagacaggaggagtaagttcaagagatctattgtacaacatggtgactataattaataatatactgtattcttaaaaatgctaagagagtagattatatgtgttctattacaaaatcwcgagatatgtgaagtaatacatgtgttaattctcctgatttagccattccacaaggtatagttgttttaaaacat

SEQ ID NO: 903257 - DNA, 607 bp, Homo sapiens
acaaacttcattgggggaggagtggagcatcccatgcacgtccactgaaaacatttcagagatkcccagaatctctagctaggctgacttgtgatagtctttttttctactgaaagcagtccattaagattggaagaggtagttacttcttcaaatgtgccaacatcaacacagagctactagaaatgtgacgaattgggaaactatattacaccaaaaggaaaaaacgaagtcttcattaactgacctggacaaaaaatatagatctataaactgcctgagcaataattaaaaataatcataaaagtcactaagctacataagaacacagaaaattaagtgatacgaggaaaacaatacataatgaaaattagaatatcaacaaatatatagaaactattacataaaacaaattctagagcagaagaataccataactgaatggaaaaattcaatagagagcttcaaaggcagacttgatcaagcagaaaaaggaatcaataaaattgacgataggtcatttgaaatttctagtccaggagtgtaaaaggcagaaatagtttttttgaaaactgcagaaagcttatagaacttataggacacagct

SEQ ID NO: 903258 - DNA, 607 bp, Homo sapiens
acaaacttcattgggggaggagtggagcatcccatgcacgtccactgaaaacatttcagagatgcccagaatctctagctaggctgacttgtgatagtctttttttctactgaaagcagtccattaagattrgaagaggtagttacttcttcaaatgtgccaacatcaacacagagctactagaaatgtgacgaattgggaaactatattacaccaaaaggaaaaaacgaagtcttcattaactgacctggacaaaaaatatagatctataaactgcctgagcaataattaaaaataatcataaaagtcactaagctacataagaacacagaaaattaagtgatacgaggaaaacaatacataatgaaaattagaatatcaacaaatatatagaaactattacataaaacaaattctagagcagaagaataccataactgaatggaaaaattcaatagagagcttcaaaggcagacttgatcaagcagaaaaaggaatcaataaaattgacgataggtcatttgaaatttctagtccaggagtgtaaaaggcagaaatagtttttttgaaaactgcagaaagcttatagaacttataggacacagct

SEQ ID NO: 903259 - DNA, 607 bp, Homo sapiens
acaaacttcattgggggaggagtggagcatcccatgcacgtccactgaaaacatttcagagatgcccagaatctctagctaggctgacttgtgatagtctttttttctactgaaagcagtccattaagattggaagaggtagttacttcttcaaatgtgccaacatcaacacagagctactagaaatgtgacgaattgggaaactatattacaccaaaaggaaaaaacgaagtcttcattaactgacctggacaaaaaatatagatctataaactgcctgagcaataattaaaaataatcataaaagtcactaagctacataagaacacagaaaattaagtgatacgaggaaaacaatacataatgaaaattagaatatcaacaaatatatagaaactattacataaaacaaattctagagcagaagaataccataactgaatggaaaaattcaatagagagcttcaaaggcagacttgatcaagcagaaaaaggaatcaataaaattgacgataggtcatttgaaatttctagtccaggagygtaaaaggcagaaatagtttttttgaaaactgcagaaagcttatagaacttataggacacagct

SEQ ID NO: 903260 - DNA, 608 bp, Homo sapiens
agaaatggctgtgggagctctcagtgaaatactatgaggttttatyagcagggaagggtaggagtcacttcagctcccctgccaggtcatcaggaaagctatccacctctcagattcatttcttccccagtgttctggctattcagattagacaagcacctcttttcatctgtaggaatgttgatgttccaattaaagaggaattgtgactcagcctctcatgcaagcctgaacctggggggtactcctcctgtgaggatgcagtcactctgaagtgtttcaggaaagatgtctataggtgcatctatgccaagctcccatgcgagaagccccagctatgtctgcagtggtggacaagaggggaaagaagccccttctccacgactgttcacaaacaccaaagctacctggcttttggagaagagctactgactttccctgctaagcctagcaatgaaattgtgtctctgctgaaagtaacttcccacgagtggaaagatctaggactcaaggcctcccatctggattcttttgtcctgtggggtgttcccttgatgtggtgctcttccccttctcctaaaagtaggagttcttgacagccaaattat

SEQ ID NO: 903261 - DNA, 622 bp, Homo sapiens
gcacatttcaagaacctgagatggaagtgagagtgatgtgatgtggaatgcagtattagacctcagaaatggtaatgtgccaccagagttcgttactcgatgaggcatcgtcwgcagaagtccctgggtaaatgcagtgtttctcagacttctttcattattggtcctctgaagaggcttttcagacatttttccttatcgatctctttctgcccagaacttgacattttaataccacaaatatagtgtctatttgtttatgtattgtgaatctttgcagggccacaaactattataatgtctactccccctcttctactatcctagaacaagttttagccccttgtgggtaatactgttcctattgagattaaatggcatattgtgctgacagtcagaaccggaatctcattcctaccccttatttcatctgacattggaaccccttttcagcctttgtcagcctacccttggtcatctgtgaaagggaactcataatgcttttcttagaaacctcttctgtggggtaaatgagaaatcccatacagagtagatagcacctggtaggacttccacagatggtcattcagggcagtgaataaagtgaataaagaattggata

SEQ ID NO: 903262 - DNA, 608 bp, Homo sapiens
aaatctaaggatgctctaccatactaaaatcaattaatgtaayatgccacattaacagaataaaggggaaaataatatcaatcatcttacttgttgcagaacaaaatttatttcaacatcacttgattcaaaaagttaaagctaggaaacaaagaaaactatttcaacataataaaattcatatataaaaaacacagttaacataatcaatggtgaaagactaaaagcttttcttctaaaatcaggaaaaagacaaggatgtctcctttcataatttttattttattttattttattcaattttatttttatagtatgggaagtcctagttaaaagagttaagcaaaaataaataaataagtaaagtagaagtcttccaaattggaaaggaagcagtaaaattgtgtctgtttgcaaatggcattatcttaaatgcagaaaacttgaaagattccacgaaaaatacccctaatagaacaaataaatgaattcagcaaattgtaggacacaaaatgaatatgcaaatattacttgtgtttgtatacattaacaatgaacaattcaaaaagaaattcatttacaagttcaaaaaataaaacatttagaaa

SEQ ID NO: 903263 - DNA, 608 bp, Homo sapiens
aaatctaaggatgctctaccatactaaaatcaattaatgtaacaygccacattaacagaataaaggggaaaataatatcaatcatcttacttgttgcagaacaaaatttatttcaacatcacttgattcaaaaagttaaagctaggaaacaaagaaaactatttcaacataataaaattcatatataaaaaacacagttaacataatcaatggtgaaagactaaaagcttttcttctaaaatcaggaaaaagacaaggatgtctcctttcataatttttattttattttattttattcaattttatttttatagtatgggaagtcctagttaaaagagttaagcaaaaataaataaataagtaaagtagaagtcttccaaattggaaaggaagcagtaaaattgtgtctgtttgcaaatggcattatcttaaatgcagaaaacttgaaagattccacgaaaaatacccctaatagaacaaataaatgaattcagcaaattgtaggacacaaaatgaatatgcaaatattacttgtgtttgtatacattaacaatgaacaattcaaaaagaaattcatttacaagttcaaaaaataaaacatttagaaa

SEQ ID NO: 903264 - DNA, 640 bp, Homo sapiens
gaagatgcaagtaggggccattttgacaagggatggatttatgatggttaattttatgtgtcaacttgactgggctaaggcacgtctagatagctggtaaaacactatttctgtaagcgtgttcccagaagagatcagcactcgtattggtgaatcaattaaagtagatggcctggttcaatgtatgtgggcatcatccaagcagatgagggcctgaatagaacaaaacaacagacgaaatataaattcactctgcttgagctgaggcattcaacttctgccctcggacatcagttctcctgcgtctcaggatttcagactcagactagggtttataccatccatgggccgcctaattctcaagcctttaaacctggaccgaataataccactgactttcctggttctccagtttgcagatggcagatcatgggagttctagcccccgcctaaccatatgggccaattgctgtaataaatctcctcttatttatctgcatccatatctatatctatatcttactgattctttctgaagaaccctgatatagttgtataactgtaaatttaccaaaaatcactaaattttacacactttaaatgggygaattatatggtatgtaattgtaacttgataatg

SEQ ID NO: 903265 - DNA, 587 bp, Homo sapiens
ctcattttatgcctcatagtagccttayaaccagaacaaaagctttctaaaacaactagaaatttcagttaacatacaattaaatgcatagatacatttttaataaactgaagaaaaaattttatggtataaaaatgaagaggatcatgaaactagagcaacaagaaagactcaccctttctgatatcatgtgctgatatgagtgatattgtttggatatttgtccccccacaaacctcatgttgaaatgtgatttccagtgttgtaggtagggcctggtacgaggtgactggatcgtgggagcagatccctcatgaatggtttagcaccatcctcttggtgatatctgacttcttgttcagttagttcacacaagatctggttgtttaaaagattctggggccaggcgcagtgaatcacccctgtaatcccagcactttggaagaccgaggcaggcagatcatctgaggctgggagatcgagaccagactggacaaaatggtgaaactctgtctctagtaaaaatacaaaaattagccagatgtggcggtgcacacctgtaatcccagctactcgggaagctgaaa

SEQ ID NO: 903266 - DNA, 587 bp, Homo sapiens
ctcattttatgcctcatagtagccttataaccagaacaaaagctttctaaaacaactagaaatttcagttaacatacaattaaatgcatagatacatttttaataaactgaagaaaaaattwtatggtataaaaatgaagaggatcatgaaactagagcaacaagaaagactcaccctttctgatatcatgtgctgatatgagtgatattgtttggatatttgtccccccacaaacctcatgttgaaatgtgatttccagtgttgtaggtagggcctggtacgaggtgactggatcgtgggagcagatccctcatgaatggtttagcaccatcctcttggtgatatctgacttcttgttcagttagttcacacaagatctggttgtttaaaagattctggggccaggcgcagtgaatcacccctgtaatcccagcactttggaagaccgaggcaggcagatcatctgaggctgggagatcgagaccagactggacaaaatggtgaaactctgtctctagtaaaaatacaaaaattagccagatgtggcggtgcacacctgtaatcccagctactcgggaagctgaaa

SEQ ID NO: 903267 - DNA, 587 bp, Homo sapiens
ctcattttatgcctcatagtagccttataaccagaacaaaagctttctaaaacaactagaaatttcagttaacatacaattaaatgcatagatacatttttaataaactgaagaaaaaattttatggtataaaaatgaagaggatcatgaaactagagcaacaagaaagactcaccctttctgatatcatgtgctgatatgagtgatattgtttggatatttgtccccccacaaacctcatgttgaaatgtgatttccagtgttgtaggtagggcctggtacgaggtgactggatcgtgggagcagatccctcatgaatggtttagcaccatcctcttggtgatatctgacttcttgttcagttagttcacacaagatctggttgtttaaaagattctggggccaggcgcagtgaatcacccctgtaatcccagcactttggaagaccgaggcaggcagatcatctgaggctgggagatcgagaccagactggacaaaatggtgaaactctgtctctagtaaaaatacaaaaattagccagaygtggcggtgcacacctgtaatcccagctactcgggaagctgaaa

SEQ ID NO: 903268 - DNA, 535 bp, Homo sapiens
agtctcatctgagacaaggctaatcttttcacctatgaacctgtaaaaaataaaaacaagctagttacttccaagatacaatggaggaatgggcattgggtaamaatttccattcctaaaggaagaaatcagtgaaaagaaaggggttacaggccccatgcaagttcaaaacccatcagggtagtcattaaatattaaagctttaaaataatctcccttgacttcatgtctcacatgaagccctgtaagattgcttagcttagagtcagagaagttaatgtcctcaagggcaactctcaatcatcagcaaaaaattctgaggcatattccacactgtgtcatagaattttcagcagaaataagccctagcttcccacataagttatcagcccaataatgcaccatttattcttttatcatccttaccccaaaatgctacatttaatcctccttcttgtttaatgaactcaattcccataataaattgcctgcagtgattgacttttctccagatccacatttaaactattaacaa

SEQ ID NO: 903269 - DNA, 535 bp, Homo sapiens
agtctcatctgagacaaggctaatcttttcacctatgaacctgtaaaaaataaaaacaagctagttacttccaagatacaatggaggaatgggcattgggtaacaatttccattccwaaaggaagaaatcagtgaaaagaaaggggttacaggccccatgcaagttcaaaacccatcagggtagtcattaaatattaaagctttaaaataatctcccttgacttcatgtctcacatgaagccctgtaagattgcttagcttagagtcagagaagttaatgtcctcaagggcaactctcaatcatcagcaaaaaattctgaggcatattccacactgtgtcatagaattttcagcagaaataagccctagcttcccacataagttatcagcccaataatgcaccatttattcttttatcatccttaccccaaaatgctacatttaatcctccttcttgtttaatgaactcaattcccataataaattgcctgcagtgattgacttttctccagatccacatttaaactattaacaa

SEQ ID NO: 903270 - DNA, 650 bp, Homo sapiens
tttgatcatctgtctagtgttgtcagtgaggagtccccaatattattgtgtggctgtctttttgtaggtctagaaatacctgttttattaatctggatgcttcagtgttgggtgcttatatgtttaggatagtttatcttcatgttgaaatgaattcattatcattatgtaatgtccttctttgtccttttttactgtcgttggtttaaggtctgttttatttgatgtaataatgatgactcaccctttttttgttttccattcacatgatatatcctcctccaaccctgtctttgaaccagttagtatcattacaagtgagaggggtgtcttgaagataaaagatggatgggtcttttttaaaatccaatttgccactctgaaacttttaattgggaagtgtagacaattgacattcaaagttaatattgatatgtgtggttttcatcctatcatgaagctgtcagtttgttgccttgtagtctccattgtgtagttgttttattgggtctgtgagctatgtacttaagtgtgtgtttttgatatcaggtatcattctcttccatgtttascactccattatttcttgtaaggctagtctgctggtaacaaattaccttagcaattgcttctcaggaaaatattttatt

SEQ ID NO: 903271 - DNA, 597 bp, Homo sapiens
tgaaaccgagtaggattttcatcctttccctgaattattgctctaatcttgtcataattgactggcttaacaacacactttttcctctactttttctctacggcacagcaagtggacaatacttgtaagtcatgacaagttaaattaaagaacgtggccaacttaacaaactcctccataaacttttctggatgctctgaaaactggccaaatttttgcttgtataaagccaaatcagatctagaaaatgcacatgtactctaagtgttcccccatttccatcagctacctcccacaatgaacacaggtttgactttaggggctgataggggaccccattcctggtggtactggttgggcagcagggtatatgtgctggggcaagttggataagggggagggttgcctgatgactttggggtagaatctttcattagagaagtggtgggacctgcacccggcctgagaactaagggactgaagagamtctggagagggtgtaggccttttaggaagaatagctcggagggaatcccttaagtgcagcttcctggtatctggaagtaacatgagccagtaaagggccatacaagcctg

SEQ ID NO: 903272 - DNA, 632 bp, Homo sapiens
atctgaggtcacagaaccagtccatggctgagctaaagcttaaattctcggcttagcctccctggtgccttatcccatttctggagcatctggaaggcacattgagttttcctgtcaaaacaaactgtgaggctagataattatttagccttattttcctgtgctggctgtccatcctgtgggtgccatatgactctacttcctttggttttcattacttttgtttcctccatggcaccactcctccacactctcaaatctgtccacacccagacactcattctagccacctggactgccaagaccctcctcttctttggtacctatcatattctgccttgtactgaagttactgaaagactttcttaatcccccacttctcctccttacccagtaacacacacacacacacactctctcacacacactcacacatacacaccgaccactaacacctataaactccttgaaggcaggactggactcttcgttccttgtcactgaacgtcccacttgcttaggtcagtgcctgctttagaacaggttctcragaagtatttgctggattgagttaattactgaggaagtgattaaaagccccatttatccaactattgtgcccattaaacctc

SEQ ID NO: 903273 - DNA, 172 bp, Homo sapiens
caggttctgcctgtctgccaggtatctatcagggaggcttttccttaggtctgttctgttcccgggagctgcagtgattattgggtcagtggggatcacgtccagtactgggcacttcctatacccttgtaaaatgctcaytgatatgattcccagcaccacctacatggga

SEQ ID NO: 903274 - DNA, 575 bp, Homo sapiens
gagaaacttttttgtgatgtgtgcattgaactcatggagttgaacatttcttttgatatagcagttttgaaacattctttttgtagaaacttcaattggatagttggagcgctttgaggcctatggtggaaaaggaaatatcttcacataaaaactaaacagaagcattctccaaaacttctttgtgatatgtgcattcaactcacagagttgaacttccttttgatagaacagttttgaaacactctttttgtagaatctgcaaatgggtatttggctccctttgaggcctatggtgaaaaaggaaatatcttcacataaaaactagacacaagtattctgagaaacttctttgtgatgtgtgcattcaacctacagagtggaacctttcttttgatagagcagttttgaaacactctttttgtaaaatctgcaagtggatatttggtttctttgaggcytatgttggaaaacgaaattgaacctttcttttgatagagcagttttgaaaccctctttttgtagaatctgcaagtggatatttagagtgcattgtgggcaatagtagaaaagga

SEQ ID NO: 903275 - DNA, 710 bp, Homo sapiens
agaagcattctaagacacttctttgtgatgtgtgcattcaactggcyaagtcgagcctttcttttgattgagcagttttgaaacactctttttggagaatctgtaagtggatatttgaagcattttgcagcctgtcatggaaaaggaaatatcttcacataaaaactagacagaagtattctcagaaactactttgtgatgtgtgcattcaaatcactgagttgaacctttcttttgatagagtagttttgaaactctctttttgtacaatctgcaagtggatagttggagcactttgaggcctacattggaaaaggaagcagctctacatgaaaagtagacagaagtattctcataaactgctttgtgatgtgtgcattcaactcacagagttgaacctttcttctgatagagcagctttctaactctctttttgtagaatctgcaaatggatatttggagcacttagaggcctatggtgcaaagggaaatatcttcacataaaaactagacagaagccttctcagaaacttccttgtgatgtgtgcattcatctcactgagttgaaactttcttttgccagagcagttttgaaatactctttttgtagtatctggaagtggatagttggagcactttgacgcctgtggtggaaaaggaaatatcttcccataaaaactggacagaagcattctcagaaacttttttgt

SEQ ID NO: 903276 - DNA, 710 bp, Homo sapiens
agaagcattctaagacacttctttgtgatgtgtgcattcaactggccaagtcgagcctttcttttgattgagcagttttgaaacactctttttggagaatctgtaagtggatatttgaagcaktttgcagcctgtcatggaaaaggaaatatcttcacataaaaactagacagaagtattctcagaaactactttgtgatgtgtgcattcaaatcactgagttgaacctttcttttgatagagtagttttgaaactctctttttgtacaatctgcaagtggatagttggagcactttgaggcctacattggaaaaggaagcagctctacatgaaaagtagacagaagtattctcataaactgctttgtgatgtgtgcattcaactcacagagttgaacctttcttctgatagagcagctttctaactctctttttgtagaatctgcaaatggatatttggagcacttagaggcctatggtgcaaagggaaatatcttcacataaaaactagacagaagccttctcagaaacttccttgtgatgtgtgcattcatctcactgagttgaaactttcttttgccagagcagttttgaaatactctttttgtagtatctggaagtggatagttggagcactttgacgcctgtggtggaaaaggaaatatcttcccataaaaactggacagaagcattctcagaaacttttttgt

SEQ ID NO: 903277 - DNA, 600 bp, Homo sapiens
aatttttatgtgaagatattcccgtttgccccataggccacaaatcactcccaatatccacttgcagattctacaaaaagagtgtttcaaaactgctctaagaaaaggaaggtttaactctgtgagtttaatgyacacatcacaaagaagtttcagagaatgcttttgtctcgttttcaggtgaagttatttccttttcctccacagacctcaaagccctccaaatgcccaggtgcggattatacaaaaagagtgtttcaaaactgctctatcaaaagaaaagttcaactctgtgagttgaatgcacacatcacaaagaagtttctgagaatgattctgtctggtttttatgtgaagatatttctatttccagtgaaggcctcaaagcgctccaaatgtccacttacagattccacaaaaagagtgtttcaaaactgctctatcaaaagaaatgttcaactctgtgagttgaatgcacacatcacaaagaagtttctgagaatgcttccgtctagtttttatgtgaagatattcccgtttacaccgtagacctcaaagcactcttaatatccccttgtagattctacaaaaagagtgttt

SEQ ID NO: 903278 - DNA, 587 bp, Homo sapiens
cgcatattctacaaaaatagtgtttcaaaactgctctatcaaaggaaaggttcaactctgtgaatggaacgcacacgtcacaaagaagtttctgagaatgcttctgtctagttttwacatgaacatatttccttttccaccataggtctccaagcactctgaatatccactagcagattctacaaaaagagtgttacaaaacttctctatcaaaagaaatcttcaattctgtgacttgaatgcacacatcaggaagaagtttctgagagcaattctgtctagtttttatgtgaagatatacccctttccaaagaaggcctcaaagcgctccaaatgtccacttgcagatactacaaaaagagtgttacaaaacttctctatcaaaagaaatcttcaattctgtgacttgaatgcacacatcaggaagaagtttctgagagcaattctgtctagtttttatgtgaagatatacccctttccaaagaaggcctcaaagcactctaaatgtccacttgcagattctacaaaaagagtgtttcaaaagtgctgcatgaaaacaatggttgaattctgtgagttgaatgaac

SEQ ID NO: 903279 - DNA, 588 bp, Homo sapiens
acatcacaaagtagtttctgagaatgattctgtctagtttttatttgaagatatttccttttctactgctggcatcaaatcgattgaaatgtccacttgcaaattccacaaaaagagtgtttcaaatctgctctgtctaaagggacgttccactctgtcagttgaatacacacaacacaaagaagttaatgagaattcttctgtctagcattaaatgaagaaatcccgtttccaacgaatgcctcaaaactgtccatatatccacttgcagattttacagtgtgtttctaaactgctctatgaaaagaaaggtaaactatgtgagttgaacgcacacatcacaaagaattttctgagaatgattctgtctggtttttatttgaagatatttccctttctactgttggcatcaaatggctagaaatctccacttggaaattccgcaaaaagagtgtttcaaatctgctctgtctaaagggacgttccactctgtgagttgaatgcacacmacacaaagaatttactgagaattcttccgtctagcattcaatgaagaaatcccgtttccaacgaaggcctcaaacaggt

SEQ ID NO: 903280 - DNA, 576 bp, Homo sapiens
agaattcttccgtctagcattcaatgaagaaatcccgtttccaacgaaggcctcaaacaggtccatrtttccacttgcagactttacaaacagtgtgtttccaaactcctctatgaaaagaaaggttaaactctgtgagttgaacgcacacatcacaaagcactttctgagaatgattctgtctggttattatacgaagatatttccttttctgcaattgtcctcaaatcgcttgaaatctccacctgaaaatgccacagcaagagtgtttcaaatctgctctctctaaagcaaggttcaactctgtgagttgaatacacacaacacaaaaaagttcctgagaactcttcttagtctagcatgaaaggaagaaaccccgtttgcaacgaagccctcaaagaggtccaaatatccacttgcagacataacaagcagagtgtttctaaactgctctaagaaaagaaaggttaaactctgtgagttgaaggcacacatcacaaagtagtttctgagaatgattctgtctagtttttatttgaagatatttccttttctactgttggcatcaaatcgctt

SEQ ID NO: 903281 - DNA, 600 bp, Homo sapiens
aagaatttgctgagaattcttccgtctagcattcaatgaagaaatcccgtttccaacgaaggcctcaaacaggtccatatttccamttgcagactttacaaacagtgtgtttccaaactcctctatgaaaagaaaggttaaactctgtgagttgaacgcacacatcacaaagcactttctgagaatgattctgtctggttattatacgaagatatttccttttctgcaattgtcctcaaatcgcttgaaatctccacctgaaaatgccacagcaagagtgtttcaaatctgctctctctaaagcaaggttcaactctgtgagttgaatacacacaacacaaaaaagttcctgagaactcttcttagtctagcatgaaaggaagaaaccccgtttgcaacgaagccctcaaagaggtccaaatatccacttgcagacataacaagcagagtgtttctaaactgctctaagaaaagaaaggttaaactctgtgagttgaaggcacacatcacaaagtagtttctgagaatgattctgtctagtttttatttgaagatatttccttttctactgttggcatcaaatcgcttgaaatctccact

SEQ ID NO: 903282 - DNA, 594 bp, Homo sapiens
ttgaatgcacacaacacaaagaatttgctgagaattcttccgtctagcattcaatgaagaaatcccgtttccaacgaaggcctcaaacaggtccatatttccacttgcagastttacaaacagtgtgtttccaaactcctctatgaaaagaaaggttaaactctgtgagttgaacgcacacatcacaaagcactttctgagaatgattctgtctggttattatacgaagatatttccttttctgcaattgtcctcaaatcgcttgaaatctccacctgaaaatgccacagcaagagtgtttcaaatctgctctctctaaagcaaggttcaactctgtgagttgaatacacacaacacaaaaaagttcctgagaactcttcttagtctagcatgaaaggaagaaaccccgtttgcaacgaagccctcaaagaggtccaaatatccacttgcagacataacaagcagagtgtttctaaactgctctaagaaaagaaaggttaaactctgtgagttgaaggcacacatcacaaagtagtttctgagaatgattctgtctagtttttatttgaagatatttccttttctactgttggc

SEQ ID NO: 903283 - DNA, 654 bp, Homo sapiens
ttgctgagaattcttccgtctagcattcaatgaagaaatcccgtttccaacgaaggcctcaaacaggtccatatttccacttgcagactttacaaacagtgtgtttccaaactyctctatgaaaagaaaggttaaactctgtgagttgaacgcacacatcacaaagcactttctgagaatgattctgtctggttattatacgaagatatttccttttctgcaattgtcctcaaatcgcttgaaatctccacctgaaaatgccacagcaagagtgtttcaaatctgctctctctaaagcaaggttcaactctgtgagttgaatacacacaacacaaaaaagttcctgagaactcttcttagtctagcatgaaaggaagaaaccccgtttgcaacgaagccctcaaagaggtccaaatatccacttgcagacataacaagcagagtgtttctaaactgctctaagaaaagaaaggttaaactctgtgagttgaaggcacacatcacaaagtagtttctgagaatgattctgtctagtttttatttgaagatatttccttttctactgttggcatcaaatcgcttgaaatctccacttgcaaattccacaaaaagagtgtttcaaatctgctctgtgtaaagggacgttccactctg

SEQ ID NO: 903284 - DNA, 582 bp, Homo sapiens
ttgctgagaattcttccgtctagcattcaatgaagaaatcccgtttccaacgaaggcctcaaacaggtccatatttccacttgcagactttacaaacagtgtgtttccaaactcctytatgaaaagaaaggttaaactctgtgagttgaacgcacacatcacaaagcactttctgagaatgattctgtctggttattatacgaagatatttccttttctgcaattgtcctcaaatcgcttgaaatctccacctgaaaatgccacagcaagagtgtttcaaatctgctctctctaaagcaaggttcaactctgtgagttgaatacacacaacacaaaaaagttcctgagaactcttcttagtctagcatgaaaggaagaaaccccgtttgcaacgaagccctcaaagaggtccaaatatccacttgcagacataacaagcagagtgtttctaaactgctctaagaaaagaaaggttaaactctgtgagttgaaggcacacatcacaaagtagtttctgagaatgattctgtctagtttttatttgaagatatttccttttctactgttggcatcaaatcgctt

SEQ ID NO: 903285 - DNA, 584 bp, Homo sapiens
atttgctgagaattcttccgtctagcattcaatgaagaaatcccgtttccaacgaaggcctcaaacaggtccatatttccacttgcagactttacaaacagtgtgtttccaaactcctctakgaaaagaaaggttaaactctgtgagttgaacgcacacatcacaaagcactttctgagaatgattctgtctggttattatacgaagatatttccttttctgcaattgtcctcaaatcgcttgaaatctccacctgaaaatgccacagcaagagtgtttcaaatctgctctctctaaagcaaggttcaactctgtgagttgaatacacacaacacaaaaaagttcctgagaactcttcttagtctagcatgaaaggaagaaaccccgtttgcaacgaagccctcaaagaggtccaaatatccacttgcagacataacaagcagagtgtttctaaactgctctaagaaaagaaaggttaaactctgtgagttgaaggcacacatcacaaagtagtttctgagaatgattctgtctagtttttatttgaagatatttccttttctactgttggcatcaaatcgctt

SEQ ID NO: 903286 - DNA, 622 bp, Homo sapiens
gaatttgctgagaattcttccgtctagcattcaatgaagaaatcccgtttccaacgaaggcctcaaacaggtccatatttccacttgcagactttacaaacagtgtgtttccaaactcctctatraaaagaaaggttaaactctgtgagttgaacgcacacatcacaaagcactttctgagaatgattctgtctggttattatacgaagatatttccttttctgcaattgtcctcaaatcgcttgaaatctccacctgaaaatgccacagcaagagtgtttcaaatctgctctctctaaagcaaggttcaactctgtgagttgaatacacacaacacaaaaaagttcctgagaactcttcttagtctagcatgaaaggaagaaaccccgtttgcaacgaagccctcaaagaggtccaaatatccacttgcagacataacaagcagagtgtttctaaactgctctaagaaaagaaaggttaaactctgtgagttgaaggcacacatcacaaagtagtttctgagaatgattctgtctagtttttatttgaagatatttccttttctactgttggcatcaaatcgcttgaaatctccacttgcaaattccacaaaaagagtgtt

SEQ ID NO: 903287 - DNA, 600 bp, Homo sapiens
acttgcagactttacaaacagtgtgtttccaaactcctctatgraaagaaaggttaaactctgtgagttgaacgcacacatcacaaagcactttctgagaatgattctgtctggttattatacgaagatatttccttttctgcaattgtcctcaaatcgcttgaaatctccacctgaaaatgccacagcaagagtgtttcaaatctgctctctctaaagcaaggttcaactctgtgagttgaatacacacaacacaaaaaagttcctgagaactcttcttagtctagcatgaaaggaagaaaccccgtttgcaacgaagccctcaaagaggtccaaatatccacttgcagacataacaagcagagtgtttctaaactgctctaagaaaagaaaggttaaactctgtgagttgaaggcacacatcacaaagtagtttctgagaatgattctgtctagtttttatttgaagatatttccttttctactgttggcatcaaatcgcttgaaatctccacttgcaaattccacaaaaagagtgtttcaaatctgctctgtgtaaagggacgttccactctgtgagttgaatacacacagcacaaa

SEQ ID NO: 903288 - DNA, 602 bp, Homo sapiens
tgtttccaaactcctctatgaaaagaaaggttaaactctgtgagttgaacgcacrcatcacaaagcactttctgagaatgattctgtctggttattatacgaagatatttccttttctgcaattgtcctcaaatcgcttgaaatctccacctgaaaatgccacagcaagagtgtttcaaatctgctctctctaaagcaaggttcaactctgtgagttgaatacacacaacacaaaaaagttcctgagaactcttcttagtctagcatgaaaggaagaaaccccgtttgcaacgaagccctcaaagaggtccaaatatccacttgcagacataacaagcagagtgtttctaaactgctctaagaaaagaaaggttaaactctgtgagttgaaggcacacatcacaaagtagtttctgagaatgattctgtctagtttttatttgaagatatttccttttctactgttggcatcaaatcgcttgaaatctccacttgcaaattccacaaaaagagtgtttcaaatctgctctgtgtaaagggacgttccactctgtgagttgaatacacacagcacaaagaagttactgagaattcttctgtct

SEQ ID NO: 903289 - DNA, 453 bp, Homo sapiens
ccatatttccacttgcagactttacaaacagtgtgtttccaaactcctctatgaaaagaaaggttaaactctgtgagttgaacgcacacatcacaaagcactttctgagaatgattctgtctggttrttatacgaagatatttccttttctgcaattgtcctcaaatcgcttgaaatctccacctgaaaatgccacagcaagagtgtttcaaatctgctctctctaaagcaaggttcaactctgtgagttgaatacacacaacacaaaaaagttcctgagaactcttcttagtctagcatgaaaggaagaaaccccgtttgcaacgaagccctcaaagaggtccaaatatccacttgcagacataacaagcagagtgtttctaaactgctctaagaaaagaaaggttaaactctgtgagttgaaggcacacatcacaaagtagtttctgagaa

SEQ ID NO: 903290 - DNA, 500 bp, Homo sapiens
atttgctgagaattcttccgtctagcattcaatgaagaaatcccgtttccaacgaaggcctcaaacaggtccatatttccacttgcagactttacaaacagtgtgtttccaaactcctctatgaaaagaaaggttaaactctgtgagttgaacgcacacatcacaaagcactttctgagaatgattctgtctggttattatacgaagatatttccttttctgcaattgtcctcaaatcgcttgaaatctccacctgaaaatgccacagcaagagtgtttcaaatctgctctctctaaagcaaggttcaactctgtgagttgaatacacacaacacaaaaaagttcctgagaactcttcttagtctascatgaaaggaagaaaccccgtttgcaacgaagccctcaaagaggtccaaatatccacttgcagacataacaagcagagtgtttctaaactgctctaagaaaagaaaggttaaactctgtgagttgaaggcaca

SEQ ID NO: 903291 - DNA, 500 bp, Homo sapiens
atttgctgagaattcttccgtctagcattcaatgaagaaatcccgtttccaacgaaggcctcaaacaggtccatatttccacttgcagactttacaaacagtgtgtttccaaactcctctatgaaaagaaaggttaaactctgtgagttgaacgcacacatcacaaagcactttctgagaatgattctgtctggttattatacgaagatatttccttttctgcaattgtcctcaaatcgcttgaaatctccacctgaaaatgccacagcaagagtgtttcaaatctgctctctctaaagcaaggttcaactctgtgagttgaatacacacaacacaaaaaagttcctgagaactcttcttagtctagcatgaaaggaagaaaccccgwttgcaacgaagccctcaaagaggtccaaatatccacttgcagacataacaagcagagtgtttctaaactgctctaagaaaagaaaggttaaactctgtgagttgaaggcaca

SEQ ID NO: 903292 - DNA, 584 bp, Homo sapiens
catgaaaggaagaaaccccgtttgcaacgaagccctcaaagagktccaaatatccacttgcagacataacaagcagagtgtttctaaactgctctaagaaaagaaaggttaaactctgtgagttgaaggcacacatcacaaagtagtttctgagaatgattctgtctagtttttatttgaagatatttccttttctactgttggcatcaaatcgcttgaaatctccacttgcaaattccacaaaaagagtgtttcaaatctgctctgtgtaaagggacgttccactctgtgagttgaatacacacagcacaaagaagttactgagaattcttctgtctagcatgaaatgaagaaatcccgtttccaacgaaggcctcaatgcggtccatatatccacttgcagactttacaaacagagtgtttccaaactgctctatgaaaagaaaggttaaactatgtgagttgaacgcacacatcacaaagaattttctgagaatgattctgtctggtttttatttgaagatatttccctttctactgttggcatcaaatggctagaaatctccacttgcaaattccgcaaa

SEQ ID NO: 903293 - DNA, 576 bp, Homo sapiens
agaattcttccgtctagcattcaatgaagaaatcccgtttccaacgaaggcctcaaacaggtccatatttccacttgcagactttacaaacagtgtgtttccaaactcctctatgaaaagaaaggttaaactctgtgagttgaacgcacacatcacaaagcactttctgagaatgattctgtctggttattatacgaagatatttccttttctgcaattgtcctcaaatcgcttgaaatctccacctgaaaatgccacagcaagagtgtttcaaatctgctctctctaaagcaaggttcaactctgtgagttgaatacacacaacacaaaaaagttcctgagaactcttcttagtctagcatgaaaggaagaaaccccgtttgcaacgaagccctcaaagaggtccaaatatccacttgcagacataacaagcagagtgtttctaaactgctctaagaaaagaaaggttraactctgtgagttgaaggcacacatcacaaagtagtttctgagaatgattctgtctagtttttatttgaagatatttccttttctactgttggcatcaaatcgctt

SEQ ID NO: 903294 - DNA, 584 bp, Homo sapiens
catgaaaggaagaaaccccgtttgcaacgaagccctcaaagaggtccaaatatccacttgcagacataacaagcagagtgtttctaaactgctctaagaaaagaaaggttaaastctgtgagttgaaggcacacatcacaaagtagtttctgagaatgattctgtctagtttttatttgaagatatttccttttctactgttggcatcaaatcgcttgaaatctccacttgcaaattccacaaaaagagtgtttcaaatctgctctgtgtaaagggacgttccactctgtgagttgaatacacacagcacaaagaagttactgagaattcttctgtctagcatgaaatgaagaaatcccgtttccaacgaaggcctcaatgcggtccatatatccacttgcagactttacaaacagagtgtttccaaactgctctatgaaaagaaaggttaaactatgtgagttgaacgcacacatcacaaagaattttctgagaatgattctgtctggtttttatttgaagatatttccctttctactgttggcatcaaatggctagaaatctccacttgcaaattccgcaaa

SEQ ID NO: 903295 - DNA, 576 bp, Homo sapiens
tcttagtctagcatgaaaggaagaaaccccgtttgcaacgaagccctcaaagaggtccaaatatccacttgcagacataacaagcagagtgtttctaaactgctctaagaaaagaaaggttaaactctgwgagttgaaggcacacatcacaaagtagtttctgagaatgattctgtctagtttttatttgaagatatttccttttctactgttggcatcaaatcgcttgaaatctccacttgcaaattccacaaaaagagtgtttcaaatctgctctgtgtaaagggacgttccactctgtgagttgaatacacacagcacaaagaagttactgagaattcttctgtctagcatgaaatgaagaaatcccgtttccaacgaaggcctcaatgcggtccatatatccacttgcagactttacaaacagagtgtttccaaactgctctatgaaaagaaaggttaaactatgtgagttgaacgcacacatcacaaagaattttctgagaatgattctgtctggtttttatttgaagatatttccctttctactgttggcatcaaatggctagaaatctc

SEQ ID NO: 903296 - DNA, 601 bp, Homo sapiens
aaagaatttgctgagaattcttccgtctagcattcaatgaagaaatcccgtttccaacgaaggcctcaaacaggtccatatttccacttgcagactttacaaacagtgtgtttccaaactcctctatgaaaagaaaggttaaactctgtgagttgaacgcacacatcacaaagcactttctgagaatgattctgtctggttattatacgaagatatttccttttctgcaattgtcctcaaatcgcttgaaatctccacctgaaaatgccacagcaagagtgtttcaaatctgctctctctaaagcaaggttcaactctgtgagttgaatacacacaacacaaaaaagttcctgagaactcttcttagtctagcatgaaaggaagaaaccccgtttgcaacgaagccctcaaagaggtccaaatatccacttgcagacataacaagcagagtgtttctaaactgctctaagaaaagaaaggttaaactctgtgagttgaaggcacacatcacaaagtagtttctgagaatgattctgtctagttttyatttgaagatatttccttttctactgttggcatcaaatcgcttgaaatctccact

SEQ ID NO: 903297 - DNA, 636 bp, Homo sapiens
agaattcttccgtctagcattcaatgaagaaatcccgtttccaacgaaggcctcaaacaggtccatatttccacttgcagactttacaaacagtgtgtttccaaactcctctatgaaaagaaaggttaaactctgtgagttgaacgcacacatcacaaagcactttctgagaatgattctgtctggttattatacgaagatatttccttttctgcaattgtcctcaaatcgcttgaaatctccacctgaaaatgccacagcaagagtgtttcaaatctgctctctctaaagcaaggttcaactctgtgagttgaatacacacaacacaaaaaagttcctgagaactcttcttagtctagcatgaaaggaagaaaccccgtttgcaacgaagccctcaaagaggtccaaatatccacttgcagacataacaagcagagtgtttctaaactgctctaagaaaagaaaggttaaactctgtgagttgaaggcacacatcacaaagtagtttctgagaatgattctgtctagtttttatttgamgatatttccttttctactgttggcatcaaatcgcttgaaatctccacttgcaaattccacaaaaagagtgtttcaaatctgctctgtgtaaaggga

SEQ ID NO: 903298 - DNA, 602 bp, Homo sapiens
tgtttccaaactcctctatgaaaagaaaggttaaactctgtgagttgaacgcacacatcacaaagcactttctgagaatgattctgtctggttattatacgaagatatttccttttctgcaattgtcctcaaatcgcttgaaatctccacctgaaaatgccacagcaagagtgtttcaaatctgctctctctaaagcaaggttcaactctgtgagttgaatacacacaacacaaaaaagttcctgagaactcttcttagtctagcatgaaaggaagaaaccccgtttgcaacgaagccctcaaagaggtccaaatatccacttgcagacataacaagcagagtgtttctaaactgctctaagaaaagaaaggttaaactctgtgagttgaaggcacacatcacaaagtagtttctgagaatgattctgtctagtttttatttgaagatatttccttttctactgttggcatcaartcgcttgaaatctccacttgcaaattccacaaaaagagtgtttcaaatctgctctgtgtaaagggacgttccactctgtgagttgaatacacacagcacaaagaagttactgagaattcttctgtct

SEQ ID NO: 903299 - DNA, 649 bp, Homo sapiens
aaagaatttgctgagaattcttccgtctagcattcaatgaagaaatcccgtttccaacgaaggcctcaaacaggtccatatttccacttgcagactttacaaacagtgtgtttccaaactcctctatgaaaagaaaggttaaactctgtgagttgaacgcacacatcacaaagcactttctgagaatgattctgtctggttattatacgaagatatttccttttctgcaattgtcctcaaatcgcttgaaatctccacctgaaaatgccacagcaagagtgtttcaaatctgctctctctaaagcaaggttcaactctgtgagttgaatacacacaacacaaaaaagttcctgagaactcttcttagtctagcatgaaaggaagaaaccccgtttgcaacgaagccctcaaagaggtccaaatatccacttgcagacataacaagcagagtgtttctaaactgctctaagaaaagaaaggttaaactctgtgagttgaaggcacacatcacaaagtagtttctgagaatgattctgtctagtttttatttgaagatatttccttttctactgttggcatcaaatcgcttgaaatctccacttgcaaaytccacaaaaagagtgtttcaaatctgctctgtgtaaaggga

SEQ ID NO: 903300 - DNA, 584 bp, Homo sapiens
catgaaaggaagaaaccccgtttgcaacgaagccctcaaagaggtccaaatatccacttgcagacataacaagcagagtgtttctaaactgctctaagaaaagaaaggttaaactctgtgagttgaaggcacacatcacaaagtagtttctgagaatgattctgtctagtttttatttgaagatatttccttttctactgttggcatcaaatcgcttgaaatctccacttgcaaattccacaaaaagagtgtttcaaatctgctctgtgtaaagggacgttccactctgtgagttgaatacacacagcacaaagaagttactgagaattcttctgtctagcatgaaatgaagaaatcccgtttccaacgaaggcctcaatgcggtccatatatccacttgcagactttacaaacagagtgtttccaaactgctctatgaaaagaaaggttaaactatgtgagttgaacgcacacatcacaaagaattttctgagaatgattctgtctggtttktatttgaagatatttccctttctactgttggcatcaaatggctagaaatctccacttgcaaattccgcaaa

SEQ ID NO: 903301 - DNA, 534 bp, Homo sapiens
taaactgctctaagaaaagaaaggttaaactctgtgagttgaaggcacacatcacaaagtagtttctgagaatgattctgtctagtttttatttgaagatatttccttttctactgttggcatcaaatcgcttgaaatctccacttgcaaattccacaaaaagagtgtttcaaatctgctctgtgtaaagggacgttccactctgtgagttgaatacacacagcacaaagaagttactgagaattcttctgtctagcatgaaatgaagaaatcccgtttccaacgaaggcctcaatgcggtccatatatccacttgcagactttacaaacagagtgtttccaaactgctctatgaaaagaaaggttaaactatgtgagttgaacgcacacatcacaaagaattttctgagaatgattctgtctggtttttatttgaaratatttccctttctactgttggcatcaaatggctagaaatctccacttgcaaattccgcaaaaacagtgtttcaaatctgctctgtctaaagggac

SEQ ID NO: 903302 - DNA, 601 bp, Homo sapiens
cagccagaacttccaacactatgttgagtaagagtggtgagagagggcatccctgttttgtgcctgttttcaaagggaatgcttccagtttttgccctttcattaaggtactggctgtgtgtttgtcatagatagctcttattattgtgagatacgtcccatcaataagtaattttttgagagtttttagcatgaagtgttgttgaattttgtcaaaggccttttctgcatctattgagatagtcatgtggtttttgtcattggttctgcttatatgctggattacatttactgatttgtgtatgttgaaccagccttgcattccagggatgaagcccacttgatcatggtggataagctttttgatgtgctgctggattcggtttgccagcgttttattgaggatttttgcatcgatgttcatcagggatattggtcaaaaaatctcttttattgtgtctctgtcaggctttggaatcaggatgaagctggcctcataaaatgagttagggaggattccctctttttataktcattggaatattttcagaaggtattgtaccagctcctccttgtacatctgttagaattcggctgtgat

SEQ ID NO: 903303 - DNA, 596 bp, Homo sapiens
cgcagtgcggtttctcagagaggttccttccagtttttatcccggatattcactttttcaccattggcctcaatgagctgccaaatatccattcayagaatggacaaaaacagtgtttcccaagtgctgtatccaaagaaatgtttatctctgtgacatgaaggcacacatcacaaagcaatttctcagaaggcttctttctagtatttatatgaagatatttcctttttcaccataggcttcaatgtgcctccatatatccctttgcagattctaccaaaatgtgtttccaaacgcctgaatgaaaagaaacctttaactctctgacatgaatacacacatcacaaagcggattcttagctagcttattctagtttttatcctgggatattggctttatcgcctttgcccccaatgagctaccaaatatcccttcacaggttgtacaaaaacagtgtttctaacctgctgaataaaaaacaatttaactctgtgagatgaatgcacatatagcaaagcagtttgtcagatatctttattccacattttatcctgtgatgttcagttttttgccattggtttcaatgagcacccaa

SEQ ID NO: 903304 - DNA, 546 bp, Homo sapiens
gaacagcggatattggtgaaaagcaaatgttgctgcctgattgttcctctggaagtttttcctcagaggagcacctggccatgtgaagtgtcactctgcacctaccgggaggtgcctcccagttaggctactcaggggtcagggccccacttgaggaggcagtctgtccattctgagttctcaagctgtgtgctggaagaaccactactctcttcaaagctgtcagacagggacatttaatgctgcagaagttactgctgctgttcgtttggctatgccctgcccccagaggtggagtctacagaggcaggcaggcctccttgtcctgctgtgtactccaccaagtttgagtttcccagctgctttgtttacctactgaagcctcagcaatggtgggcgctcctctcccagcctcactgccaccttgcaatttgatctcagactgctgtgttagcaatgagtgagkctccatgggcataggaccaactaagccaggcacgggatatgatctcctggtatgccatttgttaagaccattggaaaagt

SEQ ID NO: 903305 - DNA, 654 bp, Homo sapiens
tgtataatctgtgaagcaatgttttgtagcctaaaaaggcctgtagtgaacaaggaaataacttcagataaaaactggaaagaagcattatgagaaactgctttctgatgtgcacattcatctcacagaattaaacccttgttttgatgggacagttcagaaacactgtttttatagaatctgtgaagggatatttgggagcacattgaggcctttggtggaaaaggaaatatcttctgataaaaactagaaagaagctttctgagaaacttctttgtgatgtgttcacttacctcactgagttaagcatttcttttgattgagaggtttggaaacactgtttttatagaatctgtgaagggttatttttgagaacagggatacttttcagcacattgaagcctatgttgaaaaatgaaatatgttctgatgaaaactagagagaagctttctgacaaactgctttgtgatgtgtttattcctgtcacacggttaaacctttgaatgagcagtttggaaacactgattttgtggaatctgaaaggtatatttgggagcacattgaggcctacrgtggaaaaggaaatatcttcagagaacttgacagaagctatattagaaactgctttgtgatgtgtgcattcatctcacaga

SEQ ID NO: 903306 - DNA, 644 bp, Homo sapiens
ttggaaacactgtttctgaagaatctgtgaagtaatattaagaaacgctttaagtccccctgtaaaaaaggacatatcttcagatacaaacttgaaagaaggtttctgagaaactgctttctgamgtgtgcatttgtcaaagagagttaaacctttctttggattgaacagtttggaaacactgttttggcagtatctgagaagggacattagggagcgtactgaggcttacattgaaaatggataaaacttcaggtacaaactagaaagaagttttctgagaaactgctttctgatgtgtgcattcattacacagggttataactttcttttgattgagcagttgggaaacactgttttggttgaatctgacaaggtatattagggaacataatgaggcctatggcaaaaaaggaaatatcttcagataaaaactagaaagtaacattttcagaaactgctttgtgaattgtgaattcatctcacagagttacacctttatcttcattgagcagtttggaaccactgtttttgtagaatctatgaagtgatatttcagggcccattaaggcctaaggtgaaaaggcaaatatcttcagataaaaactagaaagggactttctgagaaactgctttgtgatgtg

SEQ ID NO: 903307 - DNA, 631 bp, Homo sapiens
gaaaaggggaatatcccatgatataaactggaaggaagagatctgagaaaacgcttgttgatgtgtgcattcatctcgcaatgttaaacctttcttttaattcagtagtttggaaacacagttttttcagaatcaacaaagggatattttgtgccacattgaggcctaaaacggaaaaggaaatatcttcagataaaaactagacaagtcctttctgataaactgctttctgatgtttgcattcatctcacagagaaaaacctttcttttcattcagcagtttgaaaacagttttcttagaatctgcaaagagatatttggtgccattttgaggcctatggcgaaaaatgaaatatcttcagataaaaactagaaagaacctttctgagaaactgctttctgatgtgtgcattcatctcacagagttaaacctgtcttttcactcagaagtgtggaaacacagttttcttagaatcaacaaagagatattttgtgccacattgaarcctaaggcaaaaaaggaaatatcttcagataaaaactagaaaggtcctttctcagaaactgctttccaatgttttcactcatctcacagagataaacctttcttttgattcagcagtttgaaaac

SEQ ID NO: 903308 - DNA, 534 bp, Homo sapiens
actttctggagaatttgtgaaggaatatttggcagtgcattgaggcctatggyggaaaaggaaacatcttcagataaaaactcaaaagaagcttaatgagaaactgctttgagatgagataaatcatctcagagagttaaaactttcttttacttcagccatttggaaacacagttttcttaatatctgcgagcagatatttggtgccacattgagacctatggtgaaaaacgaaatatatacatataaaaactagaaagaacctttctgagaaactgatttgtgatgtgtgcattcatctcacagagttaaacatttctattgaatcagcagtttggagacacagttttcttagaatctgcaagtagatatttggtaacgcaatgaggcctattgtgaaaaaggaaatatattcagacaaaaactggaaagaatctttctgacagactacttaatgatgtgtgcattcatctgacacagttaaacctttctttttattcagcactttggtaacactgtttttgtccattgtgc

SEQ ID NO: 903309 - DNA, 657 bp, Homo sapiens
tgcgagccgatatctggtagcgcaatgaggcctmatgtgaaaaaggaaatatcttcagacaaaaactggagagaatctttctaagagactgctttgagatttgtgcattcatctgacagagttaaacctttcttgatattcagcacttcggtaacgttgtttgtgtccactgtgagaatggacatttggaagctcattgaggccaaaggcaaaaaagtgaatatcccaggataactttaaggaagatatctgagaaaacacgtggtgttgtgtgcattcatcttgcagtgttacacctttcttttgattcagttgtttggaaacacagttttgttagaatctgcgaagagatatttggtagcacattgaggcctgtggtgaaaaaggaaatatcttcagataaaaactaggaagaatctttctgagaaactgctttgtggtgtgtgcattcatctcacagagataaacatttctttggattcaacagtttgttaacactgtttttgtccattctgcgaatggacatttgggagctcattgaggtcaatggcaaaaaagtgaatatcttataatgaaaactagaaggaagatgtctgagaaaacgccttctgatgtatgcattcatctcacagtcttaaacatttcttttcattcagc

SEQ ID NO: 903310 - DNA, 601 bp, Homo sapiens
tctgagaaactgcttcatgatgtgtgcattcctctcagagacttgaaccattcttttgattgagtrgtttagaaggactctttttctagaatctgcaaagggatatttgtgagcacttggacgtctatggaggaaaaggaaatattctcacataaaaagtagaaaggagttttcttagacactgctttgtgatctgttcgttcatctcacagagttaaacctatcttttgattgagcagtttggaaacacagcgtttgaagaatctgagaagggatattttgattcaccttgaagcctatggggaaaaatgaaatatcttctgatacaaactgaaggggtggcctgcccctccacacttgtgggtatttctagtcgggtgggacaagagactgagaaaagaaataagacacagggacaaagtatagagaaacaacagtgggctcaggggaccagcactcagcacaccaaggacgtgcaccggcaccggcctctgagttcattattattttcattatttcagcaaaaagaatgtagtaggagaacagggtgataattaggagaaggtcagcaaaaaacttgtgagcaaaagaatctatgtca

SEQ ID NO: 903311 - DNA, 639 bp, Homo sapiens
aatgtagtaggagaacagggtgataattaggagaaggtcagcaaaaaacttgtgagcaaaagaatctatgtcataatgaagttcaagggaaggtactgtgcccggatgtgcaagtaagccagatttatgtttctctccacccaaacatctcagtgtagtaaagaagaacaaggcagcattgctgcaaacatgtctcacctcccaccatagggcagtttctctcctatctcagaattgaacaaatgtacaatcgggttttataccaagacattcagttcacaggggcagtcaggagacagtggccttcctttatctcaactgtaagaggctttcctcttttattaatccacctctgcacagaccctttatgggtgtcaggctgggggatggtcaggtctttctcatcccatgaggccatatttcagactatcacatggggagaaaccttggacaataccccactttcaagggcagaggtccctgcagctttccacagtgcattgtgctcctggtttactgagactagataatggcaatgacctttatcaagtatactgcctgtaaacattttcttaacaaggcatgtcytgcacagccctacatcccttaaaccttgatttcatacaacacttgtttttg

SEQ ID NO: 903312 - DNA, 586 bp, Homo sapiens
tttacatcaaaaacagtaaaattaaacaaagacagtcattactcatgatatagggatcaatttagcaagaatatataacaattctaagcctatatgcacctcacactggagcacctagatatattaagcatataatattagatgtcaaacatatgtactccaatataataagagtggtgtactttagcatcccattcacatgttagatagataatcaaggcaaaaaatcaaacaaggaacaaaggacttaaattggactttagatcaaatggactgaacaaatatttacaaaacattctacccaacaactgtatcatgtacattattctcttcatacatggaacattctccatgatagacaataggttaggttacaaacctaagtctcaatgaaatttcaataatcaaaattatgtgaaatatctttcagaccacaatggagtaaaactagatataaataccaagaggaacttcagaaactatacatakatatgaaaattaaacaacatactcctgaagaattgggtcaacaaagaaattaccacaaattttaaaaattgtgaaacaagtgtaaatggaaacataa

SEQ ID NO: 903313 - DNA, 612 bp, Homo sapiens
tggggaaggaaaaaggaagaaaccagaggtcctgacttcatacrtgtctgcaggtgctcttgctgcctgaacatggtcactgtgcgctgggcggacaagcagacctcccaagtggaaagaggtcccctcctccccctgcccactcaagatgtgcagacacttgctgaccaccatgctgcatctggggctttctcggatggcaccctgctttgggcaccccacccgccaccagctcagatgcaacatatttaccaagaagtttcacatgcgttggaatctacagcagctctgccagaccatgggatttgagaatctgaggtcagtggccggcggccagtgtcccatgtccctgactcttaagctctggcaggcaaagaatgcggaaggttggcttccaaagaactgacacagttctgtttatacctcacacggggagaagagaataaactcaaaacactgtcagagggccgagcagctcctgccaaccagtgaggcggtgggggctgcaggaaaggcaaatggcagttcctgttggggctgcatgtcgcagccgaccccttctgggcctcctctccctcacctatcccagaccaaaaataccaacggcagccc

SEQ ID NO: 903314 - DNA, 620 bp, Homo sapiens
atctgaggtcagtggccggcggccagtgtcccatgtccctgactcttaagctctggcaggcaaagaatgcggaaggttggcttccaaagaactgacacagttctgtttatacctcacacggggagaagagaataaactcaaaacactgtcagagggccgagcagctcctgccaaccagtgaggcggtgggggctgcaggaaaggcaaatggcagttcctgttggggctgcatgtcgcagccgaccccttctgggcctcctctccctcacctatcccagaccaaaaataccaacggcagccctggacatacacacacacaaatgtcacaatttcaaatagatagtcatgttcacccatcatttgcacattctgtatccaaaatcagtttcctccttccctcccgaatcttcccacccctaagttctgctgctgtcctgtggtacacctggacgacaggatactggagcacgcccacagcaaagggatgtgggctggtactgaggaaacrgcagcccggacagtgagtagtggcccaaggcctccacacaggctgggaagagagggaggcaagctcaggctgcctggattccagcctcctccggcacagacacctgactgcc

SEQ ID NO: 903315 - DNA, 608 bp, Homo sapiens
gtctctactaaaaattaaaaaattagctgggtttggtcgcaagaacctgtaatcctagctactcaggaggctgaggcaagagaatcgctggarccctggaggcagaggttgcagtgagcagagatcacatcaccgtactccagcctgggtgacagagcaagactctatctcaaaaaaaaggaaggaattgcatattatttatgttacaagaaaaaaatgagcttatttaattttttgacaataaaataaagccctgaaccaaaccaaaccttagtaaataactcataagttactaataaagaactgttatcattcatttgaaaaaaaaaatgtggcattactcatcttcagcaagggatgcacatttagggatcagttctctgtccctggaagaaactcacaggtaccagggccccagatcatgtctttgggaaccccgcatctgtcctatggagcctcctaacacccagggacacttatctggaacctggtcattttcagtgtccagtggggcctccttcacacatcctcagggtggccacaacccttggaacacacatctgctcatcactggtcatggcaacagagaacatggatgggaaaaaaag

SEQ ID NO: 903316 - DNA, 608 bp, Homo sapiens
gtctctactaaaaattaaaaaattagctgggtttggtcgcaagaacctgtaatcctagctactcaggaggctgaggcaagagaatcgctggagccctrgaggcagaggttgcagtgagcagagatcacatcaccgtactccagcctgggtgacagagcaagactctatctcaaaaaaaaggaaggaattgcatattatttatgttacaagaaaaaaatgagcttatttaattttttgacaataaaataaagccctgaaccaaaccaaaccttagtaaataactcataagttactaataaagaactgttatcattcatttgaaaaaaaaaatgtggcattactcatcttcagcaagggatgcacatttagggatcagttctctgtccctggaagaaactcacaggtaccagggccccagatcatgtctttgggaaccccgcatctgtcctatggagcctcctaacacccagggacacttatctggaacctggtcattttcagtgtccagtggggcctccttcacacatcctcagggtggccacaacccttggaacacacatctgctcatcactggtcatggcaacagagaacatggatgggaaaaaaag

SEQ ID NO: 903317 - DNA, 554 bp, Homo sapiens
gccgacttgaccttcctagtatctaggactataggctcatgccaccacacccagataacttttcycattttttaagaaatgggatctcactatgttgcccaggttggtcttgaactcctggcctcaagtgatcctcccaccctgcctcccagtgttgggattacaggtgtgagctaccacaccttgatggctctgcttttgattagaatgactaggctgccccagtgtgtttgtgatggtgttcccagaggagactggcatgtgagttggtggaatgaatggaaaagatacaccctcaacatgggtgggcaccatccaatcgcttgggggaccatatggaacaaaaaactgcaggaagggcaatttttcaccacttctctcctggagtcatgacacccttctcctgacttgggacttcagaactccaggttctccaacctttgaactccaggactgacaccagtggcctactgggctctcaggccttcagccttagactgagaattacactatcagcttctttggttctgaggccttcatacttggactgagtg

SEQ ID NO: 903318 - DNA, 600 bp, Homo sapiens
ggccatgaaatgccaattcctttctgggcagagggcatttggttgtctcaagctaaaatccacattttgctttgcatctgggcaatttacaaaagaaggaggtttattggacttacagttccacatggctggggaggcctcacaatcatggtggaagggaagaaggagcaagtcacatcttacatggacggcaccacccaaagagagctgtgtagggaaactcccctcataataccatcagatctcatgagatttatttgctatcaggagaacagcacgggaaagacctggccccatgattcaattacctccaccaggtccctttcacaatatgtgggaattcaaggtgagatttgggtggggacacagccaaaccatatcagggacaaattccaaaaacattagctttattcaaatttactttcctttttacctttctgagtcgtcaagttctaaaagcactgcttaattttgtttctaaactcacattgcagcacagggcatgatctgccctcaagacaaagaccataagctactctttcctggaaaatgtacaagttggtatstcagcaaatgctactcatgtttcttatccttatg

SEQ ID NO: 903319 - DNA, 623 bp, Homo sapiens
cccaaaatattcattttctttggttcatttgtacaataacttatgttctgaaaataataaaaagaatgaggattaataatattcatctgagaatctcattttttcattcataaattacatatatgattgatacaatttgcctttttcaattatgtcttttttttttttttttgaaatggagtctcactctgtctcccaggctggagtgcagtggcgaggtctttgctcaccgcaagctccgcctcccgggttcacgccgttctcctgcctcagcctccggagcagctgggattacaggcgcccaccaccatgcctggctaattttttgtgtttttagtagagacggggtttcactgtgttatccaggatggtctcgatctcctgacgtcgtgatccacctgccttggcctcccaaagtgctgggattacaggcgtgagccaccgcaccagccttatgtcatctttaatattgatcattctatccaattatcaaagagaagatgaattaatttatccagtctcccactgaagcacagatgaggagtgaaaacatgagcgggtagagaggggcccctaagctgctgtggccactgtgtgagagsgtgcgaaatggtgcctccctc

SEQ ID NO: 903320 - DNA, 644 bp, Homo sapiens
agttatgcacagcaaaagaaactatcaacagagtaaacagacagcctacaggataggagaacatttttgcaaactatgtatctgacaaaggtctaatayccagatctttaaggaacttaaatttagaagaaaaaaacaacctattaaaaagtaggaaagggatatgaacagacacatctcagaagaaaacacgtatgtggccaacaatcatatgagaaaaagctcaacatcactgatcattagggtgagcagatttctgaactgagatttctttattcttattaaagggatgggtgcagattacagtagctgagaaatgaggatgagtaagagagttgtcagaagagttattctcctagcttttaaaatggtgcagcagacaaactggcttgtatgttccattttcactttggataaaatattcacatttcaattactgaaacaatctttgcaggaagtattctatttattccctctggctgtgaaagctaaaagcagcatttctgagagaaaagaattttttctgtgatctgaaaaaaagagagatgacagcctcattccatacttttctgtgttttgtcttcttttcagtgagttgcctctatttcacatgatagtaatgttatttgaattatatctcaatt

SEQ ID NO: 903321 - DNA, 559 bp, Homo sapiens
tgtgaatgagattacatttcttatttggctcttggcttggatgctgttggtgtatatgagtgctagtaatttttgtatattgatttcatgttgtgaaactatgctaaagttgtttatcagctgaaggagcttttgggctgagactgtggggttttctagaaatagaatcatgtcctctgccagcaggggtagtttgtcttcctcttttcctatctggatgccttttatttatttctcttgcctgatttctctggccaggactttcaatactatgttgaataggagtggtgagagaaggcatccttgtcttgtgctggttttcaagggggaatgcttctagcttttacccattcagcataatgttggctgtggatttgtcatagatggctcatattattttgaagtatgttttttcaatacttaatttattaagggtttttaccatgaaagcatgttatatgttatcaagcacttttcctgcatctattgarataatcatgtagtttttgtctttagttttgtttgtctaatgaatcgcatttattgattgtggatgtta

SEQ ID NO: 903322 - DNA, 631 bp, Homo sapiens
caggtgatttagatactttccaaagtttaagaacctctgttttatatgatactactggaatcccttctcaaaagatttgagtgtcattaattggcccataggtracaattcccagaatatcatctattttaggtgttcaaagttttttatggaaatttgtaatatcatattagcaggaaccaagaagtttaactacacagctgtcagacttccagttactgccttggaaaaagtcaagtgatattttaatcattgtcagacaccattcttagcaagaaaaactttccaggaaaagaaggtaaactgagagaagaattgcataactctaatccaagtaccaaaatataaatatctcctattctgtttccagtaagcactgaatgaatatcaattgaggcagctccagaatgatgcaagatgaattcataattggccattcaaacttattaattgccccatattaagctcacaatatgttaccacctggttgccatgctgctaaaacaaaccagctgtaacacattctttccacctgagggattgattgaatgccacagtcaacagaagactgtatctctcccaagttcgcatgcagatttcttgtaacaaataatttttaacaaaaagatgt

SEQ ID NO: 903323 - DNA, 639 bp, Homo sapiens
gtacttattgaaaagaaattcatgtataagtggagctgcatagttcaaaaccatgttgttcaagggtcaactgtacagagaaatgacagaattttcttaatttagcatatcttcaaatcccatgtatttgtaaaacagtaacacaagaaattaagacattttaggtggtatcatactaattatgcttatttactgtctttgtccccaaagacagcacgatagttatctaaaaaattttcagtaaagtttcatgattgtatatatgaaagacacaaattaactcaacattgatgattcaaggttttatatttagccagcttcatgactgaaaataatagtgtttctttttcttttctgggaataaacccatttccttctcattcctttttctcagcagatggcaccaagcagatccatggaagtgagtgggaaccacacctctgtggccatgtttgttctcctaggactctcagatgaaaaagagctgcagctcatcctctttccagtcttcctggtgatctaccttgtgaccctgatttggaacatgggtcttatcatcctcatcagaatagactctcayctgaacacacccatgtacttttttctcagtttcctctcatttacagacatctgctattc

SEQ ID NO: 903324 - DNA, 611 bp, Homo sapiens
ttggttgagttcgtctgaagacctgggattaatggaaagaaatgttcaggttaaggtaaaggattgtggagaccaagttttattgtgcagaagaagctctcagacagcagacttcagagagagcaggttgtaaattgtttcttatcagacttaaaagggtgcctggctcttagttgattatctcctagatcagggaaggaaggaaggaaaacaaagtggagaggggattctctatagaatgtggatttttcccacaagagactttgcaaggcaatttcaaggtatgtcaaggaaatatatttttgtgtaaaacattttgattttcttccttgttatgctacagtcagattgtaaagtaagtcactgtatatggtgttaaataaaacccatctaatgagaatttatggtttgcagggcatgactccccagaccccttagaaaggaatttgggcaagataaaaaaaatcagagcttagtcctcaggtagctacagatgaggaaaayagagtttctaaataacttggatcaggctatgtacctacaaaatggcagagatgaaattaataatctcagatccaatgacttaaaagtgaatattcttaaccctcttt

SEQ ID NO: 903325 - DNA, 700 bp, Homo sapiens
accaaagaaacaagattaaaactagataaggtcatgtgtaggattttccaaatctttcttgtcatgctgaaacttccagctcttaaaacagtaacacatatttcctttgtcctaaaaaccaatattaagtctccttccttgggcataagaatatggatagttatacttaggtgacagtaatgtgtggtaaagagtgggccttgctggcatgcggacaatgaccaaattgtattgatcatattttaatcgaatacattgctccactactgacttgcaaatacatgatgaatttgctttctaacatattccaagaaggccagagaactggcttatccatttggattaatccactggtgaatttctttcgggataggccaaaatggatctggactataatctttacatatttagatccttcaaactagaccaaaaaggaaatctgggctgcaaggctcaattagaagaacagtgtgggatgctgctttgctgactattgggggtcgctgccccatgtcttcagaggagactggagcccagtgcctgccatgaccaacttatgaggtgaagtaagggcttccccctaggaacgcatgtgcttaatacagatgtgctgtgtgctaggtaccctaaggactacaggaaataatragaatacatgatgtgtccataacaaggaggcacacaggccacggcaccagct

SEQ ID NO: 903326 - DNA, 580 bp, Homo sapiens
ccccagaaaagcagtacttgccgctgagggtgacaggaccaaggcaggcatccccacgtggtcagayacctctgaaacgtgggtgaataatcaggcaggtgtccccgcatgattaaacaccaagggaagactgtcttcccgagtccgagactggcgccggagttttgggtccacagataaaacatgtctccttcgtctctaccagaaaaggaaaggaactgaaattaagagaagggagagactgaagtatggtgccaagattcaaaggagaaagaggttgtgggatagtaacagaggttggagaagagagtaaaaaaggctgcttaccagatttaaaaatggtgagatgttccttgggctggttggtctgaggaccagaggtcgtaggtggatctttctcatggaacaaagagcaggaggacaggggattgatctcccaagggaggtcccccgatcagagtcacagcaccaaatttcactcgtgtctgtgtgaagagaccaccaacaggctttctgtgagcaacaagactgcttatttcacctgggtgcaggcgggccgagtccaaaaagagagtcagca

SEQ ID NO: 903327 - DNA, 657 bp, Homo sapiens
gctttgtgctttttgtaacagtatattaaaaacaaaacaaaacacaaaaccacctactatatttcatttacttgcaataatatgacccccatattttacaagataaaatttcgggatcccatctactatgttgtggagagagctcatgtactcttctttctccgacactattctctttcatgcaaactacaacacaaaaacaaaaacaaaacagaacacccaaaacccaaaatcctttgggctgacaaattacaaaaaatttgatagttctgatgagccaggacaggattttgttcagtcttcagtccagtggtgttctggtaattgcttaacaaccagctcaggatcggggaagggcttatttgtggcatttgctgatttcagtggtataaatactccaccatggccaatttcaagctaccatcatggagtcagccagcatacaaaattgttgaaaatttaacaagcagctatgagctgattctggcacaccactgggactcctcatttatccctcagcagggtaccttcctctagctatcaaatggcaccaaggtacacaatggctcgggtcaccgtgcctggtgccaaagtttatttgagaagcagaactcacttggcaaraaaagctgctatgaaagttagcaggcacataag

SEQ ID NO: 903328 - DNA, 618 bp, Homo sapiens
agttccacagatccccagggtgggggcaaaatgctgycagtctctttgctaaaacatagcaagagtcacctttattccagttcccaacaagttcctcatctccatcggagaccacctcagcctggacttcattgtccatatcactgtcagcattttggtcaaagccattcaacaagtatctaggaggttccaaactttcccccatctttctgtcttctgagccctctaagtctctaggacattccaaacattcctacatttttctgtcttcttttcagcccttggaactgttccaacctctgcctgttacccagttgcaaatttgcttccacatttttgggtatcctttcagcagtgccccactctccgtggtgccagtttactgtaatagtccattctcatgctgctgtgacaaaatacctgagactgagtaattgataaaggaaaaacgtttaattggttgacagttctgcagggctggggaggcctccggaaacttacagtcatggtggaaggggaaggaaacatgtccttcttcacattacagcagcaaggaaaagtgctgggcaaaaggagggaaaagccccttataaaaccatcagatcttgtgagaactta

SEQ ID NO: 903329 - DNA, 580 bp, Homo sapiens
cgtttccactgtccatcagttgctaagtagccatgtgccccatctaatgtaatctaatttatcatggaattgtggtttaagctggacattaagaattgcaaataaatggcttttgcctaagattaatagtaayatattaatatttttcttccatctgcaaaagtaacattaatgaaaatcaaatgttaaaattctataattattagtaaagtgttttattaagtaccttatacatctggaattactccttaattctggaaataatttacgtagactcttctctacataagattaagatttcataccatgatatagatttatgcaatataattgttgccttttgaattaataatatttgaatttgagctgcaagtttttaaaaaagtacttcaaagactaattcaccttcatagataaggcaaatagtctaatcaatttatggagaatgtatttagaatatgtaacagcaagtggcaggaggtactttagagttcaagactcatgtgcccatcactctgctagaagcacccataaatatggaatcatgtacttgttgaaaatgtcactgatgaaaaatctt

SEQ ID NO: 903330 - DNA, 628 bp, Homo sapiens
tcttaccaactagtgaaaagaaaatgcatcccatgtttaccacgtagacacagcctcagctggaaatagaagttctcctggagggcacccctctttctgctgctgctgagtctcttttggaagaggaacttgcaaactgcatagtgcagctatacagggaaagcagcaggaggaccctacccatttataggatggcctgaattagttgagtctgaaactaaacatggtttaccaggaacaggggaagaattttattgccgaatgttttaagacatgtcacaagacatagtcaatgtgtgcaaagtcacatataataaatgtgtactataaatctcggctttacaccatatagacaaattttattactagaaaattatttccacttcgttaaggaaccagaacgatagttacagaagcttatttcaaaggagcactaatttactttatagccttgggttttgtcccagtactgggaactaacagtgctctgacttcttccagttgttggcrggtcctggtttgaccatgtgaaaggatggtgggctgcaaaagacatgcaccggatcctctacctcttctacgaggatattaaaaaagtaagtggcactgagacttataggtcagaccc

SEQ ID NO: 903331 - DNA, 630 bp, Homo sapiens
tgccccatggcctcccctagaactttccccaatgtgactgttcctggactaaactgagggtcgggctgctatttcctgtggcccaataacaagatgcagatgaactggggaggaagagaagttttatttctgtaactggttacattcagagggcctggaaattatcaccaaaccaactcaaaatgacaaaatttttcagagcttatctaccttctaagctgtatgtctacatgtaagtgtgcatgccttctaaagacatatgtgattaatttattttaatttataactaagatctgagtcctgaagaccttcctctggtgcctaatgaagtttgcttaatttaaatgggtctccaggtactgggttgatcacccttatcttgtctcctgttaaactactgaggtttggggagttccttcagacctccaataaacgtgtttgtggaggcctggggagtttcttcagagccccaataaaacttatataatcctaactgggtactgttaagaactcctttattattttgtcatgttgtaaggcccaggaaaygcctaggcaaaactctggatgggcttttgttacatttcagcctttgcataagggcactggctttttttaatatttaactta

SEQ ID NO: 903332 - DNA, 682 bp, Homo sapiens
agtgtaaaagtgttcctatttctccacatcctccccaggacctgttgtttcctgactttttaatgattgccattctaactggtgtgagatggtatctcattgtggttttgatttgcatttctctgatkgccagtgatgatgagcattttttcatgtgttttttggctgtataaatgtctttttttaagaagtgtctgttcaggtctttctcccactttttggtgggttgtttgtttttttcttgtaaatttgtttgagttcattgtcaattctggatattagccctttgtcagatgagtagattgcaaaaattttctcccattctgtaggttgcctgttcactctgatggtagtttcttttgcaggagctctttagtttaattagatccgatttgtcaatgttggcttttgttgccagtgcttctggtgttttagacatgaagtcctttcccatgcctttgtcctgaatggtaatccctaggttttcttctagggtttttatggttttaggtctaacatgtaagtctttaatccatcttgaattaatttttgtataaggtgtaaggaagggatgcagtttcagctttctacatttggctagccagttttcccagcaccatttattaaatagggaatcctttctccatttcttgtttttgtcaggtttgtcaaagatcagata

SEQ ID NO: 903333 - DNA, 646 bp, Homo sapiens
tttatctgagcctgtattaaaacagaggagagactgacaaagctgatcaaactacatttgacataacttgaggctggatatactgtgatggctggccctcagttttatatgaacttccctcattataactttttttgctctatctcagggacaaacctctgcccatgtacttaaatgaaaatgaacattccctaccttcctgttattgcaacatttgacacagttccttaagtatcaagaccgctcagcattttttagtttttctcttcccacagtcatcgatctcatgtctttgcatgtaaaagctttgcttgaccacctattccaagaaatgttctggcatggaccctgagcatttctctgttgcaccaactgctcttaataaagtattttctttattaagaaaatccggagatgtgtctgtgcttccttgacagtaaatacaactaatagttatcttcctaagctgctaagggtgtactgggatagagtgggcagtttctgggggaaggagtaacagagygtgaacaggttaaacaatgttcccaaggctacaatgctagtaagtaattgatttaggatttagaatttttaattgatatatctaactcaatagcccatcttttctcaatatattatgaggaag

SEQ ID NO: 903334 - DNA, 646 bp, Homo sapiens
ataagagtctcaaacaaaatcatatagcaagcagcatacaggaatctgtagatgcattcacattaagatmagaattaaaagagaagaggccagaaatgcttacgggatgtggagaaattgagaaaataataattttttcagggaaagacaacatgctgatcctggttatattgatataaagataaatagtggggctgggggcagtggctcatgcctgtaatcccaacacattgggaggccaaggtgggtggatcacaagctcaggaatttgagaccagcctcgccaatatgatgaaactccatctctactacaaatacaataattagccaggtgtggtggcatgtgcctgtagtcccaggtattcgggaggctgaggcaggagaatcacttgaccccaggaggtagaggctgcagtgggccaaaatcgcaccactgcacttcagtctgagcaacagagcaagactcaatctcaaaaaaaagatttttttttttttcataaaaagaaaaagataaatagtgggccctaaactagaaattctggcaaggtggaaacctcaggtacaattctaagccttttgaagttgttaaaatggaaaaaagctaaaattgactaagacctaacaaaagataccacatagacagggg

SEQ ID NO: 903335 - DNA, 623 bp, Homo sapiens
ttaagtttccaggcaggtgcctctctatcccagcttcattgttgtgttcttttcttcacaagtattttcagagctgcccttggccatctggaagatgcatggtgaaagaaacggatgcttgctctcagcacacacttccttccctgacagtttgtcgcctagcagctattttggcttcccaagggaaatcttgtcctttgcccttgtggggcttactgcaaatcaactcatcatgaggaagattaatcagagaaaagacatacaattttttttttttaaactgtgagcatgaagagaatcacagagtgtatactcaatctcccaatgggggcaaaatacttctgtaacctcctttcaggtggcgagaggggacatgggaatgtaggtaattctgttgagcggtaataagtgatgactaggaagattgaatggatacttgggagaatgaatagggggaggaaacagagattgacttattaatggttccctttggaaattaaatactccttggasaccagtcattactttgtaaaaaagtctgtttgagcgggcttacatcttaacgttctttcctgtagtcaagaagaagatcccagggagggagggaaagtgaattgtaataa

SEQ ID NO: 903336 - DNA, 599 bp, Homo sapiens
tttcactttaaaaaacaaataaataaatattgccatcttccaaagtttttgtcccactgaaaacacagaaagaactaaaagagattgagatattttcatttcaaaaatttatcattggttttcaggtttcttcaaagcatgttttcccctattgtttctgcctgaatttgaatatgccagaactccttagagaattatataggtaggaaaatctgtcagtgctctaaacttaaaaacagaagatgaaaaaataatatatgctggccatatatgtgtatatattccaccttatctgtgatttttgttatttctttgccttaataaaagacatcggtaaacaaagccacccgaagtttggactgggcggagcccagcacagtgccgtaagctgctgtagccagactgcctctgtagattcctcctctctggacagggcatctctgaaagaaaggcagcagccctagtcaggggcttgtggataaaactcccatctcccggcgacagagcacctgggggaagagggggatgwgggtacagcttcagccgacttaaacgttcctgcctgccagctctgaagagagcggcagatctcccagcac

SEQ ID NO: 903337 - DNA, 651 bp, Homo sapiens
taatccctaaattctgtatggactgtaaatactgttatggactgagttgtgccccaccccatccatatgttgaagttctaagtgccmgtgtgactgtttaaaaatagggcttgtagcaggtaattaaggttaaacaaagtcatcagagtggggccctaatccagtagggttggtggcctcataagaagaggaaaagagagttctctaaatttccccacccatcttcatgtctttctttctccgccatgtgaggatatagtgagaatgtggctgtctacaagccaggaatatagccctcgccagaacctgaccatgttggcatgtgatctcacccctccaacctccagaactgtgaaaaagtaaatatctgttgtgtaagccacatgtctagggcattttgttatgttagactatattaggccatctcttgcattgctataaagaaatacataggactggaatttacaaagaaaagaggtttaattggctcacagttctgcgggctatacaggaaacatagtgctggcatcagctcatggggaggactcagggagctttttctcctggcagaaagcaaagcaggagtgggcacttcatgtagtcaaagcagaagcaagcaatggagagaacaagagagaaagagagagtaga

SEQ ID NO: 903338 - DNA, 664 bp, Homo sapiens
gagcttcttataatttcctttatagtattgaggcaggctaagcttatttccagtatgtgtaaaatgactctaaatgaataatttattcactaaacaaatgctttcttgagcaccacrtcgtgccaagaagtgtgctagaaaagaacaagaaagacacagtcttgctcacttttattcaggtggcagcagccttctacgtacatacatgtactttacaacacactaatatgatgcaccaaaatataatgtatcatttcctaaatgatttgacctcatttattaataatttcaaaatacatcaattgatggtttttaaaagtcgttttgtggcagcacctgtccaatccttcctcccccaccccctcttttgtcattactaggatatgattcaacttattcttcaggcataaaggagtttgattggattgtaacccttttctctcctttttatctgtgtttatgcttccttccttgcttcttgtaaactctttaatcttatttaaaaaaaaaaaattttttaggttgttaggactgatatctttctcttctaacttttcagagaaagaacagttaagagactttgcaatattggaactctgtcagctgggcccctatgcctctcaaagataacatcaaaagcacattcatgatccatctgagctga

SEQ ID NO: 903339 - DNA, 563 bp, Homo sapiens
attttctttaagtagttttacagtttcaggttttgtgtttatgtctttaatccatgtgagtttattttcttacgtgatgtgagatgatgatcccatttcattcttttacatgcagatgtccagtttttccaacaccatttattgaagaaattgtcctttgtccattgcatattcttggcaccgttgttgaaaatccattgaccacagaaacatgagttcatttctgtaatctcaattctgttccatttgtttaatgtgtttatttgaatctagtatcatgctattttaattattttagctttgtagtatagtttgaaatcaggtagtgtgatgcctccacctttatcctctttgtggaaatgcagattttagtttttctatatgtgtcattgaggatgagaattgaaaagcaactagaataagtattgagcaagccaattcatggtatctgccaaaagttgcaattattaaaaaaaaaaaacacytaaaaacgtcatgtcttatataccatggtaatagaaaatatatttcataatttagttgtacaacttcaaaatagcttt

SEQ ID NO: 903340 - DNA, 425 bp, Homo sapiens
aaatgagaaaatgtgttcagtgctgaaactagcactcccagccccaggtcagttacagcagtggcaggcattatgtttgtctccacaagattcatcaagctatatgggcaaagactcagcaagtagaaggcaacggagcatgggctaagatcagcaatttatctgaggccaaataccacaaaacaaagggagactcattatgtaagctagctacaggtgtattagttccgtttcagagacttccaacaggttttcatatatttcacatttaacatcagtatcaaccttaatgtaagagacactgcaatcattttttatagtacttggaaatgaaaattctcaggaggaacttttcaaaggatttttcagttccatttttcttataggaaaagttttatayctaaggtaatacaatctgctcttaa

SEQ ID NO: 903341 - DNA, 595 bp, Homo sapiens
tgcccacttttacttaacactagtttagctcttctagtcaatgcaacaagaaaaatgaaatatttgaataatttaaaaaactatcattttttaagatgttaactttccaacataaaawcttaacataacacatgtaaatagtaaaatggctggttatcgaaagaaaagttcaaattcaaaagctttcctatatagaagttatattacacagaattcttgggcattgcgaaggcccacagacatatttaggatttgatgctggcagtcgtctgagaattcagtgaagaatgttactcagaatgcctccctagaacctctccaacatggtagtgtcaggataaagatactcctcagctttcaatgccatcttcctttagctcttctccaacaaccttctcgagtcccatcatgtttccactaagagtctccttaggacacttccagcttgtccacaaaactgagttgtgcacaacaatcattttattattattaaaattttgtgggtcaggaacttgagaaggccctagctggctggtttgtatttggtccttctaggcagctgcatttagatatcagctagacatcattatcagaa

SEQ ID NO: 903342 - DNA, 621 bp, Homo sapiens
ggcttctggacaaattagggaaagaattttttctttcctaaggcccaaaataattttggtgagttctaaaacaatgccaacactataaatttatagcaatttttgtatggccaagataaaagaagtttatattcagggacattggaaaattaaaaatctattgaaatgtgacagaaaagcttaacagtaaatgtttgcaatacttatgcacacgtaaatgaaactgtacttctcagaatttctaaaacaattgaatacgttttctaatcttaatgtctaacacataactgccttaataacagcataaaaatatattaagtcttataatacctgataccatatggcatactatactaatttatgtagtgaagtaacttacataatttacttttggggacatggtagcatgttttgaaaagtaagtggacagctcaggaaaaaattaagagtgtggagttgggtctttcaaatcatttatacatttataggaaaatattttatttaaataagaattaaattcaattttcttattgttttccaatacctgaatgtttgytaatgtgtaaagttgaataatttgcctcattttcatttcttattaagatatatcaagtctgtgaa

SEQ ID NO: 903343 - DNA, 688 bp, Homo sapiens
actggaacaagacgaagatgcttgcttttaccactcccatgcaacatagaactataagtcctagccagggccagcaggcaagagaaagaaataaaagacatccaaattggaaagataaagctaacttacctctgtttactgatggcataatctcatacttataaaatcctaaacacttcttcaaaaaactagattcgataaatgaattaggaagtgtcaagatataaaatcaacatacaaaattcagtgtttttttaatataccaataacattcaaggtgagaaagaaatcaagaaagcaatcttgtttacaatagctacaagaaggaaacacctggaaatatatttaaccaagaaggtgaaagagctctagaagtaaaattacaaaaacaactggtaaaagaaattgcagatgacacagacaaatggaaaaatatcccatgatcatagattggaataattaatattgttaaaatgaccacactgcttttttttcttttccctagcaacaatgttgatacctagtaatatgttatcttattactatctcctgtctttacttgagaattctgtttgatctatccagtaaagttgtcaatcatctctattaattgtctgcacttccaaataaaggaaataaattgacrcatagttttctgtgcataattctactatttttttttctttcc

SEQ ID NO: 903344 - DNA, 496 bp, Homo sapiens
ccaatttctccacattcttgccaacatttatctgactttttgattctagccatcctagtgggagtgtagttgtatttcattatggttttgayttacgtttctatgatgattaatgatgccaagcatattttcttgtgctaattgaccatttgtgtctcttctttagagattgtgacttcttggatgaatctgtttctgaggccagttttttgtttttttgagacagggtctcactctgtcacctagactggagtgcggtggcacaatgttggctcactgcaacctctgcctcctgggctcaaggaatttttctgcctcagcctcctgattagctgggattaccagcacacaccaccacatccagctaattttttttttttatattgttagtagagacgaggtttcaccatgttggccaggctgtgaagtcagtttttgatatttgttctgacactaagaggactctacccagctgttctaatctacagttgatctt

SEQ ID NO: 903345 - DNA, 613 bp, Homo sapiens
tgtctttaataccataatcgtttcatttcctagcatggttcaataaatgagagagaattcatgcaaaaatgtaagtctgtgaaaagggtgacttggaattatgctcatgattggtggagagattcatatccatgatgtcatagtcatttgaccctgttgccattcctcgactggaggaactagagcaagagagcatgcttgcacctcactcgtgcaggacctgcttcctccacccaatgatgtatggagcagccttttagaatatgtagacaaataagatttctgttctttgaaattgcaaatgaaggactcaaaatcaaagatataattaatgttgcttcagaagttttaatagaaggggggttttgtagctaactgcaaagacatgattttgcatgttaacatgctttaagtcacttgctaatatagcataatgcatgcaagaaagaaccccagagttaaaacttacttttagaaaatatgtgattccattatctaaaatgcatgcagatgccataaaactatagtagaaagctcatccaccctatcaaatgtaaagaaatgtttgtttttcctgctatatcatatkggttaatatgctcttattgattac

SEQ ID NO: 903346 - DNA, 573 bp, Homo sapiens
cacacacacatttgttagagtatttattagttatctaatatatgcaatccataaaaccaaactaacacatttttctaacaaactttaaaagactaaaagtattcaatacaagtaaactatcaccataggaatatttaatgaatgtacatcaggaagataaaaattgataccaaagaaaaagctgcaatgtcagaagaaaatgggagtgaaccaaaaaaaaaaagaaagaaaaagaaatggcaaacatatgggtaaatataaacaaactctgactttacaaaattaaaatgacaattactaattttgtggattaaaaacacaatggaattaaaatagtgggcaagaataacatttaagacacacaaatcaatactatatagaacgaattatctgaaaaagcaattaaattaaaaagcaataatataaaataaactctaaaaacatggcaaattcaaaaatatgttttsaaataattcatgagtcaaaggaaataatggaaaatttaaataaggaaaatacagagaatactatatatcaaatttgtgggaagtactgaagaagttcatagtggaa

SEQ ID NO: 903347 - DNA, 610 bp, Homo sapiens
ccgtaaaaatgtctaacctccaataaaatttgcatgcttttctcctgttaatctgtcttttgtcagcatcatccataggccttagccacagaatctcagaaagtagaggaaaggtctttccttctccacagatgagaactagaaggtccatggagcatcccccaccccctgcccagaccaattgaccagctccccactgacaagctccagagtaacaccaggcagccaatctctaacttgctcactgttccagctatgttagataatgtaacaattgcagagccaaacagctatctgcattaaccaggagattggagaagtcataaaatagatgttcccttatcaacaagacaatgggagtattgttataaagagagggattagaatagaattgttgactttttgtccatattgatggaaacttataattgcttcccaaatcctactcttccagatccatttttaaaattttgttttgttttctaaaaaaaaaagaaacaaaaagcaaaaccaaacaacaacaacaacaaaaaaaaamcacagtttttacttctttccatgaataaccaaacctctggtctctggaaatggccctaaaacctttttggag

SEQ ID NO: 903348 - DNA, 620 bp, Homo sapiens
agttctttacagttaacttttaggaacttttagacacagcagattgtcttagaccaatattaaaatgagtctctattcctttatcgcaaaccaactggcagttcaaggggccaggtcaaagccttctgaatggtgagagaagccatctgggaactgcttttgccgttgttgtagaatgaaacctcatgagcacccaaagcagccattaggtcccaggagagaacaagaatcctggaatgactgagttaaggccttcctgagactcgtgtgtcaaaatctccagcacaaccttcccatagctcaaggtggtagagcacccattcattctttcactccagataacttcagtatgttttaaagtcaagaagcttggtgagttataatagcaaagacttcgaaccaacccaaatgcccattaatgatagactggataaagaaaatgtggcacatatacaccatggaatactatgcagccataaaaaggagtgagttcatgttctttgcagggacatggataaagcyggaaaccatctttctcagcaaactaacacaggaacagaaaaccaaacactggatgttctcattcataagtgggagttgaacaatgagaacacatggac

SEQ ID NO: 903349 - DNA, 514 bp, Homo sapiens
tgagaaccttgaaaggaactttgcaagttctataagtttgtcattttaattctcctcagcttggaggtggcctcacgtgcttcagccagacttagatgtactatgtatgtatgtactagaatgcactataagaawgccaggaacaagtgtggtctataaagggagcctcagtgtaacgctgagacaggctcattggcagctccagtaggaaattataagctgaatattttatatatatatatatacacacacacacaatatgcatacacacaatcgcacacacatacatacacacacacacattttaaaagctttctgcaatagccatccaaaatctaaattgaaataaaactgaagctaggacttaacagtgctctcctcctcccctgatacatctctaatttttcttctgggggtttgggttacccagaccctccatttcagataagtctctctgtatttccacaaagtactgaaagagagcttagggactgagtctagaagcctcatttta

SEQ ID NO: 903350 - DNA, 680 bp, Homo sapiens
cagctggatacactgttaattctatgagtgagaaagattccattaggtgagcttcaggcaagastaggctacaaatggaattcccttttattttctgaaattcacagtatatgacccatatccagtgataaatggtctataaattctcttgctgtatttaattgcataaacttccattatattctactattaacatgggaacactttgacacaagatgtcagaaaagggaaaacgaataaaaaaaaaaaaccctttactcttaaaatcaaaataatcttcatgtcccacagaatcatgttcaacatacaagttccaagcacacaattttaaatattttttcagccaattagttacttttaattttggtagtacaaaaatctattaatcactatttaattatctggagctcttgcctgcctaattagtgctttccgtattgcatcttcaactaaactggggaccctatcaactcatttatctgatacgtatttggtgcactggtgagttaattaatgaaaaaagaaaaaaaatctcatttagatggttcattcaaaaaaaaaaaaagcttattaaacactttgaacattaaataagccgactgattatattgggttttcattgccctaaaaagcattatataaatgcaaaatcccatgtgacatttcttggtaaatataca

SEQ ID NO: 903351 - DNA, 637 bp, Homo sapiens
caaatgaatgcggagtggatattattaatttactaatattttgcatggaggtgaaatgccattgcctctaattgagggagtcaataacaatgtggatgacagcctgtaacctcactgctaaaaccaaatgagctttaagataaatgcttctaattactgacagaaaacttgcctagtaaagtcgccttttggaaagcaatgaacgcaaacacaggctaagctctggggaatataatttgaaaaaatttgacaaagaagcaaaacatgtgtcctcttttagaacctggatcatagtttattgctggaattaaaatatatttggtgacacttctgcttttaaagatgagttaaataataaaaatgatcatttgtattaataataagcatgttaagattttaataaaaatctgggggttaatagatcaaacccaaatatttccttttctctgtagttttttttttttccttttctcccacctgcccctcctgattcattcatttactcattcagtaaatatttactgaaaaccaggatactctgctaggggacaggggtgcagagctaaataaacaaagggtaaggatctttattttggcacwgacatattgcagacacctagaacagtaccttctcact

SEQ ID NO: 903352 - DNA, 663 bp, Homo sapiens
agagagtgggggccaatattcaacattcttagagaaacgaattttcaacccagaagatcatctccagccaaactaagcttcataagcaaaggagaaataaaatactttacagacaggcaaatgctgacagattttgtcaccaccagaccggccttacaagagttcctgaaggaagcactaaacatgaaaaggaaccagtagcagccactgcaaaaacatatcaaattgtaaaggccatcaacactatgaagaaactacatcatctaacaggaaaaatacccatctagcatcataacaacaggatcaaattcacacataacagtattatccttaaatgtaaatgggctaaatgccccaattaaaagacacagactggcaaattggataaagtcaagacccatcagtgtgctgtattcaggagacccatcacatgtgcaaagacacacataggctcaaaataaaaggatggaggaatatttaccacgcaaattgaaagccaaaaaaaaaaaaaaaaaagcaagggttgcaattctagacggataacaaagatcaaaagagacacagaagggcattacataatggtwatgggatcaatgcaacaagaagagctaactttcctaaatatatatgcactcaatacaggagcacccagattcaaaaagc

SEQ ID NO: 903353 - DNA, 578 bp, Homo sapiens
tgaacagaaaattttgatacaaaaytcagcattgcaattttggtaattttgttagtagaacagaaagttgctttaaatatgttctgttgaacttgttttcagtctcagtgggtagtaaaacaaaatagtaattttgtcggaggaaaatagaaatcaattgggtgcattcactattctgtatgctgtgaattgaaagaatgcttgaaataatgtgtttttacaacactatctgattttcgggttcactgttcttctacttggtcatttaaaataaaacttcaagttatatacatgtgttgaaagggtaaatgctttttatttaggtacagaacaccaatctcaagatggatctaaatccaatttaaagatgatttgatttttataggcacctaggtaagaaaaacggataaataaatatgtgtaccagttcagttgtcatggaaatcagggaacaaaaatgaagtattttactcatggactgttttttggtccagtttaccatttcttattatctgttttccatgtttacaggaagtgggctttaagtagcactctcatacatttctatggtttgaagc

SEQ ID NO: 903354 - DNA, 641 bp, Homo sapiens
ttggagtcaaataaacctaagtttgatcttcaacatcatcattaattggctatttagctagactttggcaaattatattctccgaacttcaattttctcaactacaaaaaaattttactttataagattgtcatgcaaattaggtgagataatttatatacagtatggaacttaatggctagtatttactatatggcagcttaggtcattctcaacatcatcatccttattataatatgcagtaatcagtgtctgtgaagttgaattagtttttcacattcttgtttctggaaatcactctctttttcacacgtgtgaataattcagtaatgaccagaaaattttgttagtaaacatagcttttaagtgctaaaaagaagtgtttttatttttgttttttgttttattttgttttgccctggcattttagtcaatctatacttttagtattgtttctctcttctaatcattttattagttgaattgaattaggtgtttgggggcccttgatggcaccaaaaatttcatctcattaaaatttayggaagaactcattcacaacatgatatggtaaaaacaaacaaaaagttgagccttgatttttatttgggatccctatatttggctcaaagctgtctggg

SEQ ID NO: 903355 - DNA, 607 bp, Homo sapiens
gttccaggaaatcaataggtgattgggataggctaaataatggtcccccaaaaatgtcctcattgctgtccccagaacctgtgaacatgttaccttcaacgacaaaagggactttgcagatgtgatgaaggatcttgagaaggagggttattttggttatgcaggtggtcacaatgttatcataaggacccttatgagagggaagcaagaggatcaaaatcagaaaaagatgtgatgacaaagccagaggtaagactgatgcactttgaagatagaggagagagccattagtcaaaggatgcaggcaacatctagaagatagaaaagcaaggagacaaattctcagatggtttctaacaccctcaaaaagaatgctgctctgcaacatcttgattttagacttctgaccaccagaactataaaataatacatttgtgttgttttaagtcactaagttggtggtaatttgttacagtaataattggaaacttgtatagttattcacraaaagagtattaccccaaataaaacactttctatagacatcaacttcaatatctcttattattgtaaaggatcctggagcactaggagcgaagtaaattgt

SEQ ID NO: 903356 - DNA, 656 bp, Homo sapiens
ctggttaggaaatctaaaggaccatgacttcatacaaatacrtaagtgtgccaaagaatatgaaaaatatggttgaaatgatacttattatatttctgttcctgcgtgcaggactttcttaagacagtactcaggaagaaatctgtggcagagtgaaagaaaattaagaagagattgtacttcctgaaggcctattataatgtaattatgtaatctttctctaaaggtgacccttttgccccgcctaactttttagaattgtatttccttatgttcagtctttccagccatggttgaggtgcatgtgtccctcacagaaatccagtagaatgacaaaaacatttgacatttacagcatctcgtgaccctccgaggcacagaagtaatttaatagtgatggaaaaatttgccatcaaactacccaagtgttcctaaatagtttggcagttaatagtcctgagctatttcagaatttctcagtgtctcctactgtacggcattgttcactaagatagcaaaagcctccactaacaaagatacattcagatttttacaaatgcagagtgaacaacaaaaaaagcaaggttatgtctgaatgcttaaaatatttctcatttataggcagaagttttttgctggctataaaacaaatcaga

SEQ ID NO: 903357 - DNA, 689 bp, Homo sapiens
ctacttaagaaaaacatttttttaaaaagttgatagggggtgcttactctcaaagatcataagtttcagcccaaggattatttactgatttcaagatgtaaaccaacaccaaccaaccaacaatgagttcacaatggagggaacaagctgccacttcctgaaataactggtcaatcactaataatgtgacagccagacactatgtgtctcattgtgatgcaacatgctacctagaagaccacttcaaaaatgattcttccagaatgctaatgtaaatctaatcagcctttagaatttaaaggcttaaaaaagactaaagaaaagtaacaaccaaatgcaatatgtagaacttatatggagcctgattcgaacatcaagtataaagagatatttttgagaaaattgagaaattttaaaacatgaaattagtattatatgatattgaagactgctgctttttcaagacatgtcctcaaatttattttacattccttccatactaactcttctccttgcatgtagacagacttgtggctgctttcaatgacttctgaarttaggtcattaaaagtcatacattctttggctagtaatcttgggttactcactcatgagaggccaagctttatctaggaagttcaactactcgagactgtcatgctggtgagtatacacgtagacactccatt

SEQ ID NO: 903358 - DNA, 575 bp, Homo sapiens
ctgaaaggactataaatcatgctgctataaagacacatgcacatgtatgtttattgtggcactattcacaatagcaaagacttggaaccaacccaaatgtccaacaatgatagactggattaagaaaatgtggcacatatacaccatggaatattatgcagccataaaaaatgatgagttcatgtctttgtagggacatggatgaagttggaaatcatcattctcagtaaactatcgcaagaacaaaaagccaaacaccacatattctcactcataggtgggaattgaacaatgagaacacatggacacaggaaggggaacatcacactctggggactgttgtggggtggggggagtggggagggatagcattgggagatatacctaatgctagatgacgagttaatgggtgcagcacaccagtatggcacatgtatacataagtaactaacctgcacattgtgacatgtaccctaaaacttaaagtaaaataataataataataataatgataaaagaaatgtaaaacattggaaaaagartaaataaatgtaaatgtgtttaaaaaaaaaagt

SEQ ID NO: 903359 - DNA, 654 bp, Homo sapiens
tgtatctaggaagtaactaacttgctttcgattttacaggctcataggtggaagrgacttatcttgtctcagatgagactttggactgtggacttttgagttaatgctgaaatgagttaaggctttgggggactgttgggaaggcatgattcattttgaaatgtgaggacatgagatttgagaggggccagggccagaatggtatggtttcgctctgtccccacccaaatatcatctgaagtgcagctcctagctcccataattcccacatgttgtgggagggacccagtgggagataattgaatcatgggggtggtttcccccatactgttctcatgatagtgagtaagtctctcaagatctgatggttttataaggggtttcccctttcacttggctctcattctctcttgcctgctgccatgtaagatgtgacttttgccttctgccatgattgtgaggcctccccagtcatgtgaaactgtgagtccatcaagcctctttttctttataaattacccagtgtcaggtatgtctttatcagcagagtgaaaatggactaatacagggtatgtttaaagtttcagtaacaataccactggttgccagtatttttaaaatacatggttttcacattttattttcatgggatct

SEQ ID NO: 903360 - DNA, 612 bp, Homo sapiens
catggtacaggaaaattagttccctctgtgggcctgtttccacacttgaaacgagacagtggaccaggtgttcataaaggtgcytgcctgctctaacattcaatggtgttggaattctacaacatagattctcttacctttcagtcctgaggtgcagtggacaatgagatagctgatgaccactcattttccagacaagccaagttcatcctctgagagcaaatggcttgcatggctttcttaggcaaagaatagctcatcaacacattatggcaagcctagtatttgcgcttgctttctggagaatttcaaaacacaaataaagaccttttctttcaattattaagatcagaataactttacttagagtgaaaaaaaaaattggaattgccctaaaaactctatgtatggatcctgatttttcaaaagatctcaaattatctttctttttttataaattcctgacaaaaattatctcattcagaactatatagctctaatcaaatatccactgcatgccataatcgggggtaggccatttcagtacctactagacaataaacaactccagaatgtgtcttgtttttatgcatttgtatattttcagagctt

SEQ ID NO: 903361 - DNA, 612 bp, Homo sapiens
catggtacaggaaaattagttccctctgtgggcctgtttccacacttgaaacgagacagtggaccaggtgttcataaaggtgcctgcctgctctaacattcaatggtgttggaattctacaacatagattctcttacctttcagtcctgaggtgcagtggacaatgagatagctgatgaccactcattttccagacaagccaagttcatcctctgagagcaaatggcttgcatggctttcttaggcaaagaatagctcatcaacacattatggcaagcctagtatttgcgcttgctttctggagaatttcaaaacacaaataaagaccttttctttcaattattaagatcagaataactttacttagagtgaaaaaaaaaattggaattgccctaaaaactctatgtatggatcctgatttttcaaaagatctcaaattatctttctttttttataaattcctgacaaaaattatctcattcagaactatatagctctaatcaaatatccactgcatgccataatcrggggtaggccatttcagtacctactagacaataaacaactccagaatgtgtcttgtttttatgcatttgtatattttcagagctt

SEQ ID NO: 903362 - DNA, 598 bp, Homo sapiens
aattgagtactcattaaaaaaccacaattttattcccatttgactcattaggaaactgaggttcagacaacttaagtgacttttccccaagaatccaatgctcataagtrgtggagtctggagtgaaacctaagtctgtctggctccagagaaaagaaagttccctacttctcataagtctcgccacccaccacccacacaggacacagcctatagctccatcccaagtaaacctgcaaaaaggattctttcagcaagggagacacagccctgccttggccattctccccttcactcctcctcccaagccctgctttccacagctcccccagcccattgaagggtgtccgtactctgtttcaacagcctcctgggcgctgcataccctattccaacacaaataagtatgtgggtgtctggtgagtgttttttctcactgggaggccccgcacatcagagtgtggattttggtttcaagtctttcctaccttttggccaactcttctctcacctactgcactgggcagtcccgcctccctcccagctttaactctttgccaaaccctgactctggctgggaaacagaaggctgcatgct

SEQ ID NO: 903363 - DNA, 655 bp, Homo sapiens
cgccctgccctcccagctcctcaggccccatccttccccactcaaccccyagccacccctcgcagcagaggctatccaacacaggaaggaggacaggagagctccagcccattcacctgcacttcctaatgctcacaaagcagcgcgtttgccccataactcatcccccccaacacccaaataaccctctgcctagggtactctgggaggaagagcacctcgaaatatgagaaaccagcttacttcaaaaagacagcacttcctagggcacccagccccaaatacctgttccaggaaagaggttcaggttcccgaccccagaaagggatatggccactaatctgctcctgcagggactggcaagattcttgttggggtctgccttgtttaccctagaagaggaggcaggaggtcaaaagacacaaacccagctacctcagttagaggacaaagtcaaaagccacctttgaggtgggcaggaggaaaggtgatgcccctgaaacacacataggaacgggcccacattggccctgagttgggcccctctcatgtgtcccaaacttgcccatcacttgagatgggcaacacctcttgcctcccccaacagcatccagagaggtgctcactcctcaatggcaggcgagtcacttagtgt

SEQ ID NO: 903364 - DNA, 642 bp, Homo sapiens
atacacccagtaacaatagctccattcaccaagtattcccaggcacagtgctcaggggcttcatccacactccttcctttgattatcgcarcaatagcccttggtgaacactagtcccaggtgaaagatacaacactaaggctcagagaggttaggtaacttacccaaaaccacacaggaagaaaggtacactgctaggattcaaacccttacctaataccaaagcccacacttcttcctcccccttctcctccaaccccctccccactctagcatttaattctatttgagaagagcctggtactaacgtgctgttagaaatgttaataacgtgggctatgggcagggtagaaaaaatctgtagcagcatttcaatacaaattataaatatagtaaaacttataacacacaactgcatcccacagaaggaaaattcaactgctcattagcaaaaagaaaaaaacctgggagaagagtctgtaagaagcatacctttgtagaaacagagaaaagataaagctttgtgtatagtttaaatatatctaatacattttgccaaagcacctttcagagatgccgtggccattttcacctgcattacatgagggttcctacccccacatcgtcacaaacaagaaagtt

SEQ ID NO: 903365 - DNA, 684 bp, Homo sapiens
attttttttaaattaacaaaattgagaaatggttagccaggctaactaagaaaaaaagaaagagaagatccaaataaataaaatcaaagatgaaaaagaagacattgyaactgatactgcagaaattcaaaggatcattagtggctactatgaacaactatatgaaaaaattgctaatctagaggaaatgtataatttcctaaattcatacaatctaaaaaatttgaaaatctagaggaaatgtataatttcctaaactcacacaatctaccaagattgaaccatgaggaaatccaaaacctaaacagacccataacaaatagtgagattaaaactgtaatgaaaaatctctcagtacagaaaatcccaggatccaatagcttcactgttgaattataccaaacatttaaagaattaataccaatcctactcaaaatattctgaaaaacagaggagaagagaatactgccaaactcattctctgaggccagtattaccctgataccaaaatgagacaaagatacatcaataaaagaaaactacaggccaatacatgagatggatattaattcaaaaatcctcaacaaaatactatcaaactgaattcaacaatacattagaaagattagtcatcatgaccaagtgggatttatctcagagatgccaattacggttcagtctaca

SEQ ID NO: 903366 - DNA, 591 bp, Homo sapiens
atgaaaaaattaaggcttccatgaggcggcattgtcttagttcrttcaggctgctataacagcgtactatagacctatagactgggtggcttataaacaacagaaatttatctctcacagctctggaggctgggaagtccaagatcaaggcaccaacaggttcagtgtctaatgaggactggctttctggttcacagacaatgcctacaatgtgttctcacacaatggaagggtgaggggtctcgctgaggcctcttttgcaaggatactaatcccatttataagagctctgctcccatgacaggccccacctcataatatcatctccttgggggttaggatttcaatacatgaattatagggtggtgggggaaggggtgggcacgaacacaaacattcataccataataagcatcttaagcagctaatagtacaatcaattaaattctttctcttttcaaagtatgactgattttctacacaaagaaaggaaaacacctggaaggtgctctgaactgaagggggttgagaggacgagttctcaggtgtctggctctttagagggcatatgttccccggtagcccagatgc

SEQ ID NO: 903367 - DNA, 642 bp, Homo sapiens
tcccatcacaagcctggaggcctgggaggacagamtggtttcatgggtcgggaccagggccccactgccctgtgtagcctggagacattgctccctgcatcttagcctattcagcttcagtgtggcttaaagggacccagatatagcttgagctgctgcttcaaagggtgcgagccataagccttggtggtttccaggtggtgttaagtctgagggttcacagagtacaagaattgaggcttgggagactccagctagatttcaaaaattatttggaaagcctgtatgtccaggcaaaaacctgctccagggatagagccctcaagaagaagctctactagggcagtgtggaggggaaatgtggagttggagcccccacacaaagtccttactggagcactgcctagtagagctatgagaagagggccaccatcctccagacccccaaatagtagatccactaacagcttgcactgtgagtctgtgaaagcagccacagaggctgtaccttgcaaagccggaggggcagagcttcccaaagccttgggagctagccccttgcaccaatgtgctctggaggtgagacatgaagtcaaaagagattattttggagctttaaggtaatgactgccctgctgagtt

SEQ ID NO: 903368 - DNA, 540 bp, Homo sapiens
acaacagtgaaactctgtctcaaaaaaaaaaaaaaaaaaaaagattttgtctggaacatgaggatttttatttatctatttcctcctgctcataatgaacttacataatgtttaaaaaaacataggatttttgttgtaaattttttagatgaaatacaatccaacaactacagtcctacaactaagaaattttagatcaaatgcttttaaaaagtcttaacacttacatctcagtacgcaaatgaatttgaaaagaaggaatatgatattttttaaaagtggcccaaatgagataacgttgatcagaagataattttgggagataaataccaacagtttctgaagaaagaaattagcaaagattaatagacagaagtaaaaggagtctgtaaaagaaaaatcagggaaagcccgaaatatgtccaataaggaaatgaatagatttacctggagcaacggccctgtgttttgaayaagtgtgagaaaggaagaggaggaagaggagaggaaagctaggaaggcaagaatgggcagaaggga

SEQ ID NO: 903369 - DNA, 645 bp, Homo sapiens
aagcattccagtttaccactgaacaattgataatccccaacttgaccttcagtgctttccagtctggccctattgtgctttccaggcccatttctgtaggtatgctgtaatcattcaaaccagacgattttctcacattctatgttgtctcaccatggtccctttgcataggctgatccctttcccaggaaggactttcttccttcccattccatctttgtgattctggcagggctagcatatagagtccatgatggaggtggaggtgatggagggtggaagggaatggtgaggagggaaatggagattggaaccagaagtgaaaggtcatgaacttctactaaggaacctgaacttcattctctaaaccattgtttcgtaaagtatccatagaccatctgcatctgactatatgaggacttttgttaaaaggcatattcttgggtctagacatactaaattagcatctctgtgcatgaggcccagaactggccttttaataagccagttaggcttatgcaatgagttaggctttggtaattcttacacatatgaaagtttgaatgttrtaaatatctcaaaacagcgaggctgagaatgtgaatagatgtgcacattggagaggtcatacgcacagcagaatga

SEQ ID NO: 903370 - DNA, 587 bp, Homo sapiens
cagccggtgttgcagctggtgtgacacagaactgggttctgaccagagatgtaaatgaagtagtgtgggactccctaaaggcagcattgtgggaakattccacaaggcagctggctcagttcgatgataggacctgtttgccgtttcctcttgctccttccagctatctagaacacagatatatagctggaaattcagtagtggtttcagaccaggaggtcatgttgataagaaagccatggactagaatagcagagaaaatgaagaaatttgggttgctgataacaatggagttatcatttttgatcttgattaactacctttagatttgttttatgagagagaagaaaatcctcatcttgtttaactgttattttgagttttctgtctattgcagttaaatatcatttctaaccaagactgagataaagggttttagtcttaatgttgaatccatttatatactatccaaaaacaatgaaatatttcaagtatccatatcatatttttttaaaaatgaatctaacctagatgtgagagagattagtacgtattaaatttctaaaatgcaatggactgagtggaac

SEQ ID NO: 903371 - DNA, 607 bp, Homo sapiens
ttattctcttttctactttcccattatactgtatatctctaccataacattttttccatggttacaaattaattttgtatatgtccatttcttaaactttgagttcctgtgagcaagaacatattttttcatcattttgtcctccatgtaatctatcttgtgcaaaatagctatctaatgttcataagtttaagttacgtagaattaaagaacttattttctttgaatgtttaattcccttattgaaaacattgtcatttagatacacactcccagaaaaagtatctattcttccctgagaaagacatacaggactgccatgggctttgtgtaaacaaagtgatttcaagctgacaagacacatttagatttctgagtaattataaaaatagccctagataaagtccttataaatgcttataacattaacagctctgtgatatgcataaatacacgtaagtaaaatgccacaggttatagtcyttaaaaacgcttcgtgcttacagttcacatagcagtatgcataaatacacgcattataatatcacaggatgcaattgttagaaactgcttgtaacattaacaggtcttaccgtgaagtgcatgt

SEQ ID NO: 903372 - DNA, 456 bp, Homo sapiens
tgggtatacacccaaaggaatataagtcattctactataaagaaacatgcayacgtatgtttattgcagcactatttacaatagcaaagacttggaacaaacccaaatgcccatcaatgataagctggataaagaaaatgtggtacatatccaccaaggaatactatgcagccataaaaaggaatgagatcatgtcctttgcagggacatagatgaagctggaagccatcatcctcagcaaactaacacaggaacagaaaacaaaacaccacatgttctcactcataagtgggagttgaacaatgagaacatatggacaacagagaggggaacaacacacatcagggcctgttgggggttgggggtaaggggagggagcttagagaacaagtcaataggtgcagcagaccaccatggcacatgtatacctgtgtaacaaacctgcatgttctgcac

SEQ ID NO: 903373 - DNA, 688 bp, Homo sapiens
cttaaagattttttttgaaaaaacagaaaacatctggacgtaaaaggatacatttgacaaacataatgatctacaawgaaattatttacatgtttctgttttttcttccatactacacaatttcaccttgcaactgcttaaccaattagaaactgggagaaggtgggacttaaatattacttggtaactgatagaatgactgtttgctccataaattgccaaaattatacatgcatttcaatgtttatggaatttcacctaccctattgttacacaagcccgatactaaattcaaatgtgcatgtcagcattatattactatggtcagatttttaagagatttcacataaggtagaattcttttaagtaaaattatttgttagcaatatcatactggatatttaaaatgcattaatttttcaatggccaataaaccaataccactgaaattttcaaaccaccccagcccctagaacacagggcacggctggtcaggacctcctaagtttgctcacctaagtacacaaaaccaacctaaccagctttggctctaataaacagagcctgtcattaacacataggttaccctcctttactttgtgactcacagttttactcaaatgagcaagactctgcccagaattgtgtctctgctgacgttcatttcacaggacttctgagtatggct

SEQ ID NO: 903374 - DNA, 639 bp, Homo sapiens
taataaaaagacacataatcatttgttgaaaacgatgtggagacattgtaacacttacacattgctgatgggaatggaaaatggtgcaaccacattggaaaacagtctagcaatttctcaaaagtttacacgtacagtttaaccttttatagctaaacatgcaaggaaacacaacacagcaattctacttctaagaatatgtatctgacagaaatgaaaacacagttacactaagcttgttcataagcatcattattcatactagccaaaaatagggaaaaattaatgtccatcaactgataaataaatcgataaaatgtgtatgctcatatataaaatgtttattttgccattaaaaaggaatgaagtccttacatatgctacatcataaatgaacctttaaaatgttatgctaaatgaaggaagccagtcacaagaaactatatattgtacgattatatttattttaaaatttccagaataggcaaatctatagatacaaatttaattagcaattgagcagggcaggagaaatgcagaaactcagggtgaggaaaaaatactaaagagtacagggtttattttgtgatacaaataaaartgctctgaaactgattgttgtcatggatgtacaattct

SEQ ID NO: 903375 - DNA, 612 bp, Homo sapiens
agtctaaatcccttggccataggggtcccactgagggacaggatggacctggggcaggtagccatgctaccctggtaatactatgaacagaataaaagtttggtggccactgatgctgcctctggatataactggatcttggccagaagtgggtgaatgtaaaccaaaactaaatttctaagcccctcaaaccaactaaatagattcctcttcttggccaagggcattccacagtagacctgaaaatctagttcaggccaagataggaaggcagggtcagacagacctcgctatgccctcccccagctggaattcaggcacactgataagcattaacattaaaacaggtcttaagcctgacaaaacagtcttctgtagcaaaagacaccaactcccagcctaactctagtatagtatcatatgacagatagcaggccctgaaggaaatcaaagtattttaccccaatgtatatttctttgacatattttaaaatgactcttcaaagctycctcttgtggggaaaaatctacattctgctacctatgtcttgctacctggaggcttcatctgcatgagaaaaacttggtctccacaacccttatcttaaccca

SEQ ID NO: 903376 - DNA, 592 bp, Homo sapiens
gtgaaatgatcacaacaatcaagctaaataacatatgcatcaccttgcatagttgctatttccctcatttattttgtgatgaaaagagttaagrtctgccttcttagcaaatttcaagtatacaatacagtactgttaactatcattactatgatacacagtagatctccagaacttattcatcatatgtaactggaactgtacacgtttaccacaaaaccccattaccccctcttctcagcccctgacaactgccattctactctctgcctctataactctgactgtattctctatgtataaatgatactacgcagtgtctttctgcatctggcttatttcacttagcacaacatacttcagtcttacccatgttgtcacaaaaagcaggctcttcatttttaaggcacaataataatctattgtgtatacatttaccaattttctttattcatcactggacatttagattgtttccatatattggctactctgattaatgcggcagtgaagacaagaatgtagatatcttttaaagagcctgatttcagtccctttgcatatatacccagaagtggaattgctggatcat

SEQ ID NO: 903377 - DNA, 592 bp, Homo sapiens
gtgaaatgatcacaacaatcaagctaaataacatatgcatcaccttgcatagttgctatttccctcatttattttgtgatgaaaagagttaaggtctgccttcttrgcaaatttcaagtatacaatacagtactgttaactatcattactatgatacacagtagatctccagaacttattcatcatatgtaactggaactgtacacgtttaccacaaaaccccattaccccctcttctcagcccctgacaactgccattctactctctgcctctataactctgactgtattctctatgtataaatgatactacgcagtgtctttctgcatctggcttatttcacttagcacaacatacttcagtcttacccatgttgtcacaaaaagcaggctcttcatttttaaggcacaataataatctattgtgtatacatttaccaattttctttattcatcactggacatttagattgtttccatatattggctactctgattaatgcggcagtgaagacaagaatgtagatatcttttaaagagcctgatttcagtccctttgcatatatacccagaagtggaattgctggatcat

SEQ ID NO: 903378 - DNA, 592 bp, Homo sapiens
gtgaaatgatcacaacaatcaagctaaataacatatgcatcaccttgcatagttgctatttccctcatttattttgtgatgaaaagagttaaggtctgccttcttagcaaatttcaagtatacaatacagtactgttaactatcattactatgatacacagtagatctccagaacttattcatcatatgtaactggaactgtacacgtttaccacaaaaccccattaccccctcttctcagcccctgacaactgccattctactctctgcctctataactctgactgtattctctatgtataaatgatactacgcagtgtctttctgcatctggcttatttcacttagcacaacatacttcagtcttacccatgttgtcacaaaaagcaggctcttcatttttaaggcacaataataatctattgtgtatacatttaccaattttctttattcatcactggacatttagaytgtttccatatattggctactctgattaatgcggcagtgaagacaagaatgtagatatcttttaaagagcctgatttcagtccctttgcatatatacccagaagtggaattgctggatcat

SEQ ID NO: 903379 - DNA, 624 bp, Homo sapiens
cacagtgagaaagtattaaggtcaattaggagctccgtattctaattccaaagactgaacttccaaccactgagccatactgcctgtcattcaggacaaaccaaactgagaccaagtaaggggaggaagaggagaaaggcaacaaaagcaggtaagatagaagggagaggagaggagtaagcagtggcacttccttcttataaccacacagtcttggggtctcgatggcaatgtatgcacagaattgcagtatccaatggactgtgtctacatgacgtgctcaatccgtaacaggcaggaaaaattaacagacacacatcagtatatgcatgtacaggcagacctcattttattttgcttcactttactgcacttcacaaacactgtgtttcttacaaatggaaggtttgtaacaaccttgcatgcagcaagtctactggcaatattttcccaacagcaagtgctcactttctgtctctgtgtcacattctggaaattctcgtaatatttcacactttttcattattaatgtgtctgttacagtgatatgtgatcggtgatctttcatgttaccattgtaattgttttggggcaccacaawtcgtacccaatataagacagaaa

SEQ ID NO: 903380 - DNA, 607 bp, Homo sapiens
cctagcaagtaaggatgggaggaattgaaatctgtatttttctgagtggaaaggagtagtattcatttttctaaaaccaattagccttttataaaggtaatmgtttcaaaaactttaattcacagtgttttaaataaaaccataaatatgtcattacttatagtttattttcatattttattttttcaatccatcaaatcattggattggcctatgtaagttcagaatgtctactatttctgttataagttagttaagaggttgtcttagtgatgcaaaaatatttattagaaaattattagtaatgtttttcattgaagcagatatattatttatcaaacaacccatcatagttcattgctaggtacagtgggaaatagccatctatgtgcagtgggaaatacagccatccataccatgcggctttcttgctttcattctttgagatagggtctcaccatgttgcgcaggctggactcaaactcctggactcaatggatccccccacctgtctgccgagtaactggaatctctgctgtgtgccaccacatctggctagcatgcttcatgcttcttttttgcagggagttataaatgtaggtagaga

SEQ ID NO: 903381 - DNA, 411 bp, Homo sapiens
acagtatggatctagaaaaatttctgaagttcacgtcatatttatatttattgagaagtgtccagtgatgacaaatgtgtgataaatatatgtttatagcagggtaatttttttttaactgtcaaaaatctatagggtggtacaaaccatgtttaactatataagatgcttaaattttggtttagatccttattctgctgtaattgcctaaaacaaaagttggcattttaactgtgcaagtacctagacataacagtactacttgagtttttaatcggwactatttgagtttttaatcatcctgtcatctaggttctgtcattgccctcccatgtcccccatggctctgagcccaggagaatgtcagcctctgtcacctgcctgctcccctggttgggaaaggggtgacaa

SEQ ID NO: 903382 - DNA, 639 bp, Homo sapiens
cctttatggtaaagctagacagtcagtaattcccaacctcaaaatcttgtggtcagggtcagctttcctgtgttacagtgctgaatgctgaggcttcaattaaatatttaaagcattcaaactagtctgagtctatttttggaaaagatcttaaccctatttaatgtttatgtctcacctttgtgtaaagatggtatggcttaggcaaaacaagcttattaattataaaaaacaacagagctttcaccatgttacttttttctaaagcatatgaacctcctctcaacaagtatgctttctcatgtgtcagttgtattagtctactatgcatttgagccccttgactttcaagcagaattaatcactgttttctctaaattccccattcgacaacagcgacctagccaggtgcctaaagattactaagatgtggtcctgctagaggggagctcacatctatgtacacacagaacccagttaacttcttgaggtcactctgctgcttaagatctaagtaaggctggcctgaacccctgttccacttcctgtggaaggttcaatgccctttrtaatctcattgtaaactcccaagagttttacgttcttggggtcacctctggctctgactttatgccttac

SEQ ID NO: 903383 - DNA, 599 bp, Homo sapiens
atagttctatctgaaaaatcctgctaataaatacaggccttattttgatattttggaattttatagggaattaaatacaatacaataatgcatcctactgaggtcagacagctgagaaaaacaggtcagtcaaatcctcattcctgtgaaatttaccagtgggcttttaaaatggccaaacgttaaagtatctagcatgatgcttgaaatataatctgtggaaatacactaaactaaaatgatcttgtccagtctcatggtttcaaatactagccccatgctaacgatcaaattttgtatgcattcaaaactcctgaactcagatttagatatctaacatcccgactggtttcttcaccttactgtttcccatgccaaacttctttcttttcttaatccatttcccccaccttttccattatattaaacgtaattaaatagggatgtttggctgaggctatgaaatttgactcacatcacatgccaaattcatcaccaaatcctgtcaactctactttaaaaatattttcaaartatgaccacctcttactactaccactctagttcaaatcatcctagctctttcctaggtgactgca

SEQ ID NO: 903384 - DNA, 613 bp, Homo sapiens
tagttacctttagtaagattttgccatttctagaagactttgctgcttctggggcctaatacttatgcatatataaactggaaggagctcagttcttcagaaattaagaatcccatttttacttcaaatattggttttgtctctcaggctcccttgatcaactagccagtccgatcctggacacagtccagtttctattgcaacttttaaacgcaatttggatcagacatttgctcaaagaaactcagagagttcaaaacacaaatctgtggaggtttggaatctgagagagaacttactgcaatccccagctgctctgagagagcaatggacacattgggcccagtgggtacctcacttggtcgctcagaactgggggttgttagaagctctacttcagatcccactcctgacaccattaaaatgttaaaataaaataaaataaaaactttaaaataaaatacaaactttagccaaattcagagtttaattgagcaaagaatgataatcaaggaagactgaatcaagcagtctcctgagccagagtagtctcagagactccagygcagccatgtggtggaagatgacttatgaacagaaaaagaaagtgaca

SEQ ID NO: 903385 - DNA, 536 bp, Homo sapiens
tctaaaataaagcacgttgttttccatatgtcctcaaaggttatttcatcagcaaattaataaactttgagatgtatattttggctcctaatggatgcttttgcttattttyatgttctcaactttgtcctgaataagtgcaattatccaggtaagaaacatccagataaatgaggtgctaccattcatatcaggagctgtaagcagcttcaaattccttgtgagataaacaaaataactctaaagacatgcaaaataaacctattacaattgtagttattatctaaaggctgcatattaattttggataatttgcttcattatatttttggaaattagaatctttatgatttatatttgcaatctggtgttatggctttaatgaaaattatttaacttctagtttttcaaaaaactttgattttctcacaagtatgtgtaaaataagttttctataccatcttttcaagaatattcatacagcagaggaattgccaagcagcacatctttaaacccacactgggctctcagtgcc

SEQ ID NO: 903386 - DNA, 668 bp, Homo sapiens
tttcagttgcacagactgctctgacactgttagcgatggcaatcaaatgccagcacaagaagcaagggggcacaaatgaakctcctgatgaggtctatttacagttcttgcagaatattatacgttttttacttcaaaacctctagagttttttatttttaaaactttggtgtatttgagaattggggctggtcatttcctggtatggctaatggtaaaatatcagctctttctctcgttaattcatttgagggagatttcgttaagaggaagattcagtgatgaactcatggagggagagctgtacctctggttaggctcaggagtcgagagtgtgagctatggagtgaaagtaggtgttttcaaatctgcgtctactgttcctgatagttaaacactgggcaggtcacttactttgtgcttctgtttcctcagctgcaaaaaaaactagtacttgctccatgacattgtgaggtttagaattaatccatgcttacgacagtgactgtcaaaccaaaagtacacaatagatactatctgttactattgttctgtttttttattctttatattgttttacatctgagaacttcaaagattatttgatacaaatatctccactgataaaaatatcagtagagaaataggataattatgcttaaccagct

SEQ ID NO: 903387 - DNA, 677 bp, Homo sapiens
ctcagttactggtttttggtggacatttctattccagtgttgtgttgtcaccacaatattgtggtgaatatttgtgcacatgtaaatgtacttataatggtagattttagtgccgtgtgtgtgtgtgcatrtgtgtgtgtgtgtgtgtgtgtgtttgagagagagaaagagagagagagacagggagagagagacagagagttttaattctgaagcctaaaactttaaaagtctaaccaacttacaacctgagcagggtgtatgagagttttgagagcactcacatcatcaccatgtcttcattacacctgatactcttgattgtttttctcaattacatagaaagaatactatactttagtcagttttttttgttcctctgagtagtaccattaaaaaaattttaatgcttctttagaagaatgacacaaatatatatgcacagacatttaacaaaactctcctaccttaactggccaaataataagtctcatgacaagtctgcaagtatatttcacagcattcttctctggcgtaacgccacactacatagtgcttgcataagattcttctccagacaaccaatctctcaggcagtggaaaagtcactgagtatttattttgcgtctgaccactttttgaaattacgagtattttgcttatcatcctctcttaaa

SEQ ID NO: 903388 - DNA, 677 bp, Homo sapiens
ctcagttactggtttttggtggacatttctattccagtgttgtgttgtcaccacaatattgtggtgaatatttgtgcacatgtaaatgtacttataatggtagattttagtgccgtgtgtgtgtgtgcatatgtgtgtgtgtgtgtgtgtgtgtttgagagagagaaagagagagagagacagggagagagagacagagagttttaattctgaagcctaaaactttaaaagtctaaccaacttacaacctgagcagggtgtatgagagttttgagagcactcacatcatcaccatgtcttcattacacctgatactcttgattgtttttctcaattacatagaaagaatactatactttagtcagttttttttgttcctctgagtagtaccattaaaaaaattttaatgcttctttagaagaatgacacaaatatatatgcacagacatttaacaaaactctcctaccttaactggccaaataataagtctcatgacaagtctgcaagtatatttcacagcattcttctctggcgtaacgccacaytacatagtgcttgcataagattcttctccagacaaccaatctctcaggcagtggaaaagtcactgagtatttattttgcgtctgaccactttttgaaattacgagtattttgcttatcatcctctcttaaa

SEQ ID NO: 903389 - DNA, 565 bp, Homo sapiens
gggaggattatgcagtcatctgggaaaagaaaaaagatgttaacagaaaccagtatragcaggggtgatggagaaaatagaattatgttaagggaggaggaggaggtaggaatcgagtagaatgattcaaggtatcccccaggattctaatgtctgcactaggtggacaaagatgccattcactcaagagggaactctgagaagggtcaggttggatgtgtacaaactccttttccgaccttaagtttgaaatggctgtagatgccaagtagagctaagtcagtaggtagctatatagatctagggcttagaggattggatgtggctggaagtaaaaatttgagagttctcttatacagaaggtaattaaagccaagcttatgggtaagattttctggatacatgtttttagactagacattcaatgaaactgtcttgaagtgctccctgatttttcgtagtcttctagcaaagctcacaattggttcaacctgacttaaaacattaccaagactcttgctatggcaccatggtttagactcttaaccaattacttatggtaact

SEQ ID NO: 903390 - DNA, 658 bp, Homo sapiens
aagcagaagaaaggatatcagagattgaagatcaacttaatgaaataaagtgtgaagacaagattagagaaaaaagaatgacrcagcttccaagaaatatgggactgtgtgaaaagaacaaacctatgtttgattggtgtacctgaaagtgatggggagaatggaaccaagttggaaaacacacttcaggatattatccaggagaacttccccaacctagcaaggcaggccacatttaaattcaggaaatacagagaacaccacaaagatactccttgagaagagcaaccccaagacacataatggtcagattcaccaaggttgaaatgaggaaaaaaatgttaagtcagccagagagaaaggttgggttacccacaaagggaagcccatcagactaatagcagatctctctgcagaaactcttcaagccagaaaagagtgggggccaatattcaacattcttaaagaaaagaattttcaacacagaatatcatatccagccaaactaagcttcataagtgaaggaaaaataaaatcctatacagacaagcaaatgctgagagattttgtcaccaccaggcctgccttacaagaactcctgaaggaagcactagatatggaaaggaaaatctggtcccagccactgcaaaaacatacc

SEQ ID NO: 903391 - DNA, 695 bp, Homo sapiens
accagaatataatttacaaggacagagcacttttttgtttaaattataaagccccttgacaaggaccttcttaaaaagtgccaaatagcattagtgatattcatcaatttccactaaattgttgtatgccaaagttagttttactgtttcatttacacactacattgtacatggctttactactccaaactttaaaccaaaaataatcttccttcaaaggacaaaggagaccctggaggtgtttgctagtcatttaaaacagctatggctgacagtttacagcttaccctccagaaaaagtcctaatgcgcttttccaggcttgctcccaatgggtagatccctgctcagagcctggctagttattggcagtagatcaaccttcacttgctgccctctcctccactttccctcatcctctgtcactcactcattagaggtttgtaaggcaaagttatcaagacagccttctgagaataagcataaggaggctcaccagctacacaatcataggagaatattcatgtggcattaatcctttctgtgtgattataccacctcaytgattttcccacctgtaactgtgtaaagcaaagaagacagaacttcacctttgggacttctttttccttaagaattctggcaggtttactggttttgaaatgaaaagcccctacacctgaatttaatgtcagg

SEQ ID NO: 903392 - DNA, 638 bp, Homo sapiens
ccttcattaatctgttaatgtggtaaattacaccaatatctattaatataacagctattaataaatattgattatattamtattttgttattaaactccccttgcatttattgaaaaaatattcgtagtcataattccttatcttataaattgcttgatggcatttgatttcatatttcagcatttacagtttaaagtcaaaaggtctataactttatgtttccatccaggttgagtatcaaagtttcagcaatctcataaaatatacccgagaactttcttctctctcttttttttttttcctgtacaactgattgtatctggaactcaatcctaggctattttataaatgattggaaagccatattcaatatctgtttccttctctttccctagatttagacatatgcattttcctatctgtaacatcttttttggcactttccatcttataaaatcatcatcattatgatgaacagagaaaatccaaaattatctctaggtattgtttcacactccgggaatatacccaaggaaccatatggacccagggaaaaaatttaaatggaagagaaaaaatgaaaatgaaacttctacattttattactaatataagatttaaaaagtaggacaccacc

SEQ ID NO: 903393 - DNA, 575 bp, Homo sapiens
ggtttctctctctgggactctccctgtatcagcaatggtactatcacttttccttgtcacccaatcactatgaacttcttcccctctcacacccatacccaaagtaacgggtagtgggaatgggtggatkttcatcccacctctttttttaatgaatacattaaataaaagagtatctccacaagtttgcctacctatcattttaaagtaaaaccagtttaatttgattgttgacctctctggtgaaattgctagaaatgaagaaagtatcttaccaacctaaaggaaatggagataaaagagttggagaagaagaatgatgcctaaggcaagtctttaaaaaagagtttttcacatatctttctcttaccaaactttaggttgctaatacatttatcactataatttgatttttaattgatattcctggtgaaaaattgatacatttgatagattcagaggctgtaataaagtcatctgtcctaagaactaagaagtacacagagtgatgtagttcactaaaggtttcccccacctcaatttacatgggccttaactttcaagagattcaacat

SEQ ID NO: 903394 - DNA, 550 bp, Homo sapiens
gatgctatgaggaggtaaagtcataagaattatacaatggactctgggaacttggsggggaagggtggggtaaagtataaaagactacatactgggtatagggtacactgctcgagtgatgggtgcgtcaaaatctcggaaatcactgttaaagaacttatgcatgtaaccaaacaccacctgttcccctaaaacctactgaaataaaaaagaagaaatctataatgaaaaaattatttttatattaaattactcttatacaatagaaaggtttttgaaaatcctttaaaaaatgtatttagcaatatattgtgccctgcttactgaagttctctcaaaaaagaaatataaaagttcaaataatgtaaacaagtaataaataaccttgcaaaattattatttttagctacatgctaaaaatgttgaccagtaaacagggaactctgcaaaattcacaccctctgtctttgctgtgacactcacatgagactacataagaaaaagaaaaaaaatattaaaaacaaataagtaattaaaaataggccatgtt

SEQ ID NO: 903395 - DNA, 609 bp, Homo sapiens
tcatagacaatgtctaaaaggaataaatcaagaaataccagaatagacacattatccctatatatgggctaaataacagaagaaattgcttttaaaaaagtttaaaaagctgtcactctgggccaggcacagaggctcatgcctgggaggtcaaggcgggtggatcatgaggtcaggagttcaagaccagcctggccaagatggtgaaaccccgtctctactaaaaattaaaaaaaaaattagctgggcgtggtggtgggtgcctgtaatcccagttattcaggaggctgaggcagagaattgcttgagctgggaggcggaggttgcagtgagccgagattgcgccactgtactccagcctgggcgacagaatgagactctgtctcaaaaaaaaaaaaaaaaaagtggcactccagagaactgaactgagatatgaggagaaatacagcagagaatttttgtttgtcactgtgaaccttttggtaytaattaattttttaagcacgtaaaacattttttaaggactttttattgtttcatgaaacctatttcatttacctgagggaaaaatattaataattgtgttggattgttacttagctgaagcac

SEQ ID NO: 903396 - DNA, 631 bp, Homo sapiens
taccaattagtatagtttttagaaatttgaattttcattctctgaggtgctgtttatttcctctgaatttttaaaagtgggctattggtattttttcctattgatttatargagatctataacttttatcagactagtggcagtttttttgtctggtttattggttggcaatgattttcatctaaaaatatgatgaaaatattttgtgaaaatttttatgtagtcggatctatttgtctgttttaaaaaatatttcttcccttgcttttatgcttagacagtccttgagtttgagtttgtgacttttcttttctcttctctccctttcccttagttttcttttcctccattcctccttgctttctctgtttttctgtgtctttaacatttaactcttttttatacatctggattttatgttggtgcgatgggtgaactccagctcatacttgatctctttgaaaatagctaatcctctcagtacagatttttgaatagtctttctccccacctcattatttgtgatggtttctttatcattaatttcacatatgtacgagggctgtttcatggctctccattttttctctgttggtaatcaacaaatcgtcactgcagagtgattattgtg

SEQ ID NO: 903397 - DNA, 587 bp, Homo sapiens
ttacatttgtcctttgcaggatattttctagatcttgtagttgtgcttcactcttttttattcctttttcttttgtctccactgaccatgtattttcaaatagcctgtcttctcaaatagctggtaatgccaagtaggtttgtgtgcttcccttcagagccatgtttgtgcacttcccttcagagctgcgtgtacccccaggccccaagtgtgtccagagatactcactaattacttctttgcttgaccagttctgctattaagaggttctgatgcattcttcagtatgtcaattgcatttttaactctagaatttctgcttgattctttttaattatttccatatcattgttaaatttatctgatagaattctgaattccttctctgtgttattttgaatttccttgagtttcctcaaaacagctattttgaattctctgtctgaaaggtcacatatctctgtttctctaggattgatctctggtgcctcatttagtttgcttagtgaggtcatgttttcctggatagtcttsatgcttttagacatttgtcagtgtctgggcattgaagagttaggtatttattg

SEQ ID NO: 903398 - DNA, 601 bp, Homo sapiens
ttttttgtatttttaatagagatggggtgccaccatgttarccaggatggtctcaatctcctgacctcatgatccgcccacctcagcctcccaaagtgctgggattacaggtgtgagccgccgcacccagcctcaatttttttaatgttttaagacttgttttgtgacctaacatatgatcgatccttgggaatggtccatgtgctaaaagaagaatgtgtattcagcagccgttgagtgaaatggtccataaaatatttattaggtccattttgcttatagtgaagattaagtccagcgtttctttgttgactttctgtctggattatctgtccaatgctgaaagtagactgttggagtctccagctatttttgtactgaggttcatatctctctttaattctaacaatatttgctttatatatctgagtggtccaattttgggtgaatatatattttaaattgttatatcctcttggtgaattgatctatcataatataatgaccttctctgtctcttcttagagtttttgtcttgaaatcaattttttctgatataagtatagctactcctgctttttttttttttttttttttttgg

SEQ ID NO: 903399 - DNA, 631 bp, Homo sapiens
tgaattacttatgctaggaacatgagagtcatsccagaataaaatcctgtctttattcatattaagcagtgtcatcaaattctatcaatttatttcccttaaatattttcttaaatcctttttttattctgcagcaccaaaaattcttccttcagttgtgtattaggtagaatgaacatgagaaattcccattcacttgatccttccaattctatcttctttcctaggaattcttactaactctttggtatttcttcttcatagactatttgtatacattgatatttgtgcaaccaggatgtagcatatgcaagttgatttctatcttccttcccaggaattcttactaactctttggtatttattcttcatagactatttgtatacatcgatatttctgcaaccaggatgtagcatatgcaagttgatttgtagttccagtttgagtctgacaaccattgttataagtggtataagttccagtttgaaagccttaaggcttgagacctaaaaagagccattatttctgtttgagtgcaagggctggaagagactgatgccctactcaaagcagtcagacaagaggagattccccttagtttttttattctattcaggtcatcaagtaatt

SEQ ID NO: 903400 - DNA, 692 bp, Homo sapiens
cctcataggacttcagtcagttgttarcatctttattccatttctgtctatggtttacaatccaggacagcgttgatgtttatattacagaccagtctcctctacttactttctttatgttactttgtttatctcctctacggataatttatttatcatctaccatatgttaggtcttggaaatacaaaggtgaataatattaagattctctcttcaaataacttataagccaatggagtaaaccagcagttataataattgcaaaatgtgctgtggttatatataggaaaggcaggtaactctggcttctgaaaagtggtagcacctggactgagtctcggatgacaggtagaaattaaccaagaaagtagcatgtgcaacagcatgagatcaagggaaaccacagcacattgaggaagttgtacgtggttcttcacagataggtacagacattgcgaaatgagatgagcagactagataagttgggcaggaccaggtgagagcgttacacctctgcgtcatcctaaggagtttgacgttaacttgaacactctgcatttctataaaagaaaacgttctctgataacacaactgaaaatatatcaaaggcaaagcaagaaagcaggcagaaagacaggttagaggaagcttgttgtagtgctttagaaaaaaaccaataccttaactatgg

SEQ ID NO: 903401 - DNA, 617 bp, Homo sapiens
taaaaagtgactttgaaacagcaagcttttatataagaaagggaaaaaattaagtagggggtgagaaaaaataaaaagtgaaataatccaattaatcttgcggtacagctagatatgctaaatctgtcctgactcaaagaaaattttgagaaagatacaaaacatatggaatcattctaagtatgctgtttgtatgagaaagcactgagtaatataattggtttaatgtgtgagtcagaatcaatgtacaatttttagctgaagagttctgatactagtttggaagatatgtgagttcaggagcatgaggaaagtttggatactttgaagggtatggggaataatttccctacactgggtaaatgaagctcagaaaggattcatttttgagatgttcacagttaggatttctatgtagtttataatgtgaaaataaatgggcaatattagcctaataagctatcaaatgttgattgtttgtgaccccagatgccacaattctttcctcrttccctaatagaatacaaacaatgtaatttacaagggaaatcagtaaaacaaaggataaatctatagctcatgttatattttggtttatagaaaaattacaataatta

SEQ ID NO: 903402 - DNA, 480 bp, Homo sapiens
gatcagctgtatacttcatttattatgattattattattgcttttttcttttgtgagacagaatcttgctctgtggctcccagactggagtacagtggcatgatctgggctcactgcaacctccacctcctgagttcaagcgagtcttgtgcctcaaacgcctgagtagctgggattacagatatgcaccaccatgacgggctaattatttttgtatttttagtagagatggagtttcgccatgttgggcagactggtctcaaactcctggcctcatgtgatccgcccgctgtggcctcccaaagtgctgagattacaggcatcagccaccgctcctggcctcatctatatatttcccatctttgataataaggtaattgcagaaaggaaacaaacaaatgaaacgtaatgtggaaataactgatataattarttttctgaatgtctgaagcctggaagcctgtaaatataatcctatac

SEQ ID NO: 903403 - DNA, 569 bp, Homo sapiens
tgttttggcaaagttcaaaaggcctctgtmctcactaaaagtgatccatttggaggggttcatttctggtaattacaaagtttttatttccattgtcaatttaagcaattgtgaaacatgtacatatattttaagagtccagatctcactttgaagaaattcttcagcagaactgcataattagcaatgaagcagaagaataccttttcaataatagagtacatacaatcatatatttttttcggaggaataatgtttattttgattactacacatgattatggatagtattatgattaatatccatataaagctacattgattttaaaatctgattctaaacaatagtcaaagttttagttgcaaaatagatcatatgtattcagatgcatttcttaatgttcatttaatttctaagaccttcaatatttctattatgtctgtcttcttattaatataaatatatctagtttgattttatctttttactccatcactcatgtttatggttattcacacattttaactcattttgaaatacagtggtcagctctgtattgcataggatg

SEQ ID NO: 903404 - DNA, 681 bp, Homo sapiens
tttgcagtattgtattgaggtataattttccctgtctgtggcttttcactttcttaataatgtctttgaagagcagaatgtttttaatttttatgaagtctcatctaaaattatttccctatatcaagataggcaaaaagatattctcttatattttcttgtagaagctttacaaatttagtttttatattaagcatgatcatgagaagtgcatatttcaatttgttagtttcttattgggtcttaaataagatgtctgaggttgagaaataccatttgagtaacttgtttcaagacttagaatcttgcagatagatatccattaacacttgtaagaatcaataagagtatttaagtctaatctcattccatttgtccacctggcaagttgtaaagagtttaaactagaacaccctgacagtgaaaaggggagtgccagacaacatccttaataatgccaagacaagagtcttgccaggactttcctggcaaactcaggcatattatcactccagatttgggtcttctgactcttggttaagtatcatcctagatatttcccattaaaataattcaatcaacagttattaacttctgcagaactgtttatttcaactactraaacaatattgaggtgtcaaaaacagttgaatactggactcttcggtcttccctcttagg

SEQ ID NO: 903405 - DNA, 632 bp, Homo sapiens
tcattgtaaaaggattgaattgtattcttagtggtatgggaagccactggaggaattttgagaagaggagtrtccagatatggtctacttttattgacataaaaaaatttaaaatataaagaaaagtttaaataatagcataataaacatccattatgctagaagtaacacgttaacgttatgccatagtgtatttcttcacgtatattttgttgaagtattttaaagtgtagatatcgtgatatttaatcccaaaatacttctgtatatatctcttataagtaaaatatttttctgcataattatcatagctaccaaaactaacaactctaattcctacttgatatttatatttccctaatcatccccataatttcttttatagtggttttgtttaaaccagaatcaaatcaaggaccatgtatcgacttgattgctttgcttatcacataccttttaatgtagaacagtactccaactcgcattttttctccctatggcattaacttattgaagagcctgaaccagttatcctggaaagctttgtctgattatttccttgtgtcatttgttgtgtttcttcatgtatttttgtaacctggtaattagaaataatgctctgattagattga

SEQ ID NO: 903406 - DNA, 494 bp, Homo sapiens
ggtggctcacacctgtaatctcaacactttgggaggctgaggcagggggatcacctgaggtcgggagttcargaccagcctgataacatggtgaaaccccgtctctactaaaaatacaaaaatgagccggttgtggtggtgtgcgcctgtactccccgctactcaggagactgaggctgaagaatcacttgaacccgggaggaggttgcagtgaactgatatcacaccagtacactgcagcctgggcgacagagcgagactccatctaaaaaaaaaaaaaaaaaaacttaactggcttttacttgtgattctagaatcaggcaacacctcattctataaaatagaattatataaaattgaatgttcttaccagctgagcagaggagcctacctttatagacagaaaaggagtgagggaaacagacacagaacagaaagcacatgggtgttttttttgttttgttgagacagagtcacgctgtgtcgccaaactg

SEQ ID NO: 903407 - DNA, 677 bp, Homo sapiens
agatgcaaaaactgagccccaaggagatgggttaattctcctagtgtcagacatagtgagactaggagatgtgttaatagatgggttaaacccatgtgtttttgtaagccatggttttcagaaagaagtaacttaaataaaacctaaatggtacttaactaatttccaatgatctggctattttcaaaacactttggaaaactggagcatgagaatattataaatgcaaaatgtttctttgaaattctcttaaatacatttcattttttttcctgtgagagctactttgcttgagccttatagaaataattctgcttttgagtactagtgagaagaaacatctttattctttcaatagatatttttcaatgcctactacgtgctagagttatgctaggctaaaaggtagaatgataaaccgatatataaggttcctctcatggtggaacactcattctactggagaactagacttttattatgtttgtagcagacaatctaatgaaattttttcttatttctaatgtccatgatttttggcttcacagtagctatcacaaaattattctgacattatccacatatggtattgctagatagccatggctgtgaaatttggttccttagcaactgyaaatgtaccttggaaaggaaaagaaattgtcatgaaatactct

SEQ ID NO: 903408 - DNA, 626 bp, Homo sapiens
attttagacataagatcatgcaacaaggtgaaaattamataagaagtcagggcaaaaggaacatgggaaaagaaatgtaagatgtagccagagtttattttaatatacaaagtttatgtcatcatagtttcctcattgcttaagtaaagctataaatccttgacatataatagttcctcattaaatgtacggtggtcatcattactgcaagtatacacaacttgtcactgcaaaaactgcagagatgtatttgtttctgttttatgcttagtgttcaatactactgaggttctcatgagaagatagaaatgaatggattttgaaataaggatggaatgagcaggataactgagctgtcttgatggataatagataaagtataatctgaactaaaaagaaagctctctgaatcgcctatagagacaaatattatagacaggggaaatacagtatgtgattacttacacaaaaaagtaaatataaaattattgtagaagaaaaaggaggtattaaaagtaaataatatgggtcatttttggtttttgttggtattattattattactattagttggcagctgatatttgttgaattaccaatatgggccaagtacttaatctgtatta

SEQ ID NO: 903409 - DNA, 589 bp, Homo sapiens
aattgcaatagcagtaatagtgatacttttaatataggtaattgaccttctgaaaagtatgaatagtaacatctttaggacactttaytatgtttattaagtcccaacttaaagtctaggaaaaaagtgtgcttgatgtataaacatagattcaaaatagttctttagacataccccgtcctctcccatgactgatacatgttgtttataagctctaagaaaggaagctctaaagaatagagaattttggaagcactgaggatatgaactatgtttaaagaattgtattagggaaatttggttttgatgcttattctctgataatatttagcagcaggaactggagaacagccaagccctcagcaaaggcattcatgttctggcctgtttatattcatttgccccattgtcagggaggaaaataaaattttagggaaatgtatataaagaccaaagtacttaacttagggcatgcttaaatccagcattaagtgtccatctatttaaaaatagatggatctgtagagctgatacaaaattatttgatttttctcgttggcatttctttatcatatgatttacattttgc

SEQ ID NO: 903410 - DNA, 660 bp, Homo sapiens
cagtgagaaagctgaaactctttggcaggcatcctgtatgcagttttctgtgacagtctgcctttgccttttggtgaaaatatttcacttacgaatagatgaaaagaaatattttccccaaaaatacatacagaatcaggaatgattattttaaaacatagtaatacttcaaagatttctgaaaatccacctttgataagagacttttattaggattgtgtaagatgcagtaaaactcataattgtgttcaatgaggaaaatgttcactgaggataggttatacgaaaatgattcaggtaggtgctatgagaatagcaaaacttggtaagatggagggttaattaggagttaatgatgattaggagttaattagttcccctgtggcctggtgaggggtgggtagggttaggaagacctacctcctaccaagagcacagcttgagtgaagacaagaaattctatgagtagttttgtgaaggtaattttatattatttaattctagtaaataagagtggctataatagtatgaatgaagagtaatagtaaattatgatggttttgtttggttgcatgaatttgtactacaaaaagtaaagctcattaaaatcattttggttcatgattgcargatttatacaggatgctgaatgcatatttt

SEQ ID NO: 903411 - DNA, 689 bp, Homo sapiens
tctaatcaaaactcaaattgaaatgtacattctgttggtctctaaatattcttttccctttgaatctctattttcagtaaaaataacaaactctctcccttcccccactaccaaagygtccccaatcagatctactttatctatttatttagacaaagtctcactctgtcacccaggctggagtgcagtggcaccatcttggttcactgcaacctccgcctcccaggttcaggcgattctcccacatcagcctgcagagcagctgggactacaggcctgtgccatcaagtctggctaatttttgtatttttattagagagggagtttcaccatgttggccgggctggtctcgaactcctgacctcaagtcatctgcccacctcagcctcccaaagtgttgggattacaggcgtgagcccccgtgccaggcctagatccatttcaaagagacaagaagagaagatacaccaggtacctgccgatgactcatagtttgcttcctatttagtcatctgtaattatacataatacttgcaacaatccagcaaggtagagcaagtgtttatgtcctttcacttcacaggtaaagagctactcttggagaaatttaagtcatcagaggacacaagattaataaatgtcagttcaagaccatgtctttactgctgtcactgttggaaccatacaaa

SEQ ID NO: 903412 - DNA, 625 bp, Homo sapiens
actggcctcttacctttgcctaggcagtccccttacagggtttctggcctgtggtcattaaagggtgttgctttctaacagatccaggagctccaggcttatcttgggaccttaagaggaaaggatcacccaactcacaggtatttgaggatacaaacccatggctgggcttggctttaaaaggccttacctgagatttcttgtggaacagagttccatcgaagccagtacaaaaggcctacatagaaataattattcttgctgcactttatgctaataatcaggccaagcatagttctatcatatattttttttttaccaaaaatgaggactggagagagaaaagttatgcaacaaaatttatcatatatttgccactaaattctattgtcacttggttgtttttaagttttttaacccacattttatactaatcctgcttattcctgagaatcaagtagtgatgtcctgcagccccaaagaaacagaaagggatgggtaatgtaaaaatctggatcaatattctakctctgggcaattatcctgcaaatcctgccaggtgataaaagtaaatagggtgcccatacttgcaggtttctttgtttgggaaaataaagccaagcac

SEQ ID NO: 903413 - DNA, 513 bp, Homo sapiens
tcaaattattattattatcataccgtaaggacaaggtcaatacttagatgtttaacattttcacaactttttattcttgcctatattcctgatcttctgtcttgtaatgaatgatcgtgtcccccacaaaattcatatgttgaaggcctactcatcaatgtgatagcatttgggcatatggatgtgaaaccttttggaagtaattagggtgagataagttcatgagggtagggccctcatgagagaactgctgtccttatcagaagagacaccatagaggagctctctctctctctctctccagcttcctctaccccagagaaagtcacatgagcacagagcaagaaggaagtcatctgtgagccacgaaaacagcccctcaccagaaactgaattggttggcagcttgatctcagagttagcctgcgggactgtgagaaataaatttctattgtttgacatgcagcctgtrgtcttgttatagcagcccaagcttactaatacacatctaga

SEQ ID NO: 903414 - DNA, 160 bp, Homo sapiens
ttgttatatttccttttgcatrtttcctttccacttccaaactaccctgtgagagaggtttcattgaccctactttgcagacaagaaactgaggctaagggaatttaagtaactcgctgaaggtcaaaactctagtaaacagggattcagtccaaaatct

SEQ ID NO: 903415 - DNA, 600 bp, Homo sapiens
ttgcttggcacctagaatgtgttcggtattcatctcctatgattaattttagatttgrtggtttccagccctggctcggcattagaaccacccttctcaggaatagacatacttggaactccacccctgggaaattctgagcctgtggatctgggctggggccaggatctgcctgttaaaaatggtcctctggttattctgctgttggagggtctcagtgtttgtgaaatcaaacatatgattgaatgtaaggtagaacgtaagtccttgatttctctggtttctagggttcagtgaagggacagaaaaggctgcttggtaaagtgatctcttctagggaggatgcttggggggtccaagagctcaaagcattttctcttcttatctcatctctgcatgtccagccttgcccatcgaagcagatggaacggagaggaagttcaccctggcctccttcacactacccctgtgacccaagtaagctggccaccttccctgcacttcatctcgccactttgttcagcaggcattctccatgttttacatttgcagaccagaggcgggtggaagaagagctctgtggactccatgaccatcagt

SEQ ID NO: 903416 - DNA, 198 bp, Homo sapiens
gcgccaccggaaccggtgagtraggacgcgcccctccgccggcgggcgggacccagccggggcaccgggagaccccgaggcgtaggtctccgtttgcccacccgcctcctaggaggcgcctctcggttctcctcgccttccctccctcccctccgtggtggcgcctctgagctgtcagcgccgaggctaaagggagcc

SEQ ID NO: 903417 - DNA, 491 bp, Homo sapiens
caggcttccttgagctgcagtgggctccacccagttctagcttccaggccactttatttacctactcaagcctgggcaatgttcggtgcccctcccccagcctcgctgccgccttgcaatttggtctcagactgctatgctagcaatgagcgaggctccgtggccatatgaccctctgagccaggtgcaggatataatctcctggtgtgccgtttgctaagactttggaaaagcacagtattaggctaggagtgacccgattttccaggtgctgtctgtcacccctttctttgactaagaaagggaattccctgacccgttgcacttcccagttgaggcaatgcttgccctgcttcggctcatgctcggtgggctgcaccyactgtcctgcacccactttccgacactccccagtgagatgaaccgggtacctcagttggaaatgcagaaatcacccatcttctgtgttgctcacgctgggagctgcagac

SEQ ID NO: 903418 - DNA, 559 bp, Homo sapiens
agaaaaaaatgctaaaatatggtgtcataatatctacaaagttctgagagagagmccaagactcatacctagcaaagatgtcactcacatataaaggtaacaggtatagccttatcaaataagaatgaacttatttagtacacagagccaataaagccttgtgtggagtgtgtgtgttgcaggaggatatggggaactcaatgacaaaatccagccaactaaagcataattaaaaacacaattttatacagacacacacacacatacacacacacacacacacacacactagtgacctttgaatccactaaaataaaaaactaaaaccaaaaaaaggtaaataattatagtagcaggtggaaacataagtcgttacacagtgaaaataatcattcaacaaaaaaatgaaaaaaaagtggcatgaatgcatacggttgctaatttcattcttcagagtagaaagaaaatgtctaaacttaaaacatgaagtgtaaaaaaggaacttaaaactattttttttttagacccagggtctcactgtattgcacaagctggattt

SEQ ID NO: 903419 - DNA, 645 bp, Homo sapiens
tgccatttgtggggcatgagtaaaaaatacttactgagtataaccgtatgagttgaaaaccccttcttgaagagtggattggaatccatctcccagagccaagtaaatcaggacttttctaactattgttccttcacgtccctagccataagcagaaatctagaatctaaggaattggacatttggtttgcttccagccttcgggtattatacaagaagcatttaaaagctcataaacttcaactctaagcaactgtaagaaatcataaggtttagcttacttctgctaagtagatagataggcacagaggcagcctgataatgtgaaacgaataggggccttagagtcaaacaaacctaggtggaatcctggatccattacttatcagctatgtttcctttagaaagtaacttaatattttgaaatctcagctcatctgtggaaatagatttaaaaactctactgatacataggttatgagtgccacattaaatgattcaacatatgcaaaacatttagcatatgctaaatatgcgaaatgctcaataaatagcaataattttcacagagtagatttttaaacaactgcttcagtgacatatarttgccataccattcacctatttaaagtgtgcagtctagtg

SEQ ID NO: 903420 - DNA, 626 bp, Homo sapiens
ggtctgaaagtgtgtttggtataatttcaattcttttgcatttttaaagtattaggttatgtctgattttgtggtctattttggagtatgtgccatgctcagtggagaagaatgtatattctattgttttcaggtggagagttctatagaggtctatcagatccatttggttcaatgttgagttcaggtcctgaatatctttgttaattttctgcctcactctcagtggagtgttgaagtttctcactattgtgtgtccatctaagtctctttgtgggtctccaagaacttgttttatgaatctaggtgctcctgggttgggtgcatatatatttaggatagcttacctcttctggtggaactgaaccctttgccattatataatacccttctttgtcttctttgacctttgttggattagagtctgttttgtgtgaaatttggattgcaatccctgtttcttttctgatttccatttgcttggtaaattcttctcactccctatattttgagcctatgattgtccttgcatgtgagattggtctctggaagacmtcaggccactaagtcttgctttgttgtccagtttgctactctgtgccttttaaatggggcatttagcctgt

SEQ ID NO: 903421 - DNA, 632 bp, Homo sapiens
cttatacgttcagcatgtatgtaatggctctcccctaagtcattacttgtagggaaagtgttttaattttttttttcctttatcctgttagaaatmatcttttacagagaaaaacttctgtaagtacctatatctcaacagtacacttttaacactaactgctggggttcggtgcctcaactctgtatcttctactcgttcactttacccactcacagatttgaatgaactgcttgtcattggggaggaaccacaggaagttcttacggtggtcacactttaggagagagaattagtgccgaagcttttcctcatggagaaagctgtggggggcagattaggtagctgcataatctctgggatgtcgcgcctgctttgctttactctggcaaaacagagacccacctacgaaatgtttccgggaagggatgaagtgtgccacggagtttctgaaggaagaaatgcaggtaacttgatgtcatctggctatcggctgccagatgtcttaatctgatagtggacattagcaataatatttagtgaaagactcttttttggaaagtcgggattgacatttaatccatcagtctgtgtcttatctatgtaactctagtgtaaatctaaaagagata

SEQ ID NO: 903422 - DNA, 499 bp, Homo sapiens
acatgaagaataaaagttataaatgaggtaacttacctaatgatagaggyttccttttattaaaggatttcaaagctgcttctgaaaaaggagaaggggggaaaattttgcattttaccataagctcaagattttattgccttcataaaagaaaagatgacatttagaactggatcacttgttcctttctcttatctccttccagttcaaaatgcttgcatcttttttttttgagacagagtgtcactctgttgcccaggctggagtggcacaatcttggctcactgcaacctctgcctcccaggttcaagcgattctcctgcctcagcttcctgagtagctgggactataggcatacaccaccatgcccagctaagttttgtatttttagtagagatggggtttcaccattttggccaggctggtctcagactcctgaccttgtgatccgcccacctcggcctcccaaagtgttgggattacaggcgtgagccaccgc

SEQ ID NO: 903423 - DNA, 597 bp, Homo sapiens
ggtattctattatagctgatatttccaaattttagcttgtcaataagtcttttaaaaatgtatgacatagtataggattatgcaaataatttacacaccaaattataattatagaaaattaaaatatccagctgtaaaacaaagaggaagacaactattaccctaatacttttcctatgggaatttggcatggcataggtaatatagaaggatgatgctatgatcacattaataaattcacacttttcttaaccctgtcagccagctctgtgaacatggtgacatgtggaaatgtgttttctcacaaccaaaggaaatatttccataaaatttgcagatttttataaacgaccttttttagcacaactgatatgcactaacaagtatttcaaaaatattacagctgtttcagaatttctttgaaaaaaacaatgctattctgacagaatcagatgtgcccatgaggggcagccattcttctaattttcattttattatttttacaattttaattttcaagtaaacccctcctatgacaagtaatgtgtccacaagatrggcaaaataggagtcttggaatttttcaactttaactca

SEQ ID NO: 903424 - DNA, 629 bp, Homo sapiens
aggctacccagcaatcacccgtaccagcccccctccccaacgcatcctctttgaacgggaagctggaaggggtgggaaagaagggtcagtgagatcctggttagtatctctaagactgaaaagagtggtgggatcttactggcagaaatgctccatttatgtttataaggttgagagtagagggtgtttttattctgcttcccacttgaagcatttatggcatacatacccctaaagagttctctatttccccatggcagagaagggtgcagtagagtcacctgtgtaggatggttgggtagatgcatctaacactgtttccctgagtaggctgaataccccatcagggctcaggaagcagccaaatatcttcttcaagtgaccataagtgacagaaatgagacacccaacctgggtgaaacaagagggttctcttggttataatggaggaccctgcaatcaagaggaatggactggctagttaagattcagatgagcatgagaccacctcagaagatgttaccatggggcagtgacaaggccaagaagagatggacccatggtcayctcagcagactggaacaaggagagaattctgtcaccagaactacggagaacacaaaatatgc

SEQ ID NO: 903425 - DNA, 546 bp, Homo sapiens
gggtcttcagagaaaccaaaggatctacaagttcaagcacagcgaggacaaaaatctgccctatgtgggtcacaaggtcaggagatcaagactatcctggctaacatggtgaaaccccgtctctactaaaaaayacaaaaaattcgccgggcgtagtggcgggtgcctgtagtcccagctactctggacactgaggcaggagaatggtgtgaacccgggaggcagagcttgcagtgagccgaaatcgcaccactgcactccagcctgggcaacagagcgagactctgtctcaaaaaaaaagaagaaaaaaaaatctgccctatggatggaaccatgaaaaatatcccatgactttaccagcaataaaaacttgccagcagtcaacagaggtaattcagacacttttcaagaagcttaactgtaaaactgtgaaaaagcaatgagaatggtagattgaaagacgaaagtaggggagcacagtggaaaacagcctagcagatctctacaacttacctaaaaatgtgccattgcaaacttaacaaattc

SEQ ID NO: 903426 - DNA, 618 bp, Homo sapiens
gagcaaatatccttgttgtctttctaacttgataaccttccccatcttgcaggatctatccaaagcgtgtccagagaagaaacaaatggagatggcccagcatgacctcactagacaaaggtacatgccaacttcagaagttctggtgaacatgaaaacatttgtgaaaagactccaaacccagagtatcttcccatttgtagagtgatagactcctttctagagcacactgcccaatatctttgaggactaaacataagcatggttgtaaagctatgtctgactgatccccccagtgagaatcccagatagttatttaaagcaggaacaggaagcggggtgatcactggggatggggccagccttgcagctgagggaaaggacagttaagtcaaagaactatgcccaaaatgggtcatcaaaggaaatggcggtgaaggtccctttatcagaaactgaaagagacaaacgaagtcccaagagctaagaatgcagaggcaaggagcagtgggtcatcatgggtgaatggaaggtggtctgcaaaaattccaaaaaacagggaaattccaggagacttgcyttccattctcctcatgaagatgtgaatggctttcccta

SEQ ID NO: 903427 - DNA, 629 bp, Homo sapiens
caaatgatatttctagttctagacccttgaggaatcgccacactgtcttccacaatgtttgaactagtttacactcccaccaacagtgtaaaagtgttcatatttctccacatcctctccaacatctgttgtttactgactttttaatgatcgcccttctaactggtgtgagatggtatctcattatggttttgatttgcatttctctgatcaccagtgatgaagagcattttttcatgtgtctgttggctgcataaatgtcttcttttgagaagtgtctgttcatatcctttgcccactttttgatgggcttgtttgttttttttcttgtaaatttgcttaagttcttcgtagattctggatattagcccgttgtcagatgggtagattgcaaaaattttctcccagtctgtaagttgtctgttcactttgatggcagtttcttttgctgtgcagaagctctttagtttaactagatcccatttgtttattttggcatttgttgccattgcttttggtgttttagacatgaagtccttgcccatrcctatgtcctgaatagtatggcctaggttttcttctagagtttttatgattttaggtctaacatttaagtctttaatccatct

SEQ ID NO: 903428 - DNA, 618 bp, Homo sapiens
tttttgtatgtggtgagagagatggatccagtttcattcttctatccagtggctctccagttttcacagaaccatttactaaatagggtgtccttttcccaatttatgtttttgtatgctttgttgaagatcagttggttctaagtatctagctttacttccaggttctctagtctgttccactggtctatgcatctacttttatatcagtaccatgctgtttcgattactataaccttgtagtataatttgaagttgggtaatgtgatgcctccagatttgttctttttgcttaggattgctttggctatttaggcccttttatgattccatatgaattttacatttaagtttttaaaggactgctaagagtgctgtgttgagagtagactgggggtggggaacaagggtgaaagcagaaatgccagttgggaggccattgcaataattcagatgaggaataatagtgacttgatccagagtaatacagaatgcagtgaaaagtgatgcaattcagagtatattttgacagtgaagctagtattataatctgccatctttacatgccatgaygtcataaaacatgcttctattttggtgatttaggttgttcctgtt

SEQ ID NO: 903429 - DNA, 573 bp, Homo sapiens
gtctggaattgagtaaacatgaattaagtattcaacgaatgagtaaataaatgcttccttcaaggttttccattttaggcaaaacakcatgtcgtttgataattatgctcatgatctctttatgaacatttttgtggggggagaaatagtatcacacagatcacagtgagaggaaaaaagtaacgggttatatgaaaaggctagacaaactgacgagtgctaaatcacctgctaacagtggcttaagtgagagtttctgaaatcctgtgcaagaaactaaactgaggactaacagacatttgtagtcgaaacatctgttttataaagcaattgagaaatcataaaaatgttttatgcctttagggcctaaatattccaagacaaatatatattttaaaatatattatttattccttttcaaagaatctgactcggcattccactatacatcaactgatggtaatctattcaccaaactggcttgcaatggggaattctggctgcggtttgtgtgcccttgaataagacaaaatatcctctctctgatgattcattttgcaagtggaaagaaat

SEQ ID NO: 903430 - DNA, 667 bp, Homo sapiens
ctctgcatttgtcactggaaatatgatttagtcctgtcagggtagtcaaacacatctttttattgtttatctctggttccctactaattaaccatgcagaactggagatgaccgcaattgtgctattaacagatgcccagtctcttccattaactgtgctcttcgagagtgacattttccttttatttattttagtattctcaggtcctgataccaggagctcaattatgcttattggatgaataaatgaggtgcaaatgtaagctggggcaagaagggtttgctttgtcaacagatttagtgactaaaaaaccacactgaaggaaacttaaggacagcattcatattttattcatcattagacccactaaggaccatgggcatagtgttggctgcttactgactgggccatgatcccaggttccatcttatactcctgagaggcagagccagagttaacacatttagcctttagaaagacacaccatagtgctgaccattctccctgaagattttggttttctgcagatatttacaaaatcttcacaaggattktgacaatcttctttgatttttctggtcccatcagtgccaaaacttatcaatctatgttaataatatatgcaattttaggtatatgttttcaaaagtcttactaaaacaacta

SEQ ID NO: 903431 - DNA, 578 bp, Homo sapiens
ccatatctagatcagcacctgatgcatagcaggtgttcaatgaactagaaactcaactgttgtcaatactgtctcttcatgacgtatttttcttctttgtgccaactcaacttctctgatccacagcagagagctttacatcttactgctttatttgctaaagaaatattctctctcggtattttcatgtcaaaaaaattccagaaaaggaactcattgaaagagaaattttacattattttaataaatagagcatgaaatgctgccagggttccctatgaaaccatggtgccagcttgctctttaaagttcctgctcaaaaacaaaaacacaaaacagaacagagaagtgctgctattagacctacctcaaatgtaattatgattggacacaattaccgtcaatgattcctacccaagaagaggtctgaataaagaagttagaaacagatcctcttttgaaacggataccaggttgcatcccatctcctctatyattctttcaaaaagaaggggtcaaagatttgctcattcatctgaaaaaaaaaaaaaaagactttatcttccagccaaagactt

SEQ ID NO: 903432 - DNA, 674 bp, Homo sapiens
caaatgtaatcaccaatcctgtgattttcaacaacacactgacataacctctctgctttgcctttcataattctgagaaaaccccagaaatataaaaatgtttaaggtttcatggaagccagaatttaaaaatttaaaaatttaaaaataagtgagtttaattttattacctgagtgcttttttctctagctttagttatctatttctcttcatcacggcacataatagatgaaaaataaatatttgtaacatgactgaatggattaacagggtaatcatctactgttttctcaagtagaaacaaataacagccagctctgttctaaaccactttaaattaatgactatcatcccctccatgtctatccctcatgtaatcctcctttacattctcctctgtaatgttaaacttgacttttttcctccaagatctcctgaaagaccacattactaatgaacaatgagtggctaagggttccagggattgctcttccaattctctaactcaatggccaaggctttggctcagtttcaagtaacgagggggaaaattagggaaagtgtgtacrgttcacaatttctccaagtcaggtggagaacaagtggcatgtaaagctctctatttattcttttgtttaatcagtaattgacatagaaaatttgccataaattg

SEQ ID NO: 903433 - DNA, 617 bp, Homo sapiens
ccattttaaaaatctgctgtgcattcatttagcctacatttaatgagtactgactaggtgccagacatcagtctggatactgggggtttgcaatgactaaaacatggtccccatttgggagggtattgaatttcactgaagactgaattccattgagattgattcataactgagtaagttagtacagtaggataaatatgataagagaggcatatgcaacatgctgcaggaacatagagaaaggttatcagacaagtttagcaaagcttcacagaagtagtgacaacttaggaaatataaacaggaaattatatataaacaggattttaggggctaaggaaggagccagcgacgttgtgggctgggcgaatcctgtgtggggcatcagaactcatagatgggcacatggcacatgtagggtgccctgcttcacagaattggtgtgcaaggggagatagtggaagatggagcaggaaaattaaggagagctcagtttgtgggrggcctgaatgccatccctaagtctgtcgattgaggccatcctgctcattctttggtccctgtcctgattggtaacaccgagggtgtagtaaaaatatctaacaagctgtatggca

SEQ ID NO: 903434 - DNA, 546 bp, Homo sapiens
atgtgtgttagtgagtgcaggatctggctggccactccgggcattgacacaatagcaagctccatggggggcctgcagccaaaccaggcatgttgcctcaagggaaacatggtggcacccwggtggtgtgttgccttgttgctggggtggtttccctccgctggtgagggcaaagggctggtgtgacagccttttctgggtactggcgcttggtgggtcccaagctcttgtccggtgtctgagaagaatggggttacacagaaaattgaatgatggtgaaaatggagaattttgttgagtgatgaaaacatttctcagaagagagtggagctggagaggggacgagaaggacaggtcgtctttccccaaaatcaggttgtctcttccccaaagtcaggctgtctcccctctactgactgagtctgggatctttataggcacaggataggggtggggcataccataggtagttttggaaaaagcaacattcaattggtaaaaaggcatgattcagaaagaaccaattgggagagggcaggcaaacag

SEQ ID NO: 903435 - DNA, 546 bp, Homo sapiens
atgtgtgttagtgagtgcaggatctggctggccactccgggcattgacacaatagcaagctccatggggggcctgcagccaaaccaggcatgttgcctcaagggaaacatggtggcaccctggtggtgtgttgccttgttgctggggtggtttccctccgctggtgagggcaaagggctggtgtgacagccttttctgggtactggcgcttggtgggtcccaagctcttgtccggtgtctgagaagaatggggttacacagaaaattgaatgatggtgaaaatggagaattttgttgagtgatgaaaacatttctcagaagagagtggagctggagaggggacgagaaggacaggtcgtctttccccaaaatcaggttgtctcttccccaaagtcaggctgtctcccctctactgactgagtctgggatctttataggcacaggataggggtggggcatrccataggtagttttggaaaaagcaacattcaattggtaaaaaggcatgattcagaaagaaccaattgggagagggcaggcaaacag

SEQ ID NO: 903436 - DNA, 522 bp, Homo sapiens
tattgtcagtctgaatggctttctctctctctctctctctctctatatatatatatatatatatatattatatatatwttttttttaattgaagtgttttctgtcttccctttgctaaggcaatccaaaaagctattcatatatgaacattttattttaatgatttgatgagttaactactgaagagtgatggttaaaactgagctggaatagattaaccaagacttcagtgtgacatttgcttctatcctgcttgacacttgctgcagtttgaatcagatgcaaggtgtgtgccaaaccacctgatgctacatcatttgtagcatattcagcgtgaagcatcagttaaattctgcagactttgggtaaataaaaatgttggcaatgaaaaaccactcctccctttagatcattaaaattaggaaacagaagaatccttactacattagacttaaaattttcttcagagcaagcagcaccaggtttgtacttcaaaatattgccatccctctaatcacatgg

SEQ ID NO: 903437 - DNA, 502 bp, Homo sapiens
ggacctccagcaaacgccaacagacctgcacctgagggtcctgactgttagaagaaaaactaacaaacagaaaggacatccacaccaaaaacccatctgtatgtcactatcatcaaagaccaaaggtagataaaaccacaaagatgggggaaaaacagagcagaaaaactggaaaatctaaaaatcaagcgcctctcctcctccaaaggaacgcagctcctcagcagcaatggaacacagctggacagagaatgaccttgacgagttgagagaaggcttcagaagatcaaaccactcagagctaaaagaggaagttcgaaccaatggcaaagaagttaaaaaccttgaaaaaaaaattagacgaatagataactagaataactaatgcagagaagtccttaaaggacctgatggagctgaaaaccacggcacaagaactacgtgrcgaaggcataaacctcagtagccgatgcgatcaactggaagaaagtgtatcagcgtt

SEQ ID NO: 903438 - DNA, 572 bp, Homo sapiens
gtctcgcacgtccagtatttttggctgggtcgaaaaaaaaaaaaaaaaaagattacaaatgttctcaccaaagtcatgagaggctgctttttcttttgttgttaaatcacatgggcaattttcggttctcatctcctcgtctgaatgattgttttctgcaacagtactctctcctaattttttgggcactccaattcagtttcctttgatgagttctctcattcttctagtagctcgggcagaagccctgaagtcatccctggcttctttctttctcttatggacaatgttcaattcatcagaacccctgtttttttctcccttaaaaatacatctagaataagaacaattttaccagcactgctgctagctacttccttggtccagacaccatcctctctggcctggagggttacacttgcctcctgcctggtctcctggatcccccttcttgtgcccataagctgttctcaacacacagccaaagtggtccacttgaaccccaagtcggctctccgatcrtctcctcagagccctcccctggcttctcatctcactcagaatagaagtca

SEQ ID NO: 903439 - DNA, 653 bp, Homo sapiens
catatcttcccccaccaaaatcaccagttggaaattacctttcctcctctgaactacaagaacacttatttgcatcttatttgcataaactttttaaaaattattttttgtattagayatatacacagatatgtcttatctgtcccatttgcctgtatgctcctagagaacagaatccttgttccttagtctttatctatcatagaagattgtacatgagaggctgggtgcggtggctcacacctgtaatcccaatgctttcagaggccgaggtgggtagatcacttgaggtcaggagttcgagatcagcctgggcaacatggcaaaaccctgtctctacaaaaaatacaaaacttagccgagtatggtggtgcgtacctgtaatcccagctatttgggaggctgaggcaggaaaactgcttgaacttgggaggtggaggttgtggtaagtctagattccgccactgcactctggcctcagtgacacagtgagtctctgctaaaaaataaataaataaataaataaaaaagattgtacatgagagcaatctatacatgtttagttccttgactgaatgatagacggattgaatggatcaatcaatctaggaactggcagcttttaaatatctataccatctttggcaaataac

SEQ ID NO: 903440 - DNA, 659 bp, Homo sapiens
ggactgaaaagttgcaagtagtgaagatagtgaaaagaaggactcaggattttggaggaacatktgacaaaactttctaaaggagaacactacccagagttttggtccaagcaatttgtttgatgagggagtgatttactgacatagagaaaactaaaggagaaagagaattatgggcctgggtattgattctgaagttctgctttctatgtgtttattttaagatgcttattaaacatccaatggagacgatggggagaagctaatgatacaaagttggaattcattcatatatagttggtatgtaaagctatgggctggatgagatcagcaaaaagagctgggatggggagcaaagagagaaacaggtggagggggagtaaactagggagagacaaggcttgctctgagtattgggaccctgtaacatttagcagctgaggaagcaaggacccagcaaaacacactaatgagaggtggccagagaggtagaagaggaaatgtaaatttatctgttccatacatagaaccttgacagacaacattttaacaacaataacaaaatgtagtactctctggtattttcacatacatcattgctatcacagcaagttcactgacctacatcacagaactacttattttctgattaaggccag

SEQ ID NO: 903441 - DNA, 494 bp, Homo sapiens
tccttcaaatatgttttccaaacttttagatttctcttcttactcaggaacactgattattcttaggtttggaattttaacacagtcccaaacttcttggaggctttgttcatytttttaaaattctattttctttgtctttgatggactgggttaattcaaaagccttgtcttcaagttctgaagttctttcttccgcttcttcgagtctattgctgagactttctggtgcattttgcgtttttctaagtgtgtccttgatttccagacattatgatttttttttaatttatgctttctatttcacagaattttctttttatatcttgtatcatgtttttaatttctttatatttgacttcacctttctctggtgcctcctggattagctcaataattgaccttctgaattctttttctggaaattcagaggtttttgtcttggcttggatatattgctggtgagctggtacaaaattttgggggtgttaaag

SEQ ID NO: 903442 - DNA, 638 bp, Homo sapiens
tctttaagagtatttctacaatcctgtaaattaaaaggttagatttttttcatctaaatattcttatatttattaagtcctcaactatgactatggcatcatttcgtttttacatgggtttggatcaagtaaaggtgcccttccgcaaaaaaactttcaggatgtaaaaactggttcctgtaagaaaagaaaggcatgatcttaacaatgttgcatccatctatactatttcatactgagaagcaagagcaatctgtttatcaaacccaattaccctttccctcctcttctacatgaaatggtcgcaatagattaggtagagagaaagaaaactaaacactttgcaaacatcaaaaaggagttgaagaaatgagggatcccaccatgaggcagacataaagccaatcacagcttccggaaaatgcaggctgaaattctttccaacagtttttggtgaaagcttttatgtctcagttatttaaaactctatattgcctaattattcatagatcagttctagctacttgtatcttacatggaaatacaaagagctgagagtaaccaaggaacaaggacacattctagcagggtatcataactgattacagagtwatagttgtaaaccaaaaataaaattt

SEQ ID NO: 903443 - DNA, 496 bp, Homo sapiens
agaaaaatgctaatttggttactctatgcaaccccttggtcagcaacttrcaaaattgaggattttgcttgcctgtggtttcataatttttctttgtgatgcaggatggaccccagagctatggtatggcaaacagggttgctgggctctcttagggaaagagaacccagaaacctgacatactggcaaaaacgataagaatttcttacaagtcagacttctggtctctctctctgtgcaaactggttgaatgaatggtaaaaatcactgtttatcccctgtaaacttttgattaatggaaaaaatgatttctgaggctagtcttaagctgtagccaatctggtgtggtttgtgtgtctttctgcatggttctatcataaggaagaataccgtaggataaaacatgggcttagaacctcataaacccgctgttcaagccagtctggcaaactggtcagtaacaaactttgctgcagttccctgaaacaagcaaaaa

SEQ ID NO: 903444 - DNA, 631 bp, Homo sapiens
aatattgctgttccatatggctaatgacagcagaaggcatggagtctatggtgaaagcatttcattgtgactaagttgctcctgataaaagatgaagacctggaatttattagactacttatgcctgttgcctatattcccttcttctcatgcagtaaagcgaggcacttcatggctactgctataactttttcttttccttaatttttttaaagtaaaagttatcttgagaatattagttcgaactccaaagatccaggtatcatttcaaaatatttttaaaggggacaaaagaaaatctagggaaggtggggatttacccaaaagaaaatgaagatggatgggaggagcatgcatgctgttccaagtaggcaccatgctcggttctttatgcaagttttcttgcagcctcaccctctccataactctatgagaaagatgtcattaattgcatttgacagattattactgtccaatgaaactttctgcaataaagccagcatttgcactggatccatctgattmtaaatgtttcttttcatgacaataaataaaaaaaactacggtattttataacagttttctttcctactaaacataggaagggaggcaaaatagatctgctggttac

SEQ ID NO: 903445 - DNA, 631 bp, Homo sapiens
aatattgctgttccatatggctaatgacagcagaaggcatggagtctatggtgaaagcatttcattgtgactaagttgctcctgataaaagatgaagacctggaatttattagactacttatgcctgttgcctatattcccttcttctcatgcagtaaagcgaggcacttcatggctactgctataactttttcttttccttaatttttttaaagtaaaagttatcttgagaatattagttcgaactccaaagatccaggtatcatttcaaaatatttttaaaggggacaaaagaaaatctagggaaggtggggatttacccaaaagaaaatgaagatggatgggaggagcatgcatgctgttccaagtaggcaccatgctcggttctttatgcaagttttcttgcagcctcaccctctccataactctatgagaaagatgtcattaattgcatttgacagattattactgtccaatgaaactttctgcaataaagccagcatttgcactggatccatctgattcwaaatgtttcttttcatgacaataaataaaaaaaactacggtattttataacagttttctttcctactaaacataggaagggaggcaaaatagatctgctggttac

SEQ ID NO: 903446 - DNA, 600 bp, Homo sapiens
gtataaaaaaaaacccagcatcttcaatggtgaaacacccaagtacacgcactggggctcatcaagaaaacaactccacccacagagaatggagaaaagcaaggcagggtgaccacacccctgrgagcaacacagagccaggtaaacatcccctgcccagagaagcagtgagtgagtgagtgaccccagggacagacacttctctcatggatctttgcaacccttgagtcaggagatccccttgagaacccaccccatgagggccttcagtctgatacacagagctctgctgggtcttagcagagcagccactcaggcacacacagcaacccaagagtttagatacctgggcttcccagcaaaagcagccgcaactccagctgagcaggaggttattcccctgtacaaacccataggaaaggggctgaatccaggaggataagcagggacagtctgcaggccctgcttccctagcacctcagaggatgagacccactggcctggaactccagccagccatgggtagcagtgttacacctccctgagacaaaactcccgcagggcaaagcaggccaccatctttgctttttcacggcctta

SEQ ID NO: 903447 - DNA, 617 bp, Homo sapiens
cgtgcctttgccacccatgcttttgtcttatttggttatgaatctggggcttcccataatccccttaagaytcaataatttgctaggataattcagagctctctgaagccaccatgcttatgatggttacagttttatcataaagaatacaactcgaacagccaaatgaaagagaaaggcaaggtcaggaggaccttctgtctatgcagagttgaggtgtaccatccttctggtacacagtgttggtgctgagatagtagacaggagctgagatattttccaagaaaaaataacgctgagtggtaaaataggtttaactggaaatgattatcatttttgtccccagatcccttttcaaattcaatgaatgctatggactctttgcccagaagtgcatacccttgcacatcttgggcattagggttagatcccttgacttaaagctcttccctgaggcatgtgtatcataatattcagctcttggagaaggaaaaactaaatcttacatgggaattacaggattcattgtgtccctcatccttgaagctagtctgtattattcaggcaatttatacctgctgctagaaagttgaggataatttcccattgtcaatcct

SEQ ID NO: 903448 - DNA, 608 bp, Homo sapiens
attcagggcaagctgctcataaagatgaaacagcaaagactggcactagggagactcccttcatgggagtcttacatgactattcataagtaggtgggaagaggtgttactagtaagcatgttcttggtkcacaggcacagtagctatacgtgctttctcatatattgtgttgtgggaagtcagggaacccgaacggagggactggctgaagccacagcagaagaacataaattgtgaagatttcatggacatctgttagttccccaaattaatacttttataatttcttatacctgtctttactgcaatctctgaacataaattgtgacgatttcatggacatttatcacttccccaatcaacactcttataattttcttgtgcctttctttaatctcttaatcccttcgtcttcctaagctgaggatgtatgttgcctcaggaccctgtgatgattgcgttatctgcacagattgtttgtaaagcatgtgtgtttgaacaatatgaaatctgggcatcttgaaaagaacaagataacagtgattttcagggaacaagggagataaccataaagtctgactgcctgtggggctgggcagaaaagagt

SEQ ID NO: 903449 - DNA, 654 bp, Homo sapiens
aaagaaaaaaattaaaaacmgttaatataagtcaaagcacaatgaactgcttcagttttgagtgctgactgaaagctattgggataaaacagagtagaagtcagtgagaaagctgcacagccttaatctgagtcctaaaagatgggtaagatttgaatttgaaaaggagaaaagagaaagtattatagacaaaggaaatagcacaagcaaaggaaaaataatagtgcgtatgggacaagtgaagcagctgtatttgccacagcataatgaggaatgcacagatagatgcaacaggatccggttatggaaatacaggaaaatggggcagaaaaggaagggattctaagaaagccagaaaaaaattgttactttattttgcacttaaaatgaacccaggaagccatggtttgtgttgtctgaaaagataaacatggcaaataaaaatgcctgtgaagaaattgtactctacaagtagcaggaaatactcagtaacttcataggtgtatataataaacaatcagcttgtggcttgaagtctaaaatcaaattgcaagacatcatgaattacctgggaataaaggatgcacttgccacctttctaaataattaattttattgttacttctaataaaaaggcaagacgaattaacgaaa

SEQ ID NO: 903450 - DNA, 597 bp, Homo sapiens
tatcaaatcatcatcatcttttacctggagatgtgcaacggcatcccaagaggtcaccctctttacctgtctatagtctaatttcaacagagcaactagaatggtggttttaaaacagaatttgggaatttagttgcactttgatggtgttagtccacaaaatccaatccttttgctaattacaataaaaatttgtgaacaaaacacaaacaaacaagtatataaaaggaaattacccatatctgtgggctctctaaggcaaataaaagggggcagattgtgaaggaaagtcaaaacttagagaaggaacctggcttagggtgtttgcttttatggtttttgactcaatgagaggttttagtcacagaggagaacatcagcattggtagataaaactcctaaaaaaaaaaaccctcatctttttgggagagtaagggggaaatcttatagtggggtaaaaaagcagaagaaaggctagcttaattctgtgtaggaatcagtataaggctragattggaaagaaaaaaatcttgaagaaatcatagcagtaaacttccaaatcatcggaaagacataaatttacacatcagcaaacca

SEQ ID NO: 903451 - DNA, 600 bp, Homo sapiens
ccctttcagagaaaatcaggaattcaaagattctgatgaactgggcaactaagaatatcaaccttaaatgggtaggcaaagctgargcacacttgggcatggaccccaccccaggtactgcacaatacagttggaaaggaattcctaacatacagctgttccctgaggggaggagagtttgggccacacatacagtgtcctaactcaaaggttccccatggtttggctcttgattcatcaacttggaacaaaggggactaggcatacacaagagtctctagaccacagaaaaaaaagtgcagttttgtatggacacacaaacacttgcaggggcttcattcctgggaatagggcagagaaaactcaaatattcccagttgttctggaaggcacttgccagcatactctgccgcctgttgctgctgaccattagcttctgactagtctgcatcagagagctaatgtggccaactagccttagacttccagcagcccgagtaggacctgggcactttctcatccctcttccctggctcaccccagcaataacttcaggtctactgtttcctcctggaagaagtttgtgtgggcaatgagcac

SEQ ID NO: 903452 - DNA, 619 bp, Homo sapiens
ggaatgaatttgaagttgtatttcattccttatgcaaaaatcaattcaaaatggattaaacataagaccagaagctgtagaactacaagaagaaaacaaaggagaaaaagcttcatggcattggtctgggcagtaatttcttggatataactccaacaggacaggcaacaaaagcaaaaatctgcaaatgggattacgtgaaacaaaatcttctgcatagcaaaagaagcagtggaatgaagagaacgcacagatggggagaaaatgttagcaaattatgcatcagataaagtgctaacagacaaaatatataagtaactcaaactactcaataataagaaaataaataacactattttaaaaatgggcaatggacccgagtagacatttcacaaaagaatacatataaaaggccagatatatgaaaaaatgctcgacaacactaataatcatggatgtacaaattaaaaccatgagatacgacytcacaaccattagattgcctatgatttttaaacaatgaaaaagtaagtgatggtgaggatgtggagaaaagggaactcttgtacagtatctgctgagaatgtacatcagtacagccattttagaaaacaatgtg

SEQ ID NO: 903453 - DNA, 647 bp, Homo sapiens
cacctgttcgctcacattcactaattctttgcctttcacttgcttctttgtgcctgttctgcaaacccccagttctggttggatccagctctctgcaaatacagcttgactacttttcccagtctccttgacagctggctgaagccctgggactgatttctggtcagtgaaatgtcggcagaaaaggtggcaactacccccgggcttgacccctaaacatctgtgaaactgtctgggtctttctcttatgatcgtgaaggaattttggtggacttcgaggttaggagtagggtgtggaggggatgtagttatagacacttgatgtggacaattgacgatgtgaagagcgactgctacccctaaacctctttggaatgtgacaacagagaggaaaacaaaagccttcactttgttatgtctctgagatttgggagctgcttgttagcttcatttgcttaccctaatcaatagaattaacaccaagaatgggtccttcaatgctacaagacaaccaygcgacatttcccaagcatgttcacactccttgtctcctaaatgattttctcatacgcttcccccttttctttcctttcctcactctctgctgatgagcttgcttcttatttaactcagaaactggaagtaat

SEQ ID NO: 903454 - DNA, 560 bp, Homo sapiens
tactctgttgcccaggctggagtggagtggcctgatcataactcactgcagcctcgaactcctgggttcaagtgatccccccacctcarcttcctgagtagctggaactacaggtgtttgcctaatttttttattttttattttgtagctatgatatctcactatgttgcccaggtttgtgttgaactcctggtcccaagcgattctcccacctcagcctcccaaagtgctgggattacaggcgtgagccactgcacctggccacaactataatttattaataaaatttaaaagaaaaatataacttatttctagaaatccaagagacagaaattgactctttagccaattctcataaattcatctattttgtaaaatttggtactcttgtagtacattctatggaccttttgcaaaatttgtaaggtcaaagtacatactggaagtgagtagaataacagttgtttaagaaggaattgggagtacagaatatttggattacaattgttttttcacatttccatctacacttttgtatgagagattaaaaatcagtctaa

SEQ ID NO: 903455 - DNA, 668 bp, Homo sapiens
tttcaatctctaacaagtttgagttacaaatctcagcaactatctgctgacttaaactgaaaaatatctgaccctagagaagcaaagatcgagcaatcactttctcatgcagtttcctgtttataaagagtagtcattcttaatatgtaaaatgctaatcatataatgatatttcactgatagactcaaagctcaaaatcacatgaagtaagacatatgacattgcactactgaacttcatgaatttcatactcaacacatttttaagtgatcctgccactcctctagtagcagtaactattgatctcttctgcacctccaagatgtcagagcagtggggcattttcaggaaactggtgacatgtgttgctctcttcaaaccagtgactggtgcaatattgtgatagtaatgaggtacgattcagtgctagtttaccaaggaaggtaaactttaccaaaggagttcaactagcactgatttgtatctcattactgacacaatatggcaccagtctagtcatactaatagatcaaacagtgaaagatgttcaatttaatcatatttacaggaatatttgatacrataatggatattaaggaattccaaagaacccaaaagaaagctgaaaaagcttttaaaaaacggggggagggggaaatcaccgcta

SEQ ID NO: 903456 - DNA, 573 bp, Homo sapiens
agaatgagcatgtgctatttggccaccaggaaaaaaaaaatctaggtgattttaaaaacccaaaaacccattaagaaatctatttacatgygctttaaaagttaagttctagtataaactggcactaactttgtaacaatgagctccttgaacagaagtactctgtgtcaaaagtcagcctataaaaacagcaggggctctgtagctcttagtaaggagaccaaacttctgtagcctaagctattcattagaaaggaatagggaaagttaagcacttttcctcggatcaagaggtaaaacactaaatacccaggaactgctgacaggataaagaccattattaggtttttaaaagaggccaaaggtatcaaactgacatctttctctctgctgagccagaaaggagacaggagaggaagcaaagaaggacaggaaatttttgaagacctttttccttgatgagccataagcaggaagtaaatggtctttcttcttatggagagatcaaagatcacgaagatggctcttaagaactttttttttttaaggaagaaaagaaaggcagatctaaag

SEQ ID NO: 903457 - DNA, 575 bp, Homo sapiens
actgagacacactgcaattagtttactttggcagcttatcattttgagaatttggaagccataggccaccacgcactakggttttgggtggtttggggatattcaaatgaaaactgattacatcttttaatcaagagtgctttaagcatgctgccttctcactcggttttttcccccctatttccctattgtcgcttttagccacctgctctgcccgttcccatccccttgtttgaaccttttgcagatgtgagtagcagaacctcctccttctctgctacctcgtccctggaaatgagtatataagtctaagggccaaaatgtggttcacagtgataaatgctgtttccagcttgctacagaccagatgaggtgctgtgaggggcacaagtggagaaagtacccagcatgttcagagtgcagctcgctgtggcctgcaagttggcagcaagagctgtagatgaaaatggccttgcttcttggaaccacgtggacttttctaattagaagccttcatgctacgacccatctctccaaggacaaagggaccaggcggttgctccagtggtcaactt

SEQ ID NO: 903458 - DNA, 625 bp, Homo sapiens
gtgtgtgcgtgtgcgcgcgtgtgtgtgtgtgtgcgcgygatcactgtgatgagacggaatcctctccaggccttgaactgttggggtaggatccagccaccctcaaccttgaacttaaacaattgggaaaataatttttgtatttgcttttaattatctttcttaaaagtacataagctcacattcacttcaatgtttaatgttaaaagtgtttgagatctttatttagaagtttgatgatgtttttgtgaccagaaatatgccctcggaacttaattctcgttttatcaattagcctttggtaaaattggttctgttatacatcatgttgcttagagttgcagtttccaagaacctactgaggccattaagtgagggcagagtgtactcagagaatcacaaatgctaaccatctgggtcattttcttagatgggagcactaagctatgcttttcactgtctagcatgcagtccctcaattgagtgccatctccgttaaggaggacaggctgcagaaaggtgcaattaaaacaaattaagatgatcctaacatctattgctatagtttagtagtatcaggttctttttttaaaagctcatacaggaaggtacagtattgcgacta

SEQ ID NO: 903459 - DNA, 642 bp, Homo sapiens
cactatgactaaaactatgtacagaagaacaaatattctataatccaacattcaatttcttggagaagtttgtaaatgattataaggtgtggatagtagcattcttttgcaaagcactcctgcatgtattaccttattcactcctctctattacctgaactagatgggcattgttatcccatttcaggtccagggtaacaatgtgacttgtcaattgccacgccattgataaatggcaaactctgaacccagaatttttttaaaaacataattatttttctctttgagtagctaatactcaccaagtattgtatactcattttattttatccttacaattacctacacagtaggttattatcatctttgatttatgattgagaaatgaaggctccaagagagaaagtgactttctcagggtactgctgctcatagtggggtctgggatatgaggatttttcccagaaaggaagtctttcaagagctaaaagactcttttacagaggaaatgaacgccagacttgggacaatgaaactgaattccaggttctgtccactaaatcttcaggcgaatcattttcatgtaytgagcctttgcttccttctctgttaaataaacctataggaatgtttcaacccatg

SEQ ID NO: 903460 - DNA, 627 bp, Homo sapiens
aaagcttggtattagcattgttatagtcagtacctaagtaatagatacagtttctcacagattaactgtgcaacattaaatcattgcatttgggtctcagcatcacaccaccaaaraatttatgtgagtttgtgaatacacatttttaaatgtttgaagttgcttttatgggggcatttcaaaggttgctgaacccacaaatttacctgtcaggaaggggccatagcattgaggccattgctttattttgattaggatgtaggtgatattatgccgtagagtaaatgatgaagggtagggatagtagccggaggaatgaagacagatgtgagtgaggcaacactaaaattaaaacgtttttaggaatgtaagcaagctacgtgaattaatagtgacatataatgctattaaagttattataaatgaggaaacctttagcatactgacattcaggtgaagctcaactttgggtatactacgggaaaagcagaaggttaaagagtgatgatttagtagacaaaaagttttccttatatgtggaagaaataggctgatattgaccctcatcaagaaaagggaagagaacatttagagggaaataaactatacgtactgtcataaatgtca

SEQ ID NO: 903461 - DNA, 553 bp, Homo sapiens
tggtcatttggttatgtttaattatgttccaggctaggtcacaattgcctcactgcctttcctacccctacttgtttaaactctctggatgatggtctcccttctttaaactcaagctgctctaaagtasaaagaaacatcctgatatcatcacaaaagaagattcaacttaccactttcctgagaaatgctattttaaaacctcttcttattcttcagactaccctctttgatttatcctgtttttcaccttcaaagtttctgtgtctttttcctcatctgtctctgtgtcagcacagcgctatcactagaatctgtatcatcattctcttttccaacccatgtgtctgggtctgacctctgcttccctcatgtcttggtctttgttaagcatttcaggatcaaattaaattttatgacagcacccttctggtattttttaaaaaagactatctggttaggaggtacatagtttttagcaacatttcaacttgacagcaatctgtatatgatttatgtagcttgttatttccctgtgaagaaaagaaaatct

SEQ ID NO: 903462 - DNA, 609 bp, Homo sapiens
tgttctttgcccacttcgtgatggggttgtttgtttttttgcttgtaaatgtgtttaagttctacatatattctggatattagacctttgttggatgaatagttagcaaatatttccccccaatctgtaggttgtttactctattgatagtttattttgctgtggaaaagctctttagtataattaggtcccatttgtcaatttttgtttttgttgcaattgcttttcccattttcatcatgaaatctttgccaggtcctatgtccagaatgatatttcctaagttatcttccagagattttataattttaggttttacctttaagtctttaatccatcttgagttggtttttgtaaatggtgtaaggaagtggtccagtttcaatcttctgcaaatggctagccagtttttccagctccatttactaaatagggggttcttttcccatttcttgtttttgtcagctttgtcaaagatcacatggctgtaggtgtgcagcattatatctggactctctattctgttctattggtctatatgtctgtttttgtaccagacccatgctgttttggttactgtagycttgcagtatagttcgtagttgggta

SEQ ID NO: 903463 - DNA, 647 bp, Homo sapiens
aacaaagaatgtgctgatgagagtggtgycagtatcgctgccatggtttgaatgtgtcccctccagagttctagtgttgccaatgtggcagtgttaagcagtgaggcctttaagaggtgattaggccatgagggctcctccctcatgaatgggattaagtctctaatgaaagaggcttcacacagcgttaccttaggttgctcttcagttctgccatgtgaggtcacagcgttctgcccctctggagtgtgcagcctcaccagacaccaaatctgttggcagcttgatcttggacttcccagcctccagaactgtgagaaataaatgtctgttttttataaattatccagtcttaggtatttttttgtagcagcacaaatggattaagacaatcaccaacaagatcagtagtggcttttctctctaggccagggctgctatcaggaggcatcattacagaatagaggtgattaacagccacagggttttaggaccctaaagcagaggccaagtggaagagcttagctattaaaaggtgggtatatgcaattacaataatgaatggcatcatcagaggggcagccagggaagattgacccaaacagttatggagataattaacagaactcagcctccacacaggcagc

SEQ ID NO: 903464 - DNA, 647 bp, Homo sapiens
aacaaagaatgtgctgatgagagtggtgtcagtatcgctgccatggtttgaatgtgtcccctccagagttctagtgttgccaatgtggcagtgttaagcagtgaggcctttaagaggtgattaggccatgagggctcctccctcatgaatgggattaagtctctaatgaaagaggcttcacacagcgttaccttaggttgctcttcagttctgccatgtgaggtcacagcgttctgcccctctggagtgtgcagcctcaccagacaccaaatctgttggcagcttgatcttggacttcccagcctccagaactgtgagaaataaatgtctgttttttataaattatccagtcttaggtatttttttgtagcagcacaaatggattaagacaatcaccaacaagatcagtagtggcttttctctctaggccagggctgctatcaggaggcatcattacagaatagaggtgattaacagccacagggttttaggaccctaaagcagaggccaagtggaagagcttagctattaaaaggtgggtatatgcaattacaataatgaatggcatsatcagaggggcagccagggaagattgacccaaacagttatggagataattaacagaactcagcctccacacaggcagc

SEQ ID NO: 903465 - DNA, 628 bp, Homo sapiens
cagtttagcccagaacccaaagtatgaagatgcctggagagtttgtggtggtgggaagctggctgaaaggcccagcacatggagaacacaccatcagatacgaagggagggggtctgagaaaagcccctrggatgagattgagccagctgggaggaatgatacgttattacccacagtgcacagcccttccattatccctgaagcttcaatgcactcctgttccacaccccaaatccagttttttttttttaggtattatatgtggtaatatcttgtgctgcagatggagtagcaagaggaagaacaatgccacaatcccccgatgcaaaattggtagaaagaataactactagctacccctcttcacagaagagtggccatcccaccagccatcagcagtagaggaagtagcatgggagcataataagaactatgggtggaggaactcaaagttcatgtccctgagcacctcggacctctgagatacagccagatgccttgcaaagggctacttcccagaaatcatgttagtaggactcaaactgttctaatttgggcataaaggtaaatgaggcattgttttgcagtcacaggcaacatacacaaagcacttagcccatctgccag

SEQ ID NO: 903466 - DNA, 598 bp, Homo sapiens
tctgtgagattttcagaagaaccattcatrttacaagtttatattcaggtttcagtcactgaggaattattggtggcagtgatcttataattatcagttctttattatcttgaatatcactttattggcttatctggtagtctctttttaggatttgtacactctcatctctacattatctataatacctaatgccatgtaaatgttggcaaatagttgttacactgtattgtttagagaataatgacaaggaaacaaatctgcacatgttcagtacagatgtaatcatcctttttttcccaaatatttttgatccacagttggttgaatctgtgaatgtaaaacccacaagtatggagggctgaccatatgttatacataatctgacacatatttgttatatatatacaatatatcatctaaaactgaatatttgttgctccaaatagcctcaaaatacgccccaaaaatttataaaatttggaggaatttattgtttataatgaacatttatcaaaattaagtgaatcatctattgttatactttttcattaaaaaatacaaagcaggtatggatttaatatcttaatgaactatt

SEQ ID NO: 903467 - DNA, 673 bp, Homo sapiens
gccccaattaaaagacacagcctggcgaattggacacagtcaagacctattgatgtgctgtattcagaagacccatctcacatgcaaagacagacataggctcaatataaaaggatggargactatttaccaagcaaaaaaaaaaaaaaaaaaaaaagcatgtattgcaatcctagtctctgataaaacaaactttaaacctataaagattaaaaaaagacaaagaagggcattacgtaatggtaaagggatcaatgcaacaagaggagctaactattctaaatatatatgcacccaatacaggagcacccagattcataaagcaagtccttagggacctacaaagagacttagactcccacacggcaatagtgggagactttaacaccccactgtcaatattagacagatcaacgagacagaaaattaacaaggatattcaggacttgaactcagctctggaccaagtggatctaatagacatctacagaactctccaccctaaatcaacagaatatatattcttctcagcaccacatagcacttattctaaaactggccacataactggaagtaaaacactcctcagcaaatgtaaaagaatggaaatcataacaaacagtctctgagattacagtgcaatcaaattataactcaggattaagaaactcac

SEQ ID NO: 903468 - DNA, 608 bp, Homo sapiens
taaaaataatagaacagacaactaatttttgaacattcacatgcacacacatgaattttgtttggcactattaatatgagacaaagaagtagtcaagggaaaacacaggactaagagtcatttctaactaacatagaatccagaccaaagacacgaatttatggacaaaataatatgtggaccaatcatttatggaccaaatatgtgatcaatgtaactcaggaatttttaacaacatgggagactattttatattttattgaaggacaaatgacaaaaaaaatctgtatattctgtctgattctacccatgaaaaactatatatgtatatatgtggaaaaaaacaaaaaagacacagattaaaggcatataacttagtacttggattatgggactataagtggtttttatttatttttaaatgcttctttatattgtctaaattttcggtattgaccatagactaatcttgtaataaaatggtatcattttaaaataatgtataattgcaatatttctaactttttaaagagaatgaattttctttgtttatatttactctgattttggtyctcaaggtgacttaaaattaccagatttcatcattt

SEQ ID NO: 903469 - DNA, 546 bp, Homo sapiens
tgattaaacatgattttttgcattactcgctgaatttagaccctaatcctagaataaaatgtgactccactgtgtgaaagaattttccttggctgtctggcattatatacaatttgatgagagggattacataaaagattcctctccttttctaatgacctccattacaaaataggtccattgacatgaaaagaataacgatgacttcaaagaaaattacggaaaatgttcttgtcaatctaaaaaatataaactgctcattaaagtataaaaacttccataaccatatttcttttactctgttttataattctttggaacaataaaagcttttaatgttcaagaaaagagtcaagtcaaatagcaacaaggagaatgtggattagtcaaggagaataatgccttggagaagaggtttggtaatgcaggaraaaaaggactatgtggtcagcagctgtatcctcctctacatggctttcagctcattggtggttatagaaataacactacatacagaaaatttttatgaagcactgaacgcaaata

SEQ ID NO: 903470 - DNA, 624 bp, Homo sapiens
tactcccctctgatctgtatcatcacttgtcatagagcaggctcttccttcctgtgttctattgtttccttggtctgtttttrcatgaatatataacattgtttcaattactattgctttctagtaagtcttgatatgtgataaaagtaaatcttcattattcttcaaaattctcataactcttcaagcctcaaaaaaaattagaatcaagttgtcaaatgttaaaaaattcctattaggcttcactggaaatacactcaacttacagaccaagatgggcagaactcatttttatgacattgtcagttctcccatacatgaacatgttatatcttaccatttattagctgcttaaaaaaagattttcaaaaatgtttagaattttctccttaaaggtcttgcacatttcctgctagatcgaatcctaggcactttacattctgatttctgctataaatgaaattgtttttaaaattacctttttattatcatcacattgtctttgagtcttgttatttctttcttgccttctaaagtatttgaatttccactgtttctttcccagctcctccctatgctttggaaaagtttgggcacaatgtacaactttcacatgcacatttg

SEQ ID NO: 903471 - DNA, 673 bp, Homo sapiens
ccaaggcaatcctaaacaaaaagagtggaagctggaggcatcatgctacccagcttcaaactatacttcagaactatggtaaccraaacagcatggcactggtacaagaacaaacacatagaccaatgaaacagaatagagaacccagaaataggacttcaaacctacaacaatctgatctttgacaaaacctgacaaaaacaagcaatggagaaaggatttcctatttaataaatagtgctgggagaactggctatcaatatgcagagaattgaagctgcaccccttccttacaccacatagaaaaatcaactcaagatgatttcagggctaaaatgtaaaacccaaaactacaaaaaccctagaagaaactctaggtaataccattcaggacacagacatgggcaaagatttcataacgataatgccaaaaggaattgcaacaaaagcaaaaatttacaaatgggatctaattaaactaaggaacttctgcaaggcaaaagaaactatcaacagaataaacagcctacagaatgggagaaaattcttgcaatctatgcatctgataaaagtctaatatccagcatctatagggaacttaaataaatttacaaggaaaaaaaacaaccccattaaagagtgggcaaaggacatgaacagacacttctccaaa

SEQ ID NO: 903472 - DNA, 607 bp, Homo sapiens
ctgggatcctgggagagaccggtagacagtggggctctcaggtcagactggcttcatctcatggayaagattgcccttcactgttcaggtccaacagtttccctagggctagattctcctaggagagcaaggtgagcctagggggatggacatcccttgctgggcttcactacagacattcccacaccaaaccctctgggctctgcactggctggaattctgcctctaccatctctctaagcagctctccctgccagctcaggtgttcatggaggtcatggggtctcctgctgccagggttccagaggtgcctggtgggttgctccttgcctgctcaactcaccacttccccaggagttgttgggggccaggagcgagtcccagtacatggtagccccatgcagggttcccagcttcctccaccttcagaccagcttatgtgtcttccctctgtccactgacagtgcttggagtgtgccagtcttcctaatgtcctggacccttggtggcagatgttcctcctggatgcatctagttggccttcttgagagcagccttatctctgttattttttgagaaaaattaagcactattctttgaaaccttt

SEQ ID NO: 903473 - DNA, 631 bp, Homo sapiens
aagaatgctaatgttccccaggccaaagtaactttcaatgttttggtgaagacagtgttctccaaaccctttcagggtacctaattagacatgagtaaactggttgcacgtggtaaatccactccaacatttgtatcttttaaattccctcttctacataatacccaaaatcctgtcatctcaacttcattcagcataggccattattgaacccaggtgttagtaattcaactgaagtggcagccctagagctgtgctgctcagattttccttcaagaatttgctgaggattctacttctagaatggtggcaaaagtagctccatgaacccactccccagaaaaacaaccgaaagtgaagaaaattatatatattacatatgacctaatgtcttctaaaattgtcctaagggcatatagtaaatgaagtaatatttattcattgaaatctactaaatctccataaagacagatagtttagcagaaagaacagcataagaaacaactaacaagagctcttstagaatcagaacaaatctcagagactggctttaaaaagtgcccataaaaaaagaaccaaatttaattgaaagagattgtagagcaatgagtgtcccagagaatttgtccaa

SEQ ID NO: 903474 - DNA, 608 bp, Homo sapiens
taaacaaaaaacaagcttagggtttaaatatttcaggcaaatcttttactttttcttccctaaattacccaaattattgcatcaaatgttcacttacagttytgataacaattcaacttaaattataaacagtttgaactaagttatcaaaaaatctcctctttgaatgaaaaagaaaaaatataaagcaaaataaaacccttctgccatcaccaccactaacaatttcacagcaagaacaaaactaatcctaccaaaaattagtggtatttaaataacaacatattttgaaagttctaaacatgttatggatatcagctaatttgtctatcatggcagaagggacatgagtttattattattaattcctttgaaacccatagttataattgagaccattttattgaaagagtgttatataattgcaatatctttgtaatatcatagaataaaagtcaaagttaacaatacaattattcatatctatgtgctcctattctttactttttaagacagtgagtttagttagaatttccctgaatttaccaaaaccactttcaggcacatttggtcccctagagaggaatcgctactataccttcatgagg

SEQ ID NO: 903475 - DNA, 457 bp, Homo sapiens
tataggcgtgtgctaccatgcctggctaatttatatacacacacacacacacacacacacacacacacacacggstaatttttatatatatggcgcatatatatatatatatatatatatattttttgtttgtttgtttttttgtagagatggggtttcttcatgttgccaggctggtctcaaactcctgggctcaagtgatccacctgcctcagcctcacaaagcactgggattagaggcatgagccactgcagccggccagagtatatatttcaataaatttagcaaagaaaagtcttggacctgtttgctttctttcaagattgttgtttgtattatgcttgatttttcaatttatgctcttcagcttctgaccaggcagtgtttaccagtctttattttggcaatcgtttaatccttagataatattcactttattcttctttaaaactcagc

SEQ ID NO: 903476 - DNA, 591 bp, Homo sapiens
acccatctaaaaatatccaggcttatgttttagaacaacctccgtttctcctaatgaatcaatgggctttatttttcttgtggaaggtcaaacatggagccaatttttatgaactttgtggactctgttatgttacaattctcttctatagttctgtttttcattcaaatatgtgtttttatatgttatcatatgtactataacaagtatatgacatttccccgttccctaacattatgtccccagcacgccttcccttcaatcttctctgtcgctttttttttctcaaacttgatgtgcatcccctgaacttgggaatacctgactctctcctgagaatatgaaactgccttgtggtgcagagcacagggctgtgtctgaaaattcacttcctcctatcatcagggtgatggcatgtggatcgtcataaaaggaccagggtgaaccctgcacatctgcattggcttgagatcatcttacagcgatgagtttccacgtgtgcagcctgcaaacgcagcttcccctctctgctcttgccctccargagcagaagcagaggaggaggtttcagagttgccatcctgaagagca

SEQ ID NO: 903477 - DNA, 628 bp, Homo sapiens
ccaaaagatgtgcacatgaatattcatagcaacagtattcataaagccaacctcaaaactactcaaaggcctattaacagttgaatggataaataaattttggtgtagtcatacaatgcaatactatacagcaatgagaatgaacaaaatgtagctactcacaaacatagtattgagggaaacaagccagaatgaaaaaaataactatttaatatgcaatttgcatagagtacaaaaattagcatccatgatgttaaaagtttggctaatggcttccctggggtggaagtaagatcatgattagaagggagtatgaagggcttctatatgttggtgtatgggtgagttccatttgtaaaatgaatcaaactgtacactgaggctatatgcacttatctgtatgtgcattcacatcaaactaaattaaggaatgagtgtgttctaaattgaaagactggctcatgtgataatgcctcatttcagcagtgtatggctaaaaaaatatttagtttcctccactgcccctgacacccatcrtgtttgttattttagtgacaatgctcaacagaacagggggtgtgggatgagagtgtagtatttgaagtaaaggacattatgttcacgattc

SEQ ID NO: 903478 - DNA, 428 bp, Homo sapiens
aaattttggtttcccagtgcatataaaagttatgtttacacaatactgtagtctaataagtgtgaaatagcattatgtctaaaaaataatatatataccttaatttaaaaataccttattggccaaatatggtggctcatgcctgtaatcccagtactttcagagccccaggtggtcggatcacttgaggccaggagttcaagaccagcctggccaataggatgaaaccctgactctactaaaaatacaaaaaaaatgagttttgcgtggtgacaggtgcctgtaatcccagctactcaggagactgargcatgagaattgcttgaacctgggagttggaggttgcagtgagccaggattatgccactgcacttcagagaaagactctgtctcaataaaaataaataaataaataaataaataaataa

SEQ ID NO: 903479 - DNA, 657 bp, Homo sapiens
gtggacctgctattatttttatgagttartcaacttgaaatttaagaatggattataaagccgtcattttatacaaccaaaagggagagagagagagagagagagagagagagagaggggtactgcacaaggaaacttaaaaatcccaccacaacagatggcttgtgccattttgaatttactctccctaaggagcaatcccttgtagaggctattaaagcttctgtttgcatgagaaaatgctatttcaatgttgatggctatatatgtgtgacctccattgaaaacaaaagtcacagagatttgccctgaattcagaggagtgaaacaatgaggttggaagactaaacccacccagtgtcacatgcatctttgagaactgattaaagtgacagcagtgaaacaaaattgcaccactcaatacaagatttgcctcaaggaataaaaataaaataggcatattactcctcaaagacacatattttatttagttgttaagagtagagtgttggaatttttgaagaactgttgctatttaatagaggtgaaagttttaatgtgaatactgcctgtgtgagcgcgtgtgtgcaaagttggcgtgacacattctgctcaaattagacttctaaataactagtaacagctgtggtgcttaga

SEQ ID NO: 903480 - DNA, 621 bp, Homo sapiens
tggtggtgggtgcctgtaatttcagctgctcgggaaactgaggcagataattgcttgatcccaggaggtggaggttgcagtgagccaagattgcaccactgcattccagcctgggcaacagagtgagattcctctcaaaaaaaaaaaaaaaaaaaaaaaaaaaaaaagaaagtaaaaccaaatccctaataggtaagtttccaatttaagtatttgcagtctcaattcacaacagattactaattgagcccaggggggaaaagtcaaggctcatttctactaaaattaaatataaagttagggggaaaatactaaaagcttaattaaagatttttcaaactctctagtgatgtggtctggattatggggaccaactctcccactgagaacaacaaaatgatagattaaaaattgtgtgatgtcttaaaagtattgaagatgtgtcaggtagaaaagaatcatctggataaaatcaagagaaagaaagaacctgatgaactaagggaggacaagktcatttttgttgtgagaacgtttttccacctaaaaacacttgacctttcctctagatggtctcatggcttacggggaaggaacccaaaaccgagaaataccatagtt

SEQ ID NO: 903481 - DNA, 681 bp, Homo sapiens
gttctcctttcctgctggaccacctagcagcaaactctcccttgctcagcttctaggataacaaagcctttaggaggaatgyagctttacttgcttagtcctactttgctggattttcttaatgtttcatatttttgttcacgaatctgcctggtcatgctgtgccctttgtcttgattggtaaaagctttgttcataatagaactctcagctttttcctttcctgatcatggggagtcttatgaggaatatattcatatagtcctaatcctcaaaatctaaaaaggctctaatacttctcttcaactgagcaactccagcagggcacagactgaaacaaaaatagaagcttatttattgattgtcttgtcagcagagcagatattcacctgacagctttaactttttgattcctaacaaaaaggctgtttacaacccccttcttggacagtacagttaatttcccaaagggtagctttgtgtgtggcgggagggaagtagatctctgaaacaggggaagtaaattaataccttacccaccactgaacctttcatctttccacagtgactaatcctctcaagggtgtaatactggtagaatttgtgctagaacagaaacaaaaatatcacaagtgtaatattgaatagtagagtctccttgatattgaaactctgctctgt

SEQ ID NO: 903482 - DNA, 353 bp, Homo sapiens
ctaggtgttccaatttgttggtatgtacgtatggccagtggatataacaatgataccatcacrtgggtataacaattataaacatatatgcactcaacactggagcatctaaatatataaagatgacattaagagtcctaaaggtagttatcaactgtagtacgataaaaataggcaacttcattatcctcacttttatcagtgaagagaacatccaaacagaaaattaacaaagaagcatcggagacagacagcactccagaccaaatgaatctaacagaaatcttcttccagatatattggagttcctttatatgttacccactttttttctcttgctggttttagaatct

SEQ ID NO: 903483 - DNA, 518 bp, Homo sapiens
ttggcttaggcaaagacttgatgaccgagaacccaaaagcaaatgcaacaaaaacaaagataaatagatgggacttaattagactaaaaagcttctgcacagcaaaagaagtaaggagcaaacagacaatgcacagcatgggagaaaatcttcacaaactatgcattggatgaaggactaatattcaaaatcaacaaggaattcaaacaaatcagcaagaaaaaagaaacaatcccatcaaaaagtaggctaaggacatgaatagacaatgcacaaaagacaatatacaaatgtccaataaacaaatgaaacgatgctcaacatccgtcatgatcaggaaactacaaatcaaaaccacaatgagataccaccttacgcctgaaaaaacggtcatagtcaaaaaatcaacagataatagatattggtatgtatgtggtgaaaagggaagacttttacactgytggtgggaatgtaaaccagtaaaaccactatgtaacacagtgtggagattccttaaa

SEQ ID NO: 903484 - DNA, 589 bp, Homo sapiens
ataaatctagctagctttctattttattatttttttcaaaaaacagccmctggatttattgatttctgaaggtttttctatctctatttctttaagttccactctgatcttggttatttcttgtcttctagctttggggtttgtttgctcttggttctctagttattttagttgtcatgctagggtattgatttgagatcttcctagctttttgatgtgggcatttagtgctataaatttccctcttaacgctggtatagctgcatcccagaggttctggtatgttgtctctttgttctcattggtttcaaagaacttcttgatctctgttttaatttcattatttacccaggagttattcaggagctggttgttcaatttccatgagttgtgtggttttgagtgagtttctttatcttaagttctaatttgactgtgctgtgatgtgagaaactgtttgttatgatttcagttgttttgcatttgccaaagagtattttactccaaattatgtgattgatttcagagtaagtgccatgtggcaccaagaagaatgtatattcctttgatttgaggtgtagaattctgt

SEQ ID NO: 903485 - DNA, 691 bp, Homo sapiens
cagtgaagaatgtttgatttcaaggacacttattttgtttgccaataatcataatgcatgttttgaatgcatgtagagtcctatttttgatggaaaaaggataatttatttgttatatttcattgccatagtaaaaacaatataactgattattattactaatactaattgtaattaagtaaaacatttaataattttcatagccaaaaattttttctaatatacatttaatactaaatgtatcacttaacattaatcatccataatctaattttccaagtgttattttgtaaaaatatatggagtgttaaaaggtggccattatcaaaaattgttaagaaatatgcagaataaaggcatttacttgaaataaatgtggaatgaaatgaatcatataagttgactaagaaataaaatagtgagaaaaaatacagcaaataggattataataattgtcaagcaaaataataaatatccccttcaaaataccgtggttccctgttggtatttgtttgttgagagtgcagcagtggaaaatgcatggatgtggataataatttgttgaagataaatcaattgaaatacattaaaggaaaagaagcttatttgtaaattaatttaacccactcaagtgcagaattatatcatgttgattattgytgattattatttccaaactttggagcaggag

SEQ ID NO: 903486 - DNA, 599 bp, Homo sapiens
ggaagagaagcatgcaaatagctctgaacagattttctgtatttagttttaaatgaagcaggactccaagaaagcattacattttaccattcccataaaggtggtgktgtttttttttctctttactattctggcatcctgtccctgcccctatgtagtaaggaccctaagtgagctccagatcttattttctcacccttgcttccatcagtagcagaaaaggtctctctctcatggccagtctatgactcaactcatatgtggcacatcatctatcccttactaatcagaatgagatatgcatctgtttccccaaattatcaagcatgtgaattgctacatgtgaataataactgaaaagaaccagttaaaatacaaaattacccattatgcaaaatcttgagcacttccctttttgaaataatacaatcataaattgttctatttgttttcttgagggcaaatggtcctcaggaaatatttattccattacaattaaaaaggaagttttaaataaatgcccatcaatattccattgctccactttaaaaattaggaaaataggaacttaaaacttcctttataaatacaattgaatg

SEQ ID NO: 903487 - DNA, 634 bp, Homo sapiens
agtttggatccaagctccctgcacatcagtcaccttagaagtgtgttgagaaagaaacacacacacacacacacacacacacacacacacwatgtatatatatatatataaaatatatatatttatgtgcgtgttatatatatacacacacacgtgtgttttatgtgtgtgtgtatatatatatatagagagagagagagaaagaggtggggcctgggaatcataatttcaactattatgctttccttcttgaagtgacaagtactgtagggactgtactttgagaagcctagttccagggagattttgattgatgaattctgaggaaaggcagggggaggaagacaaccaccaagaaggaagtgcagagcagggaatgtagtcagaaactccatgatcttgcctttcaaattgcttcaaattgatttcaaatttgatattaacaatagagttttgtctattccagttcccataataaagactggaggtaagttgagattcaatctcccacttgcttgtgccccgaagatccaaaattaaaatttgactctggggacaaagagggtactgttgatggtatggcctggaaaatcagctacaggctggaccttagtccactattagcccctaagct

SEQ ID NO: 903488 - DNA, 531 bp, Homo sapiens
cagtgctatgcacagaatctttatttgtggctggattcctgccttaggcttcttaggtactgtatactggcaaactatttttggtgttgtaatttgggctacaatccagtagatggcggttatgaatgatggccaggagataggctcttaggcaagctgctctttttttttttttttttttcctataggaggtacctctgacctgaatctttttttttaaattttagtattattatactttaagttttagggtacatgtgcacaatgtgcaggtttgttacatatgtatacatgtgccatgttggtgtgctgcaccccttaactcatcattccccccactccccccaccccacaacagtccccagtgtgtgatgttccccttcctgtgtccatgtgwtctcattgttcaattcccatctatgagtgagaacatgcggggtttggttttttgtccttgagatagtttgctgagaatgatggtttccagcttcatccatgtccttacaaaggacatgaactcatcatttttta

SEQ ID NO: 903489 - DNA, 677 bp, Homo sapiens
  misc_feature 308: n = A,T,C or G
gctgaaggttagaggcaatggggagatgatagctaaagggtacaaaacctcagttagatagcaggaataagcctgacttcttttcaaaagcatagcatgttaaatatagctaataattgcatactgttcatttcaatattactgacagttaatttctaatgttctcatcacaaaagctgttaaatagttgaggtgataagtatgttaattagcttagtttaatcattccacattgtattcaaaaattatagcaacaccttgtaccttgtaaatatatacaaccataatttgtcaatatacaatttaanaaacagagactacactaacccataaaatgggaatttttgatagatattaactaaaatcaactttggcatttgaaatataccttagaccacatctgcttatatgagtctcatggacatccagcaccaaaagtatattgcctcgctttggtgatgtcaatacagcggacagaggctctgtttcgccgggccagtgtaataacagagtatggcaaaatttccagttaagcattcctatgtatcagaagtaccctagtcagcagttttcccttttatccctaaatttgttgcagcttatatgtaacaaataaaccaatctgtgacgtgagtagcactgyatcaagcccttagggtaataaccataatttaaat

SEQ ID NO: 903490 - DNA, 578 bp, Homo sapiens
atccttgtagttggtaaggcttacttggaaattatgacataaagtaagtactaaatgacagtcttgtttggttaccagataccagctaaattggccatgctcaggagtctcggctatcaatatgtgcccatcttccaaatagcattattgggttttgcttttcaataatcttaaaatgcatctctgctgtaaataaagaggaaattatgaaatgattttagacattcgagtttgaggctagtattcttatgaaaataagcaatccattttcccaatacgacccattcctgctcagcagtcatagcccttgctgtgacagaaaactccaatttctatggcaagataagagtttctaagcacttgctaaggtcagtaacatgattcatggaagcaaaactggaaattcttggaaaggctaggtgctggtttatgcagctggtctgatgacaggcacagaagatagctcagaaaggcagactttggaacastacatgtggatctttccacaaacatgaatcgttcttggaaagtttattcagtttattggacatggtagtctccttccctatcagggatga

SEQ ID NO: 903491 - DNA, 526 bp, Homo sapiens
gcatttgcaacaatatggatggaactgaaggtaattctattaagtgaaataagccagacacagaaagacaaacactgcatgttctcacttatttgtggagtctaaaaataaaaacaattgaactcatagagatagagaatagaaagatggttaccagacacaggaaggggaacatcacaaaccggggcctgttgtggggtggggggagtggggagggatagcattaggagatatacctaatgttaaatgatgagttaaagggtgcagcacaccaacatggcacgtgtatacatatgtaactaacctgcacgttatgcacgtgtaccctaaaacttaaagtataaaaaaaaaaaaaaaagaaacatggttaccagagactgagaagggttgtgggcagggcagggggargtggggatgataaatgggtgcaaaaagtatagttagaaagaatgaataagacctagtgtttgatagaacaacataggggctatggtgaataataatttaattaaacattttaactaaa

SEQ ID NO: 903492 - DNA, 648 bp, Homo sapiens
taaactttgctttgtcaaggtayaattttacatcccaactacattgcttttttattcaatctgagagcatctgtcttttagtgtgtgagaccattcggggtttgttccttgtaaaccttttgagtttttccaccttgacctcagataatttccccccacaaaaacactgacctatgctcagatgaagactagaggacctgctgcagagctctgaagttctctggagccctctccccctggatactttgccaccttagcctacccaatttctagctctgtctcctcaactcagggataccaccaacctcctcctcctgggatctgcttccctctagcatggcctggaaactctctcctgggaggaaattggggcaatcctagtcctcacctcatttgtttctcctctcccaggaattcttgtcttttattacctgatgtcccatgtcttggtaaaccattgtttcatatattttgttcagtttttttgttcaggcagaagagtaagtccagtccctgttaccacagaagggcttccaccttgattttccaacaggaaaattgaaatgagcacctgcacttataaagccttatttgttctctctcatttgagggacatggaacccttgactgcctttagcaaattctgtg

SEQ ID NO: 903493 - DNA, 599 bp, Homo sapiens
cccctttgatctacacttttacaatatatagcaaatcatgacacagtactacatcaaaattgtaatgacttagagatggaacccacattgcttcctgtggcattcagggtccttcactgtcttcttttccattcatgttttcaatcaatttcacacaccctcatatcctgcattgcagctcacctgtggcttctaatcacccctcaggtaagctgagatgaataccttcagatcatctgcccataacccctttcctaggaagtggcccacctattccagcagggattataagaagaactgtgttgatgcaacttggaccaagccctctggccgcagctgatgtgttcaaagataaacatatatatcaagacagcccaatgagagtcagagtcccttccttgaaatttttggaatttggcccataggaataattaagtgagtctgtagtttaggctgtaaattgagggccactcttaccattggcgacttttgttcaacctatcctggagcagtttccctggcttggttagtaaaccataatattttggattttgtgagacaattttttcccyccttatctaactttactttttcccttt

SEQ ID NO: 903494 - DNA, 624 bp, Homo sapiens
ctttgtaccttttgagtagtccaggactagtttcaatggatatccatccaatttttggtaagcgtctgagttggagcaccccccaaaatagagcctgaaacagtttatttggtagatgatcccaagcaagtaaaaatggagtcagggagggagagctacggtttgaatatggttttacttttccaaaattcatgttgaaatttgattgttattgcagcagtgttagaaggtggaatctttaagaagtgattaagtaattaagagggattaatgtctttcttgcaggaatgggttagctatcttgagaatctggcccccccttttctgtcttgtgcatgccctgttcctgccttctgctcttccaccatgctgtaaagcagcatgaggcccccatcagatgcagttgcttgttcccagtctccagaattgtgagctaaaaaaaaaatttttattttaaataaattacccagtctcagttattctgttatagcaatagaaaatggtctaagacaaagcaaaaacaagaaaaagaggaaaagtcacttatarttatcaagttccttgctgcaggcaatgggctcaatttagatgggatctctgagaaacatgaggaattttctagaa

SEQ ID NO: 903495 - DNA, 563 bp, Homo sapiens
gcatgcactaaagctatctgtctttaaaacagcagataaaatactgagcaaatgttaaatttagacttcacaaacaagaggactttctgcatatctgctttgtttaccgtatattcacacacatctaaaaatttcaaacaaggtagattgcaattaagacagagtttttcttagcatcagtttttatatctttaaaatggggatagtgcaaatctaatatgttagtcgtgacacttaataatgtcaataaaagtgctaagtaaaatttaggatattttatgagttgtgagctctttgtactaccaagtcaaaaacaattattctttgtaatagcagtacccaactcagaaatgtggtaactgtctttctaaattacattgattgtttatactgcaaaatttaaaacacatgatattttaagtagcacaaagaaattacatctataaatatccctaaaatggtaaaatgtagcaaaatactttctcatactacagagaatatcctagtttataaaaagtcraagtaaggttgtacaatgaacaaaaatagccagatttgtttta

SEQ ID NO: 903496 - DNA, 503 bp, Homo sapiens
aaagggcattacataatggtaaaaagctcaactcagcaagaagatctaactgtcctaaatatataagcmcccaacacaggagcactcaaattcataaagcaagtttgtagagaccttcaaagagacatagacttggatgggtccaagatggcctattagaagcagctgtggtccacagctctcacagagaggaatgaaaatggaaagcaaattatgcatcttcaactgaggtatccagattcttgcattgggactgaagaggtggatggctcaacccatggagagtgaggaaaagcagggtggagcgacagctgacctgggagtggcacagagccaggggagcccccacctccagtcaagggaggtggtaagtgattgtgcaaccccacctgggaaactacacttttcccatggatctttgccacccatgggtcaggaaatcccctcatgagcccacaccagcagggccttaggtccaaagcatagagctgtgtggtgtcttg

SEQ ID NO: 903497 - DNA, 503 bp, Homo sapiens
aaagggcattacataatggtaaaaagctcaactcagcaagaagatctaactgtcctaaatatataagcayccaacacaggagcactcaaattcataaagcaagtttgtagagaccttcaaagagacatagacttggatgggtccaagatggcctattagaagcagctgtggtccacagctctcacagagaggaatgaaaatggaaagcaaattatgcatcttcaactgaggtatccagattcttgcattgggactgaagaggtggatggctcaacccatggagagtgaggaaaagcagggtggagcgacagctgacctgggagtggcacagagccaggggagcccccacctccagtcaagggaggtggtaagtgattgtgcaaccccacctgggaaactacacttttcccatggatctttgccacccatgggtcaggaaatcccctcatgagcccacaccagcagggccttaggtccaaagcatagagctgtgtggtgtcttg

SEQ ID NO: 903498 - DNA, 623 bp, Homo sapiens
cagaccagtgaccctatgaatcaaccacataaacaagtctgcaaaataaccagctgacatcatgataacaggatcaaattcacatataacaacattaaccttaaatgtaaacgggctaaatgcccccaattaaaaaacacagaatggcaagctggataaagagtcaagctccattggtatgtcttcaagagacccatctcaggtgtgtgaagatatacataggctcaaaataaagaggtggaggaaaatttaccatgcaaatggaaaacagaaaaaagcaggagctgaaatcctaatttctgacaaaacagacattaaacaaacaaaaataaaaaagacaaataaaggcattacataatggtaaagggttcaattcaacaagaagagctaactatcctaaatatatatgcacccaatacaggagcacccacattcataaagcaagttcttaaagatctataaagagatagattcccacatgataatagtgcagacaaagatattcaggacmtggactcagctctggatcaagtgaaccatacatatctacagaactctctacccaaaaacaggagaatatacatttttctcattgccacatggcgcttacactaaaattgatc

SEQ ID NO: 903499 - DNA, 691 bp, Homo sapiens
tatgcacataaactagaaaatctggaagatatagatacatttctggacaaatacacctcccaagactaaaccaggaagaaactgaatccctgaatagaccaataacaagttcagaaattgaggcagtaataagtagcctaccaaccaaaaaaaccccaggaccagatggattcacagctgaattctaccagaggtacaaagaagagctggtaccacttctactgacactattccaaacagctgaaaaggagagacacctccctactcattttatgaggccagcatcatcctcataccagagatacaacagagatacaacaaaaaaaagaaaacctcaggccaatatccctgatgaacagtgatgcaaagatcctcaataaaatactggcaaaccgaatacagcagcacatcaaaaagcttatccactacaatcaagttggtgccatcccaaggatgcaaggttggttcaacatacacaaatcaataaatgtaattcatcacataaagagaactaaagataacaaccacgcgatcaacagatgcggaaaaggcctttgacaagatttaacatcgctttattgttaaaaactctcaataaactaagtattgaaggaacacacstaaaacagtaatagccatatataacaaacctgcagccgatatcattctatatgggcaaaagctggaagca

SEQ ID NO: 903500 - DNA, 691 bp, Homo sapiens
tatgcacataaactagaaaatctggaagatatagatacatttctggacaaatacacctcccaagactaaaccaggaagaaactgaatccctgaatagaccaataacaagttcagaaattgaggcagtaataagtagcctaccaaccaaaaaaaccccaggaccagatggattcacagctgaattctaccagaggtacaaagaagagctggtaccacttctactgacactattccaaacagctgaaaaggagagacacctccctactcattttatgaggccagcatcatcctcataccagagatacaacagagatacaacaaaaaaaagaaaacctcaggccaatatccctgatgaacagtgatgcaaagatcctcaataaaatactggcaaaccgaatacagcagcacatcaaaaagcttatccactacaatcaagttggtgccatcccaaggatgcaaggttggttcaacatacacaaatcaataaatgtaattcatcacataaagagaactaaagataacaaccacgcgatcaacagatgcggaaaaggcctttgacaagatttaacatcgctttattgttaaaaactctcaataaactaagtattgaaggaacacacgtaaaacartaatagccatatataacaaacctgcagccgatatcattctatatgggcaaaagctggaagca

SEQ ID NO: 903501 - DNA, 662 bp, Homo sapiens
cagcagacctctcagtggaaaccatacaagccagaagagattgagggccaatattcaacattcttaaagaaaataatttccaaaccataattttatatccagccaaagtaagtttcataagtgaaggagaaataagatatccttttcagacaagtaaatgctgagcaaatccatcactctcaggcaggcctttcaagagctcctgaaagaagctctaaatatggaaaggaaaaactgtgacaaaaagcacactgaagtacacagatcagtgaaactatgaagcaaccacacaaacaagtctgcaaaataaccagttaacatcatgatgacaggatcaaattcacacatagcagtattaaccttaagtgtaaataggctaaatgcagaagaatcgcttgaacccgggtggtggtcatatgagccatgatcacaccactgcactccagcctgggcaacagagcgagattccatctcaaaaaaaaactaataaataaatgtctaattaaaacacacagaatggcaagttggatagagtggagacccactggtatgctgtcttcaagagacccatctcaggtgcaaagacacatctgactcaaaataaagggatggaggaaaatttaacaagaagtggaaaasagaaaaacgcaggggttgcaatc

SEQ ID NO: 903502 - DNA, 565 bp, Homo sapiens
gtagtttataaattccacgctattcccattaaactacctttgacattctccacagaattagaagaaaactattttaaaattcwtattataccaaaaaagagcccatatagccaagaccatcctaagcaaaaaaaaaaacaaaaacaagaaaacaaaaaaaacccaaatttggaagcatcatgtgacctgacttcaaactatactacaaggctacagtaaccaaaacagcatggcaaaaaaaaacagacacatagaccaatggaacagaatagagaactcaaaaataagactgcacacctacaaccatctgatctttaacaaccttgacaaaaacaagcaagggggaaagcatgccttattggcatgggcaaagatttcatgacaaaatctccaaaagcaatagtaacaaaagcaaaaattgacaagtggggtctaattaaactaaagagctcctacacggcaaaagaaactatcatcaacgtgaacagacaacctactgaacggaagaaaattcttacaatctaatcatctgatgaaggtataatatccagtgtctacaacgaac

SEQ ID NO: 903503 - DNA, 585 bp, Homo sapiens
accacaaacatgtatacaccacaaacttgtggaactctggtcaagtttcaaactgkattcaaatgttattaccataaatgatataattcttccctcttccgtgttcctattgctctttatacttatctctattagattagaaatgttttcttctttagacgcatatgtatttcttatacatattaaaatataaacaatcaagaataggaagtagaatacccgtctagagtaaattctcaataaatgtggaaaagcaaaggaaaagaggaagaagggaaattagttcagatttggaggaggacacaaagattataaaattcaaccatattttacaaatgaggaaagtaaaacaataagaaattaagtgagccaaagccttatacctattgagaggctgttttggacattcatgaatttgggggaaccaagcaccttgtaacctcattagtttgctaagagctctctgacttttgacccttgaccatccaggacttttgtttgaactcttagaggaagagaagctgttctaccagccagccttgagcctggaaggacaggagcttttggcagccattataccaccat

SEQ ID NO: 903504 - DNA, 651 bp, Homo sapiens
aactgaaacatcatctctgtctgagttgtgagcctgaagcctttgaacyggaattaacaccatcagctctcctgagtctccagcttgctaactgcagatcttggatcttgggtcttgtcaacctccataattacatgaaccagttccttataataagtcaatgtctgtctgtctctctctcttgctctgtctctccatatgcgtatacatcctattggttcgatatctgactaacacccctaaggcacgctttcttcaagatgctttataaaacaaacttaaacaacctcaaacttaaactaaaatgtgccttatttaagaagcagttgtattagttactcagatcaaaataaaatgccacagttctgggatcaataaaattctggaggcataagtgttcagctgtgaagtagaaccacagtagatttttcagaattttagagagcgccattcaatttcaagtcatccactttattttacccacagcaggagactcaaattattttaaataaagtgtcataaccgaagcaacttccttaatattctgataaacctcagctttgggaatgtgcagagcgacaaatggaataaaccctggcacttgcttacttgtggtacaaatcctaagaatttaacctctctactatacta

SEQ ID NO: 903505 - DNA, 447 bp, Homo sapiens
tgaaactactgatgtcagatggtttgatggaccccacaagaagctgactcatcaaggaatgagctttccacatcctgatgattttcagcccccggacctcgaccaatgaatgaccccaattatccagcccctccctttccatggtccagctcagaactcgttggtgttggatttgagagtctccttccatctccttacttggcatcctgcaatgattacactctttctctgatgcaatccctgctatctcagtgaattggtccattactgtgcagcaggcatatgaacctattagtccttgatatggtttggcygtgtccccacccaaatctcatattgaattccccatgttgtagggagggacctggtgggaggtaacggaatcatgggggcaggtctttcccatgctgtactcatgatagtgaataagtctcacaagatctgatg

SEQ ID NO: 903506 - DNA, 596 bp, Homo sapiens
ttccataagccaataagtggattatttataaatgaaaatattctcaaaatattgtcatactaagctatcatgcatagagccgtggaattttagcacttgtagtaatctatgatttattttgcaacagttagctaatgtcacataaatgctgtgtgacaaacaaccttaaaatctcagcagcatataataagcatgcgtttaactcatgaaaatgtccatcagctgggggtaggctagctaatctagtttgcacttgtctagtttgaatggggcttattcatttgtctgtggccaactagagatcaactgccctaggttaagtacagctgcttgtgactgctccacaggtctccattccccttctgcagccagcaaaggaacccagggatgtcttctcaatgccacagtagagatgaatgaaagcaatcactttctgtctgctgacatcacatctaccaacatctcattggtcaaacaagtccactgttcaaaccaagagtcaagatgraaaggaaggagggcttccctaccctcagtaagcaggccccgcaaaatcacatagcaaaagacctggttacagggaaggatgactaatt

SEQ ID NO: 903507 - DNA, 613 bp, Homo sapiens
ttcttaaccactgcagcccaaaataccatgatgtctaagacaagaatcrttccacttcagtacttcagaatgtgactttgtttggagataggcccttgaaagagataatatgttacaagaggatcactggtgtaggccccaatctaatatgactggtgtccttatcagaagagaaaatttagacccacagagagacaccaggatcacatgtgcacagaggactgatgatgacaacatcaagaggcaaaaaagaggtggtcatcaaccctgctggcaccttgatcttgtactttcagcttccaaattgtgagaaaatacattatctgttgttcaaaccagccagctcagcctgtggtcctttgctattccaactctagcaaagcaaccaagggccatgttggaaaacactcccatgagtgtttcattgttgttgcaaactcaaaactctgatcagtttatgtgctgaattttcatagactcatcataattttacatacctacttatttcatactttttttgttctgaatgttaaactctccttcaatattaaaaaaatccttttgtcattgaattatgttaaatttaattattataatttcttaatatgttaaa

SEQ ID NO: 903508 - DNA, 603 bp, Homo sapiens
acaaagggaggaaaaaataataaggtttactcttaggacccaagctcatcattatgggatcggaacagaaagctgttgtgagtatccccatcctccatatacacacaagttcataaaaaatgacactgaataataatataacaactttgaggaagctaaaaaagcctttattactattcaaatctatgtagccatgctgtttttattactctcacactgttttgtacagtgccttagattggtttccctggaaacatgctctgagactgggcattgcctgtagagggtttattggagaaaactcttgggagattacacctgcaaggaaaaggagaaggcagggggaagctgaaccacaataaggctgcagctgagggctctgaatcctacaggaagctgtggatctgagacagtcttgcagagattttcccagtcagaatatggcctgggcctttgtatttctgcttcagccagtctcaggctgttggctgtcccctgggcaaggcagatccctgccaccaggactgtgcatctttgagctgtccacagtggacatgccagcagcctggayatggatgtgtcagcccttaggaggggatgtgg

SEQ ID NO: 903509 - DNA, 579 bp, Homo sapiens
agttgggagctgagtgttggccccctaaaatctcccagaaatgaagccagctggcttaatatgctttatatcacratcagaccctcaaaatcatcaaataggacaaaggaaaaaaattcaaagattgaaggtagataagcccacaaagatgagaaataatcagcgcaaggaatgctgaaaactcaacaagctcgagtgccttctttcctccaaaggatagcatcatctctctagcaagagtttgaaacccagctgaggctgagatggctgaaatgacagaagtagaatttagtatatggacaggtatgaagttcaatgaactacaggagtatgttgtaacccaatacaaggaagctaaaaattatgataaagcattgcaggaactgacacacaaaatagccagtatacagaagaatgtagctgtcctgatagaactgaaaaacacactataagaatttcataatgcaagtattaatagcagaatagaccaagcagaggaaacactcagagcttgaagactggctttctgaaataagacaggcagacaagaatagagagaaaaaaaaaggaatgaacaaa

SEQ ID NO: 903510 - DNA, 598 bp, Homo sapiens
caatggtgaggagcccgtggcaggtttgattattaatcaactgagagaagtagtttaatattttaataagtgggatgagtgtactcatgtatgtgtggtaaaaataacatttctacatctaggtacatatttacacttcagtgtaaataggtttattagtgattagcaaggctttctttctttttttatgattagcaaggttttaatgctgaacttgcagagacataaaagctcttgccttgagtcgttttagataagaatttcctaggctatttggattcaaagaaattggagagaaattagtaaatataagtgtgcaagttctattttttatgctaacaattgtttgaaaggtggcaaagatcaagagggaggggttataataaactgacactcagatggcaggttggaaacctctagatggtgatgggctagtggtgatatgggaagaggtgatgggagtggtatgaagagaggtgttgtggtgaggtaaagaastgggtatagaattgggaaagagttaacgtttaaaggttgttgtataaaatgggcagggaattcactgactgacaaatagactgatgatgagagttacagt

SEQ ID NO: 903511 - DNA, 637 bp, Homo sapiens
cactgttctccagaccccagaatggtagatccactgacagcttgcaccatgcacctggaaaagccacagacactcaatgccagcccatgaaagcagctgggaagaagkctataccctgcaaagccacaggggcagagcttcccaagaccatggggaccacctcttgcatctatgtgacccagatgtgagacatggagtcaaaggagatcattttggagcgttaagatttgactggcctgctggattttggacttgcatgggggctgtggactttgttttggccaatttctcccatttggaacagctatatttacccaataactgagcccccattgtatctaggaagtaactaacttgcttttaattttacaggctcatgggcagaagggacttgtctcaaatgagactttggattgtgggttaatgctgaaataaggtaaagactttgggggactattgcgaaggcatgattggttctgaaatatgaggacatgatgtttgggaggggctgggtggaatgatatgatttggctgtgtcctcacccaaatctcatcttgaatttccatgtgttgtgggagggacccaatgggagctaattgaattatggggtgggcctttcccatgctgttctcgtga

SEQ ID NO: 903512 - DNA, 624 bp, Homo sapiens
gttcccttaggcagaggtctttccttcttcatttggctttcaattattgtctactgtctgtttattaagcatgaaggatttcccctgrcatttaccttagagcatgtctactagccacacattatctcaaattttgtgtaatggagatatcttactttctccttcattttgaaggacaattttgcatgatatgaaattcttgattgacagtgttctctctattttaaatatattatctcactgcctttggcttttatggttactgctatcaaactggtagttaattttattgaattttactttttggttatgcaccacttgtctcttgctgctttcaagagtttctgtttgtttttgtatttcaacagtttgaatatgtttctcagtcatagatttatgtattgggaagttttggctattatctcttcaaatattcctcctgcctctttatcttttttatcttcttctgggattctctttatacatatgttggtatactcaatggtgtcctacttctaaattcttctccattctcttataacttctgtctcttaaaacttctatattcttctccattcgtttcactttctgctcatcaaattgaataattttaattggtttgtt

SEQ ID NO: 903513 - DNA, 602 bp, Homo sapiens
ctttacttgttgttaatgcattaatattattttacgagctgtgacaaatctaccatactaatgtraggtcttaataatagagggaaatgtgggtgaatatgaaaacttctgtactgtttttgaaacttgtgtgtaaatcagaagttgagaaacattgattcttcctttggctttatccagactaccagtgagcccatgaaggcagtccttatttatgatatcatactttttattatcttacatttcaattttattctttcttagtattttcatctctttgcttacgttatcctatgttttattttatattgtctgtttttttcccattagaataagttcttaacatgctaatgatacttatttatattatttatctgatatcttcaacagctgtagcctattgcgctctggttgtcatgattgtattgtctccctagactgtgttcccccttgccttttacatgctgctgtggtttcattatgtgtttctttctaaaatttatgttgaaactcaactctcattttggtgatattaagcaatgggtctttttgagaagtgctctattattctaaaataataaaagttcagtgcaaatattgtt

SEQ ID NO: 903514 - DNA, 617 bp, Homo sapiens
ttttctaccacctcattcagaaaagctgctattttatacatttgcaatagagatagattgttttgtcacattctgtattccatctagtgataactgatttcctgaatgaattttttcatttgcatacattaaggttcactccttatgctctaaagtttatggattttgacaaatatttagtcatatatccaccattaacaaaccatacactgtagtttctctgccctaaaatttcctggtgttttacttcttcaaccttctctctccccataactgtggcaaccagtaggcatttatagtctctataattttacctttaaaaatataattgacatcacacagtatgtagcttttttggaatggcttctttaacttagtgttacgtaaatgagccaaagatggcctctgtggattggcccctaggttatttcttcactgcatgttgagatccttttcaaagcccatggctaccaaactcaaacttttgtacrtccaatgtttctaaaagaacccaaataagcagatttttagccatatacagcctgcctgctttttatacaccatgaaatctcacccaacagctgttacctacagataagacagtgcttgtagtcata

SEQ ID NO: 903515 - DNA, 601 bp, Homo sapiens
agtttgcaatgaggaaaagcttttcttcaccatgagtctagctttccctgccatgaagagtggccacagattgagactttccagttctttcctgactctgtagaactttgtattcattttgaaggaaacactgagatgtagagtcagattcttcatccagagagggcaaccttatacaaaattgtgaagtggacttcatatactcagactgctttcctccctgactgtgtctcttttttgcaccaacacaccctggacaataggcacctcatgtgccagtaaggtattcttgtcagaaaggaaagatcatctaaacatccattcctagctaagccagtgcaggctagatctgtttaccttttcctagcagagaagaaaggagtggggagctgcctagaagagggcaatccatacagatccatacagaccatgtgatttcctgtaccatagctcgtattgtactgtgttgtcttttcyctgatgaactgtggcctcttcatgtgttgaatccatgacttaatcttttttgtatctttagtatcagcacatgatcaagattaaagtgggactccattagtatttgaatgaatgaatgaatgaa

SEQ ID NO: 903516 - DNA, 639 bp, Homo sapiens
atttagttaactgtccttaacatctaaataagaaatccctattctaattcaatgttgctggttggcacagtatttgtttagtgactgacagctccaaatcatattactctgtaaaacttttactttgaaatgtttctcaagatggtttatgttaatcccattataatggactacaatcaagcaactgcaatggtagtaattttcactgcttttattgaaattgtagatagatgaactgaatccaaaacctactccaaataaaacagctctctactcctatgttcttgataacaataaatgttaaattatcttctataaaaggctaacatagtaaaattatacttttttcttagaaaatatacattttttaaatttccaatttttgtagggttattttatgcatgaatataattttaagattggagacatgcagtccaaattgctatatagagtttttataaagatctcgtctccatatagctgtgcacagtgtttaataaaacttctatagtaagcttacctctgataaaatgcaaatcaattataaaggttaaaatgataattagaaaatgtccataaaagtrcctttaagtataaatttcaccacatataggccatattaaattgaataataatttc

SEQ ID NO: 903517 - DNA, 665 bp, Homo sapiens
gtgaacttactttaatctttgattggctttgactgggaatatccttcaacagtcagctcaacaagattctgggcaggccacttggcttgatgctggaattttagggcagggtttcctagtgcctgagttaacatgtgggtggggctggtgcctagatctgcaggactggacctgagtcctggagccaatgggatagacctcttgattgagcctttgtggttaggcctggagcctgggtccataagggctggcctaaagccatgaaggctaggtccaaagaagctgacccagtgttagaattagccttgaatctgaatcttcatggtcataccaggcactgggataagctaggcatcttagtccactaagataggcttggagcctaagtccatatgggcaggcctggggctggggactagatctataggggtagacctggagccttggactgtgagggctggcctggcacaagagtccagtggaatggacctggattctagatctgctacagccagcctggactctgggtccactgaagtctgaggttgcaggaactgacccagacctgggaccagtctggtactggrgcaaagtaaaggctgggcctgtgggggctattctggagcctaggattttggttacttttctaatgcatggagccatgg

SEQ ID NO: 903518 - DNA, 568 bp, Homo sapiens
ctcaatgagtgccattggtacttgtaaggaagctgctggtatgtctgygaaactaactaggaaatttcccattgggattctggtgaaatttatttattaatctgtctacaaagatgctagcaaaactgccagaaatgtacttaatgagatactagcaaaacttgctggtgtgccactgagtctctggcacaccactggtaagaaactcatttgctgacaaagaagttgccagcgccagggagtcactgttggcagccatgctgtgagaacaagaatcagaattcccttctgcttgtagtgccctctactgacaaggttaccattttgctggatggcaaaggaaatatggtaacagggcccagccccagtatcaccaatcagggcaaatgaaggtagatttagagatgagaggcaattaattgataactggttcacatattaggtgtcaactcaactaagagtacatgtaacaaggacacaaatatccttccttcattcagatgtgggataatatatatagcttctttgtttctttataactcttcctcacgagccaaaagcatctgag

SEQ ID NO: 903519 - DNA, 542 bp, Homo sapiens
ggtaattgagtcatggggcaggtttttctcatgctgttcttgtgatagtgaataagtctcatgagatctgatggttctaacaagggggagtttccctgtacaaactctctttttgcatgctgtcatccakgtaagaggttactgggtccttcttgctttccactgtgattgtgaggcctctccagccacgtggaactgtaagcccattaaacttctttttcttcccagtttcaggtatgtctttatcagcagcatgaaaacggactaatacaaatatatcgagggaaaaaaagctacataaaacattacacttactagaaacccatttagagcattctccttaaacttaatcataccagaaaatgacagccatattcaaaattttatagtggtccttgggaaaacaaacactgaacaagaaaaaagaaaccctgagatgtgtatagaaatatccaacattttgattcttagactattgatcatgtacactataaaagtgaaagaaatgcaaaagccttttagaactatttaaataacatggt

SEQ ID NO: 903520 - DNA, 593 bp, Homo sapiens
tgcttctactcagcgtatatgtgtatgggtgcatgtgtatctttatcaacaaagcaagtcttcatcttaaaacaaagaagaatacactgaaagtgaaatgccttcattcaaaatttatagaaaatttcgaagagagtagtgtttgtcacaagacgcttcaacaactctgctgcagttatcattacagacgtggtgacagttcatctttttgtcagtatataaattaggataaaatgtgttaaattattgtcccagcaggagacacagttcaaaaaaaaaaaaaaaaaaactcagagaatcttgagtatcagataattagaaaaggtaagttcttcgatgtcaatttgtccattatttattcattttcttgttaaatgacatacataaaattgatgtttgacattctaattcaataaacttaaaatatagaggctacataaaattgctacaaagtgactcaccctagatggtctgtaagtaatacatgtgactgacaacattacaaaaattcaacaaatgtgagaaccctgggttaytatttcctttggaaaaaggagatatattttgcttgcatttctgctgatattaaaaag

SEQ ID NO: 903521 - DNA, 636 bp, Homo sapiens
tttcctgcctgctgaaatctgccattgaatccatctaataaggtttttggtattttattataattttcaacatcaaaatttctattttkttcttttttatactccatatctctttattaacattctctgtttgtttagacattgttctcttggtttcctttatttctttgtacatgatttccattagctccttgagcatatttaagataatttatttaaattctctgtccagtaaatctaatatttggcctttctcagggatgatttctctgtatttctttttttcttgtgaacgagtcatattctcttgttactttgcatgccttttttttttttggttgaaaactggacattattaatattctaatgtggtaactctggaaatcagcttctgctccatcttcatgatttgttattgttacttaatgtgggatacttgtttatttgtttagtgacttctctaaattgtttttgtaaaaacagtattctttgttgtgtgtgatcacttaagtctctgtgtgttctaatctcttcttataagaatagcagtcatattggattagggcccagcctaatggcctcattttaccttaattacctctttagagatcctatctccaaataaaatcatgttct

SEQ ID NO: 903522 - DNA, 649 bp, Homo sapiens
tactgtaacctccacctcccgggttcaagcrattttcctgcctcagcctcctgagtagctgggattacaggcgtacgccaccacgcctggctaatttttgtatttttagtagaaatggggtttcaccatgttggccaggctggtctcaaactcctgacctcaagtgatccacccatctaggcttcccaaagtgctgggattacaggcatgagccactgcgcctgacctatatttctgttattgcatccagaggtcatgatagttcatctggcagtcatgacagtcattctggaggcttgtgctgagctcatgaacacagggaatctcacacattgtcccttctcctattttagtgttcaagtgtctgctggcactactcaccaggcagtggccatacacagggtcacaggagctggcatggccattgcaattgcaaccagagcaggtgcccaggtagggcccaccaggcacccgagtgaagtgggcatcacagctctcgcaggacaagccagaatagccaatggggcatctgtggggacaggaccaaaagagtcgctgcaaggacggtgaggccctgccgtttctcctctatccttgctagggtctctgtggttcccagccctgccggctcaggcacctgcactcctcc

SEQ ID NO: 903523 - DNA, 600 bp, Homo sapiens
tgttgagaactctagtaacgttttgattcttgatcttttgtctaaatcattctctcactttatggargctttcaaaatcttttctctattccagatgctctgaaatttcacaataatcttggtatgagtgtatcttaattcattgtgatggatgctcaatgggcccttttaatctggaaatgtgtgttctacagttctgagaaatgttagtgaattattttattggtgattttttctcctccaattatgttctctcctcctgaaacatgtattatttaaataatccctctaattttatcatctcttcctatttaccatcatttaggtttgttttttgttgtttctgcactcctttctgatcaacctcctccaactctattggatttgttttagtttctaagagctctgtgaacattcttgttcttatttcataaatgcaatgactaacttttccaaaaattttaagggccacattttttgcattgtcttctcctccaaatctcttttactctcttttgctttaatcaccatttttcacatcagtggccttccttacctatgactatctgttcataattaagaatgagatattaaaaagct

SEQ ID NO: 903524 - DNA, 681 bp, Homo sapiens
tacaaattcaaatagatacacacatatgattyaagaacataaatcacctctggaaagttacctgggaggtgttctggtaaaggttttcttagctttctggtttctgcagtataggaagttatccctcaagaaagttggaagaaataaactatgccagtctactgtatctaccacatgttacaaaccaaagagtctttgccttcagcaacttacattttagtcaaaatataagacaaaaaataaacagatagggcagacaacttgacaatactcttggataaagctattagaaaatcaacaaactttacaactgaaagatgtttaggttggcaacagtcaatgcaacttgtttctagagctattcatataatagtgccacggtgagacagttaattggaaaatactacttggtaatggctatataaatcaaaatgtgccttcaaagacagtgtgggagtttagttacgtgctactacttatgaaataattctatgggagttggcaaaactgattagttaaatttggagaatttatgctataggaattaagcttgattggtacttgactcatgtttctctagagtttaaatgtgaaaagtttaactttgaagagttatgggctatagattattcaatacaagaagttaacattttgaccaaaaaacaaaaacaaaaacaaaaa

SEQ ID NO: 903525 - DNA, 658 bp, Homo sapiens
tcaaaaagaatttggggaaaaacaaaaaggaaataattatagaaactacaaacagcataaaagtcgtcatgtccaaagtgcaggtttcagattctgagaatcccattaaatccagggaaaagctcactgagttccacattctttgattcccggaaaactcttgatcctgctggcgtaatttaccaggcgccctgcctgccccttccctccagccctgccagtctctggccatgtgatctcccaggccagctcaggccactttgccatctcagtccatctttcacctttcacaagtcaactccaactctcccaaaatgatagcttattttctgtgtttacccctagactcactaagctctctccccctagtcacatccccccttccatctgaaaggaaataggttcactgtcttgaggagcaaaacatccttagttacccaagagtgaactttgagactttcagcttcacctactaaggagtcttcacaaaataggacccttcctccaacacacataccaacaaatgaaccaatgggcttccgaaagtctacattatgtataataattcctttatacrttaaccttccgatcccttcaaaagagttatttttcttgttgctgaccaagaagaaatgccgggagaaaacgcagaggacgc

SEQ ID NO: 903526 - DNA, 621 bp, Homo sapiens
cccacattgtgccagggtcataaggaagcatgagtagtttagggaggggactggaagagcgtccagggcaatgaagggctcagtaagtgactgtttgccaactggcaccgaagtatttccagatataaacaaccagtatagccatactgtactgggtgcaagtcagacttaggggtaaatccctaccttattagctactgcatacacggttatttcaactggaagtccttccccttcttgatcctcctccctgggggaggaactgtgagcacagctaactgcttgttttcttctagtctaagcattgctccttttctgtggtagctctctctgctgccttcacctacgcagtctccagctggctctatgaccagcaccacggacagctcccgctggccaggccatcccccttcctccttcctccaaccttctatcgcctctttctccacttaccctaatgcagaaatcccgaggtctgaactgaatgagaacatccctgaggagacagtacagtggagtggctaggaaaaagactctggagccaagcagactggaattttcatcccaacaccatcarctatcaactatataatcttttccttcatttctataagaaccagg

SEQ ID NO: 903527 - DNA, 617 bp, Homo sapiens
tcatgggagaattccttggcttcrcgttttaactcatgaatttactctcctgcagtgtccattttaaaatatcaacttctactgccagttgcgccctctgggacgtgtgtcctcacaatgctgcagccagagcccagccccagagcctggggagcatgcaagccaggccagggtccagtcattggtgcattcaggccttgtgcaggggccaaggggggcctctgggaggctactcacaatgtgatcatgggggccaggctccagcaagcacaccctgccatcgtgcataatcaaaccctttgaactgaaccacctttcccacaaggatctgccaagaggcaatatgtggagggacacagagatttgtctgctggccaagactgtcattgaccaggggaagctcataccaggtgacgttatgatgtgattgacttcacacgagctgaaaaatctcacccagtctcactggctgttgcatggtttcaccaggatacttccacaggctgaaggcctagattgagtttatcagatacacctgatgatgaacccgaacatgcaatctgaggtcatcaagctacgcctcactgtttgctggattcatccagccaatagccaag

SEQ ID NO: 903528 - DNA, 617 bp, Homo sapiens
tcatgggagaattccttggcttcaygttttaactcatgaatttactctcctgcagtgtccattttaaaatatcaacttctactgccagttgcgccctctgggacgtgtgtcctcacaatgctgcagccagagcccagccccagagcctggggagcatgcaagccaggccagggtccagtcattggtgcattcaggccttgtgcaggggccaaggggggcctctgggaggctactcacaatgtgatcatgggggccaggctccagcaagcacaccctgccatcgtgcataatcaaaccctttgaactgaaccacctttcccacaaggatctgccaagaggcaatatgtggagggacacagagatttgtctgctggccaagactgtcattgaccaggggaagctcataccaggtgacgttatgatgtgattgacttcacacgagctgaaaaatctcacccagtctcactggctgttgcatggtttcaccaggatacttccacaggctgaaggcctagattgagtttatcagatacacctgatgatgaacccgaacatgcaatctgaggtcatcaagctacgcctcactgtttgctggattcatccagccaatagccaag

SEQ ID NO: 903529 - DNA, 601 bp, Homo sapiens
acctcaagtcagtacctttgatgaacctcaatgcaaaaatcctcaacaaaatactagcaaaccaaatctagcagcatatcaaaaagcttatccatcataatcaaataggctttatcccygggatgcaagttcaattcaacctacgcaaatcaattattatgattcatcacataaacaaaactaaagacaacaaccacatgattatctcaatagatgcagaaaaggcttttgataaaattcaacaccctttcatgttagaaactctcaataaacaaggtattgaaggaacattccgcaaaataataagagctatctatgacagacccacagacaacatcatactgaattggcagaggctggacatattccccttggaaaccagcaccagacaaggatgcccttcttaccactcccattgaaggtagtatttgaagtcctggccagggcaattaggcaagagaaagaaacaaatgtattcaaataggaagtgactaagtcaaactatccctgtttgcatatgacataatttcatatctagaaaacattatagtcacagctcaaacatctccttaatctgataaacttcagtgaagtctcagga

SEQ ID NO: 903530 - DNA, 684 bp, Homo sapiens
ctcagaccctgggggtacacaatgactttctaaggrttcacaggcaacaggccattttgagagaatcacttttcagattctcaactgacatgggtactctgtgggctcttcatttccacatcctcttttggtaacactcttctcccactttataaaacaaagattgatcagtcaatgttctggcaggagacagatagcgtacttacattggctaattggaggaaagtttcataaaggtattatttaaaacttgtgatccggatgaagggaaatagcaaacaatagtgccaggccctggctagtaacagtggggccctggggagggtgaggggaaagagccttctggaatctgcagacaaaaggagactctaggcgggggctgtcagacaggagctgtgaccttctgcagtggaggcaggcagcctgggctcccccacagtagggataaagaacccctacctcactcatctctcagtctaccatctctgcctgttttcgctatcccatggcaaaacccaactgttacaggaaaggggtccggtccagaccccaagagagggttcttggatcttgcacaagaaagaattcagggtgagtccatacagtgaagtgaaagcaagtttattaggaaagtaaaggaataaaagaacggctacttcatagagcaaccctgagggtggctgg

SEQ ID NO: 903531 - DNA, 565 bp, Homo sapiens
tatttattttatatattgtattataattcaatactatatatatttttcttgctccaattattacagttttattcatgggagctttttcagttgtctcaagtttctttgacayacactcatcattgtatttatttgtttgttttagcatttgcttactttctggcactataaggtgctacaggctcatcttgtatatttcttccctcagttgtagagtaagacatttctctgagtaatctagttctttttactgaagaattgtatcagaaaccaatatctgagtgctatgtgtgctctttgctattggagtgttgttgcttttcagccctctcaactgacaaagcaaggaaatatgtatatactgatccaagtttatacacatatgtataaacattttctatatataaccttctatatttatattaagctaaacatgagttcatgctcatatctccaactgtaatcattattacatagatcattttaactttgtcctcttgcttttctgtaacctcccacttcaacagtgataaacttaacttccattaatttacttgtttgattc

SEQ ID NO: 903532 - DNA, 614 bp, Homo sapiens
aaggttaatattcaaactatacaaggaattcatgcaattgaataacaataaagcaatctgattttaaaatggccaaaggacctgtatagacatttctccaaagaagacatacaaatggccaacaggtacatgaaaaagtgttcaaattcactaattgtcaggattttcaaatttttcataaaaatttcaaatattcatgaagttaataacagtgtaatgagcctcgatattcccatcactcaaattcaacgagattttgccacactgactatcctttttcatttattattgttaaatttatgagaactaaatgaaactgagggcatgcaatacttagcggagttcctggtacagagtgaatgcataatatgcagtttctatttaaagttattcatccataaaatagggataatattacctaatacggagtaatttttgaaaaattaaatcccaaaaaagtagaggtggcagttctttttaatttgaaaagtgaaataacatggcacagataattagtatgattaaagaggatcactgttaatcacagaaaaggagaagcaaataatagtatatctcyatgcctgcaacaaagaggagagtgttctactcctatg

SEQ ID NO: 903533 - DNA, 652 bp, Homo sapiens
gttgatataacattagaagaagttgagatggttaatgtttgytttgcacatggtcaaataatctgctctttcaaatattttccaaataagcttacttggaaaacatattactccattttaggccttgtatctttccacagaaatatgttgaatatgaattcaagtctgaaatcataggtagtactaatgagacagaaatgcaactgattattttttactttttgtttgtttagtgttgctattacctgtgttacctgctgttcaaccacatgcattaatgtttctcagtttgatattcatttattcagtagaaaacagtagaatgtgaaaaggtgcctgtttctatttctgggacattttactattttatttttcattaataacgtgatactttttctctcaatcatttgttttctttgttaaaaaccaagtttaattgtaggaaatcaacctatgacttttgcaccaagaggaagcacaaagaaataatctctgcattttttagattaatttttctttttgtgtgctaggagaagtaaggggaagtttgttgtttaatgaacaagttcaaacaaattcatagacgtaaaacccaaatgaaccttaagagctcgccagcttgatatcatgtttcccttcccacaactaaata

SEQ ID NO: 903534 - DNA, 624 bp, Homo sapiens
ctgaatcaaaagagaggttcaaatctgtgagatgaatgcacatatcacaaagaagtatctcagaaactttccttataatttgtatgtgaagatatttcctttgtcaacataggcctcaaagtgatcaaaaataccctttttcagattgtacaagaacagagtttccagactgatcagagaaaagaaatgcttacctctgtgagatgaatgcacacatcacaaggctgtttttaggaaacctgcttcacagttgttatgtgaagatacttccttttccaccattggcctcacagcattccaaatatccacttgcagattctacaaaaagagtgtttcaaaactgctcaatcaaaggaaaggttgaactctgagatgaatgcaaacatcacaaagaagtttctcagaatgtctctgtctaatttttatgttaaggtatttccttttccaccataggcatcaaagtgctccaaatatccacatgcagataggacaaaaagrctgcttccaaactgctcaatcaaaagtgtggttcaactctctcagatgaatacacacatcactaagaatgcttctgtctagtttttatatgaagatatttccttttccaacataggcctcaaatcg

SEQ ID NO: 903535 - DNA, 588 bp, Homo sapiens
cccaagctgctcaaacaaaacaggtgttcaactctgtgagttgaatgcacacttaacaaagaagtttctyagaatgcttctgtctagtttttatgtgaagatatttccttttccatcgtaggccaccaatggctccaaatatccacttgcagattgtacaaaaagagtgtttcaaaactgctgaatcaaaacaaaggttcaactctgtgagatgaatgcaaacatcacaaagaagtttctcagaaagcttctgtctaatttttatattaaggtatttccttttccaccataggcctcaaatcattccaaatatccacttgaagattctacaaaaagagcgtttcaaaacttctcaatcaaaagaaaagtccaattctgtgataggaatgcacacatcacaatgaagtttctcagaatgcttctgtgtagtttttatgtgaagatatttcctttgaacgtaggcctcaaagcgctaaaaatccaattgcagattctacaaaaagagtttttcaaaattgctgagtcaaaagaaaccttcaactcagtgagatgaatgcacccatcaaaaagaaggttctcagaatgctt

SEQ ID NO: 903536 - DNA, 591 bp, Homo sapiens
aggcatcaaagcgttccgaagatccacttgcagattayacaaaaagagtgtttccaaactgctcaatgaaaagaaaatttcaactctgtgagatgaatggacacatcacaaaaaagtttgtcagaatgcttctgtgtagttttcatgtgaagctattttcttttccaccataggcctcatcatgctccaaatatccacttgcagattctaaaaaaagagtgtttcaaaactgctccatcaaaagaaatgttcaactctgtgagatgaatgcacacatcacaaagaagtttctcagaatgcgtccatgtagtttttatgtgaatatatttccttttccaccatagtccaaaaagggctcaaaatattcactttcagtttctacaaaaagagagaattaaaattgctgtttcaaaagataagtccatctctttgagatgaatacataaatcacaatatagtttctcagaatgctttggcatagtttttatgtgaagatatttccttttccaccataggtctcaaagttctccaaatatccacttgcagatactacaaaaagagtgtttcaaaactgctcaatcaaaggaaaag

SEQ ID NO: 903537 - DNA, 463 bp, Homo sapiens
aagttaaggataaagaaatgattctaaaagcatcgagagaagagaaacagataactttcagtggaactccaatacatctgacagcagacttttcaggggaaaattgacaggctgggagactggcatgacatatttaaaaagctgaaggaaaaaaagacttttactttagaataatgtatctggcaaaaacgtcctttaaacttgatggaaaaataagaactttttccgacaaacaaaaactgagggatttcattaacaccagacctgtcctacaagaaatgctacagggataacctaacctaaaagaagaaaagtaagtgagcaataagaaatcatctgacggtacagaactcactagcaatagcacatggaaaaacactgactattataatatggtaattatggggtgcaaaaatctcaaatagaargagtaaacatatgaactttaaagtagttttttcca

SEQ ID NO: 903538 - DNA, 490 bp, Homo sapiens
gcggcagcagggaaggcaggtcctatctggagaccaggtgagaacacgctccaggctcccctgagtctttcatgggcaataaatggcctgaagagcctgggccttccctgctgtgatcctttccacccctgcccscagctcaggaactccagcttcacctggagcagcctgcagatcccgaaagagcaaagaggaaacacaaaatgtcccaatgacagccacaacaccattctctataaggcaaccaacccacctgccaccctgccagctccagctccaaatatgccccatgcctggcagtgtctggaggaggaggcagcatcagagaaggctgtttcccagacaggagaaattgcagcacattggcatgtggtgggaatgagccaatagcaagggggaaaatgatgatgcaggaaaggaggaaattggggatccctgccctaaaattcctggcatgcatgctgaggttcagtctccctcctggcacaca

SEQ ID NO: 903539 - DNA, 504 bp, Homo sapiens
cactatgttgcatcagaaaataaacctttagttcatcttttgcaatcagtcrcagcatataatctggtacttacgtggtagataattaatgtttgctgacctaaaatattgaatttacttgaatgaatctaatgaagtacatttaaatctttggccacatgttaccattaaattgtacgtactttcaagcctctatgatgcagaaatatagcagatattagtttcactgatttctttgttttctgtgtgcactaagcaaggataaggcccactcagtgaatgagagacatttagtttataatatatcttagcataaaaagttcccagaagaacggcctcaatgaataccactctatttcatccttactctttccttcttctgggaattcctgggctggaaagtatgcatctctgggttggttttcctttctttgctgtgttcctgacagctgtccttgggaatatcaccatcctttttgtgattcagactgacagtagtctcca

SEQ ID NO: 903540 - DNA, 630 bp, Homo sapiens
gttaagttttctgtcttatattgggtacgawttgtggtgccccaaaacaattacaatggtaacatgaaagatcaccgatcacatatcactgtaacagacacattaataatgaaaaagtgtgaaatattacgagaatttccagaatgtgacacagagacagaaagtgagcacttgctgttgggaaaatattgccagtagacttgctgcatgcaaggttgttacaaaccttccatttgtaagaaacacagtgtttgtgaagtgcagtaaagtgaagcaaaataaaatgaggtctgcctgtacatgcatatactgatgtgtgtctgttaatttttcctgcctgttacggattgagcacgtcatgtagacacagtccattggatactgcaattctgtgcatacattgccatcgagaccccaagactgtgtggttataagaaggaagtgccactgcttactcctctcctctcccttctatcttacctgcttttgttgcctttctcctcttcctccccttacttggtctcagtttggtttgtcctgaatgacaggcagtatggctcagtggttggaagttcagtctttggaattagaatacggagctcctaattgaccttaatactttctcactgt

SEQ ID NO: 903541 - DNA, 693 bp, Homo sapiens
cacaggaagcagggaataagatgttgccatcctaaggaatttaggatgtcttgtaagagatgtgggaagccatccaaagttttgagaagaaaagtcagatgatctgatggatgcrttttgatgatcattccagctgctctgtgatcaaggatcagtgagggaccagaggggaagcaggaagcatattttggaggctactgtagtttccagatgagagatggcagtgcaggcaatctccaacttacaataggtcgacttgcaatttttcaactctatggtggtgcaaaagcaatacatattcagtagaaaccgtacttcaagtacccatacaaccattctgtttttcactttcagtacagtattcaataaattacatgagatatttgacaccttattataaaataggctttgtattagatgactttgcccaactatagattaatgtaaggtgggctaagctaacctatgatgttcagtaggttagaggtatcgaaagcattttcaacttaagatattttcaatttgtgatgggtgtatcaggagaaaacaccatcataaaccgaggagcatctgtactgaaaattaagggcgtagagttgagttacagagttaattgaaaatgcttttgagataccagagaaagaatttactgatgagttgtatatggagtttgagagattagaagataaatga

SEQ ID NO: 903542 - DNA, 609 bp, Homo sapiens
gtggtgagtcaacagaagctttagttgagtacagtaacttaactattaataaaccactctaaacaaagtttaaaaaatacatttactgtattaaaatatttattacacacacaaacacacattgttggctacattacatatgtgctttcaagttaaatactcctaaaaacttacatcctagtattaatgacaagtgtgcatttaaataatttaaataataaaaagtagtaaatccagctaaactgccagaaaaatacacgtagtcatgtactcttttcttatgatgacaaacgttattttaattttttatttttattttttggtgttatggtagcatattttttggtgtctatacacaaacatttaaaatattctgaataactcagaatgctttgtctacagaaatcgataaattctttatcttagaatattcttaggttttgtagcaatatttgcaggattgattaaaggtccccatagmaaaattttatgttatctatgtttcatttaaattgtagcattctcccaaagtgttaatttttatatagccatatgaagatttactctctgaggtcatttaatgcatagcagaaatagtttaataaatgg

SEQ ID NO: 903543 - DNA, 628 bp, Homo sapiens
agaaatgacttctttcaagtatagaaaacatactttgtattgtagtaactgttggaaacatatacgtattttaaatttatttatcccaattacattttctttagttcaaaayttcatgggtaaataaaagtgcattgttactgttgtattgaaaattaccaattcctaatataatgactccaatgtaggggtttgggtttttaaattcagaatgcagaacaatcaacaattttatattcaaaacaaacaacatctggaaatttaacttctatttttttttcattcttccctactggtttagaacagttaataaaaaattctgattaaattttatattttattaatttgtgattctcatacagtttttaagcacataagataagaatttagcataaacttaaaacactcgttggtagcaaacacattgggggaattcatcttatgagatgaatccatgtctctaccctaagctgacctattagtccttaccctgtgtagacctaatagtctgattctgtccaaactttaatgcaattagttaggttactattcttttatctagatcagttatttgcaagtgagtttaaatgatagatgaagtctcagttaagtgctctaagaataccta

SEQ ID NO: 903544 - DNA, 628 bp, Homo sapiens
agaaatgacttctttcaagtatagaaaacatactttgtattgtagtaactgttggaaacatatacgtattttaaatttatttatcccaattacattttctttagttcaaaatttcatgggtaaataaaartgcattgttactgttgtattgaaaattaccaattcctaatataatgactccaatgtaggggtttgggtttttaaattcagaatgcagaacaatcaacaattttatattcaaaacaaacaacatctggaaatttaacttctatttttttttcattcttccctactggtttagaacagttaataaaaaattctgattaaattttatattttattaatttgtgattctcatacagtttttaagcacataagataagaatttagcataaacttaaaacactcgttggtagcaaacacattgggggaattcatcttatgagatgaatccatgtctctaccctaagctgacctattagtccttaccctgtgtagacctaatagtctgattctgtccaaactttaatgcaattagttaggttactattcttttatctagatcagttatttgcaagtgagtttaaatgatagatgaagtctcagttaagtgctctaagaataccta

SEQ ID NO: 903545 - DNA, 663 bp, Homo sapiens
gcttcctggctgctttgtttacctagtcaagccttagcaaaggtggacccccctcccccagtctcgctgatgcctcacagttggatctccgactgctgtgctagcagtgagcaaagctccatgggcgtgggacccaccaaaccaggcgcaggatatagtctcctggtgtgccatctgctaagaccgttgtaaaagtgcaatatcagggcaggagtgtcccaattttccaggtaccgtctatcacggcttcccttggctgggaaagggaattccccaacccattgcacttcccaggtgaggcgatgtcccgccctgcttcggctcatactctgtgggctgcacccattttctgaccagtcccaatgagatgaacccagtacctcagttggaaatgcagaaatcacccgtcttctgcgtcgctcacactaggagctatagactggagctgttcctgtttggccatcttggaatgattctctttctttacattttagattctataagatgaatttttttttagattctgcaagattaagttcacatattaaactacaatgtatatgttaagcacctatctcattctttattccactttgttacrtaaaatttcataattgaatattttgaattcaatgtattataaaattttaaaaacatttaaat

SEQ ID NO: 903546 - DNA, 630 bp, Homo sapiens
cacaaggtgcagggtgggaagatcatgagactcattgtccaggtggggaatgtcacaaggtcaaatgattagttagagtggggcaggaacaaatcacaatggtggaatgccatcttttgtggttcttcagttgctccaggccatctggatgtatacatgcaggtcacaggggttatgatggcttagcttgggctcagagacctgacattcctgtctttttatattaataagaaaaacaaaaaatagtggtggagtgttggggcgttgaaaatttttggaggtggtatagagagataatgggcaatgtttctcagggctgcttcgagcgggattaggggcggcgtgggaacctacagtgggagagattaaacagaaggaaggttttgtggtaaggggtgatatggtggggctgttagaaggagtatttgtcatatagaatgattggtgatggcctggatgcggttttgtatgaattgagaaactaaatggaaggcacaaggtccaaataagagaaggagaaaaacaggtaktagaggactaagaattgggaggagccgggaaatccaattagaaagtgcccagggaggtttagcataattatttgcctggttggcaagtttttgggctcta

SEQ ID NO: 903547 - DNA, 594 bp, Homo sapiens
acataattatgaaagaactagaacgaaggcagaattggtgcttgtccttcttgccttatacctgagaaatacaaagacagagaaagaaaagtgtgaggcctaccatttgatactaaggctgtttgtcactgatgaaagaagaagaaataacagttccagcagcaactagttcaaggactcctggggatgtagcaaagacaattcttttttgaatatatagaaaaaaatacctgtgaggttttgttaaaaataattttcaatccatttaggtgaatattctatccagaaaaaaattacaattatcagaacctctgtcaatgctggtgttcagtgcttgacaacaatactgccctaagaatatgtcctatcccacttctatactcttagtttcctaccagatcagatagctattacttaatactgtagctaattctacccagagtcttcagttttaattcaatacttcaactggggcagacttttggctaagagtactctgcccttcttcgtgattatgaaagtgacctgaagtttgaacttcatatatacacrtacagtactccagaacaggaggtatacttactactaaatgat

SEQ ID NO: 903548 - DNA, 598 bp, Homo sapiens
ttcatgcgtgtgccccactctttacagtgtttggcatatacttagcacttaattcatttaatcagtctttacaaaatattcttaaattcatactatttgccaagcattgccacagccattcaggattccaacagtgaatagacctttttcacttcatgggccaccctctaagtctaccttcctgatttcttctcacctgtttgatatctaaatgttggtagtcccaaagacttgatactttttcttctagctgtaatcattacctttaagattttgttcagtatcccatttagaaaatcagccatatacagatgatcttcaaatttatacttctagctttgatgcccagaatcttacatttaactttgtgttccaatcttctcttgaaagttcaacaggcatttcaaacttaacatacccaaagccagataccccacacaaacccactcttctgctgtctttctcaactcagtaaatgtcaagtccrttatttcagcggatcagatcaaacacctggaagccatccttgagaaaaaagaagcagagatgaaaatgggtgatctctaggtaaaaggcaagtttttactgtgacatatgt

SEQ ID NO: 903549 - DNA, 641 bp, Homo sapiens
tttaaaagtgtggcacttttcctcccttacactttctctctcctgacactttgtgaagaaggtgtttgcgttctgtttgtcatccaccatgattgtaagcgtcctgaggcctcccagtcatacttcttgttaagcatgcagaactgggtcaattaaacctcttttcttcataaattacccagtctcaggtagttctttacaacagtgtgaaaacagactaatacagaaaattggtactgggagagtgggcagtgctataaagatacctgaaaatgtggaaatgactttggatctggttaacaggcagaggctgaatcagtttggagggctcagaagaagacaggaagatgcaggagagtttggaacttccgagagacttgttgaatggtttttaccaaaatgctgatagcaatatggaccacaaaattgaggctaaagtggtctccgatggagatgaggaacttattgggagctggagtaaaggtcactcttgctatgctttagcaaagaaactagcagcattttgcccctgccctagagatctgtgggactttgaacttgagagagaygatttaggctgtctggtagaagaaatttctaagcagcaaagcaatcaagatatgacctggctgttactaaca

SEQ ID NO: 903550 - DNA, 597 bp, Homo sapiens
tgtgggtctgaaggaattccccaaacctccatgatttagcaggaggtaagggtagtcaccccagcacctggacccatttagattaagtaaattgactaaggctccagagraaggtgttcaaaactcagactttagttatagattagaagttaatcacttgtgtctttagatgaatgcacacttacacgtagaaatatggcttagaaggtatataagctctggaaaactttgtaattttcagttggtctggtgataatttccaggctttatccctgtacccggttacagaagtaaactcccttctctcccagttcatctgcatcttgttattgggccacgagattaagcagcccaacccttggtttggtccaggaatgatctggtctcagttgaacatatcttgctacaaagaaaggcctattaccaacataggtgtttctcattttgaataactcttttaaaggttaggtttactaatgtcctcttgtttctaccaatttgtcctaatttttcacccatatcctcattcacagcctcattgttcaccccatacctgcagagagaaacgaaatattttctttttttatgcatgtagtc

SEQ ID NO: 903551 - DNA, 599 bp, Homo sapiens
catgcaaatggaaacccaaagcaagcaggagtagcaattcttatgtcagataaaacagactttaaagcaacaatagtagaaaaaaaagacaaagaaagtcattatataatgataaaaggattgatccaacaagaagatattacaatcctacatttatatggacttaactctggagctcccagattcagaaaacaattactgctagacctaagaagtaagacaacaacacaataatagtggggaactttaacactccactagcagcactagacagataatcaagacagagaatcaacaaagaagcaatggtctcaaactacactctagaacaaatggacctaacatgtatttacagaagattctatacaagaagtgcagaatatacattcttcacatcagcatatggaacattttccaagctagaccatgataggccacaaaacaagtctcaataaatttttaaaaatcaaagtcatatcaggcatcttctcagaccacaatggaataaaactagaaatcaactccaaaaggaatcctcaaaagtatacaaatacwtggaaattaaaccatttgctcctgaatgatttttgggttaataa

SEQ ID NO: 903552 - DNA, 629 bp, Homo sapiens
tgatattgtttgctccacatcatgggccaatacagacaaatgctgtgaacttccaggcctggtaagaattcttccttcatttctattgattttttwaattgtatttaattttctggaaatgagaagctatttctcaacattcatatcataggcaactcgttgagatgataaaattagaaagagattaataaagaggcatgtctgaaattaacaagatttctcctgtataacctaggatcacatacagcgtgaactgcccaactcagagggtgctatttacacatagtccagatgttcccagattccatggctcatgaagcccttagtgtctcaagctttttcttgcacccctaagccaaaagaaacaccttgcagttccatttatgaaataataggtccaaacatcttactaaatatttatgtcctaacaactcagtagccatataaaataacaatgcacatacattgaaagaaaaaagtgatatttatattttattcttaaatgaccaaaattgcttattgttgggatgtgtgtgctacctgagccctgcagcatttctcatatcttgggatcacattggccactgccatcctcacttctttttctacattgcttttttcatagtact

SEQ ID NO: 903553 - DNA, 635 bp, Homo sapiens
caaacacacaactctgtttttcattcttactgcccagggtcatcaaatgtggtggttcaggttgtacattgttcaaaggcacctgccaagagaccaagccatgccaagccatgtcaaggaacacgtttttctactttgcacaaaggcatcctgaggactggcagaagcccagtcactaatggagttcaggcctcaccatcttctctccagctcttggcaaatcttctaactggtcttctgtcccaagtggcttaacatttcgattgattcttcacatctgcccccagattaatttccttaaagtctatgctggatcatatcatacttttcaaaaacctgcagtcacatgctgttgccttcagaataccgttcaccctctttgctgaggcatttaaggccctttgtaacttgactcccatctcattttcaccatgttgctccacatgttctcctctccatccatcttgcttgacttactgctcagtatggtttcttattaaatttacatagcatttattcatggagaggagaacattgcaaggttttttaccataaaattggaaacagatgaagcaaggtagaagaaaatattgggataaaaaasaagtaaatgaaagaaggctaaagacaattaa

SEQ ID NO: 903554 - DNA, 566 bp, Homo sapiens
cttccacaatggttgaactagtttacactcccaccaatagtgtaaaagtgttcctttttctccacaacttctccagcatctgyctttttgtttagttttgtttttaactttttaataataggcattctgactggtgtgagatcgcatctcattgtggttttgatttgcttgtctttaatgatcagtgatgttgagcttttttttcatatgtttgttggctgcgtgcatgtcttcttttgagaaatgtctgttcatatcctttgcctactttttaatggagttgtttttttttcttgcaagtttgtttaagtccctttgagatgctggatattaggcctttgtcagatgcatagtttgcaaaaattgtctcccattctgaaggttgtctctttagtctgttgatagtttcttttgctgtacagaagctctttagtataattagagcctatttgtcaatttttgcttttgttgcaattgcttttggcatctttgtcatgaaatctttgcccgctcctatgtcctgaatggtattgcctagattgtcttccagggtttttatagttttg

SEQ ID NO: 903555 - DNA, 629 bp, Homo sapiens
gttatgcttatgcactcctgatgacaatcagatgaaattcttctagcgttagacctccagttttcctctagttcctcccttactgcccttgataagatagttttgaataattctgacacttttcctctggcctccagcaaagtttattattctcaacttgtgaattctccagtggtaagaaatcttaactctgtctgaaataagttttcaaatgtcttcattcttaaaataacttttaatatatcatttttaaaacaatcagataccttacagctatgaggactgatattgattttggcagagtgagtctcccgtaggaatgctcgggcttctcttacttgtaacttccttcttgtctaagaattttctattgagtatcttgtctccatacctgcagggctgactgttgtcaaattaagcgatgttttggcttcagaaattgcaaaatatcaggattggttcgttattaatgaattggagtaaccgggataattgagttgtgttttgtgaaaatcaccttaaatgaccaaagtaaacatacagccagatcaygtagtattatatacacagagctgaaaataaatgggaatataatacactggctcctgaagttgagcaaatttcatttt

SEQ ID NO: 903556 - DNA, 614 bp, Homo sapiens
tggcaggctcaaaacccaagagccagtgttttagttcaagtctcaaggcatgaaaagcaacatatragctcaaggcagtcaggcaggcttctctcttactcagcatttttgttctcttcagtctgcaatcccttagaggcccatccacattagggagaagaatctgctttattcagtctaccaaaatcagtcagaaatactctcatagacacatccagagtaatgttgggtcaaatgtgcaggcaccccatggcctagtcaaattggcacaagaaattaaccacacgctgtataatatatttctaggaagacagaagttataggaggaaaaataaaacagggataaaaggagtgagtcacgggagtgctgttttagatagggcaggcatctgtcagggaggctttgaaaggtacatttccacccacgattggattaaatgggtattaacctcactcagattaatgtaaattccagacacagctgaaatgagccccttgctgcacatcccctacatggatggcttctgatgttgtctcccacagcagtgaccatctgtgttgcattctgtgaggacaacttccatggtagtgatagtgtgatatgttggaaaata

SEQ ID NO: 903557 - DNA, 587 bp, Homo sapiens
ccacatgaatgtggggattctgaattggaactactagttttgttgaaacctcttaaaagctaattataattttaaaaatctcatgttctatttagggcaaggaaatgtatttcttatatattatattattatgagtgataaggttgccagaaccaagcttcagcatcctccagataattccacctatgtctttctttgtctaaattcaaatgcaggtcagaatctagagggaagagtgtaggctttgcaagatagcagctgagatgggaatctcagctcaactcatattttagccaggtgacaatgggtgattgatacaacttttttgattgtataaaaggaagaacaataatcttgcagcatgtggttggtataagattaaatacagtagtatatgtgaaaacactcagcacatagttactgaatatctgtttattttccactcatatcaaaattaacaaacattttttcctaaamatctttgctgtctttaactgagcctattactattgtaattcattttcaattgagtaaaaattttgttggtaaggctaattttggataaatgtagggaattcctagaactt

SEQ ID NO: 903558 - DNA, 578 bp, Homo sapiens
gctggatcgtcagcctgcaatttgttatgttctaaaatgagttgagataatatattagagcctagaacaaagttataagtccctatgggatatcctaagtccataaagtcaccatcctttcaacattaccctacttattactctagttatatttaaaatgaccctggtgctaatctttttctcacctattcaaaatgacattaaaaagtaattatgcactaaatttacagcccaaatcccaaagtttcctgttacataaaatgaaagcttatgtatggcataattgtttttatttttttcctgtttttacattattaagttcttgattagtctggggtattgtagccaaagttaccttacaaagtaagtttcactccactttaaaatctcacatgtaccatattgggttttaggcatttcagtaagataaatggcttatcaccaccactgtatcttgaccaagcagtgatagcagaaatgaatcttcaaccraagagccatttttctaagaaatgaacattcatatgtttaataatgtcattttacaataagcattatattcttgctattttctccaa

SEQ ID NO: 903559 - DNA, 416 bp, Homo sapiens
tttactgcatcatattaatattttcaatggtgcactaatccaagaaataaatgtgtcagtttctatggctacactgtaatgggcatagccatcagagagtgccttaaggccacataaaagacttaatgtacagattgaatagaagcacattatttattacgaagctatcaagccgagaaatttagcaatctcattttttagatttgctcatttgacctgggccaatttgcctgactgataatattgaatatttagtatcacaatgtttttgcagttttaaggataaagtgtttcagactaatttgattcagagcagtttattgaattgaatgattttaygtccctggaatctttattaacttcttttttaatcttagtgacttaaaatttaagtgggactaaggaatagtctactt

SEQ ID NO: 903560 - DNA, 591 bp, Homo sapiens
gccaaagtagagcttgggccatggattcagagggtgcaagcatcaagccttggcagcttccacatggtgttgagtctgtgagtgtacaggagtcaagaattgaggtttgcaaacctcagtgtagatttcagaagatgcgtgaaaatgcctagatattcaggcagaagtttgctgcaggggcagagctctcatggagaaattctgctagggcagtgcagaagggaaatgtagggtcagagctcccacacagagtccctactggggcactgcctagtggaactgtgagaggagggtcatcattttccagaccccagaatggtagatccactgacagatttcaccgtgcacctggaaaagacacaggcactcaatgccagcctgtgaagcagctgagagggaggctctatcctgcaaagccacaggagtggagctgcccaagtccatggaaacctacctcttgcatcattatgacctggatgtgagacatggagtcaaaggagatcattttgtagctttaagatttgacttcccctctagatttcagacttgcatggggcctgtattccygttgtttggccaatttctcccatt

SEQ ID NO: 903561 - DNA, 612 bp, Homo sapiens
atgctggttcctttgccattcaaaaggggatcattgataattgctamtatgatatttcttacttagagatacaaatggaactaagctaagctcacaatgggagactcagtattttcatacacaaattcatttatgcattaaattatttatcaaaatggtattgagaccccactatgtgccaggcagtgaaaggaagtggtaccaagttgaaccaggtagtgcttgtgcttaaggaacttatactgggatggtgagcaaagctattatgaaaaacagaggcacagtgtgctccagaagtagaaaggaagggtggtgaataaggctattatgaaaaacagaggtacaggtgctctagaaatagaaaagaagggtattacagagagaagattgatgagaggcttcctagaggaggaaaagcttgaactgagttttgaaaaataggacctagcccaagaaaagggagaataaatgtgaaaagaagcattccagttggagcaaagtcatatgcaaagacatgagtcaaaaagagtgtttgcttagtgaaatgaaaatactgtggtcatttggtatgtctggagcataaagtacatgtagggtgggagggtcggggtc

SEQ ID NO: 903562 - DNA, 695 bp, Homo sapiens
ttgttctacaaatctacaagtagctgataatcttggcctacaataggaaaatgctagtataattgatgggctaggaggctgcaagcagtaagtttaaatttggagccaacacatctgtatttaaatatctgacaatctcattgtttgtcattcctgtctacaaaatggcaaaaatgttctgtttcctttctcatttcacttaaaactgaaaatagtactcacacaatagacattttgattaaaacattgtcactagatggagcaaaacagtagattaaagaaatctggcttttgtcaatgatgagctaagaatttaaatagaacaaatcttgataaatatctcaagtgtaggtcgccaaatatgagaaaacagctttaggattttcagtaaggaaaacactatgaggatttcattcattaattcagcaaatatttattaggtaacaaggtagcctactctaagtgctgggacggagcagaaaacaagacaggagttgttccagtctcatgtaacattcattcattctagtcacagagatgaacagtaaccaaaacagggacaaatacttacataatcatagatggaagttttacaaaaggtgaagggcaggatgctactgaaatttatcaggggtaccattctactctgaattatcartgaagacatcattgggagacatttaatctggtcccta

SEQ ID NO: 903563 - DNA, 601 bp, Homo sapiens
cacatctaatttcaagggaaagaagacttgtaacccacttgtacctggaagtagagacctagctattgatgaacattaatgatgtctacttcatgcaataagagatttttggggtctgagaaattgggtgaccaggagtggctacctctagatatgaaccttattagttattagcagcagcatttccaccacttattatttttgtacctctttatattctacaaagggtatccacagcttacttgatcccttcagtaacagtaactgacatatatttttaaaccggtaacaaggtagctaccaggcactttccatatgttgtctcacctaattctatgagcactgtattactataaatccccgttttacagacagagcaactgaggctcagagaggttaagtgactagcccagcgttacacagcagtaagcagccatgcttccaattctagctgtgcttttctcttacggaaggaaaaaaaagggttgacaagtccgagatggttgattatgtgaaactagtcacttaagttagccagaaaacctcctctttgaatgaytaagtagactcagtgatcgttttaggcaaaatctatgatttc

SEQ ID NO: 903564 - DNA, 601 bp, Homo sapiens
cacatctaatttcaagggaaagaagacttgtaacccacttgtacctggaagtagagacctagctattgatgaacattaatgatgtctacttcatgcaataagagatttttggggtctgagaaattgggtgaccaggagtggctacctctagatatgaaccttattagttattagcagcagcatttccaccacttattatttttgtacctctttatattctacaaagggtatccacagcttacttgatcccttcagtaacagtaactgacatatatttttaaaccggtaacaaggtagctaccaggcactttccatatgttgtctcacctaattctatgagcactgtattactataaatccccgttttacagacagagcaactgaggctcagagaggttaagtgactagcccagcgttacacagcagtaagcagccatgcttccaattctagctgtgcttttctcttacggaaggaaaaaaaagggttgacaagtccgagatggttgattatgtgaaactagtcacttaagttagccagaaaacctcctctttgaatgactaagtagactcagtgatygttttaggcaaaatctatgatttc

SEQ ID NO: 903565 - DNA, 613 bp, Homo sapiens
gcataatgcttgttttccttggggagaagattttgagacttcckcatgtttcaataatgtccccatgtctgtatggagatccaaataaatgctgtgtgcctgatagttttggcctcttaaacagccatatcttatacagtttagtcaatgacaaaaaatcatttacccaaattattctgtctgataaggagtttggagcaggtaatttcaggaatttttttctgtctaaatggatataataatcaagaagacacttgtagaaataattccatgcagagctatagggaacagcttcaagacttaaatcttaattacatcagaaccagttatagacatagttgcctaaactcaaaagttttcaacaggttaaaaaaaaaaaaaagtgaagcattttaaaaataacaatattcaactattcaaatactgattattttagatttatgcctttaaaattctaaatgaagcctattggtcaaaataatagtgattcagcttttaggttctgaaatcagatattctgggtatgaatcctggctttaccactgttgggagctgtgtggacttgggaatatttgtaaatacgcctcagtttctgcagctataaagtggatat

SEQ ID NO: 903566 - DNA, 694 bp, Homo sapiens
cacagggcacagcatgtgttgttgataytaagtttgtggacagcaatggtacaatcccaaggacttgtataagtggcctctacctcattaaccatttccttgaacccagaccatcagggagctagtgagctgattcaagagaggaaagaacaattctccattcaagtcagacatccctcaaggggaacatgactattctgactcatttgagaaggggcaaagaaaaggatatgaggtggaaacactattatctgtaaagtttagctgatggaagaaaatggtgtcatttgcttaactttggaaaatgcagtgggtctctgggccctgagggtggtatgcaaaataagcccatctctccacctacagccttcccaaaaaacaggctgtaggcgtggctgctttttaagaagctggatgctaacttcagatggcacagaattcaagaccaaaactgcaataacttattagtcatattttccatcttcagttcctttgggggtaaaaataccacgaagaagataaaatggcttttctcacggtataggtcattgttgtgttttctgttcaaaaaaagcccacacaaccacattctctattataaaaagtagtacctctcatagtaaaagcctgctctacagttacagttttcgtttcagaattaacaatccattagctcaaattaatattggctgca

SEQ ID NO: 903567 - DNA, 597 bp, Homo sapiens
atatgaattccaaggagcacaatgaaagggtctcaggagttgaaggatggggcaaaaacaacaatacagaggcacgtggggttgcaagtcaggagggtgcaatgatctgggaaytctgggtttcctgtgatggctgccaccttctgattaaagagcataatgagattagactcaatggtatcaagcagagagtagtggcaaaactgtgtgtcaggtcttaaaattgagattaattacatataaaagtcaagcaattatgcaacaagcacacgaaaaaaatgcccaacatcattactcatgagggatgtgcaaatcaaaaccaggtaccgtttcacaaccactaggatggctgtcattaaaaaaggagaaaatttttaaaagctggcaagaatgtggaggaattggaaccttcttataccgttggtgagaatgtaaaatggcacagcttgctacgaaaaacagttgggcagttcctcaaaaagttaaacataaaattaccatatgacccagaaatttctaaccccaaataaatgaacactggtacctaaacaaatataagctcacaaatgttcacagcagcactattcacaatagcca

SEQ ID NO: 903568 - DNA, 610 bp, Homo sapiens
tctcaaataaggctatataagtatttgggccccaytgggatattgagtgatcactctgattctcccctgtgtacacattaataagttttgatgcctttttcctactaatctgcattttgtgagttgatttttcagtaaaccttcagaggacaaaggggaagtttttcccttggcccctactgtcagaggcatttgaaccaaagtgaataggagctgggtaaaataaagctgagacctactgggctgcattcccaggcagttaggcattcttagtcacaggatgagataggaggttggcacaagatacaggtcacaaagaccttactgataaaacaggatacagtaaagaagctggccaaaacctgccaaatccaagatggtaatgaaagtgacctctggtcatcctcactgttcattatgttagaatcggtagttaggcagacatgagcagggcaggggagggccctgtctccaggaatgtcaggtgatcatcagatgatggtcaggcagttgttaaactgtctctctaaaataacaattggttgtagccagtgccagagaaagacaatctcccaatagatagaaaacacctgaaactaactgggcacca

SEQ ID NO: 903569 - DNA, 609 bp, Homo sapiens
agatatattaattctcttatccactgcttgttacaatagctctttaacaatatgctctgctttctaaattaaagattaagtattgcatgcaattagtmatgataaatatttataatttaagtacattattaactacatattttttaaagttgaaataatctgaagttaggcttttgtagaatacatttttatttgatgcctgtaacagttattatatgggcagaaactaggttacaattttgtagaggtcagcttacacctgtcactatgtctcagcaaatgcctgtcaccaggtactgatagaaaaaaaaaataagttcacaattagcctctttatcaagaatagaaataatgactgcctctgatgccctctttaaaaatgtagcctgaggaaatacatcaaaataaagcttttttagggaaaagaggcatataattttctcaagagcagagcctagtgcttggaggcaaatacatttagtcagtgaataggctagagagactaaaaagtaacaataactgtgttcttaaaagtttactactatgatgacataccagttttgttttactttagttttgtttgtttgtttgtttgtttaagtggtctca

SEQ ID NO: 903570 - DNA, 660 bp, Homo sapiens
acgtgcagaatgtgcaggtttgttacataggcatagttgtgccttggtggtttgctgcacctattgacccatcatctaagtcccctccccttgtcccaaccccccaacaggcsctggtgtatgttgttcccctccctgtgtcaatgtgttctctcattattcaactcccacttatgagtgagaacatgcggtgttttgttttcttttcttgtgttagttcgctgaggatgatggcttccagtttcatccatgtccctgcaaaggacattatctcattcctctttatggctgcatagtattccatggcatatatgtaccacattttcttttttcattttttttttcaggggggacttagttttgctcttgttgcccaggctggggtgcaatggtgccatctcggctcactgcaacgtccacttcctgggttcaagtgattctcctacctcagcctcccaagtagctgggattacaggcacccaccaccatgcctggctaattttgtatttttagtagacacggggtttctccatgttggtcaggctggtctcgaactcctgacctcaggtgatctgcctaccttggcctcccaaagtgctgggattacaggcaggagccaccacgcccacccatgtaccacattttctttatccagtctat

SEQ ID NO: 903571 - DNA, 649 bp, Homo sapiens
cctaattgcccgtactgataggggaaaataattgagccgggttaactcagactacaatctttttccattacaatgcagtgttttgtgactttattttattcttaccttcctaatgatgaacttgggttcctcaaacataccccagccaggctgttgggggaactcagccttcagtatgttggggcagagaaattggaattaatttctcattgatacttaaccaaggtagatagcctgagaatatcaagaatggacatttaataagttgttggaaatgcatacataataccaagaaaaatctggtgagaatgggttaataattttatcttccaaaaatattccttggacctgtgctatacttggtatggaaaaccgtgagcagaagagatagagaatgtaggaagggcaccaggggctgtgaattggggctatggcatggctgtccccgactcctgggtgcagaagctacagggcaggtattgatctggtgggcagcctccagccctcagctccagcacacccactccagtgagcccctgaggaggtgagatggggtcagagccgagctgtggaggaggaaaacaagcttgagaygatgagcagagcaggagctgggctctctgccctgagaacagaaggctgtggaaac

SEQ ID NO: 903572 - DNA, 624 bp, Homo sapiens
gtttgggggacttcaggctaggagtaaatacctcataaataytgcttcagatctagaaattggactggtagcctgggaaatggttgtgcaatgaaagaaactcattttagcaggaaataatggacaaatatgttagcttgaaattaagtgcagagatatggaaagacacatgaaaatccagttttgacttcatgagttaccaacaagcaaaacaaaattatttcatacaaacgtgtttatcacggtagagttatgaggataatacacgagtacacataaagaacatcaaagtcagctctggcaaaggctgtttgatgccctcagtctctcctcttctatataataaaattctcaattttagttaagtagattacctgaatacagactatacatctcaattttttctgctactagttgtggtaaaatgactaagttctgataataagtgtaggaaagtggtgtggaaatttctgaaatgtgtccttaaaggggaagtgtatttccttcttatttttgcttcttggatgcatatgagattgctgaagctctatctggaactctaaggcccctgatagctcactttaagggtggtggaatgcaaagctggaaacagcctgggctccc

SEQ ID NO: 903573 - DNA, 666 bp, Homo sapiens
gtggaatcttcagaattttctatgtataagattatgtcatctgaaacagagacaatttaatttctctattttcaatttggatgcctcttctcttcttttcctttttatttttatttttatttttcttgcctaattgctctggccaaaacttccaggactatgttttgaagttcttaaatggggatgattttgccccgggatcatttacaatgtctggaggcatctttgatagtcatgactaagggtatgctatgaacatctagtgaatagagggcagggataatgctaaacatcttatgattcacagaagagcctctgacaccacaaaaagcatctggtccaaaatacctacagtgctgaggttgagaggccctaacgtagttaatctttcctaacccttgtacaatttatagatggccaggtcagtgtgaaaggaaaagcaatacctaaacatgtcctgtgcttattgtggtgacacctcagtgtcgactctctagacagcacaagcatctacccagacccaggaatgttccttcttctttgttttatatagataagtaactatgctcattggaattctgggtatcaatcgggttgaagcaaggaaartgaaggccagatatttcactctctagtctcttagtaagaacctcacaatagacttgg

SEQ ID NO: 903574 - DNA, 615 bp, Homo sapiens
ctgccgactgtctgggctgcagtgccctggcacatttccttgcagagaaaggacagcaggagtgggcttcctggttccctttctgttttctctgargccagcaggtgcctggcgtggcctttgcgccccctgctggtcgttctggcagcacacagcctcctgccttgccagtgtgaaacccggtgctgtcttgttccccgggtggaatgcaagagaatgcttgggaagaactttgttacccaatgaagcctcctggttctctagtccctggtagcctgtcctggttgccaggtgcttgtttgcattccaagctccacattccccagggtccagtgtagtcttgtgtctaagctggtgtctggccaccaaaggcaggcgtgcagggccttggctactgcgctaggtctgctgatggccacaagcctttagtcccagctctgccttagcaatgggggtgtctgaaggctcaggggatacacaggtcctctaggttcctggggagatgatggtaagtaatccttcttaacagtctttaaaaaatacataatttaacatggacaaagcaagtaatcaaaaggctatctgacaaagtgaaaaatattgtaaaattcttaa

SEQ ID NO: 903575 - DNA, 630 bp, Homo sapiens
agtgaagtgtctttgggattgattaagactgttttgcatgacttggtaaaggtaaaatgtcatctctcttttcttcagacaaatagatttggttatctttttttttttttccccccccctttctgagatggagtctcactgtatcacccagactggagtgcagtggcacaatctgaactcactgcaacctccacctcccagtttcaagcaattctgcctcagcctcctgagtagccaggatcgtaggcatgtgccaccacgctccactaatttttgtatttttagaagagacatggacctactcttagcacctactcttaggaccaaattaggaccataacaaaaaaatttattgaaaatgatcatattctcttttactataaactttcagactataatttcttatagtggtctggtcttcctaattatgtttgaaatcctgacttttatttctttttcaattcttaggggaaactaatttaattagtaagttatcaaaatcttttgatctttagtaagtactcgttatgttggtrctttataagctaaaaataagaaaaacaacaggaacccctgaaagattcaatgaaactttctaattctagacctaacgtttgttgagtgacttga

SEQ ID NO: 903576 - DNA, 587 bp, Homo sapiens
gcagaatggatatgacagaataaaattcaatgaacttatgatagaggaatagatattatccaatccggacaacagaaagaagattgaaaagatgaaaaagtcttgggggttatgagacaacgccaagagttctaatatccatattatcagaattccagaaggagcaaagggaggtgcagaaaaaatatttaaagaaataacagcttataataaaacaaatttgatgaaagacataaatgatagattcaaatagttctgtggaccccaaacaagatataacaaaaaattccacattcaaatgcatcctattcaaagtgctacaagttaaagacagaacaacaatgaaacaattgtagatttattgtgaggattcatggaggccagactagaaagtaagaaataagactctcactatttcacaaatgataaattctgaagaattcacaataatacatcaagattgcaggctrtaaggtcaacacacaaaaattaactatatttctacataaataaattggaaacaaaaaatgctactaatgatcattctgaaaaagtgaagtatttggatataaatctaagaaagtatg

SEQ ID NO: 903577 - DNA, 647 bp, Homo sapiens
accatttggaaatgcttttagaaattcaaatacaaagacttatgattgcctgacattgatttcatacccccatygaccaagtcccactttcatctttgttccttgttttcttcattttaatgtattccatcctacaattgtaataaggtacccaagctgtgcatttcagggtcattattgcatttcttaggaagttaaagcccccatcctttgaccttatgctttctgataccacccaaggtgtgacataattgcccgcaaatgcgctgtctgtcatgtcttattgctcaaatgaaacccacttccacagtaggacgaaaagagaggtgggtagagctcctgctatttgcatcagcacttgtcctcaggaaatgcggaatcttggcactgaacgaaagtgtaaaaatgacaaatttgccatctaatatggaccactgcactcacaagactgcaactccttacattaatggagattaggatataacttttttaatttggagcctcattacacagtataaataaaaatacagccccaactatatcatctttaattgcctctagacagaatgctgattatctactgaggatcttggccatgtgtttctgaggaaccagcagagtttgttccctgctttgaaagcaaaatc

SEQ ID NO: 903578 - DNA, 613 bp, Homo sapiens
atactttttttcttgttattggtcatctgacgattccaagcttcagattcgcttcaatgacagcacatgcgtctgcagctacatgcatttgtgaacctgtaaattcttaactgtaggtgagaactacttccagacatactgtgttctgggtgggctacctctttttttctcatgtggatctactgtgaaatatgaatagtgatggatctgagcatagagttgaatgtctgtaggtgttttcatgtagaaagctgaaacaatttgctactgtttctgacatagaagccacgcagtttcttctctagtttcctacatctcaggttttcctctcactgcatgaggtattggaggagcaatgtgcaagaaatcagaagacctggtctctgatactttttctgccatttattagctatttcccactaaaaaagaaatcacttggcttattgcaacttcattctctctttgatgcaaagaagagagataatagtacccaactctctggttgctataaaaaccaaataagtcatgtggaagtaatytgaaaactataaaggacttttaatgatgctaaaattcaaatttattcttgttacaccctgggtagaacccttca

SEQ ID NO: 903579 - DNA, 665 bp, Homo sapiens
ttagcattccttattgaagaacatttaataaaagatcagtctcttttggactcyatccatgaggacttaatttctgaagcatgcctaggatttcattaaatggcagtttatctctaagcaaacccatagcgcagacttttggtaagagcattaaattgttaacgatatagtcacatctacttccattgctctcactcccaaacatcattcttctgttaaatgtatgattccatgtttaccttttcccacaaatacattgattttaattactcgtctttccccttttctttaatttattcttaagtgatctaaataccagttttacacaggcagaaaccatcttgttacagcaaataagaaagccattaacctcctctatgttgcttgacagccaaccagatagttatggacctaagtgcaattggttcagtctaattattggtaagaaaaacacctcaatgttagttctgccaaaattagtatttctatccttggcatccatattacaaaatccacttgaccatgaaaagattactccattcgatagttatctgtaaatacatttctcagctaattcataccataaaaggctaccatgatgctcataattagacatttcacagtttaaatatcacctttttttttcttctgaccaagatgaaaaa

SEQ ID NO: 903580 - DNA, 602 bp, Homo sapiens
caaaggctcaggatacaaaactattgtgcaaaaatcactagcaatcctataccccaacaacagttaagctgagagccaaatcaaaaaagaactcccattcacaactgccacagaaagaatgaaatatctaggaatacagctaacaagagaagtgaaagagctctgcaaggagaactacaaactactgctcaaataaatcagagatgacataaacaaatggaaaaatattccatactcatggatagaaagaatcaatatcatgaaaatggccataccatccaaagcaatttatatattcaatgctattcccattgaactaccaatgatgttcttcatagaactagaaaaatctatttcaaaattcatatggaaccaaaaaagaccccaaagagccaaggtaatcctaagaaaaaagaacaaagctggaggcatcacattacccaagttcaaattatactacagggctacagtaaccaaaacagcatggtactggtacaagaacagagacatagatcaatggaacagaataggaaayctagaaataagactgcacacctacaactatctgatctttgacaatcctgacaaaaacaagcaatagg

SEQ ID NO: 903581 - DNA, 593 bp, Homo sapiens
atggacctaatctgctggtaaaatgttccagtayatgagagtccagaagaccctacaaaatctcattagagtggcctgattacttacttctcactgcttgatcaaattctcagaagaaattgctgtgcctctacagcttttaagaaaatttacatctttactttattgaattgatatgttaaaaagtgatatataattcctttatacctgttggcttaataggtattccaacatgcctcttcctgaatacccttctatctttgcagattatggtaggagaaggaattctctactgttgcctctccaaaagaagaaatggggtcggactagagcccaacattaatgctggaggctgcaacttcaattccttcctcagacgagctgtcagattcgttggtgggtgtggggaaccacaaagaaaagaaatgctttttttttatattgaaatgttatatttaattatagatattaagtctcgtacgctataatttagatgtataatttcagtacatgatgagttttatattgtacaagaaactgttaaaacaccaaaatttgggttttgtatctgaaatgtgttatttacagttgta

SEQ ID NO: 903582 - DNA, 638 bp, Homo sapiens
catttatatgagtgttagtaacaaaacactttagactttggagttatcaaataattgcttatgcctctagacacattggggaacattaaaatatgtggctgtaagtccaaatgctaagatagtctctttggaaaatggataatcaccccagaagaatactaaactaccatgcttacctctaggggattaaaaaaatgtctcaaatctgaacttctctcaaagacctaataccaactcttcatagggaaaatttctgtgttaaagatcttgttaagaaaccaaagtttgatcctgaagccacaatcgtccatgatgcaatgtttcaaggtaactgtgtcacttgtcctggtgccacaaggcaatgagaagacttggcttggtgtgttggagaccagaacttgggggtgaccaaacacttgggtatatttagagtctctgtatacttttcctttttttttcttagagactgtgtctctgattgagtaaattaaaacaggggaacctcattaaagctattaagaataatttaaagttcaatagtcttcttggakggcctgtgtcataataaagaaaagcttatatttttgccagtactacaactgctacgggcatgattaggctggagccttctcaagcac

SEQ ID NO: 903583 - DNA, 561 bp, Homo sapiens
tgttcatagactacatttatactgagattcacctactggtacaagcagaccattgtccggcctcttgctagtattgcctcctgctccagcaggacacatggatgaacatagtgtcctgtgtgtagtaaagactctatgtctttgatgaattcatttgaataggctttgtgccagtattaggtttcttttacaactgggatcttgacacttttatgttgatggttgaccttgctttaccttggtttcaggtactgctataatttttggcatctaactgttggtcttgactttacttaaattctaaatttccctcatgaccctcttattggtctcccaaatatctacctgtctaccaccatcctcactttcccactgtgttgaagagaaattgaattcaacccctctagaaaagcagcagaccattgttttcgttgttcctttrataggctggtcatgaaaacagtaaactcttgatttaactggaggtctttaatatccagagagtgaaagagctatatctgagatttttgggctggctcatttattctgccatctctcaag

SEQ ID NO: 903584 - DNA, 633 bp, Homo sapiens
catctctctcaagttcaaagttccacaaatctctagggcaggggcaaaatgccaccagtccctttgctaaaacataacaagcatcacctttgctccagttcccaacaagttcctcatctccatctgagaccacctcagcctggactttattgtctatattgctatcagcattttggacaaagccattcaacaagtctctaggaagttccaaactttcccacatttttctgtcttcttctgacccctccaaacaattctaccccgtgctgttacccagttccaaagtcacttccacatttttgggtatctgttcagcagtgccccactctaccggtatcaatttatggtattagtctgttttcacactgctgataaagacatacccaagactgggaaatttataaagaaagacttggacttacagttccgtgtggttggagagccctctcaatcatgcaagaaggtgaaaggcacatattacatggaggcagacaagagaagagagcttgtgcagggaaactcccccttaaaatacatcagatctcgtgagactcattrgttatcacaagaagagtatgggaaagacctgaccccatgattcagttacctttcactgggtgcctcccacaacac

SEQ ID NO: 903585 - DNA, 596 bp, Homo sapiens
caccgatgcaaaaggtgagctcccatagccttgggcagctccacccttgtggctttgcagggtacatcccccgctcctgcctgctttcatrggtgttgagtgtctgcagctttttcaggtgcatgctacaactgtcggtggataccattatgcggtctggaagatggtggccctcttctcacagatccacaaggcagtgtctcagtgggcactccgtgtgagggttccaacaccacatttctcttctacactgctttagctaaggttctccatgagggccccacccctgcagcaaacttctgcctggagatccaggcatttccatacatcttctgaaatctaggtggaggttcccaaacctcattcttaacttctctgcaccaacaggcccaacaccacatgtaagctgccaagacttggggcttgcaccctctgaagcaatggcctgagctgtacattgaccccttttagccatggctgaagttgaagcagctgggatgcagggcaccatgtcctgaggctgcatagaagagtagggcactgggcccagcccacagaattatctttttctcccaggcctccagtcctgtgatggg

SEQ ID NO: 903586 - DNA, 634 bp, Homo sapiens
tcaactgtgttcatgttacagagaggccaggaagaggcagacagcaaagttaactctagcacaggagatagtttctatgatatttttaaatctgagcattgattgtatgccatctccagctttgaactggttggaaatatggaaagaagtcacgtattgacatcttattttaaagttagtgacagttgttcatcttttagatgtaaagctgttacagagataatatatatttccttggttttatagtttggctagaactcttcaattacatcattttgtagacagcctcggtgtaacaggttaccaagaggctggattcctatagtaccataccagaaagatacaggttttttttttttttttttttttaacattcctgcaccatgattacatcaatagattttaataaaatagtttaactggcagaggttcagagatggaagtggtatccacaggtatagctagctaagtcctataaagtcataaaactgtgtttgatagaagttatactgctattctagtcatgtgcaatgaataaraaaaatttgatgtgtatgcatgaaaatattcaaagaaacagaacccattcttagaaattatataatgacagatcagaggcaggatgtatatctat

SEQ ID NO: 903587 - DNA, 631 bp, Homo sapiens
tcctgaggattccatgccctcaccctcccacaggtactagagtgacctgctaaattgactggmagccctggcgaaactcaccgggaggttaccaggtcaagtaaattgacagcaacgttttgcagcagaagtacaagaagctgacctaaataactaaatgaaggacaggaaaatatgtaacacagaataagatttacaaaggaatatggagtttcaggaggggaatgatgttatgtcccctccctgaagaccacaactgcctggctacaaaccctaagtccacaactgactagcttttaacttcaggcaagttgcttaccctctcactacctctgcttcttcactggcaaagtggaaataataaaataaagcacctaattcaggacactgtgaggattaaatgaagaaatgcatgtaaagcatttagaacagtgtctggcacatagcaagcactcagtctgggcttattattaaatttcctgacaaaatgtttttattcttgctataaatgagggctcctctggccgggcacggtggctcatgcctgtaatcccagcattttgggaggccgaggcaggtggatcatctgacgtcaggagtttgagactagcctagccaacatggtggaacc

SEQ ID NO: 903588 - DNA, 600 bp, Homo sapiens
aagcctggtacccaatagttttttcttctaatcctctcccttctctcaccctcttacctcaggtaggccctagtgtctgttgtaccctcttgctgtccataggttctcaccatttagctcccacttatwagtgagaacatgcagtatttggttttttgttcctgtgttagtttgctaagaataatggcctcttgctccatccatgttcctacaaagaacatggtctcattctttgtgtggctgcataatattccatggtgtatatttaccatatttttttttttttggcagagtctcactctgtcacccaggctggagtgcagtggcacaatcttggctcactgcaatctccacgtctcaagttcaagtgattatcctgcctcagcctcccaagtagctttgattacaggtgtgtgccaccatgcccagctaatttttgtatttttagttgaaacagggtttcaccatgttggccaggctgatctcaaactcctgacctcaggtgatgtacccacctaggcctcccaaagtgctgggattacaggtgtgagccaccacacctggccatatttaccacattttctttattcgatcagtcat

SEQ ID NO: 903589 - DNA, 653 bp, Homo sapiens
caatgagatgaaccatgtacctcagttggaaatgcagaaatcacccatcttctgtgttggtcttgctgggagctgcagactggagctgtttctatttggctgtcttgccagatccctgtcagtctagtgtatattttcaaaatggtagaaaagaggattttaaatgttcatgacatgaagaaatgttaagtgtttgagataatggatatgctaactactctgatttgattattacacattgtatacatgtatggaaatatcacactatatcccattaacatgtacaattattacatgtcaactaagaaaaggaaaaaaatatttgaacaaatggaaaaggcaatcatgtaactgcattgaaagggaaatgctaaagtgttgatttcttaatttatggatcttaaatttttaattaaactttttcaaaaagaaaggatgctagaactattggttatccacctacaaaagaacagagttggatcccgttctcatggcataaacaaaaaaaaatgaactcacaatacatcataggccaaaatataagagctaaatctataactgttagtagaaaacatagggtaaatcttcatgacattcratcaggctatggtttctttcctatgacatcaaaagcctaattgacccaaaaaaat

SEQ ID NO: 903590 - DNA, 617 bp, Homo sapiens
gtattgacactaaactccgtgagatatggtggggccttttcttattatcccgtagagctcagtggatttggcgtagctatgtggatgacggttgaaacaaaaaaccatgataggctatggatcttctaatattcacaaaattttattgaacaactttgttgaaatagatgattatctgctgtttatcggggagaagaaaagcttttcaaattattacattttgatgttgaagaaaaattttaaatcacatgcagatgcctgtccagaaaggttaattttaaaatgatagcctttgcagattctactagggccggcaacaatcacagtttcaagaagaattcaggcaggttatgctaactactacataaatggctaaaactggaaatgatattcaatcttctatgtcaggggaaaccacattctatttcttttcctatagctatattgtttttgtatattatgtgcatataggaattgtgaaaacaataattttaaatttctatgtacatttaaagaattaaattgttttttaaaatcrttcaatatgggccaggcgcggtggctcacgcctgtaatcccagcactttgggaggccgaggcgggcggatcacgaggtc

SEQ ID NO: 903591 - DNA, 658 bp, Homo sapiens
tgctgcacccatcaacccatcatctacattaggtgtttctcctaatgctgttcctcccctagcctcccaccrcctgacaggccccggtgtgtgatgttcccctccctgtgtccatgtgttctcattgttcagctcccacttatgaatgagaacatgcggtgtttggttttctgttcgtgtgtcagtttgctgagaatgacagtttcccttctgttcttattcttatcatccaaagtggaacacttctcagtgaagggtgtgttgttgacagctcatctaggacagtggctttgcctggatttgattctggcaaaccaggctgtgtgatcattgtacttatggagtttgaatttctggaggaagttattggagaattttaatgggtgatatatcatatttaatctcctgtgactgttgtgtggagagtagaccctacaatagagtaactaacatcagttagttggagatggggtgagtgaagcctattgatggacagcggtaagatgaaggtaacactggattcttcctttgttattgattagtgttagacctggttgagattggtgtataaatactactgacccgtcaccacacacacacacacacacacacacacacacacaccaatttgcttacttttagaggccccatgctacat

SEQ ID NO: 903592 - DNA, 633 bp, Homo sapiens
tttactttgacagaatgctggctgggaccaggggtgcctgtctcaagctcaggaaaggccatggtcagtggcatggatttgggtcttatgcagagacgtgcaaacagagttgaaatgaatgggcctgacaagaaagagaaaaagcaggagacacagcaatgagaactgaagagtgcccatgtttaaagactaaaagagggagaagaaatcataaatgagatgaggaaggagctgtctgccaggtagaattttttaaaacctggagtttatagggaaacgcaaaagggaattacagaagttagaaaaaaaggaagatagaaaaaaaaaaaagcaaagatgactatatatctactatctggactccagtcacctggtgtccttgaaacttaggacatacacatttctattgtcataccacagcatagtcatcctcaggtcatgggtgcaacacaacctcaaggccatagtgaggagagagcaagtgttgactggaatgggctctcacaggcagatcagtgtagaactttgtgtacacaagttaatattttttgaaggaagcattttggagtttgtaagaggaaatcatcaatactaaggggaaaaaaattarcatgacaatatgaaattccttta

SEQ ID NO: 903593 - DNA, 607 bp, Homo sapiens
tgtgttgtctttaatttctttgagttttctcaaaacagctgttttgaatttttttgtctgaagtgtcatgtccccgtttctccaggattggtccctggtgccttttatttggtgaggttgcgttttcctgsatggtggtgatgcttgcagatgttctgttagtgtctgggcattgcagagttaggtatttgttgtagtcttcacagtctgggcgtgtttgtgcctgtccttcttgggaaggctttttaggtattcaaagggacgtgggccctaagcccaataacactgtggtttttgcagacttgagaggtattactctggtggtctcagattagatcaagaaaatctctctggattaccaggcagagactcttgttcattttctttactttttcccaaacaaacaaatggagtcagtttctctctgcctctctctctctctctctctctctgtctctgtctctgtgcttagccatctgaaactgggggtgtggtgatgcaagcacctctgtggtcaccaccactgggtgcactgtgtcagtgtcagacctgaatccagcatagcactgggccttgcccaagatccttcccttcagggtgatgaatt

SEQ ID NO: 903594 - DNA, 612 bp, Homo sapiens
ggatggtgttggcttcattgattgttgattctatttcacattaaaactaattttaaatgcactatttacaacaagtttctacaaatttactaaaattcatgggattgtttcctctgctgatttacmtattggtttataagtctggtaatttgcagtgacactatttctgatgtattccatctccatctcctaattaaagtaagttttgcattttttctgaactttcaacatgttctctgtatttttcattgaagctaattctgtttcctctgctcttttgggagcctgataattaaatacatttcaggtgccaacaagctaaatatccccctcccttgcaatcctgtcctattttcttcccttgtttattatttctgttttaaatatcactatatcatcctcaacaaaagcaaacatgtattgaatgtctgctgtggtgatgacattacagtcagtaacatgaagatacgtagactgagatgcgtacagacacatatatacatctatatatatgtatatttgagagtcaaagttcacttcctttgtgttgttagtctcccttgtcttatttaaagcaaaactatatttccttttagcttccctccttttgaa

SEQ ID NO: 903595 - DNA, 626 bp, Homo sapiens
gtgtttacttaatgaaagtgaacactcatgtcataccctgtcatttgtgttctctagttcttttgatgatgcaccttcctattgattcttctagacacagaagattctgctttaaaaactgtttgggctcttccttttttgtccccagctagtgtcaagcatctgtcctcctaggctcccagaggttattcagtatctccctgaggctgctgtcccccatatcctcatcttatgccaccctaacttctagaaggaagagacagacaaacactgaccactctcctcaccatcacattaaatagcaaaacagaagagaaggggaacacttattaaggctgcacccaactcatgcacacacacatgaaatcatctgtttgttaacaaatcagtcttcatgcatataatcaacacattaaatgccttcaataggcctatgaagttggtattatctccatttcacagatgaagaaactaaagctgagaaagatgaattctttccytgagattcaacctgtacatattagagctaggattcaaacctaggtctgcctcaaatcaaagccagtgagctctctattactggtaccgagaatgggttcaaaaataaggagaatgggttaccatta

SEQ ID NO: 903596 - DNA, 592 bp, Homo sapiens
ctcccctgggctcggggacccggccatgggccgaggcgcgggccgcccgcccgctgggagccacggcttagsagccgaccgctagctgcgccgccgcccggggaccggcatgaggaccgccgcggggggacgtctgcggcccgcgtcggcgctggggacaaaggtgcgtgtcgttgtcgggtccgggctctctcgttagccttgccctagttttgcacttttgaaaaagttgtgacaacaggaagacagatgccgggcgtagtttggacactttaaaactgaaccatgaactgggaagtgttaactgcagttgagcgcagcgtcggcccaaacttcagcagaccaggtagaatcacaattttgcaaaagatcccagtcccgatcacagactccacagtgttaaggattgacttagacttggtgtcgggctcttgttgagtcactgccagctggcaaaggtggcgagtcgacacgcatttccccaaggcattgtggtggttagagatttcggttgcaagtcggtgtttagcgtactgggtcgtcccgcagcctgatttttcttgggagatcagtttccctgaagtaccaagaa

SEQ ID NO: 903597 - DNA, 568 bp, Homo sapiens
cactcagcctcaaggaaggagattaatctgttaatacgggatttggtcatatgacccaaacacttcccattaggccccatctccaacattggggatcaaatttcaacatgaggtttagaggggacaaacatccaaaccatagcaatacccttaagaacaataaccttaccaatagtacccttatcaaaaatgcccttaacaacagctttcttagcaacagtacagttactaacagcactcatagcaaaaccttaatcttcaataacacttttaatatcaatgcctttaagaatgacaatcttgaccagatatggtgactaatgtctgtaatcccagcactttgaaaggttgaggcaggaagtttgcttgaggccggcagtttgaggtcagtctgggcaatatagtgagatgctgtctctacaaaaaatttttttaaaaagtccggtatggtgacctgtgctcgtagtcctagctacttgggaggctgaggtgagaaaattgctggagcmcaagagtttgaggttagtgaaccatgatcataccactgcactccagcttgggcgacaga

SEQ ID NO: 903598 - DNA, 647 bp, Homo sapiens
cttggcttgacttttgttggtgtataggaatgctagtaatttttgcacmttgattttgtatcccgagattttcctgaagttgcttatcagcttaataagcttttgggttgagactatggggttttctagaaatatgatcatgtcatctgcaaacagggatagttgacttcttctcttactatttgaaagttctttatttctttatcttgcctgattgccctggccagaacttccaatactatatttaataggagtagtgagagagggcaaccttgtcttgtgccagtttccaaggggaatgcttccagcttttgcccattaagtatgatattagctgtgggtttatcatatatggtgcttattcttttgaggtatgtttcttcaatacctagtttattgagagtttttaacatgaatgaatgttgaattttattgaaagccttttctgtatcttttgagataatcatatggttttggcctttagttctgtttatgtgatgaataacatttattggtttgtgtaggttgaaccaaccttgtatcccggggatgaagtctaattgaccgtggtggatacgccttttgatctgctgctcaattcggtttgccagtattttgttgaggatttttacatcaacattcatcaa

SEQ ID NO: 903599 - DNA, 504 bp, Homo sapiens
cctcttccatctctacctttctctgtgttggttccattttatttgtttcctgcaatgactcatatcttgtgattgaaaaacaaggggccgggcrcggtggctcacgcctgtaatcccagcactttgggaggccgaggcgggtggatcacgaggtcaggagatcgagaccaacctggctaacacggtgaaaccccgtctctacgaaaaatacaaaaaaaattagccgggcatggtggcaggcacctgtagtcccagctacttgggaggctgaggcaggagaatagcgtgaacctgggaggcggagcttgcattgagccaagatcgcgccattgcacgccagcctgggcgacagagacagactccatctcaaaaaaaaaaaaaaaaaaaagaagaagcctggtggatattcatttctgcaagaatactcagggagttctatcatctgggaccttttctggacatggtttgcctctccaggccttcagaaccatatctttctcccca

SEQ ID NO: 903600 - DNA, 504 bp, Homo sapiens
cctcttccatctctacctttctctgtgttggttccattttatttgtttcctgcaatgactcatatcttgtgattgaaaaacaaggggccgggcacrgtggctcacgcctgtaatcccagcactttgggaggccgaggcgggtggatcacgaggtcaggagatcgagaccaacctggctaacacggtgaaaccccgtctctacgaaaaatacaaaaaaaattagccgggcatggtggcaggcacctgtagtcccagctacttgggaggctgaggcaggagaatagcgtgaacctgggaggcggagcttgcattgagccaagatcgcgccattgcacgccagcctgggcgacagagacagactccatctcaaaaaaaaaaaaaaaaaaaagaagaagcctggtggatattcatttctgcaagaatactcagggagttctatcatctgggaccttttctggacatggtttgcctctccaggccttcagaaccatatctttctcccca

SEQ ID NO: 903601 - DNA, 662 bp, Homo sapiens
tatataatattttattatgattcttttaayatctgtaaaacctaaaatcatgtcacctttctcattcctgctactggcatttttttcttctaatgcctgattagtctggctagatttatcagctttctgttgatttctgttaacatggtatgtattttttaacctctttgtttctttatatataaagtgtatttcttgtaagcagcatagaattgggtcttcctaaaaaaattatatgacaattcctgacttttaattgaggtgtttaaaccatttacatttaatatgattatttatatagttaggtttgagtcgataattttgatttttgttcttttttcttctttttttccatttggatcaaacatttttattacatttcatcttcctttctggttcattaactatgtaaatcaaaagtaaaattctaagcccatcaaccaattgaatggacccctcctctcaaacaagggcattcctaagttaacctggaaaatcagttcaggccatgatgggtagtagaggtcagacacgccacactatactcaccttcctttggaattcaggcacagctgaccagcatttaacattaaaacagagaccttacgactgatgaaacagactcttggtagccattaagataccaacatgacagacagcaa

SEQ ID NO: 903602 - DNA, 618 bp, Homo sapiens
cacacaccattggttgtttctctggagaactttgactaataaagcatcataaggtaacataaagatcttcactctttttgcttacccccctcatttatgcacacgccttttctgtagacctctctgtctcagtcttctaagctgtctgcttctaggcccctgataaacaaagcaagtctttccccactgccaatgagttcatatatgttgtcatctatggaaactattcttgccacacaatatgaatgaccaagtatatcacctgaagctctgcccacatgaaaattcctcttcaccaatgtcattcatgaccacttcttcagaaatgaagtctactaaacatgttgcttatttctttatggggggagttgtgagatactgtaatttgggtttctttatgtttgaggaacatttcagaacaccccaggtcattggacccccaaacaatgcacttatcgatacgttgagtcccagaaacattatagagtatatttctcacactcttgagtgtatgagctttaasaaggcccaccttatacagtagaattagcgcatttttaatttgcaaccacaagccaatgtactcataatctttttcttggcctttgccttcaatat

SEQ ID NO: 903603 - DNA, 620 bp, Homo sapiens
atttataaaatatttgcaataacaattttaaaagattgaggacagattagtggcaaccaggggttacaaatggaaggtatggtcagtgggagaggaataagaatggctgtaaaaaacaatgcaagagatacttgaggagttggaaaccttcagtacctgaactgtgctggtgcataaacagacatatatatctaataacattgtgtcaaagtaaatatacatacacaaacataaatgagtatacgtaaaatgatggaaatgagtaagactggtagattacattaatgtcattatcctgcctctgatactacattacagttttacaaaaagttactattgactgaaactggataaagtatacaggggatctttctgtattatttattagaattccatgtgactctacagttatctcaataaaaattttaattaacaaaagaagggacttctgccctccaaagcgaaggagtaaaagctatttaattttagattcagcaaagagttaatgctggccctacttttagctctgtctcacttggatattgctaagagaaaattgcagtttataagcatgtgaaaacgtaaactgayaagaatgttctataaatgagttttcaaag

SEQ ID NO: 903604 - DNA, 618 bp, Homo sapiens
tgttaattaaatgtttaatgttatttataagaaacataacagtttggggttacttgttcagtgtagtcaaactgtatatttatgagctattatccaaactttaaattagaaaccactgaagaacatgtgcatattgaacctgtgttcattttacaatatttgctggcataattttagtggggaaaattattcagacttatataattctaataactttggttttatgacattgttgggtatatatatatatgatttatttgatgccaaaacattggttaggaaggcaatagctaattataactttttcatggtaaatcactttcatttatatggcatggtttctactagcaaactatgaaaagtagaaactactactaataaatgcttctgtgcataaacacattcactgagcaactgaaacaaattgctcaggatcaaaatttggtcgaatcataggactctggaagaatcacgttatatattgccaattttgaatcattatcactaccactctttttcccaatttaccacagtaagtatttggtccagaatctcttcatcattgactctgatrtatttactctgtcaagcagattttgtcctttttttccttatggt

SEQ ID NO: 903605 - DNA, 640 bp, Homo sapiens
aattcctgagttacacgttattacattcatcagttattgagaagagcaaggagcctattaaaatatagggtatgtctatcaatatttgctgctttataaaattgagacttaaaaattatttattggctaatttattcaaaataacaaccgtggcacatgttaacatagtcttagaaaaaaatgaggagtggcatcatttaaacattggcaaatcttcttaatgtctgacttaacagaagacaacggaatcatgatatctgcttctgcattcaatgtattgatgttagtgaagtagatgaagaaaatccagctttgcatagctagaaagttggaaaggagagatgcttaagcagcctttttggaaaactgtggttatttttctttgatggtacaccaaaacttgatgaatggaagtttcttaaaggttagttgcaatgtgaaatctgaaatcaaattaattttttatactcagttacaataaaatgcagttgtgtgttttgcatttgaaatggtcttcttaccacattcatgggtatttggaaaatactggtttcctgggttaataaggttttccaaacgtttacacgcttcattatgtaatatgaaaaaaamtcatatttgttaatatcaccacagaaaa

SEQ ID NO: 903606 - DNA, 616 bp, Homo sapiens
taatttgattgcactgtggtctgagagactgtttgttgttatttcagatcttttgcatttgctgaggarggttttacttcccattatgtggtcgattttagaataagtgccatgtggcactgagaagaatgtatattctgttgatttggggtagacagttctgtagatgtctatcaggtccacttggtccagagctgagttcaaatcctgaatatccttgttaattttctatctcattgatctgtctaatattgacaatggggtgttgaagtctcttactattattgtgtgggagtccatgtctctttgtaggtctctaagaacttgctttatgaatttgggtgctcctgtattgggtgcatatatatttaggacagttagcatttcttgctgcattgatccctttatcattatgtaattccttctttgtctgttttgatctttgttggtttaaagtctgttttgtcagagactaggattgcaacccctgctttttttttttctttctgcttggttgataaattttcctccacccctttattttgagcctatgtatatctttgcacatgagatgggtctcctgaatacagcacatcgatgggtcttgactctttat

SEQ ID NO: 903607 - DNA, 685 bp, Homo sapiens
aattccctactgaagagttcagtagaggataattgcaatattggaatcactaaatcaacttaagttcaattaatgatctgtaaactttgaaagtgttggttttagtgattctgtagcattcatgatttcaaatgaatacatttgagattatgagaactactgtcttgaaatggaggcaaagggagacggagaacagccatggtcacactacattattatccaattgtgcttaatggagagttcatagtgaatgggaatgataagaattcttgtttcagcctatactaatgttttgctttgcttaaaaagttactaacacattgattaaatactcactttagtatcagagttatggaaaataattatgatctactgaagtcagtgaaaagaaacaaagtttaaacaatcatatcaccgggttttaaatttctcgtccttagagattactttttcagtaataaagtatgtttaaatctaattaataaataataaactagatagtcatatcttctgcccctcatatctcttcctccttctttttcaccatttttttttcaattagtggcatggccagctataaacatataattagtctctggtaacattgactactcatagttwgggaggcagtaaattggtttagggccaacactgacaagtcacacagtcctggactcccatccag

SEQ ID NO: 903608 - DNA, 683 bp, Homo sapiens
aaatagtgacaacaccaaatgctgatgaggtatggaaaaactggatttctcaagcattgctggagggaatgtaaatgttgagctattttggaaaactgatagtttcttttaaaactaaacattcaactacaawgtggcccaatcattgtactcctaagcatttatttcagagaaatgcacccttatattcacaaaaagcctgtacatagttgtttatagaagttttatttgaaatagacagaaactggaaacaacccatatgtctttcaatgggtgaatgtttaaataaactgtgatacatccaaaccatgaaatactattcagcaatagaaaagaatgaactactgtattgatacatgcaataacttcgatggatctcctggaattatgctgagtgaaaaaagctaattctagtaggtcatatactatgtgatcccacttctatgacatacttggaatgtcaaaattatagaaatgaagagaagattagttgttgccacctgttggggacagcgttggagagatggaagtggttgtggtttaaaaggcaacacagggaatccttgcaatgatggaactgttctgtattgttctgtatctttactataccgatatcaaaatcctgtttgtggtatcatactagagttgtgaaagatgttatctttggggaaaaataggtaaag

SEQ ID NO: 903609 - DNA, 641 bp, Homo sapiens
aatacaaaatgagaaaattatattccacttmaccatcatcatgaagccagaatttatctgtttagatcagcactacacaaatttaattattgattaggatgtatataaatatcaagtacatttaaaatttccattttacccagaatagtgcttctcttgcttccagcaagttcaacccttggaatagtttattcggcaaatgtatcaggcactcattacattctgcaccggagatacagtggtctctgcgttgcaggtgcccacgctgcgttccaaagggagggaactggacaatacacaaataaatatagaagccagaatgtataaaagcatgacaactgttatgaagaaaattaagtgggaatgatgggatagccagtaacttagaaggggaggagctacttgaggataagtggccgaggaaggcctctttgaggaggagacttctgatacaatccctgaaagtagagccagctacacaattttcaggacccagtgcaaaatgaaaatacgggccccgtgttcaaagagtattaagagtttcaagatggcaacaatagatccaaaccgagtacagatcccttctgagcgaggggcgcacgtggcacatgtgtgaagccggctggcctgaaagacaagga

SEQ ID NO: 903610 - DNA, 637 bp, Homo sapiens
gagctcaccaaaaagccttcagcgcaccagacgggcctcagataccctgggtcaaagatggatcagaaacacaccagagggaaaagctccaggtgatacagccyccgcgaagaatctttggctatcttcttcaacagggaattcttaaccatcacaagcaaattagcagactcacactattaatgataattcaactattttcctaatcctaaatgaaaggtaaaccaatttagagaatatcacaaactcccctgaaatactaaaacacgaaggaggatgaagtaatgaattcctgggtttccaggggccataaaacctggaaaggacaagtgcagacaactgaaacttctcttccagagctaatttttgctcattatcttatgttttatggtcagcaattccgactgggccttgacaaacacttgctcatagccagttggctgtgtcagctgaaggagaggttgcctgagagatttctcatcggttgtgctttgaatcaacgtggccaatgttggaatgccaggagggtgtgcagctgtgagcagggccagcttcacaggtgcatccagaagactccaaagcttgttttcctgacaaggcctgggtataattttcctagtttgacaaaagctgactg

SEQ ID NO: 903611 - DNA, 580 bp, Homo sapiens; identical to SEQ ID NO: 901358

SEQ ID NO: 903612 - DNA, 591 bp, Homo sapiens
ctcactaccatgagaacagcatgggggataccatccccatgatccaattgtctcccaccaggttattccctcagcaygtgaggattacaatttgagatgagatttgggtggggacacaaagccaagccatatcattctgcccatagcccctcacaaatctcatatcctttttacaattcaaaaccaataatgccttcccaacagtctcccaaatcttatctaattccagaattagctcaaaagtctaagtacaaaatctcatctaagataaggtaagtcccttccacctatgagcctgtaaaataaaaaacaggttagttacttccaagatacaatgggggtacaagcattgggtaaatgttcccaatacaaatgggagaaattggccaaaactacggagctacagtacccacgcaaattcaaagcctgttaggacactgattaaatcttaaagatccaaaataatctccttcgactccatgtttcacatccagggcacgctgaagcaaggggtaggctcccaacgccttgagcagcttcaactctgtggctctgcagggttcagcccctgcagctgctttcacaggctgg

SEQ ID NO: 903613 - DNA, 559 bp, Homo sapiens
ctttagatagaccagcatttaaacactcctttttgtagaatctgcatgtggatatttsgaacacattgaagaattcgttggaaacgggtatcttcacatgaaaagtagacccatgcattctccgaaagttcactgggatgtgtgcattcaactcacagacttgaaactttcttttgatagagcagtgtagaaacacgctttttgtacaacctgcaagagttcctttggagcgctttgttgcctatggtggaaaaagaaatatcttgaaataaaagctagacagaaggattctcagaaacccctttggatgtgtgagttcaattaacagagtagaacctttctattgatagatcagttttaaaacactgcttttgtagaatctgcttgtggatatttggagctctttgaggaattcgttgtaaatggaataccttcatatacaaactagacagaagcattctcagaaactgctatgtgatgtgtgtattcaactcacacagttgaaacttccttttgagagagcagttttgaaagtctttttgtagtatctgcaagtgga

SEQ ID NO: 903614 - DNA, 587 bp, Homo sapiens
gaaaaagtgatatcttcacctgaaaaatagacagaagcattccagaaactgctttgtaacatgtgcattcaactcacagtgttgaaccttccttttgagagagcggttttgaaacagtctttttgtagtatctgcaagtggatatttgcagtgatttgaggccgaagaaggaaaaggaaataccttcaaataaaaaactagacggaagcattttcagaaactgccttgtgatgtgtgcattcaactcacagagttgaaccttccttttgagagagaagttttgaaacagtctttttgtagtatttgcaagtggatatttggagcgatttgtggagtatggtggaaaatgaaatatcttcacatacaaactagacagaagcattctcagaaactgctttgtgatgtgtgcatttaagtcacagacttgaaacttcctttaggtagagcagtgttgaaacacactttttgtataatctacaagtgttctttggagtgctttgttgcctatgttggaaaaagaaatatcttcayataaaaactagacagaagcattctcagagactcctttgtgatgggtttgttcaatt

SEQ ID NO: 903615 - DNA, 483 bp, Homo sapiens
ctctggcagatgaattcacacatcacaaagaagtttctcagaggtcttctgtgtagtttttatgtgaacatatttccttttccacctttggccagaaaggctccaaatacccacttgcagattctacaaaaagagagtttcaaaactgctccatcaaaagataggttcaactctgtgagttgaatgcacacatcacaaagtagtttctcagaatgcgtctgtgtagtttttatgtgaagatatttccttttccatcataggcctcaaagtgttccaaatatccacttgcagatcccacaaaaagagtgtttccaaactgctcaatcaaaagaaagcctcaactctgtgagactaatgcacacatcacaaagaagtttctcaaaawgcatgtgtgtatcttttatgtgaagatatttccttatacacattaggcctaaaagcactccaaatatccccttacagattctacaaaaagagtgtttc

SEQ ID NO: 903616 - DNA, 522 bp, Homo sapiens
tccatgtgctccctaatattcctttgcagattctagaaaaacagtttccaaacttctcaatcaaaagaaagtattaactctgtgagatgaaaacacacatcacgaagctgtttctcagaaatcattctagttttcatgtgaatatatttcttttttcaccataggcctcattgcgttctcaaatagccctttgcagattcaagaaaaatagtgtttccaaactgctcaatcaaaagaaagctgtaactttgtgagatgaatgtacacatcacaaaacagttcctgagaaagcatctttctggtttttatctgaggatatttcctttttctctataggcctcattgcgttcccaagtatgcttttgcagatgctacaaaaacagtgtttctaaactgcagaatcaaaagacagttttatctcagtraaacaaatgcacacaacacaaatttgtttctgagaaagtgtccttctagtttttatgtaaaggtgtttcctttttcacagtaggtctcaatgcactc

SEQ ID NO: 903617 - DNA, 645 bp, Homo sapiens
tctcagaggtctttttactttttatctaaggttatttccttttccaccatatgcttcaatgcattcccaaatatctcttcgcaaatttttccaaaacagtgtttccaaactgctcaaccaaaagaaaggtttaactctgtgagatgaaagcacacatcacaaagcagtttttcagaaagcttctttctagtttttgtccgaagatatttcctttatcactataggcttcaatatgcttccaaatctcccatcgcagattctacaaacacagtctttccaaactgctcaatcaaaagaaaggattaactgtcaggtgaatgcacacatcagaaatcactttctcagaaagcttctttctagtttgtatgtgaagatatttcctttttcaccataggcctcaacgtgctccgaaatatcccttcacagattcaacaaaaacagtgtttccaagatgctttatcaggagaaattcagccaaatatcgggtgaaatttacccccgacatttctagtaggttcttttttattttcccttagtgtcatctggtctgagaaataaagggataaaatayaacagagagaaattttaaagctgagtgtccaggggaggcatcacatgtcggcacattccatgatgccccctgag

SEQ ID NO: 903618 - DNA, 630 bp, Homo sapiens
aatgaaattaagtttatctctgtgaggtgaatgcacacttcacaaagcagtttctcttctcagaaagattctttgcagtttttctctgaagatatttcacttttcaccatgggactgaaagcgctgccatatatccctttgtttatactgcaaaaacatgtttccagactgttcaatcaaaagaaatgtttaactctgtgagaagaaggcacacatcacaaaccagtttccaagaaagcttctttctaatttttatctgaagatatttcctttatcaccataggtcccaatgcactcccaaatatccttgagcagattctactaaaacggtgattccaaactgcttaatcaaaagaaaggcttaactctgtgagatgaatgcactcatcacaaagcagtttcccagaagtcttatttctagtattcatctgaagatatttccttttccaccataagccacaaagtgctcacaaatatccctactcagattctacaaaaacagtgtttccaaactcctcaatcaaaaakaagtttaattctgtgagatgaatgcagaaaacttcctggtagtatttatctgtagattttcctttttcaccatgccctcaatgtgctcacaaatatcccttt

SEQ ID NO: 903619 - DNA, 368 bp, Homo sapiens
ttagaagctgcacaaggccaggcatggtggcccatgcctgtactcccagcaccttgggaggctgagacgtttggatcacaaggtcaggaaatcgagaccatcctgactaatacagtgataccccatctctactaaaaatacaaaaaattaacagggccttgtggcaggtgcaagtagtcccagctactcaggaggctgaggcaagagaatggcgtgaacccaggaggcagagcttgcagtggrccaagatcacaccactgcactccagcctgggtgaaagagtgagactttgtttcaaataaataaataaataaataaataagtgcacaatcaaaatagaggtttaactctgtgagaaatatccacac

SEQ ID NO: 903620 - DNA, 617 bp, Homo sapiens
aaaagaaaggttcaactctgttagatgaatgcacacatcacaaagcagtttctgagaaagcttctttctggcttttatctggagatatttcctttttcaccataggcctcaatgcacttccaaatgtcccttcacagatttaaaaaagcagtgtttccaaactactcaatcaaaagaaaggtttacttctgtgagctgaatgcactcatcacagagtagtttctcagaaaacttctttctagtgtttatgtgaagatatttcctttttcaccatgggtctcaaagcactgaaaaatgcccctttgcagattctacaaaaacggtgttgccaagctactcaattgaaaaaaaaagttgaactctttgagatgaatgcactcatcacaaagcagtttctcagaaagcgtctttctattttttatctgaagatatttccttttatactacaggcctcaatacgttcccaaataccccttggtgaattttacakaagcaatgtttccaaactgatcaaacaaaattatggtttaatactgtgagatgaatgtataaataacaaatcagtttccagaaagcttcctttaagtaattacctgaagatatttcctttttcacca

SEQ ID NO: 903621 - DNA, 617 bp, Homo sapiens
aaaagaaaggttcaactctgttagatgaatgcacacatcacaaagcagtttctgagaaagcttctttctggcttttatctggagatatttcctttttcaccataggcctcaatgcacttccaaatgtcccttcacagatttaaaaaagcagtgtttccaaactactcaatcaaaagaaaggtttacttctgtgagctgaatgcactcatcacagagtagtttctcagaaaacttctttctagtgtttatgtgaagatatttcctttttcaccatgggtctcaaagcactgaaaaatgcccctttgcagattctacaaaaacggtgttgccaagctactcaattgaaaaaaaaagttgaactctttgagatgaatgcactcatcacaaagcagtttctcagaaagcgtctttctattttttatctgaagatatttccttttatactacaggcctcaatacgttcccaaataccccttggtgaattttacagwagcaatgtttccaaactgatcaaacaaaattatggtttaatactgtgagatgaatgtataaataacaaatcagtttccagaaagcttcctttaagtaattacctgaagatatttcctttttcacca

SEQ ID NO: 903622 - DNA, 617 bp, Homo sapiens
aaaagaaaggttcaactctgttagatgaatgcacacatcacaaagcagtttctgagaaagcttctttctggcttttatctggagatatttcctttttcaccataggcctcaatgcacttccaaatgtcccttcacagatttaaaaaagcagtgtttccaaactactcaatcaaaagaaaggtttacttctgtgagctgaatgcactcatcacagagtagtttctcagaaaacttctttctagtgtttatgtgaagatatttcctttttcaccatgggtctcaaagcactgaaaaatgcccctttgcagattctacaaaaacggtgttgccaagctactcaattgaaaaaaaaagttgaactctttgagatgaatgcactcatcacaaagcagtttctcagaaagcgtctttctattttttatctgaagatatttccttttatactacaggcctcaatacgttcccaaataccccttggtgaattttacagaagcaatgtttccaaactgatcaaacaaaattatggtttaatactgtgagatgaatgtataaataacaaatcagtttccagaaagcttccttyaagtaattacctgaagatatttcctttttcacca

SEQ ID NO: 903623 - DNA, 617 bp, Homo sapiens
aaaagaaaggttcaactctgttagatgaatgcacacatcacaaagcagtttctgagaaagcttctttctggcttttatctggagatatttcctttttcaccataggcctcaatgcacttccaaatgtcccttcacagatttaaaaaagcagtgtttccaaactactcaatcaaaagaaaggtttacttctgtgagctgaatgcactcatcacagagtagtttctcagaaaacttctttctagtgtttatgtgaagatatttcctttttcaccatgggtctcaaagcactgaaaaatgcccctttgcagattctacaaaaacggtgttgccaagctactcaattgaaaaaaaaagttgaactctttgagatgaatgcactcatcacaaagcagtttctcagaaagcgtctttctattttttatctgaagatatttccttttatactacaggcctcaatacgttcccaaataccccttggtgaattttacagaagcaatgtttccaaactgatcaaacaaaattatggtttaatactgtgagatgaatgtataaataacaaatcagtttccagaaagcttcctttaagtawttacctgaagatatttcctttttcacca

SEQ ID NO: 903624 - DNA, 572 bp, Homo sapiens
gaagcagtctcaggaactgctttgtgatgtgtgcattcaactcacagatttgaattttccttttgagagggaggttttgaaacagtctttttgtagtatctgcaagtggatatttgtagtgacttggggcctcagatggaaaaggaaataccttcacatacaaagtagacagaagtattctcagaaactccattgtgatgtgtgcactcaactcacagagttgaaccttccttttgagagagcagttttgaaacagtctttttgtaatgtctgcaagtggatatttggagcgattcgagtactgtgatggaaaaggaaatatcttcacatacaaactaaacagaagcattctcagaaacgtcttgtgaagtgtgccttcacctaacagagtggaaccgttcttttgatagagcagttttgaatcagtcttttggtaggacctgcaagttttcatttggagcgctttgaagcctayggtggaaaagggaatatcttcacaaaaaactaggcagaagccttctcaggaacttcattgagatgtgtgcattcaactaacagagttgaaactgtct

SEQ ID NO: 903625 - DNA, 564 bp, Homo sapiens
ttcagataaatactagaaagaagctttctcagaagttgttttgtgatatgtgcaytcttcccacagagttaaatatttcttttgatttagcaatttggaaacactgtttttgtagaatctgttgcgggatgtatgggagtgcattgaggcctatggtgaaaaaggaaatatcttcagagcaaaactacaaagaaactttctgagaaactgctttgtggtgcatgctttcttctcacagaatttagactttcttctgattgagcagcctggaaacactctttttgtagaatctttgaaggaatatacgagagcgcatttaggcctatggtgaaaaaggaaatatcttcagataaaaactggaaagaagctttctcagaaacttctttgtgatgtttgcattcttctgacagagttaaacctttcttttgatttaacagtctggaaacactgttttggtagaatctgtgaagggatatgtgggatcgctttgaggcctatggtgaaaaaggaaatatcctcagagaaaaactagaaagaagctttctgggaaactgtgatgtgtgc

SEQ ID NO: 903626 - DNA, 564 bp, Homo sapiens
ttcagataaatactagaaagaagctttctcagaagttgttttgtgatatgtgcattcttcccacagagttaaatatttcttttgatttagcaatttggaaacactgtttttgtagaatctgttgcgggatgtatgggagtgcattgaggcctatggtgaaaaaggaaatatcttcagagcaaaactacaaagaaactttctgagaaactgctttgtggtgcatgctttcttctcacagaatttagactttcttctgattgagcagcctggaaacactctttttgtagaatctttgaaggaatatacgagagcgcatttaggcctatggtgaaaaaggaaatatcttcagataaaaactggaaagaagctttctcagaaacttctttgtgatgtttgcattcttctgacagagttaaacctttcttttgatttaacagtctggaaacactgttttggtagaatctgtgaagggatatktgggatcgctttgaggcctatggtgaaaaaggaaatatcctcagagaaaaactagaaagaagctttctgggaaactgtgatgtgtgc

SEQ ID NO: 903627 - DNA, 647 bp, Homo sapiens
tcgctccaaatatccacttgcagatactacaaaagactgtttcaacactgctctctcaaaaggaaggttcaactctgtgggttgaattcacacatcacaaagcagtttctgagaatgcttgtgtctcgtttgtawgtgaagatatttccttttccatcataggcctcaaatcgctccaaatatccacttgtagatactacaaaaagactgtttcaacactgctctctcaaatggaaggttcaaccctgtgagttgaatgcacacatcacaaagcagtttctgagaatgcttctgtctggtttgtatgtaaagatatgccttttacaacgtattcctcaaagagctcccaatatccacaagcagattctacaaaagcagtgtttcaaacctgctctatcaaaggaaagtttcaactctgtgaattgaacacacacatcacaaagcagtttctaagaatgcttctgtctagtttttaagagaagataatcctttttccaccataggcaacaaatctctccaaattaacactaccaggttctacaaaaagtgtgtttcaacactgctctatcaaaagacaggatcaagactttgagttaaatgcacacatcacaaagcagtttctgagaaagcttctgtctagtttttat

SEQ ID NO: 903628 - DNA, 636 bp, Homo sapiens
gtggattcatcttactgagttgatccattcttttgattaagcagtttgaaaacactctttttgtagaatctgcaaatggatatttgcggttctttgatgtctatggtggaaaaggaaatatcttcacataaaaaatacacagaagcattttgggaaacttcattgtgatgtgtgcattcaactaacagagttgaacgtatcttttgattgagaagttttgaaactcactttttgtacaatctgcaattggatatttggagacctttgcggcctatgttggaaaaggaaatatcttcacataaaaactgcacagaagctttctgagaaacttctttgtgatgtgtgcattcaactcacagacttgtacctatcttttgattgagcaattttgaatctctctctttgtagaatctgcaagtggatatttggagccccttgcggtctacggtggaaaaggaaatatcttcatataaaaaatacacagaagcattctgagaaaattctttgtgatcagtgcattcttctcacagagttgagcttttctttctattgagtattttgaaaaactctttttgtacartcagcaagtggataattgtagtgctttgaggtctattgtggaaaaggaaatatctt

SEQ ID NO: 903629 - DNA, 601 bp, Homo sapiens
tagaaagaagcattctgagaaactgctttgtggtgtgtgcattcatctcacagagttaaaattttttttttgattgggcagtttgsaaacactgtttttgtagaatctgcaatgcaatattttggagtgcttttaggggtatggtgaaaaaggaatatcttcagataaaagctagaaagaaactttctgagaaacagctttgggatgagtgcattcatctcacagagttaaacctttcttttgatcaagcagtttggaaacactgtttttatagaatctgcaaagggatatttgggaatgcattgaggcctgtggtgagaaaggaaatagcttcagatgaaaactagaaagaagatttatgagaaactgctttgtgaagagtgcattcatctcacagacttaaacctttttttgattgaggagtttggaaacggagtttttgtagaatctatggagggatatttgggaatgaattgaggcctatggtgaaaaaggaaataccttcacatataaactagagagaagctttctgagaaactgctttgtgatgtgtgcattcatctcacagaggtaaacgtttcttttcattgagcagtttgga

SEQ ID NO: 903630 - DNA, 536 bp, Homo sapiens
tgaacctttcttttgatagagcagtgttgaaacatactttttgtagaatctgcaagtgtccatttcgagttcttttgtgcgtatgttggaaaaagtgatatcttcacctgaaaaatagacagaagcattccagaaactgctttgtaacatgtgcattcaactcacagtgttgaaccttccttttgagagagcggttttgaaacagtctttttgtagtatctgcaagtggatatttgcagtgatttgaggccgaagaaggaaaaggaaataccttcaaataaaaaactagacggaagcattttcagaaactgccttgtgatgtgtgcattcaactcacagagttgaaccttccttttgagagagaaggtttgaaacagtctttttgtagtatttgcaagtggatatttggagcgatttktggagtatggtggaaaatgaaatatcttcacatacaaactagacagaagcattgtcagaaactgctttgtgatgtgtgcatttaagtcacagacttgaaacttcctttaggtagagca

SEQ ID NO: 903631 - DNA, 610 bp, Homo sapiens
gaaaaaggattatcttctcttaaaaactagacagaagcattcttagaaactgctttgtgatgtgtgtgttcaattcacagagttgaaactttcctttgatagagcagttttgaaacactgcttttgtagaatctgcttgtggatattgggagctctttgaggaatacgttgtaaaaggcatatcttcacatacaaactagacagaagcattctcagaaactgctttgtgatgtgtgcattcaactcacagagttgaaccttccatttgagagagcagtgttgaaacagtctttttgtagtatctgcaagtggatatttggagcgatttgaggcctatgatggaaaaggaaatatcttcacatacaaactagacagaagcattctcagaaactgctttgtgatgtgtgcgttcaaccgacagatttgaactttccttttgagagggaggttttgaaacagtctttttgtagtatcggcaagtggatatttgtagtgacwtggggcctcagatggaaaaggaaataccttcacatacaaactagacagaagtattctcagaaactccattgtgatgtgtgcactcaactcacagggttgaaccttccttttg

SEQ ID NO: 903632 - DNA, 549 bp, Homo sapiens
ctcctttgtgatgggtgtgttcaattcacattgttgaaccttgcttttgatacagcagtgttgaaacaaacattttgtagaatctgcaagtgttcwtttcaaatgctttgtggcctatgttggaaaaagtgatatcttcacctaaaaaatagacagaagcattctcaggaactgctttgtaatatgtgcattcaactcacagagttgaaccttccttttgagagagcggttttgaaagagtctttttgtagtatctgcaagtggatatttggagcgatttgaggtctaagaaggaaaaggaaataccttcaaataaaaactagacagaagctttctcagaaactgctttgtgatgtgtgcatttaactcaaagtcttgatcctttcttttgatagagcagtgttgaaacacactttttgtagaacatgctagtgttcatttggagagatttcttgcctatggtggaaaaaggattatcttctcttaaaaactagacagaagcattcttagaaactgctttgtgatgtgtgtgttcaattcacagagttg

SEQ ID NO: 903633 - DNA, 438 bp, Homo sapiens
aactcctctgtgaagtgtgtgttcaattcacatcgttgaacctttcttttgatagagcagtgttgaaacatactttttgtagaatctgcaagtgtccatttcgagttcttttgtgcgtatgttggaaaaagtgatatcttcacctgaaaaatagacagaagcattccagaaactgctttgcaacatgtgcattcaactcacagtgttgaaccttcgttttgagagagcggttttgaaacagtctttttgtagtatctgcaagtggatatttgcagtgatttgaggccgaagaaggaaaaggaaayaccttcaaataaaaaactagacggaagcattttcagaaactgccttgtgatgtgtgcattcaactcacagagttgaaccttccttttgagagagaagttttgaaacagtttttgtagtatttgcaagtggata

SEQ ID NO: 903634 - DNA, 631 bp, Homo sapiens
atttcctttttcaccattggcctcaaagcacycaaaatatcccttctcagattctacaaaaacagtgttgcaaagctgctcaataaaaatgaagttttaacacagagagatgaatgcacacataacaaagcagtttcccagaaagtttctttccagtttttctctgaagatatttcctttttcaccatagcccacaatgcaattccaaatatctgtttgcagatcctgccaaaacattgtttccaaactgctcaagcaaaagaaagcttgagctttcttttcacaaagcagtttatcagaaagcttctttctagtttttatctgaagatacttcctttttcaccataggtctcaatgcacttccaaatagcccttcccagattgtacaaaaatagtgttttcagactgctcaatcaaaaggaagttttaactctgtgagatgaatgcacacatcacaaagcaggatgtcagaaaatttccctctagttttactctgaagatagtttatttttcaccctaggactcaaggtgctctcatatatacattctcacattctacaaaaactgagtttccaatctgctcaatcaaaagaaagtttaactgtgttagaagaatgcacacatcacaaag

SEQ ID NO: 903635 - DNA, 630 bp, Homo sapiens
ggaatggaagggtactgcagccactcatccctggagcaggacaccctctagcagtagttccagttccaagaaggcataatacagtagctgtttgaccacagtgggtgaggtacagtgtcagctcctattctgggggaagcacagctgtgtggactcaactgggcttactgcctgtgaggacattttcctgcatggggaagtccctcctggttctagctgctcctggatgggaaatggggtggtggaggccaggtgtttacttctgttctctgtggccatcctggatttctgttatccagaatctacaaggaactttaacaaattgacaagaaaaaaaaacaaacaaccccatcaaaaagtgggcaaaggatatgaacagacacttctcaaaagaagacatttatgcggccaacagacatatgacaaaaaaaaaagctcatcatcactggtcattagagaaatgcaaaccaaaaccacaatgagataccatctcatgccagttagaatggcaatcattaaaaagaagtcaggaaataataggtactggaraggatgtggagaaataggaatgcttttatactgttggtgggagtataaattagttcaccattgtggaagacagtgtggcga

SEQ ID NO: 903636 - DNA, 570 bp, Homo sapiens
accttgctattctttcatgctgccttgttcttgctcctggtcaagtctcagtaaggtgtccctgtcaatctttgtgaacattgtattttctctcttcatctttctgtaacttcattctctgctttattttcctccagagcacttaccgtcttctagaatacaaggctcttcttatttattttaaattctcagtctctccacagtagaataaaaattccatgaggacaggaactgtcatctgtcttttgtctgctgtattttcagtgttcagtacagtgtctgaaacattgtaggagctcagcaaatactggtataatatattacaggaaacactagacagcagaaacaagagaaaacaactgccccttttacaggatggttgtgagtgtccaattaaatgaggttttactttgcaagttataaggcactagttacatgtatccgtattagtgctgatagtaatactcaacaattattgtgtttacttaaatgaggtgctgtgtaaaatcttyatctgaaatatgtgattcagagtgaagccagtgcagaattagagataagtccactttt

SEQ ID NO: 903637 - DNA, 589 bp, Homo sapiens
atcaaaaagtgggcaaaggatatgaacagacacttctcaaaagaagatacttacgcagccaacaaacatatggaaaaaagctcattatcactagtcattagagaaatgcaaatcaaaaccacaatgatataccatctcacgccagttagaatgtaatcatcaaaaagtcaggaaacaacagatgctggagaggatatggagaaataggaacacttttacactgttggtgggagtataaattagttcaaccattgtggaagacagtgtggagattcctcaaggatctagaaccagaaataccatttgacccagcaatctcattactgggtatatacccaaagcatcataaatcattctattataaggacacatgcacacgtatgtttattgcagcactattcacaatagcaaagacttggaaccaacacaaatgcccatcattgatagactggataaacaaaatgtggyacatatacaccatgaaatactatgcactcatttaaaaggatgagttcatgtcctttgcaggcacatggatgaagctgaaaccatcattctcagcaaactaatgcaagaacagaaaaccaaa

SEQ ID NO: 903638 - DNA, 589 bp, Homo sapiens
atcaaaaagtgggcaaaggatatgaacagacacttctcaaaagaagatacttacgcagccaacaaacatatggaaaaaagctcattatcactagtcattagagaaatgcaaatcaaaaccacaatgatataccatctcacgccagttagaatgtaatcatcaaaaagtcaggaaacaacagatgctggagaggatatggagaaataggaacacttttacactgttggtgggagtataaattagttcaaccattgtggaagacagtgtggagattcctcaaggatctagaaccagaaataccatttgacccagcaatctcattactgggtatatacccaaagcatcataaatcattctattataaggacacatgcacacgtatgtttattgcagcactattcacaatagcaaagacttggaaccaacacaaatgcccatcattgatagactggataaacaaaatgtggtacatatacaccatgaaatactatgcactcatttaaaaggatgagttcatgtcctttgcaggcacatggatgaagctgaaaccatcattctcagcaaactaaygcaagaacagaaaaccaaa

SEQ ID NO: 903639 - DNA, 631 bp, Homo sapiens
gtttctggtggacagtagtctattagtagttaagttttggaggagtcaaaagttatacatgaattttggatgttaaatggcactgaagttcctaacttctgtgttgttcaagggtcaactatgctaacaaactgaatccagcaatgtatataaggaattatacacaatgattgagtgaaatttatctcaggaattcaaggttggtttaatatatgaaattaatcagtgtaattcataatttaataatgaacaagaaacacataattacttcaatagacatagagaaataatttaacaaaatgcacaatgctttcattataaaacactcaaaactaggaatagaagggaacactacatcattctgataaaggccatttaccaaaaacccatagctattataatgctaatggtgaaaaactgaatgcttttccctaaaataagaaaatagacaagaatgtctactctcatttcttctattcagtattttctggcgattcaagccagaacaaatctacaagaaaaagatagaaggaaacaagtaaactatctttattcacagaagatattattttatgtaaaamattataaaggacccctcccttccccagaaaaacattagaactcataaaca

SEQ ID NO: 903640 - DNA, 682 bp, Homo sapiens
cacacacctgtaatcccagctacttgggaggctgagacaggagaatcacttgaaccctggaggcagaatttgcagtgtgccaacttcaggccactgcactccagcctgggtgacagcgagactctgtctcaaaacaaacaaacaaacaaaaaaccccaaaaaactccttatatgttttttaaatgaaaggaaatacatattagtaaatagattcaaaaaatagtattaaaaaatacacataaagttggagtcctagtttccttcctcaaacccattataatcattttcttctcagagataattactatcaggaatttgtaatacattttcccagtccatttaaaaatgttttaactacttttatgtggtatggttttgaatgtatttaaagttttacataagctacatcctattatacattctgttttattaggctggtgccaaagtggttgtacttttgcaccatcctaatacaatttactttctatattctaccacattcattcatttaataaatacatattttctgtctacagtgttctaggtacttttctaagtattaaggctacagatgaacaaaacagaaaaaattaacctgtcttcacagcatttatctagtaattggagaaagatagccaaaraaggaaatcaaatatgtattatgtccgatggtgagaatata

SEQ ID NO: 903641 - DNA, 610 bp, Homo sapiens
taatatatgattcttgccttaatatatgtgttcargagcaatggaaacgtttggaatattcttaagaaaatgcagtctacagatgcagtggctcacacctgtaatcccagcactttgggaggccgaggcgggtggatcatgaggtcaggagttcaagaccagcctggccaagatggtgaaaccccatctctaccaaaaaaaaaaaaaaaaatacaaaaaattagccgggtgtggtggcacgtgcctgtaatcccagctactctggagactgaggcagcgaattgcttaaacctgggaggcagaggttgcagtgagccaagattgtgccactgcactccagcctgggcaacagagcaagagtccatctaaaaatagaaaatgcagtctaaaaaagataaatgaataaataactaaagctgaatttcaaagtataaataataacctggtattacttttacctttatatcacaaccatttcttaacaactgacatttgaattaaaaagaagttagacttacactgtccctttgttgtgaagaactgccacacaaaacctattactaaaaatttctattacacaaaccgtatctgtcagctgctgtcaatttcc

SEQ ID NO: 903642 - DNA, 594 bp, Homo sapiens
tgagctctgagaacagacagactgcctcctcaagtgggtccctgacccccatgtagcctaactgggaggtacctcccagtagtggccaacagacacttcatataggtgggtgcccyttagggacaaagcttctggaggaagtgagaggtgacagtgtgctggcagcccttgcagccctcgctcactctcggtgcctcctcggcctcagtgtccactctggccgtgcttgaggagaacttcagcctgctgctgcactgtgggagcccttctctgggctggccaaggtcagagccagctccctcggcttgcagggaggtgtggagggagaggcatgggtgggaaccagggctgtgtactgcacttgctggccagctagagttccgggtgggtgtgggcttggcgggccccacacttggagtggccagctgaccctgctggccccaggcagtgaggggcttagcacccaggccagcagctgcagagggtgcgccaggtcccccagcagggcactgcacttgatttctcgctgggccttagctgcctccctgtggggcagggctcgggacctgcagctccccatgcctgagtctcccc

SEQ ID NO: 903643 - DNA, 686 bp, Homo sapiens
aaatatttgcaaactacttatctgacaagagattaataactagaatatataaggagctgaaacaactctataagaaaaaaatctaataatcctatttctaaatgggcaaaatatctgaatagtcttttctcagaagaagacatacatatgacaaacaggtatatgaaaatgtgcctaacacaactgatcatcagagaaatgtaaatctaaatgacaatgaggtatcatctcaccccagttaaaatagcttaaaactgaagacagacaataacaaatactggagaaggtgtggagaaaaggcaaccctcacactgttggtgggagtgtacattagtacagccactatggagaagagtatggaggtgcctcaaaatttaccaatagaactaccatatgatccagcaatcttactgttaggtatgtaccccaaagaaagggaatcagtaaattgcggaggtattagcacatctatgtttattgcagcactattcacaatagacaagatttgtaattaatctaaatgtccattaacagattaatggatttaaaaatgagatacatatacacaatggagtactattcagttcagccataaaaagaatgagatcctgttatttgcaacaacatggatggaactagaggatactayggcaattggaaaaaggcaggcacagaaagacaaactt

SEQ ID NO: 903644 - DNA, 579 bp, Homo sapiens
gcagaaacaaagctttgctccagaatgcagatgctrtgactctccttttgtgacttgccagagactccacatagtgttcttattcaccttggctacctgtatcaccattggctctactagatagtagggcctgagtgtcagggcaatttatatacagtctaaatttgctatagagttctcccttgctgtagatccacttaaaactgtcacttcagagttacctgacaaatgtaatattcctaaatattgagtatgttgctttcaaaatcaaaaaggttttgaaaggcttgtgctttattcttggttttttgaagtacaacttacaacagctttcattattacctttaaatggaattcccagcattgcccagatctttagatccttggaatattcacaaatgtgggagacttatgaatttctgtggagttttctgcagcatgacattctccagaatgtcaagttgattgaggttcccatagattgtattttagcagagagcaatagagttaatgtggctctgaggcaagataatgattgtgtattgaatactttccatgtgcaagtgaatggttttgacc

SEQ ID NO: 903645 - DNA, 576 bp, Homo sapiens
ataaaaataccctaaaaatatttgaccaaatatctgggcactttgtgtcccagttaatttgacacataaaatttaccatcacaatatatgtggcagggcctctgatttcctttctgcraactggggatgacttctcacctgcaatattctgagcttctcaaatagagtttaccagaaaatttggaaaattaatgttaaaaagtacttaatgtttttccaagaaaccaatagcctaaaaaattccaaaggctcatctgttgcagattccctgcaaccaataaactcagaagggtcatgcctacttaagtggaaaatacttgcctttggcctggtaagtcataccacttaacacagagactttattcttacaaacatgacttgtattagcttacagctttgagatccctttccgagtcagaagttttatatcttcatcagagctgtgtcctctgttctccacaatccaatatcctcttttcccttgattaatgaatgtatgcaattcatggctaaaagagaaattcagaggaccatacacagattctctgagaggtatagctcttctaagcacaaaca

SEQ ID NO: 903646 - DNA, 591 bp, Homo sapiens
gattttactgaaatactaatgacttccaaatcaatacttttgcgtagctatgcagatgctccacggatacatcttattctattatacaagtaaaatattggattcattatttattacctttccagctcaacctcacctcaacacctaagccaagaatctgtaaattgccttagtctcctttttcattttaccctttatatctactgttttacagtactctagattgtactttttaaaaatgtctccaattcattccatttttcgaatatagtctctgtctaagtgcaagttattaacaccttttgcataaattatggttataaactcctttccgcaatgactgtctaactgatctttctgtctcaaattcctgtttttctaaatcattcccaaataatatttataaaagcacaacaatatgatattaggctattttgaattttattttatcctttagaataaatatcataccttattactcaaagcyatctatgctatggctgtttccaacctcttttgcttcatctttccccattacccacatgaacatttgctcctttcacatcaaatatctacaaactaataaactga

SEQ ID NO: 903647 - DNA, 575 bp, Homo sapiens
ggtgaaagagttcaaccgaatagcataaggcasagtgagagactgagcgaattttagagcaggagtgaaagtttattaaaaattatagagaaggaacaaagtacacttggaagagggccaagcaggtgccttgagagagtccagtgcacggtttaatttttgacttggagttttatacgttggcatatttctgggcattgcaccccctctcccctgattcttcccttggggtgggctgtcctcatgcacagtggcccaccagtgcttgggaggggcctcatgcacaatatgtttactggagttgtatgcgtgctcgctagaggcactcttcccttaccagtcaagtgttcctagaggaaggtcaagaaccagctaaactgccattttgccttttagtgcacacacttgagtgcccatctcctgagatcttatctggaagctgctgatcaccagtttcaggtgtttctatctattgggagactgccattccctggcgccagctgtgaccaattattattttagcgacacagtttaacaaccccctgaccatcacctgatggttgtctgacatttgt

SEQ ID NO: 903648 - DNA, 612 bp, Homo sapiens
caaaacagcatggtactggtatgaaaacaaagatatagaccaatggtacagaacagaagcctcaaaaatgacacgacacatttacaaccatctgatctttgacaaacctgacacaaacaagcaatggggaaaagattcccatttaataaatgggtgttgggaaaactggctagccatatgcagaatactgaaactggatcccttccttacacattatacaaaaatcaactcaagatggattaaagacttaaatgtaagacttaaaaccataaaaatcctagaagaaaacctggacaatactattcaggacataggcatgggcaaaaacttcatgtctaagacaccaaaagcaatggcaacacaagccaaaattgacaaatgggatctaattaaatcaaagagcttctgcacagcaaaataaactgtcatcataatgaatagacaacctacagaatgggagaaaatttttttgcaatctgtccatctgacaaagggctaatatccagaatctacaaagaacttatacaaatttccaagataaagacaaataatcccatcaaaaagggggcaaaggrtatgaacagacgcttctcagaagaagacatttttgca

SEQ ID NO: 903649 - DNA, 596 bp, Homo sapiens
ttttgcaaagagaatgggtggggcaagcacgcacacacatctaaatcctttgaaatgtctaccgtcttcccagaactctgagtggtgcagtaatgaattgctttgaggttaagttatctgactgtcttgttatgagagatcaaacctgaaggtgtgtgtttgcttccaattaacaccaactcttgggatttgaaaaatcaggtatttcattcattaaccttcagaatggcattcagaggggagaatgtttgaatttacaacttacaaattataaatttatcaaaagcaataacattattataatactcatgttaggggccattagtatccttagtctctactgtacatcacaaggagaccatgtctgccctgaggacatcttctctaataataagaatcttttatcctctacagtagagagagatttccacataccttctctcttgtcatcttcaccatagccctggaaggaaataggccagaggttatcatcctcatgtgatggatgaaaaaaactgagtcttagagagatcaagagacttgcccaaagtaacactctyccaaaacggtaaaactagaacttgaagtctgaattt

SEQ ID NO: 903650 - DNA, 532 bp, Homo sapiens
gcaaattagcttttcttccctagatctttcatcatttcattcagcgttggcttccatcctcaccaatttccctgatatcctgtgcatccatggagccaggaagtgccaattaggaggyttgtgactatattccaggccttgatgctcccaggatccagacattgaagtggtaaaatgtgtgtagcaagggatgagagcctaggatgtatttggcttaagtatgaatgatcagaatgaagtagaaaatgaagaattgttaagaagcatagggtagcaattttggttgcttccagtgtaccagtcaatgtggtaaattctgcacataaacgtcttttttttttttttttttttttttggtgagacggagtctagctctgttgcccaactggaatgcagtgacgtgatcttggctcactgcaacctctgcctcccggtttcaagcgattctcctgcctcagcctcctgagtagatgggattacaggagcccaccacaatgcccaactaaattttttgtattttcagtagagacag

SEQ ID NO: 903651 - DNA, 331 bp, Homo sapiens
cctttgcagggacatgggtgaagctggaaaccatcattctcagcaaactaacacaagatcagaaaacccaacactgcatgttctccctcataagtggtagttgaacaatgagaacatsaacacagggaggggaacatcacccaccggggcctgttggggggtggggggctaggggagggatagcattaggagaaatacctaatatagatgacacattgatgggtgcagcaaacccctatggcacgtgtatacctatgtaacaaacctgcatgtcctgcacatgtactccagaacttaaaatataatttaaaaaagaaaagaaattatgaag

SEQ ID NO: 903652 - DNA, 685 bp, Homo sapiens
atgtcagagagtgtctctgtgaatgtgtacacagttgtccatttgtaaggtagatgacactttgctcctaagtagacctgcaaacaaagacaatggggtctttcctgattcctttagtttggagatgcagagaaccccacgtttctctaagtgaaatggcaagaagttatttgttagaatatggaactggtaacaaattcatgtttgcaccttgaatttgctttcacagacctggctgtattgttggacaggaataaagtaaattggagactaattgctttgtccattcccttagtcaaaaaagtatcgctgttaagttcttgaggttttttgtgtattatctctcaagtgttgagatgtttgtgtaatatatgtatcacactcatggatgaggaatcaggcacagatgaaacttgttgaaggttatgtgtacatttaatgagcagcagagtcaggattcagaccctcaactagacaaaagtcatctctgacagacttttattcaggataaaataccatttgtccatttagccagttaccagccatttactttcattattgctgaagtcaytcattctaggttgtagacgggtaatttttattctaaaagcggtgtcctcttccagaggaaacttaagagacatcttagaatggtcaggggtagtgggctggtatttgagcagag

SEQ ID NO: 903653 - DNA, 601 bp, Homo sapiens
aaccacctatgcagccataaaaattgatgagttcatgtcctttgtagggacatggatgaagctggaaaccatcattctcagcaaactatcacaaggacaaaaaaccaaacaccgcatgttctcattcataggtgggaattgaacaatgagaacacatggactcaggaaggggaacatcacacaccagggcctgttgtggggtgggggaggggggagggatagcattaggagatatacctaatgttaaatgaagagttactgggtgcagcacaccaacatggcacatgtatacatatgtaactaacctgcatgttgtgcacatgtaccctaaaacttaaagtataataaaaataaataaataaaaaagagacctcaaagagctagctaattctttcttctatgtgaggaaacagacagaaaactttatctatgaactagtaaatgtatcctcatcagacagtgaatctgccagcaccttactcttggacttcttagactccagtattgtaaataataaatttctgtttttcacarccaccaatctaaggtattttgttatagcagcccaagtggactgtattagtccgttctcacactgctg

SEQ ID NO: 903654 - DNA, 556 bp, Homo sapiens
tgctataaagacacatgcacacttatgtttattgtggcactattcacaatagcaaagacttggaaccaaaccaaatgtccacgatgatagactggattaagaaaatgtggcacatatataccatggaatactatgcagccataaaaaaggatgagttcatgtcctttgtagggccatggatgaagctggaaaccatcattctcggcaaactatcgcaaaaacaaaaaaccaaacaccgtgtgttctcactcataggtgggaattgaacaatgagaacacatggacacaggaaggggaacatcacacactggggcctgttgtggggtggggggaggggggacggatagcattaggagatatacctaatgttaaatgacgagttaatgggtgcagcacaccaccatgtcatatgtatacatatataacaaagctsgacgttgtgcacatgtaccctacaacttaaagtgtaataacaacataaataaaataaaataaaataaaataaaataaaatgggatattcattctaccctttaggaccattgcatgctttcttt

SEQ ID NO: 903655 - DNA, 556 bp, Homo sapiens
tgctataaagacacatgcacacttatgtttattgtggcactattcacaatagcaaagacttggaaccaaaccaaatgtccacgatgatagactggattaagaaaatgtggcacatatataccatggaatactatgcagccataaaaaaggatgagttcatgtcctttgtagggccatggatgaagctggaaaccatcattctcggcaaactatcgcaaaaacaaaaaaccaaacaccgtgtgttctcactcataggtgggaattgaacaatgagaacacatggacacaggaaggggaacatcacacactggggcctgttgtggggtggggggaggggggacggatagcattaggagatatacctaatgttaaatgacgagttaatgggtgcagcacaccaccatgtcatatgtatacatatataacaaagctcsacgttgtgcacatgtaccctacaacttaaagtgtaataacaacataaataaaataaaataaaataaaataaaataaaatgggatattcattctaccctttaggaccattgcatgctttcttt

SEQ ID NO: 903656 - DNA, 527 bp, Homo sapiens
tttaaaacagtaactacaataacttgttaaaagacaggcactgtaaaaaaatctgtgaccaaaaattcaaaatgtggaggggaaataaagttaatatatacagcttcatttatttttaattttttggcaaccaaggttaatttatcagcttaaaataaattgttataactacaaaatgtttttgtaagcttcatggcaactgcaaagcaggaacctgtaatagatacactaaaaataaaaagcaaggaatccaaatacactactaaccataaataaagcataaaaaaagaagaaaggaccgcaaaacaattagaaaaccagtaacaaaatgacagtagttagcccttatctattaatacgtactttgaatgtcaatgattaaatctccattaaaagacatagagtagttgaatagattaaaaaacaaacaaataaagrgacctaactgtacagtgtctatgagaaactcactttacctgtaaagacacacatagactaagagtgaagggatagaaaaaaaaatattc

SEQ ID NO: 903657 - DNA, 601 bp, Homo sapiens
ttttttaatttttagtagagacaaggttggccaggctggtctcgaactcttgacctcaggtgatccaccctcctcggcctcccaaagtgctaggattataggcatgagccaccgctcccggctacrtattgaaattaataaacagatactttgctgagaaaaaaaaatgcagtctatctacttcaattaaactatgacattctggacattttttgactctccctaaacagacatacactgagtcacatttgctatctttgaaatttgtgaaacatcagtgtctcaaacagatgttaaggctttttgaaagatgtcacatacattcatctcagggacaaattttcctaaaatgggattagaaacaatatatcacaactgtggaggagctttactggggtgttgtctatgcttaagttgcagatcctcttaatactcaaaaatctacacttactgtggctgacagtttcaagcagatgtgttcatcgcagtagtgcaagaaaagaaaagtagaagaaccctgcagagatttgatggaacccagcttctattcattaaaaccaatggcaaaatataaagcaaataggaggtgacgaaggttaca

SEQ ID NO: 903658 - DNA, 578 bp, Homo sapiens
agttctcttgaaggtaagtacacatgtactttatttacagtaattttactaacataaaaaatactcctaaggagttgaataataatattcattgcagtgccattcataaccacaagcagaaaaagaaatccatcaacaagtgaatggataaacagattccaatgtgctcttaaaatggaaaaactcttcaataatcaaaagaaacaaactcttgatacagaaaacttgaatgaaattgaaaaggcttgttctaagtaaaaaaaaaaaaaactattacagatgaaagggtatttcatgtataattacttttacatgtccattaaaaatagtataagtcaacttgatcatccttgcaatgtacacattttatttccaggttggctttttcatagtgacataatatcactattgttctataaatcatgcttctttagatttacacatacagtgactactttcrctgataaggcttcttttttgttttttcactcttctgaaaagatctgtaacctgaattatatctttcatgatgctttattgaggttctgtcaatagaaaatgctccatattatctcatt

SEQ ID NO: 903659 - DNA, 546 bp, Homo sapiens
catcattattgtaataggatataaaccattataaggtcagcataattgttttaaagtcattagtcatacagttttctagactagatatgcttgtaagtttttttttkttttttgaggtgaaatcttgctctgtcacccaggctggagtgcggtgacgtgatctcggctcactgcaacctccacctcctgggttcaagtgattctcctgcctcaacctcctgagtagctgggattacaggcatgtaccaccatgcccagctaatttttgtatttttagtagagatggtgtttcactatgttggccaggctggtctcggactcctgacctcatggtccacccacctcggcttcccaaagtgctgggattacaggcgtgagccaccgcacccggctgcttatagtttttattttctttttttaaaatccattttaattttagattcaagggatacatgtgcaggtttgttacaagggcatattgagtggggctgaggtttgggcttccgttaatcccataacccagaagctgaacatagtatccaacag

SEQ ID NO: 903660 - DNA, 638 bp, Homo sapiens
ttctcctaagaggcaataaataatttccccacaagtttattctcatgttgctattggccccgagatttcccttatgaagactgacctccaacatttatacagtcccaaaacccctttttgatgaaatatcctttaggtcacattttctgcagtctgcctgagcatccaaaaaatacaactggtaccaagcaaagtaagctattagggacagtgatggtgagaatgtcctgttagtggtaacctgaaagactcccagcatttttctttctagtattcaactttccagctctagttttctaccttactcttaaagccatcactgagtccattctcaaaccaggtgcctacgctgaagccaatgcctggttctcaggggaatactttctctgaagagcaggtattctaaaactcacgctgcagctcttcatccacaacagtgtcaggagaaagagatggtttctcagagttctttctactttttattattagtttatgcacagttttgatcatgactgactagaaggactgtaacctgtttctctcwtgctgtctgctgctaggatgtacagtaatgggtagaagggtaaggcataagttggaaaatcttagagaagaaactaagagttgttttcatttct

SEQ ID NO: 903661 - DNA, 703 bp, Homo sapiens
agcatttctttcacttttaatggcatgcagtataataggaagacaagaagaggggtgtttttcttacagtgttatggttaaagacagtgacaaagaaaaggatatgactttgatgatgttccatcatcaatgctgaaatagacatcaattatattatcagtctatacaaactgcatacacacagttaaagtaaaacaagatgcactttcttcacaaagctgtaactgctgacaaccatcaagaacaaaaatataatgcaattgaggtggacaaaatgattcgtttctggactcaactgtatcaattatcaaacgaagttcacagaaatttaaatgtaattaatttattattatttgaaaatatactaagcaattagagagactttgggatcctgtattagtccagcttcttaatgtgttattttcatttggtttccaattctttcaaattgatttaagttaaatttaacatatagcatgaatttcttcttgctttaatattaattacatttttaggatgaacttcttcctgctttttatcttaaatgtacagaataaacattgaaagtttggagaaaaaattactaaggctatgtctrtaggtctattggcagaaatctcaacctaacttctgcttgaattttatcgacctgccttttatctccagtgacatataggagctaaaatatccagaaaatagtgtt

SEQ ID NO: 903662 - DNA, 626 bp, Homo sapiens
taaaatttgcaaacagctaccatatgccttgttgcaatcagttgtccatagagggaagatcattatcaaattccaagatacagatgctttgttaacttccaaatacagtccaagtgtgtgcttgtacattcattctggccattaattaaaggccacttggagagactttaagctcttaaactggattagtgaaagtgatcaaaaggaccaactgagttttggaaattgagttttacaagacagggggtggactttgaaaagaacttcctaaatcagacattattgattgcctcatcacagccctaaaatgaaggtcgtcattaagaggactggagtagaatcatcgactgaatgttgatactatctgcacagtagatgaaacgtgatgtaacaacaatcagtggcaaaattccaaaagtaaaatccaatgatacttcatgagctggaagttcattttgacactgaaagttgctttccctgtaatagtgactkatttagaacaaaatttcatagctattctcaagggacactaaaaatattttttacaggcctacattgatgaatttctgaattgaataattggaatgttgttagacacaaacatgatgcttatatagattttctac

SEQ ID NO: 903663 - DNA, 603 bp, Homo sapiens
atttaatcattatgcatctctttttgttgcttttttcaggaggagacttttattaagtatctagttttaattttcagtgaacacagcactcaacggaaaggttggattaatgtgtcttctgttttcccttttccacctcctgaagtttactattttagaagctttcgcaggtagagactcttaacgatgaatcatcttgtttataagcaaagtttaacaaatgttgacttgtaataaagcccattatttgtattaataataaaaagtagagtgtgtatacctgcatcatggatgcacactgaattgagaatgagattcttacaactatgtttattaatgtgtcaagtaataaaaatcccagaataaaaatattagtagctgggactacagccatgagaaactatgcctggctaatttttgtatttttagtagagatgaagtttcgccattttggccaggttggtctcaaattcctggcctcaagtgatctgccctcctcagcctcccaaagtgctgagatttcaggartgagccactgcacctggcagtgtttgaagattttcattataatttacttcctagttgccaaatggccccatgctt

SEQ ID NO: 903664 - DNA, 644 bp, Homo sapiens
cagggaaagtgtgtgcttaaagcccacccactctgagagtattattcaccagggattatattatttataaatataatttccatatcatatccataaagaatgtaaaaaagaggccaggcacggtggctcacacctgtaatcccagcactttgggaggccgaggcaggtggatcacgaggtcaggagatcgagaccatcctggctaacatggtgaaactccatctctactaaaaatacaaaaaataaaattagccaggtgtggtggcgagtgcctgcagtcccagctactcgaaaggttgaggcgggagaatggcctgaacctgggaggtggagcttgcagtgagccgagatcgtgccactgcactccagcctgggcgacagagtgagactctgtctcaaaaaataaaataaaataaaagtaaaaaagcacaaattcttattttgaaaaatatttcacttctctaaccttctaaatcttgcttcatgtgaagataaaccattgtatttcagggttgcttcaaaacatatctttgaggctgggcacggtggctcacgcctgtaaycccagcactttgggaggccgaggcaagtggatcatgaggtcagaagatcgagaccatcctggctaacacggtgaaaccccg

SEQ ID NO: 903665 - DNA, 652 bp, Homo sapiens
taggctagatttcattttttggtcaaagccattcaacaagtctctaggaagttccaaacttccccacatcttcctgtcttttgaattcttcaagtctataggaagtttcaaactttcccacattttcctatcttcttctgagccctccaaactgtttcaatctctgcctattatccagttccaaaatcacttccacatttttgggtatctttacagcagtaccctactctaccagtaccaatttactgtattagcctattttcatgctgctaataaagacatacctgagactggataatttataaaggaaagagatttaattgactcacagttcagcatggctaggaaggcctcaggaaacttacaatcatggcagaatgggaagcaaacacatccttcttcacatggcagcagcaaggagaagtgccaagcaaaagcagggaaagccccttataaaaccatcagatctcataagaactcactcactatcacaagaacagtatgcccccatgattcaatcacctcacactgagtcccttctgtgacatgtggggattattggaactactcaagatgagatttgggtggggacacagtcaaatcatatcagtctatcaaatataagaagccartcagcaatttgttctggttt

SEQ ID NO: 903666 - DNA, 650 bp, Homo sapiens
ctttgtatatctctggaaagaggtgaatttgtcaatgaaaaaagtattgtgtagttcagtgggaaaaacctgttgtctgttatagtatcacatcactttcttacattgtcatggtttaaattattatcttggtgaaatatataggttagatacttaaatgttcatattattagcacactacaggtactacccttaaatcataaataatattacccattgtacacagtttccagatatgagttagagtggctgtgaagcaactagaggcaaattgtggcacagagaatatccaggggaaaattgattatgtaagcaagggctgttctactttgagagagagacagacagactacataatagtaatatattatataattaatgttatagatacactgaacaataaaacattttctggaattatgaattaattaacaacctggatttctgtttccagacctataaaccatgtaatgaaggactgaaattcgtttggcatacactttgtttctttaaaattgctagtttctttctgttatttttacattttcttgtcagagratcaaaactattagtcagtagagttttgtccatgaaataatatttggacatttgtgaatttttccctattttttttcttcttttatttatac

SEQ ID NO: 903667 - DNA, 672 bp, Homo sapiens
acaaaattaaatataaagattgagtatcccttatccaaaatgtatggtaccagaaattctttggatttgggattttttgaattttggaatatgtgcatatatgtaatgagatctcttggggatggaacccaagtctaaacatgaacttcatttgtgttttatatatactttatacacagaggctggaggtaattttatacaatatttaaataattttgtgcatgaaacaaagtttacatacattgaaccaacagaaaacaatggtgtcactgtctctgccactcacacagtctgtggttgtttggcgtcactatcattcctgagtttgagttcatatgttaccataagcaattattttcttacacctattcacacttaagtacttaacagtaaaaaaatgtggcataccattaacatagtgacacaatagagtgttcaaaataactaagcagcacagtagcatcacagattagggacgctcaacctgtaaaaggttttgagattggaaaggaagaagtataactatctcaagtcacagatgacaagttattatatataaaaattataacctacataaaactactattagaytcacaaatattactattaggactaagaaataagttccacaaggtgacaggatacaagatcactatacaaaaattaacttta

SEQ ID NO: 903668 - DNA, 657 bp, Homo sapiens
ccatacctattctgctattttgaagcatcttataacatttttttcttatattttttctcaagccaaggacaaatacctttactattgcaggatgccagcttagttcgtcatatattatggattcccagctagccacaactcggctgcttcactggaaattgtgctttcaaatatctaactgtactttctctctttttgttagagatcctaattttttaagtaatttcaactttcattttagattcagagtgtacacgtgcaagtgtgtcacatgggtatattgcgtgatgctggggcttgggatatggatgattcagtcacctaggtagtgagcatagtacctctcaggtagtttttcagtactctgcctctagtacccccagtgtctattgtttccttctttatgtccatgtgtactcggtatttccatatgtactcggtatttagctccaattttaagtgagaacatgtggcatttacttttctgttctcaagttaattcacatacgataatggccttcagctgcattcatgttgctccacagtatatgatttcattcttttttacggatgcatagtattccatggtgtatgtgtaccacattktctttatccaattcaccattgatgaattgcagccaacaaatgtatgaaaaa

SEQ ID NO: 903669 - DNA, 555 bp, Homo sapiens
tagctctcaagttttttgtgtgcattccaagttgtgaaataaaatgaaaaaaggacctcaattcatgaagtcaatcaaattattatgacggtgctttatttattccctgggatactgctccgagagcaatagctttcttgtcagatttattttctgatctttaaccttgatatgtgtatttattagattaccactggcatccatgctttgttaaagaaatttgagtgtttaaaaaagagtgaggtttgtagaaatatcaacttttgtacacagcagagagtccaaagggcaatttgtggctgatcacagagtagaaaatataatcctaaactgtatagaagcagggtttcatagattgccttcaccccacctttgaaccaagtgaatatctcaagaacatgtatgctgtgttctttatgagaataaagtttgaagcaaatttgtcctatgtttaagttctttttttatcatgtacttatgtggcttttttacaagttatttaaygtccctgaggggcaatatcttcttttgtaaaataaggatattgataccatt

SEQ ID NO: 903670 - DNA, 599 bp, Homo sapiens
tcatcatcatcatcatagtaataacaataataagcttcacaccacaccctaaggataaactaagtcaaacagaaatatttaagtttgttttattggttaaagcagaatagtaaaatcattttaatgattttaacatgtcaagtttaacaaagtgcatgataaatataaaaattagttgtttaaaaatcatcttcaaaatatgtatttcaaatcaataaggtcctctatattaatttgaaagtcactatgttttgatctgtttttaaatatttttctgtatggaacttttgaatgacatgtgaagaacatgtactgctaaaggatgtataaattaattcatcttgtaataaacagcaatcttattatttaaaacattaatgttaaaatgcattgctagctctgatatatttatttccacatatcaaattcattatttttacctatccaaataccacattctagtatctaaaytggtaactcttatacccagatatgtgttgcacttaaaatatcttattgcttataaatatgtttcttcctttgcctgggttttttttgtttgtttgtttgtttgtgtttttttttttttggattctcaa

SEQ ID NO: 903671 - DNA, 608 bp, Homo sapiens
gtagagatggggtttctccaagttggccaggcttattgcaaactcctgacctcaagcaatctgcctgccttggcctcccaaaatgctgggattacaggcatgatccactgggcctggtgtaatattttttcttttatgttgaccttgcaggatctgatgactatgtgtattggggatgttcatcctgaagtaatttatttaacattttttgtagtataggtatgtagggaatgaatcctcatagacttttctttctgaaaatgttgtttgtgttttctttttattttcagtgtacagaattctgagtaaactattttttctttcagcatgtaaaagatttttgtaacattaacttctggcttctgtggcttctgatgaaaaaattgctataacttttctttctatatttcattttattttctctgtttttttaagattttctgaatgtctttggttttcagtagattttacgttgtatgtctggggtgggtgcattttttttttttaataattagccaagttgtggtgytttgagttttttgagtctgtggtttaatatctgtcaacaattttggaaaattatcagccattttatttgaagtctttct

SEQ ID NO: 903672 - DNA, 678 bp, Homo sapiens
gggaatggtgggagttacaagtcaagatgagatttgggtggcgacacagccgagctatatcagtagggctctttacatataagaatgttagaaattacagcagtcttatcatctgaaataattccaattagaagaaagaaaagtgaaataatttaagggtaagaggaatcaaaattatcatctaaaattttatagagagataaattttccttcaaaacttaaaagataaacaagacttcctcaaacaaaaaccaactgaattcattgactgtagaactgcccttcaggaaatactaaaagatgttcttcagggagaaaaaaaataatacaagtcagaaacacaaatctacttagaaaagaacagtaagggtataattgaagataggatcatttatatttcttatctgtaatctaaaataaaagtttaaaaaactaattataataccaatgtacagggctgattatagaatatgcgtaaggagagagaaattaggaacctttggttataaggcattggcactatatttgcagtgccatagggatatttaaagatagacttggaataattataaatgtgtattgtaagctctagggmaatcactaaaacagaaaagaggcagaaaatcaataaacaaaggaaaaaatacaacaaagagaaaacatggtagatattaatcc

SEQ ID NO: 903673 - DNA, 504 bp, Homo sapiens
aatttgctaatatcccaagctttgttaatagttatttyagtgtttactagctgaatttactaatattcctagcattgttaacaattactttcaattgctgatgaagaatttgtagtgctatccaaattgaatgatttattctctagaaaaacccacctactgagcagtaagttggaatagtttatttatgattgtcattgagatactttacatattattaatgaatattttctatattgttatagtttaattaaattatactctccaaataaaaaattaaactataatatttgtcttatattcactatagctataggtcttataaatattcagtattttcagtgatatttattcatttactcctcattaataaaaaacccaattttctccacatatatactgtgcatcatagaaaagtcataggtgttgtgtgttgaattgtatcttccaagaagatatacataaatccttacttctagtacttgtgactatgacctagttgga

SEQ ID NO: 903674 - DNA, 678 bp, Homo sapiens
agcaccaagaggatgatactaaaccattcatgagaaatctgccctcataatttaattatgtctcaccagaccctaactctaacrttgggaattacattttgacatgagatttgggcagggatgatatcctaagtatatcattgcatccctggcccctcccaaatcacatgtctcttccacctatgagcctgttaaaaaaaaaaagagaaaaaagagaaaagaaaaacttccaatctggaggacagtggccctcttctcacagctccattaggcagtgcaccagtgaagactctgtatgggggctctaaccccatattttctttatacactgcactagcagaggttttctgtgaggactctacccctgaaacaggtttctgcctggacacccaggctttttgatgcatcctctcaaatctacacataggcttcccagcttcattcactcttgcattctgtgcacatgcagacttaacaccataccttgtagaagctgccaaggcttacggcttgcaccctctggagctgtggctcaagctgtgcctgggccctttgagccacagctgaagctggaagatagggatgcagggagccatgatcccagactgcactgagcagcaggaccttgggcctagcccaggagaccattgtgtcctcataggcctcaaggcctgtgaa

SEQ ID NO: 903675 - DNA, 566 bp, Homo sapiens
acaatttcctgactttctagcaggcatctaaaggccaacatgactgctttcttatctacatttccagttcatgtaataacatggaatgaacagcatttctttagataattccttatatttcatcctgtcgatctagaataataagataatttccatcactatattgcattcatttgcctacctgttgtttcatatttataacaccccacacacatttatacagtatattatagaaaactggctagccataagcagaaaactgaaaatggacccctttcttatatgttatataaaaattaactcaagatgtattaaagacttaaacataaaacctaaaaccataaaaacactgcaagaaaacttaggcaatgccattcaggacatgggcacgggcaaaacttcatggctaaaacaccaaaagcatttgcaataagagccaaaattgaccaatgrgatctaactaaactaaagggcttctgcactggattagaaactatcatcagactgaacaggcaacctatggaatgggagaaaatttttgcaatctgtccatctgacaaaggtct

SEQ ID NO: 903676 - DNA, 607 bp, Homo sapiens
tttctgatatggccatgaggacaacaaagaaggggtgtgtgtgtgtgtgtgtgtgtgtgtgtgtgtatttttaattttcaatagattgaatagaaaccaaagtaaaaacaaattagagtctgattatttataatagcaatgatcattttgtgcctatagattttgaatctcctgtatttgttaatatctcttcttactcagacacaagctgcccttgtgtttgacaaccagctatgtggttaatttatgaagtagaagttataatatttatcattttcatagatttttttcacatatgaaagttgataacaagcagctccaagaaagcagagctggcctgtgataggactcagtgtgagcaatgcagtctccattcagacagcaacacggttgctgctgacaagctgtaaataggtgttaaggtaatgaaaaagacaacatttccacttacacttttattggattctagccctagggtcatatcatcccaagaatttcacagcataaaggtgagataaacagcagcatcaaggtgctgtgaatatgawgaggtagcttagttttccctaattttctgagcaacaaagagacaacttttagagattac

SEQ ID NO: 903677 - DNA, 644 bp, Homo sapiens
ggacccagtgggagataattcaatcatgtaggcagtttccaatactgttctcgtggtartgaataagtctcacgagatgtgatggctttgttttgttttgttttgtttttttgatgtagtctcactctgtcacccaggctggagtgcactggtgcaatctccactcactgaaacctctgcctcccaggctcaagcaattctcctgcctcagcctcccgagtagctgggattacaggtgcctgccaccgcgcctggctaatttttgtatttttagtagagacagggtttcaccattgttggccaggctggtcttgaacttctgatctcaggtgatctgcccacctcggcctcccaaagtgctgggattacaggcatgagccactgcgcctggccgatctgatggttttataaaggtttccccttttgcttggcttctctcttgcctgctgccatgaaagatatgcctttctcctcctttgccttccaccatgattgtgaggcctccccagccatgtggaactgtgagtatactaaacccctttttctttatatattacccagtctcgggtatgtctttattagcagcatgggaactgactaatacactcattaatcaacctctcttcatccccctcccacccttc

SEQ ID NO: 903678 - DNA, 648 bp, Homo sapiens
gatgttaaggtagacaagaaactcagttgaaatgacagagtataatttctacrtttaaaatgttgtgttgactaatgcaattaatttgtactcagttataagtagaggcgatgagtaccaaggcatatgatcagtgcaagtatacccctgagacaatataattttcagggaatcaaaataatcagcaagagagcatatatttccttaatggagtactgagagtttattagcttctactggagtgctgattaagaaaaaggagaaaagaggttcagttgagtttttaaactgcagttaaataaaaagattttgcctatgttatttgcatggttaatgtatctagaagggttaattttatattgaagaaacaagtgtagtaattatagaaatgaatataaatattaccagtggatttgaggaattaaaatgtcacagtttcatttattactttactatatcagacctgtgttaaaaagttttgctccagttgaacaaacgagtaaaataaatataggaaaaaataccccaaaaacttttacggtatataaaaagaagaaaagcgatgtactttttattttctagaggtgatgaaaagtgaactagaaataattcctctgttaaaccaggcatcttgtaaaagagaaccat

SEQ ID NO: 903679 - DNA, 599 bp, Homo sapiens
gctagagaataaacaaatgacatgattctagaattatggcaccttggtctcttagcctttcaatttcctagcttctactagagcttactcagtatggtaggctattgttgaatctatataaatccccatatggtggcacgtatctccaaaatcctattaatttatttactcattcaacaattgtgagtaccttctacacagcatgctcaattctgggtgtctggggtgtaaagatgaaagatatatcctctgttcttaaacagagtccaaggagaaaaacagataaggaaacatactaggtatgatagtgttgtcatattccaacctccagagactgagaaagacttcccagaggaagtgacacagagaacatagaacagaataaaacagagaaaagagagaagaatagaatcactaacactgatggcttgctgcaagtgatagaatttttctaagtaattgatgtgaattaactcatgtaatactcacaacaatcctatgagttatgaccgttattatttctatttgaaaaatgagggaaccgaagcatrgtgaggtcacacatctttcaagtgagtcatgattggacagccggcatt

SEQ ID NO: 903680 - DNA, 616 bp, Homo sapiens
cagctatattaacaataaatgaatttattaaacatttttcatggatcttccattatatatctctgttttgattattataaaacagaaagtcaaaaaaagggataaacagcagtggggaacacttactaggtctcaggaaccacatgctttaccatttcacaacatcactacaatatatgcatttttatatcacactttagagatgtgataacaagattttaagaatataagtccctggacttgggtaagatagttagtaaacagtaaagctgagactgaaacaaatctgacttcaaagcccatttactgcaattccatactagtagcatctttgcagcagtaaaaataaagtagtgaagaagaattaaagatatgcctaataaccaagaaaaagaaatagctccttaagcagtaagaattagaaaaaaaatcatcaatttaattaattgtatatatgaaagaaagaataagttagaacacctggccaaatttytgcatttctgtactggagacttacataaatgggaaatgcagattctaaaaacaggagcataaggcagtctacgaaagtttgatgttttatggacatcatctgacttgccctttcttttcacct

SEQ ID NO: 903681 - DNA, 692 bp, Homo sapiens
tgatagatgctcaatacatgttgactggatgaacaaacaaagatagggtccctattccaggatggtagctaattctgtccttggcactcacaggctgccacttgggcccmtttgtggcagaatcggcaggaggggcccatgggttgatctcatcactgtggccccacacggtgaagagggctgccgttcctcagtgtccacggggtttgtggccagaggagaactcctgccttgctgctgaggggatagctgcaatggtgactgatcttcctgcccacttcctcctgagcaagctgcattgaagacacgacccattcccactctaacggatggagttagtcaagagcggagagcagagagggctggactaaatgtccctttccttcctacctgctggtgaagtactgtgttgaatacaatgaaatcctagaagtatatagaaatagcagaaaatttaatccaaagctaattctgcttcacctttttaaaaatttggaaatcctgtaatatatttctgtaataaattaaatagcacagacagtgactttcaggcaaaattctgcaaagaaacctgctttcctggtctccttattcttcttaaaataatagagaaaagcttgatttaaaaaaatatgtctaaaaagttgtcattaagtatgacatcagggcactccatgcagactgagtttctg

SEQ ID NO: 903682 - DNA, 610 bp, Homo sapiens
aggattaaaactcccaaaaactaattcgtatttctagttttaatcctaaaaaacctaactattgctcccctccatacctctcccttctattcatycctagtggctattgtcctcatctttaagtccatgagtaaccaatgtttagctcccacttataagtgagaacatatggtatttggttttatgttcctctgttaatttacttaggataatggcctcgagctgcatcaatgttgctgcaaaagacaagattttgttccttttcatggccgtgtagtagtccaatgtatgtatataccacattttcttattccaatccaccattgatgggcacctaagttgattccatatctttgctattgtggataatgcagcgatgagcaaacaagcgcatgtgtctttttgttagagtgatgtgttttctttcaggtatatacccagtaatgggattgctgagtcaaatggtagttttattttaccttctttttttttaatcttcctttaagttccaggatacaagtgcagaatgtgtaggtttgttacataggtatacgtgtggcatggtggtttgctgcacctatcaacctgtcatttaggttttaagctccgc

SEQ ID NO: 903683 - DNA, 547 bp, Homo sapiens
gttttaagaatgggagtttccctgcacaagctctctctttgcctgctgccacccttgtaagacgtggcttgctcttccttgccttccaccatgattgtgagctcccccaccagacacgtggaaccataartccattaaacctctttcttttgtaaactacccagtcttagatatgtctctatcagcagcttgaaaatggactaatacagtaaattggtaccaggagtgaggtgctgctgaaaagatattcaataatgcggaagtgactttgtaactgggtaacaggcaggggttggaatagtctggagggctcagaagaggacgggaaaatgtggaaaagtttggaacttcctagagacttgttgaatggctttgcccaaaatgctgatagcaacatggacaataataaagtccatgctgaagtggtctcagatggaaatgaggaacttgttgggaactagagcaaaggttatgttttagcaaacagactggtggcattttgcccctgccttagagatttatggaactttgaacttgagaagggaaa

SEQ ID NO: 903684 - DNA, 585 bp, Homo sapiens
ctttttggccctgagtggcatctggggaagaagtgagtaaagggactgggaggctgctcactctygctgcagaccactgggatcctggctgcaggaagctccacacccccatggacatgtgagttggcaaggagctctccctggagagtagatggagatggagctgtagcaggcacagagccaggactttttatcatgggtcagatctggtggagctcaaccataaagtcccacctccgtggctgcctatctctctcagaggctttggccccagctaaactgcagggagaaagcaaggcctgcttacccgcaggattgggacatgtctatcctgtaggcatgcctgtccaccagcctcttacatggcccctgcctggcttcctgggagaagcatgtatacattgtagtttctgctacccaacctggatgcttggctccacctgaatgcattctggcggcgccagaaatccctcagatccctcaccacacttggaacctggccctaagcatcaggaagagggagtcataagcaagtcgtggcactccagtgctgtggcctgtggttcaggagtgccaagctgggat

SEQ ID NO: 903685 - DNA, 637 bp, Homo sapiens
ggggatagatttctcatggctctgtgctgtccttgtcatwttgagtactcacgagatgtggtggtttaaaagtgaagcatacccctccctgatctttcctgtttcaactcctaccatgtgagattcctgcagctctttcatttttcatcatgattataagctactttagatgttaatattgttacaaaatttcactgaattttcttgtaaaattacctgacaaagtttatgttattataccattaatgtgataaataaatatattatgacattacaacatattatgatatcataattcatatgtattatgacatcacaatatattatgacatcataatgcacacacaacatgacatcataatatattatggcatcataatttatactacaacatcacaatatatcatgacatcataatgcacatgtattatgacatcaaaattcatagacattatcacgtcacagtatattgtgacaccatcatcagtatgtgttatgacatcacaatatattatgacattatacttcatatgtattatggcatcacagtacattatgacatcgtactttgtatataatatgatgtatcatgaattattatgtaattgatatgtattacatatctattagatggctc

SEQ ID NO: 903686 - DNA, 637 bp, Homo sapiens
ggggatagatttctcatggctctgtgctgtccttgtcattktgagtactcacgagatgtggtggtttaaaagtgaagcatacccctccctgatctttcctgtttcaactcctaccatgtgagattcctgcagctctttcatttttcatcatgattataagctactttagatgttaatattgttacaaaatttcactgaattttcttgtaaaattacctgacaaagtttatgttattataccattaatgtgataaataaatatattatgacattacaacatattatgatatcataattcatatgtattatgacatcacaatatattatgacatcataatgcacacacaacatgacatcataatatattatggcatcataatttatactacaacatcacaatatatcatgacatcataatgcacatgtattatgacatcaaaattcatagacattatcacgtcacagtatattgtgacaccatcatcagtatgtgttatgacatcacaatatattatgacattatacttcatatgtattatggcatcacagtacattatgacatcgtactttgtatataatatgatgtatcatgaattattatgtaattgatatgtattacatatctattagatggctc

SEQ ID NO: 903687 - DNA, 679 bp, Homo sapiens
tttttacggtaaaattgcacttcattaaatctactcctaaatatttctttctttttcatacatacacaaatggattgtttttttaattttattttcaggttgatcattgttagtacataaaagtacaattgaactttgcatattgattttgtatcttgtgaccttgctgaactcatgtattggttttagtgggttttaatgagttttttataaacttttatattcacttatgtcctctgcaatgatagacaattctaacatcttattttcccacattgatgattttgtttttttctctcatgtaatttctttggatgttaacatttttgccttgttctaaaatgtcaagacacaacaaccagtattttactattatggcgttaggtgtaagtttttcactgatgctctttagcagatttaggaagtttgcttgtacccttcctttccagggagattgtgaatgaatattggattggtcaaatgctccctgtgtctgttgaaaggctctttctgttaatttcctttatcctattactttgtgtaaggcactgattgattatcggatagatcaatattgcatctgtaaaataattccatttggtcatggtgtacattcattttgatatattcttgattcatttygcttttttgagaatttctctgtgtgtattcatcaggg

SEQ ID NO: 903688 - DNA, 654 bp, Homo sapiens
atttcatcctggagccttggaagcatcctacwggaccccctatctaccccactccatctctaatcggctgagacccaactctcagccacatagagtcagtcacagaaggctgagggctgggcaccaagccttctgctgggcaatgagtccctgaacaggctgagtcgccccagggcacaggcctcccttccttcatggccttcaccagctttttgtgtcaggccctcaaggcttacgtgaaactcttctgagctttgtgcaacatatgaagacatatagtcagagaaacagactcataatttgtcaggtcaaagggctatggagaagctagagtcacttgggtgccactgtgattagtttcatgtccattgcctgctggttaaagcctgaggtcttcgcctaccacccagggccctctggaatctgtctttagccaggattccctacccaaatgattttatcttcgctttcctcaggaagtatggactcttttgctcctacgactctcagcccagaaccctgcaccctcctggtgacctccctttgtctctttacctgctttctacccttgttcaaaggtacacgtcaaagccactagccacatactgatgaaacaacctttgtgaatgattttcttttaagatttagaaaaat

SEQ ID NO: 903689 - DNA, 291 bp, Homo sapiens
acacagagactgaaagtgaaagggtggaaaatgatattccatgcaaacagaaaccaaaaaggagcagaagtagytatacttatatgagaaaaaatagactacaaatcaaaggctgtgaaaaggacataaaaggccactacgtaatgataaaggggtcaattcagcaaaacgatataacaattataaatacttatgtatccagtaccagagctcccaaagtatacaaagcaaacattaatagatctaaaggaagaagtagactgcaatacaataatagtaggaaattttaac

SEQ ID NO: 903690 - DNA, 262 bp, Homo sapiens
catctacatgctgcaaagtgggatcatcctatggtgtatcttttctgttggacccaagcatacaccgggtttctccagctggccactaagtctgagggccagttcttagtccaatctttttttgtatctccctgacttttagtagtagrtgctcctctaatccctgctaatcactgagtgataccaatacagatcagaggattagctaattcagtggagggatgctttttgagagtagacattaggctgctagtagcttcca

SEQ ID NO: 903691 - DNA, 272 bp, Homo sapiens
tccaggcagggtgccagggcccagtgtcagttacctgacacagagtgtmtcaatttgtcactgttaggtacttaccttctcctggcccttattaatctacctttttaacaaagagaaagagcaggcctccagctcaaggccttcctctagaagttgttttgatggtctttgtctctttttggcaaagaaggcagatcttttaattttggtagagttctaataatctctttctaaataaatgtatttaagttaaaaaaaaaaaaaaagagaaa

SEQ ID NO: 903692 - DNA, 635 bp, Homo sapiens
atttaacatattaagaaattataagaattaaatttaacataattcaatgacaaaaggatttttttaatattgaaggagagtttaacattcagaacaaaaaaagtatgaaataagtaggtatgtaaaattatgatgagtctatgaaaattcagcacataaactgatcagagttttgagtttgcaacaacaatgaaacactcatgggagtgttttccaacatggcccttggttgctttgctagagttggaatagcaaaggaccacaggctgagctggctggtttgaacaacagataatgtattttctcacaatttggaagctgaaagtacaagatcaaggtgccagcagggttgatgaccacctcttttttgcctcttgatgttgtcatcatcagtcctctgtgcacatgtgatcctggtgtctctctgtgggtctaaattttctcttctgataaggacaccagtcatattagattggggcctacaccagtgatcctcttgtaacatattatctctttcaagggcctatctccaaacaaagtcacattctgaagtactgaagtggaaygattcttgtcttagacatcatggtattttgggctgcagtggttaagaaagtttcagaaaaaaagaggga

SEQ ID NO: 903693 - DNA, 602 bp, Homo sapiens
ccagggatctaactcgataaaagaacttaactcagcacagcaacttatatgagtggataaataacaggtgcctcccgcagtcttatcatttctctaaagatgggttttgttggaaagtagaagatctgagattatgctttcttgtgggcacctagataaatggtaatctgtgtttctaactgatggaaaacctacacagtttgtaaagcagacaagtggatgatatgtataaaagtatattatagaaaaattgactgggcaatcaatccattaatgaatccaatggctatccatagaccaccatcttagtcattcaaatatctgaggcatagccagtggtattcagtaggtgctcagtaaatgcttttgaattgaattcctaggaaatgagaagcttaggtggcaaaaccctgaagggcttcacccgtacttgaagatgtctggtgactatcaacatttccagcatcacctctgccgtttttggcctttgtgagccagagcaggtggtgaccgcacgatttgccaaggttagctgaccccaaaagattgtgcaaaaactcctactacatcctgtcaaaraaacaaaaatgatcatgtccttg

SEQ ID NO: 903694 - DNA, 610 bp, Homo sapiens
ctgttctgcagcctccactggtgatacccaggtgaacatggtctggagtggacctccagcaaactgcagcagacctgcagaagaggggcctgactactagaagaaaaactaacaaacagaaagcaacaacaacagcaacatcaacaaaaaagagccccccaaaaaaccccatccaaaggtcatcagcctcaaagatcaaaggtagataaatccacaaaaatgaagaaaaaccagccccaaaatgctgaaaattccaaaagccagaatgtctcttctcctccaaatgattgcaactcctctccagcaagggtgcaaaactggatggagaatgagatagatgaattgaagtaagcttcagaagatgggtactaacaaactctgagctaaagaaggatgttctaacccaatgcaaggaagctaagaaccttgataaaaggttacaggaaatgctaacttgaataaccagtttagagaggaacagaaatgacctgatggagctgaaaaatagcaagaggacttygggaagcatacacaagtatcaatagccaaaccaatcaaacaggagaaaggatatcagagattgatgactaccttgccgaaataaggcatg

SEQ ID NO: 903695 - DNA, 677 bp, Homo sapiens
accaatcaaacaggagaaaggatatcagagattgatgactaccttgccgaaataaggcatgcagacaagattagaaaacaaaacaaaacaaagaatgaaaataaacgaacaaaacctccaagaaatatgggactatgtgaaaagaccaaagctatgattgattggtgtacctgaaagtggggggtagaatggaaccaagttggaaaacacacttcaggatattatccaggagaacgtccccaacctagccagacaggctgacattcaaattcaggaaattcagagaacaccactaagacactccataagaagatcagctccaagacacataatcgtcagattctccaaggtggaagtgaaggaaaaaattaagagcagccaggaagaaaggtcaggtcacctacaaagggtagcccatcagactaacagcagatctctcagcagaaacactacaagccagaaaagagtggggggcaattctcaacattcttaaagaaaagaattttcaacctagaatttaatatccagccaaactaagctgcataaatgaaggagaaataaartccttcaaggaaatgccaaggtattttgtcaccatcaggcctgccttgcaagagctcctgaaggaagcactaaatatggaaaggaaaaaccagtaccaaccactgcaaaaacat

SEQ ID NO: 903696 - DNA, 657 bp, Homo sapiens
atggagaggttgcaatttttcatcagatgaaaaatccagaggatgttttcattgttgagctaaatgaatctgcaagtctatgctgccctctagggcggcctacagtgcctttaggcgagtagcaggagcaacacaaaacttaacagaggtttccctgcggagaaactccctttaagaaaaaaggagaaaccaaaaaggtgggccagcaccggaagcgggggcgcgggttcgggtagcggggacgcgcacgcaccttgcgcgtcttcgcccctcctgcggttgccaggcaaccggccccggaagttgcggcaggtgcgtccgcagcgggcgccgctagccagcggaagatggcggagggcggaggccctgagcccggcgagcaggagaggaggtcttccgggccgcggcctccgagcgcgcgggatttgcaggtgaggcgaggagccgggggagggagcgcggcggtggacgcgggctggtgacggcgcgggctggtgcgagttggaggccacctctggcctcggcggagcctttccccgaccccgtctggggatagaatccggcrcccggtctcccgatgtcgggtcttgacactgtggtggtcgtgaacacaagtgcccaagcctccagcgctggtgctttgtctcccttccaccc

SEQ ID NO: 903697 - DNA, 368 bp, Homo sapiens
ttaatattgttatgtgtgaatttgatcctgtcattatgatgttagctggttattttgcccattaattgatgcagtttcttcacatcatcaatggtgctttaccatttggcatgtttttgcagtggctggtactggttgttcctttccatgtttagtgcttcctccaggagcttttataaagcaggcctggtggtgacaaaatctctcagcatttgcttgtttgtaaaggattttatttctccttcacttattttgcttagtttggctggatatgaaattccytgttgaaaattcttttatttaagaatgttgaatattggcccccactctcttctggcttatagggtttctgccgagagatctgctgt

SEQ ID NO: 903698 - DNA, 590 bp, Homo sapiens
cagagttcctactagggcactgcctagtggagctgtgagaagagggccactgtcctcaagaccccagaatggtagatcaactgacagcttgcagcattcacctggaaaaactgcagacactcaaagccagcccgtaaaagcaggtgggagggaggctttaccctgcaaagccacaggggcagagctgcacaagaccatgtgcaatttctcccatttggaatggctgtacttatccaatacctgtacctccattttatctgagaaataactagcttgcttttgattttacaggctcataggtagaagggactattgagaaggcatgattggttttgaaatgtgaggacatgagatttggaggggccaggggtggaatgatatggtttggctgtgttcccacccaaatctcaacttgaattgtatctcctagaattctcatgtgttgtaggagggacctgggggagatcattgaatcatgggggccggtctttcccttgctattctcatgacagtgaataagtctcagtagatctgcygggtttatcaggggtttccacttttgcttctacctcatttttctattaccgcta

SEQ ID NO: 903699 - DNA, 668 bp, Homo sapiens
atattcaaaatttgattcattctgaggcaaattgctctctagctgtgaacttgtgaaaccaaacaagttatgtgctcccaaaatrcaatgatgggacaggacaggcacaggacagacattcccattccaaaagaaagacataggaaggaagaaaaaagaggcaggtctcgatcaagtctaaagctttaaacctggagaataatcttttttgacctgatattttgccctccaggctcactgcgacaaaggtcctgccattaagatggaggaagaaccctcacttaggggattgcaggtccccccaagcatggaaataaaggaaaatcttgagtgccttcaagagaaatcccaagtacctagctatccctgaaaagtaaataagtaacttgataagcaagaatgtaatagtagcttaaaacaatagcccaggaagctggaatcataggatgtttggttcctcatagaaactaaagataacatcttaacacatgtctctgtgttgtttttcagaaacccataactccaccaaatggatccactggcatgtagatctcagataagggggaactgcggactgaactctgaccaccattctttattctaaagttcttcctgaagggcctggaggaggtcacgctcatgagccagagctaacagtcttttctcct

SEQ ID NO: 903700 - DNA, 494 bp, Homo sapiens; identical to SEQ ID NO: 900075

SEQ ID NO: 903701 - DNA, 679 bp, Homo sapiens
aagaatgcaggttctgatgagcagtgaggatcctaagttcagcctcccatgttttatacgcatggtacaccttcatgattgagatttctgagatctttaattagaaaagaagccacaagtaaattgtagaaacatctacagctaagtgatactccaaaaagcagtcattttaaatgatttgctctaaatctaagcagtttgtatgtaagtggctaaggtattcttagagattcctttagcagtaactgcaggcattggcaagcctaataaatattaaactgaaatatatgtccttatatcactcaaatatgttggtatatattgctcccataaaaaactgggaagtctatggctgacttgctcatttctgtttctgccactggatctttttctccacaccctgccaaatctttgcaagaaaaacttgatattaaactccataacaaatattgttcttagagaagccatgttaagaaattcttggatctgagaactatagttcagtatccattttgtggtgacattttatttctttaaacttagaagcagtatgccaaatattcaccatttattattcayttgctacttttttactgcccttcctcttatttttgagtggccttttcttcctctttatttcacctctcttacaatcccctcatatcttcttcctgttttc

SEQ ID NO: 903702 - DNA, 626 bp, Homo sapiens
ccttagagcttccttagagaggactttcctgaccaacaaaacctccccttcacaggtgctctcaccatctaaaagcatcctgggtttttgttttttgtttttctaggataccatgttgcatttacatcctgtttttttaaattattattaaattttttaatttttttagagacagagtctcagtctgtcacccaggctggagtgcagtggcgcaattacagctcgctgcagcctcaaactcccgggctcaagcaatcctcccaccttggcctcccaaagtgctgggattacaggtgtgagccaccactcccagacacatcctgttgaacttttattatccatttccttactataacttgaggtccctgagggcctggttatttgtttcgatgactgcttttacgcctggcacctagaccaggatcggtaacggagcgggcactcagcaaaagtctgttgagtggtgggaaaaacagcatacactgtttaaagacccagggccggggtgcrcggctctttctgtgcctgcccaccgccagccccgcctacctgttccttagtctgggctttctgcacatagtctcggccaactttgatgcgaggggtgagcaaggctcgggagaaat

SEQ ID NO: 903703 - DNA, 629 bp, Homo sapiens
ctgataaaatagtcactggaaagtttatgcccctaataatagaatttcactctcttaaactctgatatgactaaatacttcaaaggtttaatgccaaaatatattatcaccaggtaaaggaagcttttcatgatccaccaatgagaacaatcaagccctgcatgatttggaatctggagattgggtcttctggaaatgatatcagaggaagattgcccttaaaccccaataaaagggaccatatcaagttcttcttcccacccaaattgcagtaaaacttcagggttgcaaaccttagatctacatcacacaattcaaagggacctctgcagactcttgaagtttttctccagaagcagacagcatcttacatatgtacagctctcctaagaccatgggccaagacttacctccatcctgaaagccgtatccttttactttttttcccctaattttcttctgccccaattatttccttttccttacaggaaaatccatgggaccataatctgtggatagctttacctaaggcttattctgtagcaaaaaacttgagtaatccttgggcttgtgggttaatgccaaaaactcaaraagcaatttcacaaatgccaatgcctccctgtgtt

SEQ ID NO: 903704 - DNA, 561 bp, Homo sapiens
gtgtcacccaggtgggaatacagtggggctcactgcagcctcgacctcctggactcaagggatccccccacctcagcctcctgagtatctgggatcacaggtgtgcaccagacctggctaatttttaatttctctttttttttttaaatagagacagggtctccctatgttgcccaggctggtctcaaactcctgggctcaagtgatcctctcatcttggcctcccaaagtactgggattacaggtgtgagcccctgcacccagcctcatgcagctttacatcattttgatcatgttggggacttgtgctgaatcaaactgagtgctgtatctacacttcccctgattttgctactatggaaagcttaatttaaaaggtggctatttctttagatacttttatcaaatacatgaagaaaatttcaatasatgaagaaaaaaaattttttttaactctggtaaaatatacatagcatgaagttaatcattttaactatgttaagtgtatagttcagtggcattaagtacattcacgatgttgtgccaccatcaccactatcg

SEQ ID NO: 903705 - DNA, 612 bp, Homo sapiens
tgaatttgcatgtcggtatgtcactttctaatacttgagagaagaaagctttaggaagagccccttttctggtctgyacaacaatggcatatggactgacactgggcacagtagtcaacagtttgggaccagtggtgtaatttgttctattgaaggagtgtagatcagagacattgatggtctggagaaataagagagggttcagtggagacacatctcagagtagctgaggcatgtagacctccatcgtccgaaatgatagtaatatggtttggctgtgtccccactcaaatctcatcttgaattgtagttctcataatccccaagtgtcataggagggaccaggtagagataattgcatcataggggtggtttctcccatcctattctcgtgatagtgagttagttctcacaagatctaatggttttataaagggctttcccctttactgggcactcattcttctccttgctgccgccatgtgaaaaggatgtgtttgcttcctcttccaccaggattgtaagtttcctgaggcttccccagccatgctgaactgtaagtcagttaaacttctttcttttataaattacccaggctcaggtatttcttta

SEQ ID NO: 903706 - DNA, 575 bp, Homo sapiens
tagttattgtttgaacccatttatgttaaaatttttgtttttaggaagccaaatatatcttattttaattgcttctggtttctgtttgattgttmagagagagaataagagttcaaaatgtttctcttattttcttttagcaatctttagtaacctcaactaccttttaaaatccacgttacacaaaaaatgctttacctgggatgtatttggctctaaaaagcgaagtatgagttcaactgtcactatatctataatttactttgaagttttttttttttgcacatatagtatgataccatgtgtgttacttagcttatgctatattgcagatgagctagtgttacatcagaaaacaagtactcctgaggagcaaccacaggctcttctgttatcccaatctccatcaagccatgcttttctaattagtatattggacatcagaaattgttttctattgataaaaattctattgaaaattgttacctgctcactagcttgatgaaaattagaaatacaatcttattgatgaaattaaaggtctttaagatacatagataggtcaaaaaaatttc

SEQ ID NO: 903707 - DNA, 617 bp, Homo sapiens
ctaatgggagagactaataaaaattcaatatatgtttacatgctaactacatgtgtacaarattatgttttatgtgttatatattatcaatacttcaatggatgccattctccaaattttgcacaggaatcacaatgcatgtaaaatgttgatagaatggaaacattttgattattcaagcattttctatgcaaatccaatgctgtgcctcacagtgacccaaatactctgcagttctgagattgtggagttgaccacatcatatgctgtctgaaatatttggccagaggaaactaatcatctttgttatacttttcacagggaagaagttagtaatagcaacctttaagtacaaagtcatatcccagttgggccattggccaaggacaacagataaacaaataataaaacaaaaaccaaattaacccaaacctctctctcagtacttctatggatacgtccgcaggcaactccatatccttctttaatgactgagttcacaaatttaaataatagtttactctaattttagtaatgcctctgcttccctcaacacacaaacatacacacacatgtagagcacttgacatctgggtaggcataaataatcaagcata

SEQ ID NO: 903708 - DNA, 583 bp, Homo sapiens
tggctgactcaaaagacccagccagaaggtacatactaaaggtacatactaaagccagcatctttgttgtgttcctgatgtatgtacagaacatccagaatgatacatggcacagagtctccacaartgtttgttgaatgcttaatgatcattccaatagtgatttacaaatgatcgtcctgaaatccatgatttactgttttgcttcttatttctagtcagtgatagagcaacagtcctttgtggatcatgagcatatcagcaattggtagatctgagagtattcagtgatttgggggttttatatatatattcccaaatccaaggactaatcatcatgtcaacctttctagccactaacggcaagactttgattctacatttcctaggagccaaagtgaaaaggagtcatgccagtcccccagctagtttttgttattgttattgtttttattccaacaaggatgaaacactgcaatgtttctggagcagcaaaactttccagcccttaactctaaaaagaaatttctcactcagcatgcttcagatggggcataatactatatagacattgtcctcaata

SEQ ID NO: 903709 - DNA, 584 bp, Homo sapiens
tggcaaaggtccccaaataccagtggaaatcttagtgagtgtgtctcctccaactaacgcaacccgttctctgactgggagatctaatcctgtgcttccaggtgttctgcaatccgcatktgcattctcaaaagctagagccaaagtcaaagctagcatttctgcagccacagaagaagacagtacaagccaattttcatcctccctttcctgttcaccaccctccaaaggtgctgtaggtggggcaaaaaattccctcaaaccctgaaatagtaacaaaaagatggtatgtaccaaactccaaacaaaaaagagaaaagaaataacaaaattattccccatgttaccctgattcaaaaacttccccttctttgtatctctagggcactgaccagtacctttttagagcactgaacttatgttgctgccagcagacttgtaacggggtttgtcattcatctggttgattttagttttttctgttccagcaaaccttcctcgttcaagtccctataggaccctattctgtccctgttctgtccctgtcaagtttctgctggcttctgctagtctctactagtctt

SEQ ID NO: 903710 - DNA, 581 bp, Homo sapiens
gacacagccaagagacgtgtattaaatatctgccatctgctcagaaccaggagattctaaagaaaagttccacgcgaatctgttttcctaatagatgacagaaataacaaattgtggctcargccccttctgcatccccctccccacactttggtataagcacttaacagaaaccccaacacagccaggagaggactaacgatggaaactgagcccaaattgatggctctaaaacaaggaaactggccaaattcagtcaaccatgtagttactaaccaactattttattaaatagaatccttcaaaaaatcaacctttctttttatatataccaacttccctttatcaagtgatatattacactgacttaacctttaactcttgagagcactgggtatgtatctctgtcacccacaaatcaccagtttgacagctggcaactttactcttgggcttactatattatatacttacatcttctatagggtaggagaagggctcaaaaagtctttcacgcagacctcagagtgcccatgttggcaaaatattttcatttgtaagtgtgaaatactttcagaagc

SEQ ID NO: 903711 - DNA, 641 bp, Homo sapiens
tttgtctgcactcttcagggttacaaatgccaggtttttctcaccatccctgctgtggtccagcattcagctcctgtgaggtgtttgtcttccayggttcaggaatccttcaaagccactcacacaaccgagattgtgtcccatgggcagggaggagcatcctctgtttctgtcccaacactcaaggtcttttctggtttgagactcaaagatcaagtctacaggttccaaatacaaaaggacatctaatcactcaggaagccaacaaccatggtgattttttttctggttttcacttgaatcttatttttgagatacggatcctttgaaagatcttgaaagatcttccaagaagacaatccacatatctattaaagtcaatcccttcttctgtcatccaaatagaagatggtataccccttcccaggtgcatggaaattccagtatctccaaggactccaggaggaatttcagttctcatagttactgctggctcttttggcctatatcattttcttttgcatcatgcttttgttagtagtttcatttttccacaccaaattgccttgcttaacatcagcctgattcttttgggtagtggtagctgcccagaacatgactgcctcacagctgtgcatggt

SEQ ID NO: 903712 - DNA, 558 bp, Homo sapiens
actcacagatttttacctttcttttgatagggcagttttgaaacactctttttgtagaatctgcaagtgaatattttgactgctttgaggaattctttggaaacgatattttcrcataaataccagacagaagcattctcagaaacttctttgtgatgtttgcattcaactcacagagttgcaccttccttttgatacagcagttttgaaacactccttgtagaatacacaagtggatatttcgagtgctttgaaaccttcattggaaaggggaatatcttcacatgaaaagtagacagaaggatactcagaaactactttgtgatgtgtgcattcaactcacagatttgaactctccttttgatagagcagtttaaaacactctttttgtagaatcttcccgtggatatttggaaccctttaaggcctctggtggaaaagtcaatttctttatattaaaactagaaagaagcattctcagaaactagtctctgatgtgagcattcaactcacagatttttacctttcttttgatagggcagttttgaaacactcttt

SEQ ID NO: 903713 - DNA, 648 bp, Homo sapiens
cctccatacccaaagtccttctctyacccctctccatggccactgatggtcctcaatcatgtcagctgctgtcgcacccaaggatatgattttctatggcttcctgaagccctggctgggtgagtaattgaggtgaatggggttggggatatcctttagggataagggagggtgctgcccttgaccactgtccttggttgccctgccaggggatgggctcctgctgagtggtggtgacaagtggagccgccaccgtcggatgttgacgcctgccttccatttcaacatcttgaagccttatatgaagattttcaacaagagtgtgaacatcatgcacgtgagtcccttgaactctgggtcccagctggagccttggggtagagggaccacaggcatatctgctctggaattttggttgtgctttggggacaatgctcttcctctctgagccttggtttccctatctgtaaaatgggaataacaatctctacttaaaaggtggtaatggattcatgtccccagcacatagtatgtctcaaaaggtgtgagtttccatgcttctctcacagaaatccttcaaactcaagagagtaaagatcaagattgcatagtagcaattgctgagtacaaaccgcctgaaaactcatt

SEQ ID NO: 903714 - DNA, 519 bp, Homo sapiens
tcattaatgggattagtgtccttagaagagaccctcagagcttttttgctgtcttcccaccaaatgaggatgtaacgagaaatggacagtatacaaaccggaaaatggccctcgccaggacctgaccatgctgccaccctggtcttggacttcagccttcagaactgtaagaaataagtttatggtactgcgttattgcacccccaatgaactaagacaacccacaccctggcttgtctcaggacaactctgaaggccactccatctctagagctccctacagctttggcttagaccttcttgagactacactgcagcccaactcctccctcagctcagcccgcctccttcctttccctacagtgttgatcacaagaacattcccgtctaaacattctgcacartaatctccatctcagagcctgcttcatggggatcccaacccatgtgacggtagccaactgtccttctttgtgcaggagtcctttattctgagagtacatcctagctacctttagg

SEQ ID NO: 903715 - DNA, 644 bp, Homo sapiens
atacacaaagaaaagttttagctaacttacttcaataagatggataatttgttcaaagtgccaaacacatttgctttcgtaattcatgccatttgtgtgttaagtgtataaaagagatagagaaagaatataggaaatgtaactacacatgcaatcttgggctttccaaaatgtttaaagtaccaaattcccttggtgccaattgctttaggcatttcatcttcactcagttgcatcctaaatatagcgtaggtgtgacataccctgtaaatttcaaattcacataaagaagtcccagccttcgaggcaagtcttaattgaatactaaataaaaaccttagtgtcttctgaaatgtttctgaataaatagttgctttacagtctttgatttctatgttcgttagtgtccaaattcagaatgggaaccaacttggggagaaaaagaaaaaaagactctcaggacaatctttttaaaggagtaacagataatctattttggctaagacagggtagattcaggtagwcagataatagaaaggggagtcccttgtgtatcaactgatgctggaatttgtgaaatcctataaagttttgtagaaaaaaatgttaaattcatggaaacttgtttggtcataatcctcaca

SEQ ID NO: 903716 - DNA, 625 bp, Homo sapiens
aacagcaaacacagtttggcctgtatgaactgaaacccatcacacatcattgccacgatcattttcctcatgtatgcaagttctcaagtatatttttggtcacaaaacagcaaaatcatgacaaaagcaacaataacaaccaaaagtaactaaatacgatttttatttagtatgaaatgtattgcattgtaattatttcaacatcataacatttattaaagatgtatgtatcactttattattctatgctcatcccccctctttatacaaaatggagcataatctgcacattcattgttctgcagtttgtattttgcacttgacagtatgttgatacaaagagaagctacttgtgttgctctggaagaactttattgagatataactcgtatgccatacttttcatctatagaggttatataatgtattgatttttagtatatttacgtagttgttagttaatatctaccattctttgaccataatgaataacagggttttctctgcacagatatgtccatttaagtaaagatgccaatgcagctaaatagaatcactcaaaaacaactcsaaaatgagccagggagagtggagggaaggaaaaggaggaatgcatccaaacata

SEQ ID NO: 903717 - DNA, 652 bp, Homo sapiens
cctttctctcaaattcccattctccatatccctttaggtaggtgaggatcttatccctagccagcagctgtaagggaactgggccttcctttctctggacatagcactgkaggtcccagtatatgttaagaatgtagatggtcagaggaacagaggaaaacctgcatctgagtccccttgtcatccctcctgtggattcctggggaagcatggaaaacaagtatttaaaatgacaggacaatccatctgccacccgtgggaatggtagaaaataagggatattcatggaaggctgcttttgtacagtctcacaaacagcagcccttagacctaagaggacattgcctatcagtcttctcagtgtagaggaagaactgtcagggccagggagtttgggatgagagaccacaaaaggcagagaaagaattgtcctctccccaaagtgcagatagctctagaaaggaagtaggagttgctcttaatggaccacatacagatgccctatggagacaaacaaatgacctcaagagccactggaaaacctggtctcaatgtgtagcaggatttaaaaattcatgataggaaataaagaattggtggagacagagtcttcccaatattaagcagagaaagaagttgcatgatatgcaga

SEQ ID NO: 903718 - DNA, 601 bp, Homo sapiens
catgtctttgctgttgtgagtagtgctgcaataaacatacacatgcatttatctttataacagaatgatttctattcctttgggtgtatagccattaatgggatttctggatcaaatggtatttctgctcctagatctttaaggaatcatcacactgccttccacgatggttgaactaatttaaactcccgccaatagcgtgaaagcatttctttttctctgcaaccttgccagcatctgttgtttcttgcactttttaataatcaccattctgactggcgtgaaatagtatctcatgtgactttgatttgcattctctaataattagtgatgttaaccttttcttcctctacgtctgtggccgcatttatgtcttctttgagaagtgtctgtttatgtccttagcccactttaatggggtgtttttcacttgataaattgtttaagtttcttatagactctggatattagaccyttgtcagatggatagatgcaaaatttttctcccattctgcaggttgtctgttcactctgatgatagttccttttgctgtccagaagctgtttgtttaattagatccattgtcaattttgctttagt

SEQ ID NO: 903719 - DNA, 577 bp, Homo sapiens
agcatgagggtatattttccattatgggaaaaaagasagtaaattaattctgtgctaaagtaaaataactggtttgccagaataagagaaaaaagcaggaagagaaagcagttggatatttgtttcaagactaaaaaaggcttatggaaaaggaatcttgggggaaaaaaatcttatctcatgtggtcaaagatggctgagactgaatgaattcatttacatagttttattaacattagctatagctatagtattaatagtacactgatgcaaaactagaaatttggtcttctctgttaaaatgacaaagttttcctggagtactggtttaagaaagtgaaggttttcctttatctgttaagtaactggccaaataaacaaagattttgtgttttatcaagataatttttttttaacttttattttagattcagggatacaagtgcaagtttgtatataggtaaactcatatcatgggagtctggtggacaattatttcatcacccaggtactaagcatagtacctgatagttatttttttctaatcctctaccttctcccaccctcctacctcaag

SEQ ID NO: 903720 - DNA, 604 bp, Homo sapiens
ttgaccagatatctggacagcttgtggcctaatcaagttgacacataaaagtaaccattataataggtggagttcayttcctaattattgaaatgaggcttcataaaaatctcaaataaatgaaaccataatatacacaaagaaaaaatggcttcctcaattagcagaacataaataattatttctgtagaagctgaggatcattatggcagagtgagctactaagagtgaaaaggaggaagtgatttcaaaaattcacaataagaaaaacacagactattaacacacttttcccaaaagtgaatagagcacacaatcaccaccacaaccacaaaatgagaatatcagcttgtggcccactcaaaggacaactttctaaccacacactgggatgcctgatgagccatgattttagtggcaatccaacatggaaatgaaggaaaaaatccttgtgtttgatgatgtatctctcagtagactgcatttaacaattcctgtaagggaacagataaaaacagaaaccacggaggagtatcaaaatttaattttcctcggagaactaaagggaactctttgagaaaaagaagctataaacatgaatgtg

SEQ ID NO: 903721 - DNA, 677 bp, Homo sapiens
agatgcaaaaactgagccccaaggagatgggttaattctcctagtgtcagacatagtgagactaggagatgtgttaatagatgggttaaacccatgtgtttttgtaagccatggttttcagaaagaagtaacttaaataaaacttaaatggtacttaactaatttccaatgatctggctattttcaaaacactttggaaaactggagcatgagaatattataaatgcaaaatgtttctttgaaattctcttaaatacatttcattttttttcctgtgagagctactttgcttgagccttatagaaataattctgcttttgagtactagtgagaagaaacatctttattctttcaatagatatttttcaatgcctactacgtgctagagttatgctaggctaaaaggtagaatgataaaccgatatataaggttcctctcatggtggaacactcattctactggagaactagacttttattatgtttgtagcagacaatctaatgaaattttttcttatttctaatgtccatgatttttggcttcacagtagctatcacaaaattattctgacattatccacatatggtattgctagatagccatggctgtgaaatttggttccttagcaactgyaaatgtaccttggaaaggaaaagaaattgtcatgaaatactct

SEQ ID NO: 903722 - DNA, 684 bp, Homo sapiens
caatttcagaacttgttattagttgattcaggtattcgacttcttcctggtttagtcttgggagggtgtatgtgtccaggaatgtatccatttcttctagattttctagtttatttgcatagaggtgtttacagtattcactggtggtactttgtatttctgtgggatcagtggtgatatcctgtttatcattttttattgtgtctgtttgattcttccctcttttcttctttattattctggctagtggtcatctattttgttaatcttttcaaaaaaccagctcctggattcactgattttttgaagggttttttgtgtctctatctccttcagttctgctctaatcttagttatttcttgtcccctgctagctttggaatttgtttgctcctgcttctctagttcttttaattgtgatgttagggtgtcgatgttagatctttcccactttctcctgtgggcatttagttctataaatttctctctaaacactgctttagctgtgtctcagagattctactacgttgtgtctttgttctcattggtttcaaagaacttctttatttctgccttcatttcgttatttacccagtagcatgttgttcagtttccatgtagttgtgtggttttgrgtgagtttcttaatcctcagttctaatttgattgcactatggtatgaga

SEQ ID NO: 903723 - DNA, 614 bp, Homo sapiens
ctgttgaattttgtcaaaggccttttctgcatctattgagaaaatcatgtggyttttgtctttggttctgtttatgtgatggattatgtttattgatttgtatatgttcaaccaaccttgcatccctgggatgaagccagcttaatcatggtggataagctttttgatgtgcttctggatttggtttgccagtattttattgagaattttcacagcaatattcatcagggatattggtctaaaattctctttttttgttgtgtctctggcaggctttggtatcaggataatgctggcctcataaaatgagttagggaggattccctctttttctattgattggaatagtttcagaaggaatggtaccagctcttctttgtacctgtggtaaaattcagctgtgaatccatctggttatggacttttttggttggtaggctattaattactgcctcaatttcagagccagttattggtctattcagagattcaacttcttcctggtttagtcttgggagggtgtatgtgtccaggaatttatccatttcttctatattttctagtttatctgcatagaggtgtttatagtattctctgatggtagcttgtatttc

SEQ ID NO: 903724 - DNA, 675 bp, Homo sapiens
agcttgaaaatgtggtatttttgacctaaatattactccatatcttgatgaataaartaacactgcatttggtgtacttaattacattaaatttctaagttatgcaaatggtacattgtaacatgaacttttaaaaaatacatgttacatgtgatgtgtgccacactttaagattcattttcattaatataaaataagtaattctctctgcttagcacagttaccatttttattacttttcccaacttggcagtgattgtttttaaagtggccttcattaaactacagcatttctaaagtgacaaaatttcaggagcaacttagtctctgactgattgcaggttgacagttgagtacctatgtctcaattgtgtatcatagagaaacgaacccgaacaggaaactaacccacttactaaaaagtatgattttggcacttaacctttctggttgtagttcctgttacataagataataatttcaaattcataagatagatatgaatattaaatgacagaactgatgcaaagttaagtaaccaccataagtcattctcaaaattatttttacatacatatagagaagtagaaaagccatgagctttacaatcaggcaaacatctgcatacatatcatcttctatacttatttctggaattttcatttcctaactgta

SEQ ID NO: 903725 - DNA, 691 bp, Homo sapiens
aataaagaagagagaagaatcaaatacacacaataaaaaatggtaaaggggagatcaccactgatcccacagaaatacaaactaccatcagataatactataaacacctgtaagcaaataaactagaaaatctggaagaaatggataaattcctggacacatactccctctcaagactaaaccaggaagaagtcaaattgctgaatagaccaataacaagttctgaaattgagatagtaattaatagcctattaaccaaaaaaaacccagaaccatatggattcacagccaaattttactggaggtacaaagaggagctggtaccatttcttctgaaactattccaaacaatagaaaacaaaggactgctccctaactcattttataggggcagcatcattctgataccaaaacctagcagagacataacaagacaagaaaatttcaggccaatattcctgatgaacatcgatgcaaaaatcctcaataaaatactggcaaaccgaatccagcagcacattaaaaagcttatccacaatgatcaagttggcttcatctctgggaygcaaggctggtttaacatatgcaaatcagtaaatgtaatccatcacataaacagatccaatgacaaaaccatataattatctcaatagatggagaaaaggccttcaataaaattcaacaccccttc

SEQ ID NO: 903726 - DNA, 594 bp, Homo sapiens
taccaatgatgctcttcataaaaatagaaaaaaaaatcctaaaattgatatggaaccacaaaatagccaaagccatcctgacaaaaagaacaaaattggaggaatcacactacttgacttcaaattatactatagagctatagtaaccaaaacagcatggtatgggcaggcatagaaacagacacatagaccaattaatggaacagaatggagaacccagaaacaagtccacacatctacagtgaactcattttcaaggtgtcaagaacatgcttggagaaaagatagtatcttcaataaacggtgctgggaaaactggatatccatatgcagaagaatgaaactagacccctgtctcttaccacatacaaaaatcaaatcaagaaagattaaagacttaaatgtaagatctcaaactatgaaaatactacaataaaacactgggaaaactctccaggacactgaagtgggcaaatatttttaaagtaatacccaaaagcacaggcaaccaaagcaaaaatggacaaatgggatsgcatcaagttaaaaatcttctgcccagcaaaggcggtacttgtactcctatgtttattg

SEQ ID NO: 903727 - DNA, 594 bp, Homo sapiens
taccaatgatgctcttcataaaaatagaaaaaaaaatcctaaaattgatatggaaccacaaaatagccaaagccatcctgacaaaaagaacaaaattggaggaatcacactacttgacttcaaattatactatagagctatagtaaccaaaacagcatggtatgggcaggcatagaaacagacacatagaccaattaatggaacagaatggagaacccagaaacaagtccacacatctacagtgaactcattttcaaggtgtcaagaacatgcttggagaaaagatagtatcttcaataaacggtgctgggaaaactggatatccatatgcagaagaatgaaactagacccctgtctcttaccacatacaaaaatcaaatcaagaaagattaaagacttaaatgtaagatctcaaactatgaaaatactacaataaaacactgggaaaactctccaggacactgaagtgggcaaatatttttaaagtaatacccaaaagcacaggcaaccaaagcaaaaatggacaaatgggatcgcwtcaagttaaaaatcttctgcccagcaaaggcggtacttgtactcctatgtttattg

SEQ ID NO: 903728 - DNA, 624 bp, Homo sapiens
caaattttaatcaccaagacaaygagaaaaatgtctccagggcatgtcagagacctttgcagcagcccctcccatcacaggtctagaggcctagagggaaaaaatggtttcatgcactgggcccagagcccccctgctgtatgcagcctggggatttggtactctgcattccacctgctctagaactggctagaacaagccaaagtacagctcaggtcatggcttcagaggttgcaagccccaaaccttggcagctgccatgtgatgttgggcctgtgggtgcacagaagtcaacaattgaggtttgggaatctccgcctagatttcaaaggatgtatggaaacacctggatgtccaggcagaagtgtgttgcaggggcagaggctttatggagagcctctgctaaagtagtgcagaagggaaatgtggggtgtgagtcctcacacagagtccccactggggtactgcctagtggagttgtgggaagagggccaccatcttccagacctcggaatggtaaatccattgacagtttgcacaatgcacctggaaaagcaagacactcaatgccaacctgtgaaagcagccgggaggtggggctgtgccttgcaaagcagagctgcc

SEQ ID NO: 903729 - DNA, 634 bp, Homo sapiens
ttaagttgcttgtaagtaataaatttaaaataatatactaaaaattctatgcttattaaacaagcatatcaagtaaggagggccactatgctgaaagcaaaggaagggaaggagttaagaactatagcaaaagcaataaatggttggggggtaaaataaagggagtacgaatactatagtagggagtagaaggatatagtcagaaatgggattttgtgggaagcaaggagtaagagagctttaattaaaagactccagtcagaaaatgtgatgtttaaattacatattataaaagcacagtgattccatataataacaagatttagggtatttgatgtttatagaatgaagatcacaaaagttgagcatgttaaagaactgagagagtagaatgttgaataggtcaactctacgagtattgaaataattgcaggatcagagtgggactagacattgaaaaaactgagtttattgtcaacgtgtttgataaatacataaaaatgaccacataggttgataggtgttaatgacgagtagtcacagacatgaatatagttggatggaaacattagctttcaggatacaccaaacacacatacatacacatttrtagcattttggagctagaaaagct

SEQ ID NO: 903730 - DNA, 648 bp, Homo sapiens
taaaaaggggtaagatgttaatcactttagctgttttgataatttctctatcatcatcttcgtctatctaagtgattctgttttaacaagaccatctttatcatttaaatcagttccatagcctttaatataatgagtaatatatgcaggtttaaatgtactatcttactacttttttgttttgtatttgtccttaatgttctctattcacaatcctcttttttcttgacttgtcttgggtaaattaattattcattcattgttccattttatttatcaattaattatttatacattctcattttttagtgtttatcctagatattaaaaatgcatactttattcacatctaatataaattggtcatttaatcatttttcaaaaataaaagttcagagataattttaagttgtttattctcccgctctagttttcattattggcatgtattttaattctttatatgtttaggaccccacgataataattattatggtttaatactgtctatcaacatgcctaccttttctctactcgtttctaccctgcatttctaagtttgttatctgaattcatcttccttstgcttaaagtacattttaggtttgtgaggtttatgtgtgtatgtgactcattactcaaatttca

SEQ ID NO: 903731 - DNA, 649 bp, Homo sapiens
gtagaaattattaaagaaaattgtatcacaactcctcttttaagtagaacttcacttagtcaactgcagcwgtataattgtgtcttcaatttaaatatctatagaactaaaggttttatctgtcttctctaagatccatcttagcagaataataaaaaaaaatctaagtactaaaatacagaagtaacttatttcattaatttctatttaccttcatgttagtaaacagtttgaagaatctatatatttttatgttttagattagcagaatataagttttgtccatatagacatatatttagatctggttttaatgttttgataaatctgtgtattcaagtcaatgcagagtttgattgacatcacttccactaaaactgtcgaaacatatctaatgcataattgccaaaggtttatttccttattacaacatatttaactgagatattagtttttaaatgcatactcccagggtcttacacatagtggaataagagaaatcatgttacattcattatctcaatttatttttaaaattccccaaaattctctaatatgattttctgcatccacacgtttacttccctagagttttcccaattttcacaggtaaagaggtaaatcttttaacaactttgaaaccaagata

SEQ ID NO: 903732 - DNA, 668 bp, Homo sapiens
atttatatattttttaattcttctgagacacttgtwtgcccaagggaacatgtagaagcagtgcaaagtaattaaaagcatcatgtttgaagtcatatagggtgaaattgaatattaatgtcatcgttttttaactatgtaacttgggacagttgtctattttctctgagactcagtattctcacctgtgaaatgggaataatagtaattatctcacactactgctatagaggttaaccaagatatgacagcttgacatttagtacagtaaaattttattgagggttagtcatgaaggtgataatctcttccctttcccatctcttagacagtaattcatagctcttcctctctgcttatacttccacaaaccctctacctcacttttagctgaagaccttgcttcctacttcactgaaatgctgaattaatctgaagagaacttttttagactctcatcagcacagctacccaccttccagcatctgttgccacctactctgtcatcctgcctgttcacataaatgaactattcatgctcctatgtaaagttaactgcccactccttttatatttgatgctatttctttttgcatcctccaggacattgcagtaacaatgttcccttctcttctatttcctcaaattttcactctttagtggaccat

SEQ ID NO: 903733 - DNA, 571 bp, Homo sapiens
aatgacatctaatgctcaagaataacttttctgtctgttcttctctcaccctttcctccaattcctgcaattacagcagcagacatggcttttaggaggaaggggacaaatttaggctgagggctacctcaaaatattttccaaaagttccaccactactatattattattattattatcattattattagaagaagaaggagaatagcagaaaagtaggaagaaaagaaagagaaaaggaggaagaggaagcagatgcattcttggttacctaatgtttatattatgtgcccattattaaatattctaccaggactgcattgtcttgagttttccattcgaacaactccactgttcaagttactaagctgtataagaaggaggcagaagacttggtccctgcattctggaaacttacaaacatttctcttcaatatagcaaataatagtttgtttctaacagcccatacaatgtatgtttgtaaagtaattgggccatccatcagcctgaactaagtgaaattatgcatttttaaaatattartttacagatattgtcagaatgctaatt

SEQ ID NO: 903734 - DNA, 559 bp, Homo sapiens
aagaaactagactcctagttcttgctatatacaaaaaccaaatagaaaatggattaaagacctaagtgtaagtcttgcaaatgggaaactactagagggaaactttggggaaacatttcaaaacattagtatgggcaaatattttttataacacctgaaaagcataagcaacaatagcaaaaataggcaaatgggattacttcaagctaaaaagtttctacacaacaaaggaagcaatcaacaggatgaagagacaatctacagagtgggacaaaaagtttgcaaattatctatctgacaaaggcttcataaccagaatatacaaggaactcaaacaactcaacagcaaaatattaaataaataaataaaaatttaaaaaagctttaaaatgcacaaattacctgaaaatacattttacaaaagaagacatgcaaatggacaaaagatatattaaacaatattcaacattactaatcattagggacatgcaaatcaaaaccttaatgacatatcatgtaaycccagttagaatagctattatcaaaacaacagaaaata

SEQ ID NO: 903735 - DNA, 547 bp, Homo sapiens
tcttaacagtattgagtcatccaattcatgagcatggtatatctctccaactgtttagattttctttaatttctcacaacaatgttttgtagttttaagagtacaggactagtacatattttactaaatgtattcctaaatattacacagtttttaatactattacaaatggtgttgatttcattgaaatttctaattgttcattgtaagtaccctaaattattattatgcacagtagttatgttctataaagtctccacaaacctgaattagcaaatactaaaccattgttcctagggaaaataaagataaggttcctgcaagtctctggtaatctttttatcaacagatcagtacataatcttgttttatgcatatttatgcttaaagacatgttatttcttatatattgttgactcattaacattgaactcatagccaacaacactgtaactcatgcctgaacaaagcttatttgacacacatattttctttgtaaggcatatcacarccttcctgcacttaagaatactagacagcacttcag

SEQ ID NO: 903736 - DNA, 669 bp, Homo sapiens
aggtctcacctctctcgtattttgccctgcaaaytctagccaccttggtctgtctaaactgccaactctgctttttaaactcagcctgtccgtctctgtgtgggtttcccttccctgtgctgcattctagaaattccttctaggtaatgaactgttagaattgtagggtcacctcatttgttttcttcatctcagggataactgccccgtaccacttgtctaatgcttgaaacctactgtttcatctactttgtccagttttatagctgcttaaggaaggtgagtgaatatggttcttgttatcccatcatgaccagaagttccctgaggggttctttttaatataagacattttttacacaggtgtaaagtttaattgaaatatatgcgtgtatatatatatatatacacacacacacacacacacaggcgtgtgcacgcacacacacacacacacaagaatattattcaacctcaaaaatgaaggaaatcctgccatttgcaacaacatgaatgaacctggaggacattatgccaagtgaaataaaccagacacagaaggacaaatactacatgatgccatgtgttatgagaaattgaaaacagtcaaactcatagaaaaagagtagaattatggttaccagggacttgagtgaggaggaaatggta

SEQ ID NO: 903737 - DNA, 615 bp, Homo sapiens
gtagtttgaagtcaggtagggtgatgcctccacctttattctttttacttaggagtgtcttggctatacggcctaytttttggttccatatgaattttaaagtagatttttctagttctgtgaagaatgtcaatggtagtttaataggaatagcattgtatctataatatctataatttacttggagcagtatggccattttcatgacactgattttttctgtgcatgaccatggaatgtttttccatttgtttgtgtcgtctctgattttcttgagcagtgttttgtagttttccttgaagaagtctttcactttccttgttagctacattcctaggcattttattctctttgttgcaattataaatggtagttcattaatgatttggctctctgcttgtctatttttggtgtataggaatgcactaattttgtatcctgagactttgctgaagttgcctattagattaggaagctactgggatgagaagctggggttttctagatatagaatcatgtcatctgcaaacaaagacagtttcacttttctcttcttatttgaatacctcttctttctttctcttgcctgattgccctgtccagaacttctaatac

SEQ ID NO: 903738 - DNA, 680 bp, Homo sapiens
atgaactcccattcattattgctagaaagagaataaaatacctgagaatacagctaacaagggaaatgaaggacctccttgaagagagctacaaaccactgctcaaggaaatcagagaggacaaaaacaaatggaaaaacattccatgcttatggataggaagaatcaatattgtgaaaatggccatactgcccaaagtaatttatagattcaatgctattcctattaaactatgcttgacattgtttacagaattagaagaaactattttaaaattcatatgaaaccaaaaatagctcacatagccaacacaatcctaagcataaagaacaaagctggagacatcatgctacccaacttcaaactgtgctacaaggctatagtaaccaaaacagcatggtactggtacaaaaacagacacataaaccaatttttctgactttttgatgtacgattttagcactacaagcttttctcttaacccagctttagctgtgtgccagagattatggtatgttgtatctttggtttctttagttttaaataattattgatttctracttaattttattgttactataaagtcatttagaaggtgtctgttttatttccatatcattgtgtggttttgagaactcttcttactatcgatttctatttttattgcactatgatctga

SEQ ID NO: 903739 - DNA, 642 bp, Homo sapiens
ctttgttgggagactttttttttttaaacacagattcttgctctgtcttccaggctggagtgcagtggcacaatcttggcccactgcaacctccacctcccaggttcaagcaattctcctgcctcarcctcccaagtagctgggactacaggctcatgccagcacgctttgggagactttttttcttttcttttttttttttttttcactgattcaatctcattactcattattggtttgttcacactttccatttcttcctgattcaatcttggtagattgtatgtgtctaggaatttatccattttatctaggatttccagtttgatactatatagctgttcatagtagtctctgataatcttcttaatttctgtggtatcacttctaatcttttttttccatttttgattttgtttgtttatttagatcttctccctttttttcttggttagtctacctggcagtttatcagttttgtttatcttttcaagagagcaactttttgttttactgatcccttgtatttattcgtagtgtctattttatttctgttctttgcttctattttgggtttggtttgttgttgcttttctagctacctaaggtttatggttagattgtttattgagaacctctcta

SEQ ID NO: 903740 - DNA, 459 bp, Homo sapiens
ttattaattgataggttcaaagatatactacttgactttgggggctggaagaaagtggtggtagaagctgtagtttttaccagaacctgtctttaggaaccaagttatgagtggttctctagtcctgggaacagctatgtaatagattgtatttatatatttccagaaatttatctctagcaaaaattcctaaattaaaggaatgtggagatgccttcattcatttcttcatctagcatttactgagcacaaattttattctaaacgctgtcttaaactctaagaacacaagaatgaattagcttcagttctcctcttaaacgactctcagctgaagagtctgagattcctacatagcaattgatattcctatgtrtcaaatgtaggtgtttgcgtgcatgggctcatgcatgtatatgcatttcagttgtctcatttaggtatgagttttcttgtagg

SEQ ID NO: 903741 - DNA, 580 bp, Homo sapiens
atttcttcagctgcagagtgaaaaccaggagttctatttctatttttagtcamgtttgtaataatgaaatgaaaaataagtgacttcttgaactcctgttacatgtcagtcagagagagcaaatatagctcactgtgacagttactgagttagagctaaagaatttctcagcagttcagtggtgtgaatttgcacattcttaaagctggttgtttcctggatgcactgtctctgcagataaaatgtgaaacgtggtgtggaagcatatttggcattcacaggtgacaatcagattcttctaaacctaattatagcataaaagatgatcagcaaagagctggattcctaaatgcggtgggtggtgaggccgtgtcattaccgcgagacttccctctcacttcctctcagccccagcctcataaacctcaaaaccaccatgatggagaagggacagtatgttatataaaatgaaaattatcagccactggggtcaaaaagaaaatctaagacagacaagaagtgctttttaaaaagcaggggaaataaatgcaaattgtttctaaatgttacttttgatcct

SEQ ID NO: 903742 - DNA, 588 bp, Homo sapiens
aagctttgtgagaaacttctttgtgatgtgtgcattcatctcacagagttgaaactttcttttgattgagcagttttgaaacgctctttttggaatatctgcaactggatatttggagagctttgcagcatctagtgcaaaagtaaatatcttcacataaaaactagacagaagcattctgagaaacttctttgtgatgtgtgcattcacctcacagaattgaacatttcctttgattgagcagtttggaaacactctttttgtagaatctgaaagtggatatttggagggcttttcagcctctactgaattcatctcacatagttgaacctttcttttgattgagcagttttgaaaccttctttttgcagaatctgcatatttattttaggagcgatttgaggcctacggtggaaatggaaatatcttcacataaaaactagaaagaagcattctgagaaacttctttgtgatgtgtgcattcatctcacagagttgaaactttcttctgattkagcagtttggaaacagtctttttatagtatctgaaagtggatattggagcggtttgaggcctgtgctggaaaa

SEQ ID NO: 903743 - DNA, 616 bp, Homo sapiens
tcacataaaactagacagaagcattctgagaaatttctttgtggtgtgtgctttcatataacagagttgaaccttccttttgattgagcagtttggaatctgtctttttgtactatctgcaagtgggtatttgcagcgatttgatgcctgtggtgaaaaaggaaatatcttcacattataactagacagaagcattctgtgaaacttctttgtgatgtgttcatttatctcaaagacttgaaccttacttttgattgagtggtttggaatccgtcttttgtagtatctgcaaaaggatatttccagtgcattgatgcctgtggtgaaaaaggaaatatcttctcataaaaactatacagaagcattctgagaaacttctttgtgatgtgtgcattcatctcacagaattgaagctttcttttgattgagcagtcttgaaacactctttttgtagaatctgcaagtggatattttttagagctttgaggcctatggtggaaaaggaaatatcttcacaaaaaaaaactaggcagaagcactgtgagaacttmtttttgatgtgtgctttcatctcacagagttgaaaatttcttttgattgagcaatttttaaacag

SEQ ID NO: 903744 - DNA, 669 bp, Homo sapiens
tgagaaactttctgtgacgtgtgacttgatctcacacagttgaacattacttctgattgagcagtttggaaacagtcattttgtagagtctgcaaagggatatttgtgagcccattgaggygatggggaaataggaaataacttcacataaaaactagacagaaactttctgagaaactactttctgatgcgtgttttcatttcacagagttggcactttcttttgattgagcagtttggaaacactctttttgtacaatctgcaagtggatatttggagtgctttgaggcctatggtgaaaaaggaaatatcttcacataaaaactagacagaagcattctcagaaacttctttgtgatttgtgcattcgcctcacagagttgaacctttcttttgattgagctgtttgtaaaatgtctttttgtagaatctgcaaatagatatttggggtgctttgaggcctgtggtgaaaaaggaaattgcttcacataaaaactagacagaagcattctgagaaacttctttttgatgtgttcattcatcgcacagagttgaaactttcttttgatggagcagtttggaaacagtctttttgcagtatctgcagaaggatatctgtgcctggtttaaggactatggtgaaaaaggaaatatcttcacataaaaac

SEQ ID NO: 903745 - DNA, 506 bp, Homo sapiens
gttggacatagtctttttgcagagtctgcrcagggatatttgtgggcagtttgatgcctattgtgaaaaaggaaatatctccatataaaaactagacagaagctttctgagaaacttctttgtgatgtgtgcattcatctcgcaaagttcaacatttgtttgatagaacaactggaaacagtctttttggagaatctgcaaaaggatatttgtgagggctttgaggcctgttaaaaaggaaatatcttcaaataaaaactagacagagatttcagagaaacttctttgtgatatgtacattcatctcacagagttaaacctctcttttgattaatttggaaacagtgattttgtagaatctacaatttaatatttgtgagcaatttgaggcctatggtgaaaaatgaaatatcttctcataaaaactggacagaagcattcgaaggaaattctttgtgatgtgtgcattcatctcacagagttaaacatttcttttccttgagcag

SEQ ID NO: 903746 - DNA, 668 bp, Homo sapiens
tgagaatataaaagtgaaaaataaatattatgactctgcycctgtgggagtagacaagaaatacacaaatagacatacaatataattttacatagtgattagctctgtgaagaacattaaagaagggcaaagaaacaaaaaattgaaggaggtttctactttagatacgatggtcaggcaaaacctttctgataaggtaacattagcaacctgaatgaggaagcaaagtatttgggagaagcgcctccttgaaagagaattctaaggagggaattgctttggatgtcaaggagaagcaagggttttggggctggagtagggaggcaggcagtttggtcactgcctggtgtgtcagtgatatggctctaggttgtatgaactgagacctaccaggggaggcaacacactcaatggccacctgttcagctattcagtttgaggacaaatatcagggggttgagagcagaagagagagataatctgccttatttacaaaactaaaacaagtgcacaaaactgagtatatgtcataagactgtagctctatggatttgcatgaagtgaataatagccagattgagaaatctgaaattaatagaaacatgaattccctcttgtgcttcctccaagtcagtactcaccatcttcacaaagataagcacaaccat

SEQ ID NO: 903747 - DNA, 622 bp, Homo sapiens
aaggtctgcggtgaataactgaagacttraactccccttatatttcactcaacactctgaaaagtgtgttcctcccaggagggactgcagtttgatccagtgatgtgttccagaatgtttcctaacttggactgcaatcagatttacttctcctaagtgcctcgtgcttgacggcatgggcatctctgtagacaatttagctgggagcataaatggttcaggggagatcaattatctgattaaggaacaaaagcagatggtgacctggttatgaggcattctcaactcaccctgagtttgtttgttcatttgtttcccacatcccacctttgaggaaaatcttcccttccaccttttcataaaacacagcaaataattgtggtttttttccttcggagtgaggggtgtgggggatctgaaagggtcacccgctttacatgtgtcattgcagatgcgagaaatgcattaagcgtttttagaagaatggacactgtcgaggccctgacagtctggtgacgatttgtttgtgttggagtaaccagtaagtcggccgttagtctttgactaatcgctcctgtcagcttgttaaacattaaaaacaaatgcacgcactggagaaaag

SEQ ID NO: 903748 - DNA, 600 bp, Homo sapiens
tttttgcctttttaagaatagccagcatcagtaattttttgcctttttagtaatagtcattctgatgggtatgagatagttatctcatcatggttttgagttgcatttctctaattatcagtgatgttgagttttttgcatgattactggccacatatatgccttcttttgaaaagtatgtgttcatgttctttgcccactttttaatggggtggtttggtttttttcttgcaaatttgtttaagttccttatagatgttggatattagacctttgtgagatgcttagtttgcagaaatgttctccttttctgtaggttgtctgtttactccattgatagtttctttttgctgtgcagaagctctttagtttaattagatcccatttgtcaatttttgcttttgtcgcaattgcttttggtgtcttcatcatgaaatctttgcccgtgcccatgtcctgaatgatattgcctaggttttcttcaaggtttttatagtttaggtttttacakttaagtctttaatccatcttgagttaatttttgtgtaaggaaggagtccagtttcaattttcagcatatggctagccagttatcccagc

SEQ ID NO: 903749 - DNA, 672 bp, Homo sapiens
ccttttgcaacctaagcaaactctgaagcaattgggatgttcaggggaatctgcttagaatacaaatctttaggagcagccgagggaacagaaataattgatatggaataaccctttatgtcgaaaataatgccaaaggcttttatctcttcagtgtgatgcgacctgaacatttctggttctacagaggacccctgccgttggcctatctcttaacagatgtttgctgggtgctggccatgtgtcaggcactatgctaggtgctgggaggattccgaaacaagaaagcatgcaagattcctgccctcctgggccttaaaggaaagtagggaagccaaacattaaataaataattataccaataagtatctaattacaagttttataagtgttaataacaaaaattgcagggtttgctacaaagcatgtaactgaggacctaatcttgtattaggggccagccaaagtagttctttgaggagatacatttaatctgacacctgatggatgagtaatagtcactaaaataaaagccaaataaagaattttatacactcccaaaagagatattttacagctttacaaggctcaaatccaactaattcrcccctgtctctgggtagtactggatgttctattttaccacttatgagacaatgctttggaaagcca

SEQ ID NO: 903750 - DNA, 598 bp, Homo sapiens
tggtgtacagattattttatcactcaggtaataaacacagtaactgataggtaatttttttatcttcaccctcctctactctcaagtaggccagagattattgtatattgtrtctttgttcttaatactgtcaaagaaagttttgatttctatcttaatttcattcagtagcagactgtttaattcccatgtaattatatgattttgagctaaattttagcatcgatttttatttttattgtgttttggcccaagagtacggtttgtatgatttttgtggggtttttccgtttgttttttggatttctggaggactgtttcacggatgaaagcgtggtcacttttagattctgtgtcatgtgcatatgagaagaatgcatattctgttgtttctgggcgaagagttctgttgacatctgttaggtccaattggtcaagtgttcagatcaggtcctgaatatctttgttagttttatgcactgatgatctgtctaatactgtcagtgggctgttgaagtcccccattattattttgtggttatctaaatttcttcctaggtctaaaagaacttgatttgtgaatctgggtgctcctgtt

SEQ ID NO: 903751 - DNA, 660 bp, Homo sapiens
tgttatgttgagtgaaagaagccaagcacaaagtaatacctacggtatttgcttacattctggaaaaagaaaatatatttatggtgatgcaaaggagatcaatggttgcctgaggttagaggtaaaggggtgtgaagagacatttttggggtaatgaatatgttgcgtgatgtgtacaactatgatgatgttttcacagttgtatacacctctcaaaagtcaacatattgtatattttagatgaatgaattttattatatcctttttttatctcaagaaagctaattttaaaatgaggaaactagtctgcttttttgaaatatttttatttgtgaattccattgagaatctaataaaagctgcatacttgaccaaagtaaaagtgcatacctttaaattactgcccacaatatcagggagtagaagacctggtgaaactcatcttaatttggaatgagaattctacatggggtaatgaaaatccatgcttagggaaattggtgtcgagactatacattttggcagttactgtggatataatcatcttacattccttctgttgtcttatatgtgttaattgagcctcttcaactatagtattggctaaatatatttacagcatacacrcaaagaaaaaccttcaaggaactataccatgct

SEQ ID NO: 903752 - DNA, 578 bp, Homo sapiens
tattttgtgtgtagaggtgagaggcttatagtggtaaattcttcagcatacatttttgcatgatttgtaaatatttttaaaaagaataatataatttagcttgtcagctctgggatgaaagaagccattttatctataaatgtgattcctggcaggctagctgaatatggaacaaagagggaattaccttacctataacacagaaacctttcagcaatagatttaaagataaagaagacaatctcattaggagacctgtagcttatgatttatgaagccagtcaatcaacaaatatttatgtgatgagtaggaaatgtagtcaaagacacaatttctgcctctaatttagcataatttcttgtcatcctcagagaatttgtttagatcttcattttctttcatcaatattataacaatagcttttagtatctctgctcttaatgttgcctccttgaactctgtagccagagttatttgctaaattgsaaaagcattgtaagttctacaatcagactgtgttagttcaaatcctgtctctgttacactctaagtatacacttggtcaagctgcctaact

SEQ ID NO: 903753 - DNA, 650 bp, Homo sapiens
tggggcatgaactaggcaggcaagatggggtgctgtcaggctcacctgccactgtcccagcagctgtggctgagagcagtggatccaggggctgtgagtcgggcaccayaggcatccctacagaatccctggaaggtgggagccacagttctacttgtcttcgtgttcctggcaagtgctgggaaaatgctgaatgaccaggaaaccagagaacagtgaaccagcaatgtttggggtttccagccgagaacgctatagactcctggatttctctccagttgggcttaggggatttcctccttattactcacccctccaactcacagctccttctcaccttagtcttcagaatctaggttctattgcgtgaagggatgagagactctccagggatcagacacaagagcaggtggactgagactgtggggagagtgtgctcagctcagaaaccatgagcgcagactccagggtccccagccagcatttctgctccagcacaagatgcgtactgctcacatctccttcccttcctcctttactttatatggtcaactatatctctgactatggaagaaaaagaatcagtctctccttaaaggaatttcagaccctgggaactgatgggggtagcatttcaaggtggagtgggg

SEQ ID NO: 903754 - DNA, 648 bp, Homo sapiens
gctagaaaagaatgtaatctgatatggaaggatagcagcttctaattttcaatcatctgttgatatactgtgaaacttattttattaaattaatatttattaaatgraaatatgcttttctggtttataactactaaaaatatcatagggaggataaaagtaaataagtgaaagttaatgccaatagaaaaattcaagagataatgtacaatgtcagaaaagggattctttatgtgtaaatggggataatacctatttcacaaggttgttctgaggattgatacgttttgagtatgtatttgtacactatctggcacatatgcgctcaataaacgtgtttctccttttcttttgcccttcctaacccaggacctttcatatatttttcatttaaaatctactgtgaccaagaagagaaactcagtcgctaacactgcaaggcaggacatgcctaaagatgatgatatggcacaagtagtgatattatacatgtgcaatgatgaagtcatcatttttgtacgcttttggatgatgatagtggactcctactattacaaaatattgaaaacatcatcatgagggcaattctgttgaacatggtagtctgcaattttaaaaaacactttgggtaccctggaagggacatct

SEQ ID NO: 903755 - DNA, 646 bp, Homo sapiens
atttaattctatctggcgagaaacaataatgggctaaaccattattgtatcgtaagtcaaattgccaaaacttcacaggctacyaaaagttaacccttattgaatgaattaagaaccttagaagttctgctgttaaaaaaagcacggtgactgtcagggtttttcaggtgtggggggtgtgagggttttaagagttggattcctttgactttgtctctattattataggcttagaggtcccgggtaactaccaatcgctatccaaagggaaagcaccctgttagaaattaagtaagaaaaatagtttatattcccggtctgccatttcgattctaagctttatctttatttagctcacagttaaagggggcatagagccacacccacctcacaaacgccgcaaggattgggagaccagaaaagtaaaagtgacttgcaaacctttagctctaagtccataaaaaagactatcatatgctcacatttctaatctttgctagtataatgtaatctttattttgaaaacaatgtgcctccattcctagtaaagcgaaagtcacggcgctgcgaccctcccttcagcgcctccggactctcacgcgatactcggctttcacgctttagtctagggctgcactgcaggagg

SEQ ID NO: 903756 - DNA, 618 bp, Homo sapiens
ctctgtagactccacctccaggggcagtgcatagatgaacaaaaggcagcagaaactttgcagacttaaacgtccctgtctgacagctctgaagagaccagtggttctccctacacagtgtttgagctctgagaatggacagactgcctccttaagtgggtccctgaccctgtgtagcctaactgggagacacctcccagtaggggccgactgacacctcatacagttgagtgcccttctgagacgaagcttccagaggaaggatcaggcagcaatatttgctattctgcaatgtttgctgttctacagcctccactgttgatacccaggtgtggacctccagcaaactccaacagatctgcagctgagggacctgattgttagaaggaaaactaacaaaaagaaaggagtagcatcaacatcaacaaaaaccacatccacaccaaaactccatctgtaggtcaccatcatcaaagaccaaaggtagataaaaccacaaagatggggagaaaccagagcagaaaagctgaaaattytaaaaactagagcacctcttctcctccaaaggatcacagctccttgccagcaacagaacaaagctaaatgctccaattaaaa

SEQ ID NO: 903757 - DNA, 618 bp, Homo sapiens
ctctgtagactccacctccaggggcagtgcatagatgaacaaaaggcagcagaaactttgcagacttaaacgtccctgtctgacagctctgaagagaccagtggttctccctacacagtgtttgagctctgagaatggacagactgcctccttaagtgggtccctgaccctgtgtagcctaactgggagacacctcccagtaggggccgactgacacctcatacagttgagtgcccttctgagacgaagcttccagaggaaggatcaggcagcaatatttgctattctgcaatgtttgctgttctacagcctccactgttgatacccaggtgtggacctccagcaaactccaacagatctgcagctgagggacctgattgttagaaggaaaactaacaaaaagaaaggagtagcatcaacatcaacaaaaaccacatccacaccaaaactccatctgtaggtcaccatcatcaaagaccaaaggtagataaaaccacaaagatggggagaaaccagagcagaaaagctgaaaattctaaaaacyagagcacctcttctcctccaaaggatcacagctccttgccagcaacagaacaaagctaaatgctccaattaaaa

SEQ ID NO: 903758 - DNA, 579 bp, Homo sapiens
ccttagtagccatactaatttatattcccaccagcagtgtacgagtggtcccctttctcccgccacatcacatgttcctcttgcgtagtacaatacaatcatctcttcccagtagtatccaragtcttaactcattccaccatcaactcaaaaatccaaagtctaaagtcttatctgagactcaagacacatttctttccacctattagcccgtaaaatcaaaaacaaattcttaacttccaagatacaacagtggtgcaggtattaggtaaacattcccaatccaaaagggaggaattggccaaaagaaagggaaataggccccacacaagtctgaaacctagcagggcagacattaaagtttaaagctccaacataatctttgactctgtgtcccgcatccaaggcacactggtgcaaggggtgggctcccaatgccttgggaagctccatccctgtggctctcacaggttggagtctggtgtctgtgccttttcaatgctgagggtgcaagctgctggtggctctacccttcttgggtctggaggatagcagtcctgttcccatagcttcactaga

SEQ ID NO: 903759 - DNA, 592 bp, Homo sapiens
gttggtaataatgatttatgtaaatagccctaaatttacatatttatcaaacttcaatatatatcagggattttatggcctctggatttaaacctattacayagccatggtcaacatgtcactacaaagccaaaaaatgcaaaagcatcccaattatcttatatgctgcctaaggaatgtcttctgctcttatgtgggagggccccagctggctgacttcagcctgccaacacagcttccaaatctaaagtcatatgacatttcaatacagaaaaatccacaatagtgcagaaacccttcttggtactccctttactattagatttcacatctagaaaccagcaagaagaggaaaatacttattttctagcagataagtcagttgcttctcacatactcctgaagatgagcctgaaatgactaaaagctatgtgtaacagatcagagtccattaaaaagaaattcccaggcactaattttatctgtaatattacttgaagtaggccatcacctaatattgctgaagttttatgcttgcagcagactttggcctattctgtgtattcccactttgtcaaaaatcaacttttaa

SEQ ID NO: 903760 - DNA, 693 bp, Homo sapiens
tcaggtcccacatctccctgcagttcatttatgcttcaggtcaagggtcacaaatattcacttgataagggatgacagattagtcacagctagmtgctgaaagtggagttgcatgaagtgcacatttagcttgcatgagggagagcacaaattggaaacttatcaaaattgccttggtgggtctctttcaaggcttctttggaggctgctctcagatctattacctctggaaattcttgaggacttttaaaaatacaatgacatctcatctcttcttaaattctgtctagtggacaatttgtgaggggtgtatgtgggaatctgcaattgaattcttcctcaggtacggtgagttgggcctcattccagctccaccgccatcatcatcagaatcctagtgggaatttcccttcctcagaagactgaaactccacctgtgctggtaatgccaggccccctacatagctccagtctattacctcaagggaacacaaaggcacactcttacaatatatatttacacctgagcttgtaaatatgacagctaagaatcagaaatgttgttttacttaaatgggcttgtcagtagattgggagtatattgtattccaaggaaatgctttttagatgtaattttaggtacaaactctggattttccttcacgtacaaaaattaaaactttgattacacac

SEQ ID NO: 903761 - DNA, 627 bp, Homo sapiens
ccattgacaccaggcatctaaggccaggacaaagctctagtagtggaagtgaattcaagtcagcatgtttgccagcttgccccctttctgctattcgcaggttagactaaattagagatgtttaagatttacaaaaatgccttaaactattttttgtaaataattttgttccccccaaaaactataaaatctgcatgcatcagtaataatgtcttagagaaacagtcttactttgtcttccaacttacgggcacttagaatcagaataatgttttggcaaagaagccccatatctaaaatattttctaaactcctaataactacaatgtcagcaacaacaaaaacaaaatggtcttggtttttacattttgaaaaagtttatggaataggaaagtaagtcaggttcaagcaataggaaagtaaatgtaattaatgtgttcaggttttgacagaagatattactgacttaagtttccttcttaattttactttgacatgttattccataagcacattgatggggggcattaatgaaataaactacytactccatcagtattcagcacaagaaccgagttcagggagttgagaaatcctgatcattggtaagaagcttggtatagtggc

SEQ ID NO: 903762 - DNA, 601 bp, Homo sapiens
cgtgaatagtaaattttctgtttttgcatacgcaaatgatttcattttacctatactcttgaataatagtttagctaaatatagagctctaccctcacatatcccttcccccctcacttcaaagacattatttcattgtcttctgacaaattttagtgcaggtaagatgtttatatagacctaattatagaactcattcatctgtagataatcaatttttttggtttttgtaattttaaatttagtttatttgtctctgatactcccatggtgtattaagatggatttttaaaaaaattgtttccaattgtagaaaattcttagccattattacattattactttgatggttacctcttgcctatttcccaccttctctttttcctgagctcttgttagatatttgtttgaacttctcaccctttgtttcacatattttaatagcatttacatgttttccaactctgggtgatttgctcagacctgtcttctaattttcttgtactgttttcagctatgtctacwatgactttattgttttaccatccataggtctgtgtgtgtttttcaagtttcagtgccattttctattttaaaaatg

SEQ ID NO: 903763 - DNA, 606 bp, Homo sapiens
gattaaagacttaaacatgaaacctaaactataaaaaccctatatgaaaacctaggagatacaactccagacatagaccttggcaaagatttcatgtcaaagactccaaaagcaattgcaacaaaaagaaaaagtaacaagtgggacctaattaaacaaaagagcttctgcacagcaaaagaaactatcagcagattaaatagcctacagaatgggagaaaataattgcaaactatgcatccaacaaaggtctaatatccaggttctatacggaactttaaaaaatcaacaatcggccaggtgcagtggcttacgcctgtaatcccagcaccttcggaggctgaggtggctggatcacctgaggtctggagtttgaggccagcctgaccaacatggtgaaaccccgtctttactaaaaatacaaaaattagctgggcatgttggcacgcacctgtagtcccagctaccagggaagctgagccaggaaaactacttgaatacaggaggcggaggttgcagtgagccaagatmgtaccactgcaccccagcctggatgacagagtaagcctctgtctcaaaaaaaaaaaaaaaaaagaaaaaaaagaa

SEQ ID NO: 903764 - DNA, 606 bp, Homo sapiens
gattaaagacttaaacatgaaacctaaactataaaaaccctatatgaaaacctaggagatacaactccagacatagaccttggcaaagatttcatgtcaaagactccaaaagcaattgcaacaaaaagaaaaagtaacaagtgggacctaattaaacaaaagagcttctgcacagcaaaagaaactatcagcagattaaatagcctacagaatgggagaaaataattgcaaactatgcatccaacaaaggtctaatatccaggttctatacggaactttaaaaaatcaacaatcggccaggtgcagtggcttacgcctgtaatcccagcaccttcggaggctgaggtggctggatcacctgaggtctggagtttgaggccagcctgaccaacatggtgaaaccccgtctttactaaaaatacaaaaattagctgggcatgttggcacgcacctgtagtcccagctaccagggaagctgagccaggaaaactacttgaatacaggaggcggaggttgcagtgagccaagatagtaccactgcaccccagcytggatgacagagtaagcctctgtctcaaaaaaaaaaaaaaaaaagaaaaaaaagaa

SEQ ID NO: 903765 - DNA, 407 bp, Homo sapiens
acacattttagacttttttttcaaatgtatattttagacctttggttttattgttgttgctgaatttttaaaaagtaaggtattgcaaagttaagaggagcacgtcaccatcaattttcatatgataattttaggccttctctcgaagtttctatatgcagatcatgactgaatattgttgtttaatctaagtcttgcagggaaggcaggtgactcttttatttggaactgggtccaccctaaagttttgattatatttacaagacagaacatcctaatcttcaaagattcattcatttgtaagtcaagcttcataaaaggatgaaatgattattttaaatattttttaaaaaaatatagaaacrtaaaatttattattaaatataaacttgccttcaataaaatat

SEQ ID NO: 903766 - DNA, 612 bp, Homo sapiens
tgaggtaaacaacctaaaatcacaactgaaatgactagagacccacgagcaaacaaatcttgaagctagcagaagacaagaaataaccaaaatcagagctgaactgaatgaaattgagacatgaaaaactattcaagagatcagtgaatccagaagctggttttttgaaaaaaaaaaaaaaaaaaaaaaacatgaaaaagacggccctctagctagactaatactaataaagaaaaaaaaatgagagaagattcaaataaacacaatcagaattgacaagggggatattaccattaaccccacagaaatacaaacaaccatcagagaatactatgaagaactctaggcaagtaaactggaaaatctaggagaaatggataatttcctggaaacatacaacttcccaaaactgaatcaagaagaaattgaatccgtgaatagatcaataatgagctctgaaattgaggcagtaataaatagcctaccaaccaaaaaagaccaggaccagatagaygcaaagctgaattctaccagatgcacaaagaagaaccggtaccatttctgctgaaactattccaaaaaaattgagggagagggactccttcctaactc

SEQ ID NO: 903767 - DNA, 670 bp, Homo sapiens
attgttatgtgtgaatttgatcctgtcattttgatgctagcaggttatcttgcctgttagttgatgcagtttcttcatggtgtcaatggtctttacaatttggtatgtttttgcagtggctggtaccagtttttcctttctgtatttagtgcttccttcaggagctcttgtgaggcaagcctggtagtgacaaaatctctcagcatttgcttctctttaaaggattttatttctccttcatttatgaagcttagtttggctgtatatgaaattctgggttgaaaattcttttctttaagcatgtcgaatattggcccccactctcttctggcttgttgggtttctgccaagagatctgctgttagtctaatgggcttccctttgtgggtaagctgacctttctctctggctgcccttaaaattttttccttcatttcaaccttggtgaatctgacaattacatgtcttggggttgctcttcttgaggagtatctttttggtgtgctctgtatttcctgaatttgaatgttggcctgtctttctaggttggggaagttcttctgcataatatctcaaagagtgttttccaacttggttcygttctcccagtcacttcaaggtacaccaatcaaatataggttttgtcttttcacatagtcccatgattttt

SEQ ID NO: 903768 - DNA, 596 bp, Homo sapiens
aaattaaattttctcaagtggtcacacgggagcaggtctatttctggagaataccttttttagactcaacaaaatcccagggatgaacacagttttgatataatagaatttgtatacactaaacccctttattgcaatatgtctccaatcgtttgatgccctagatgcaattattgctttagaagctaaagtaagcaaattctcttttcaaaaggaatatgaattcttgggcttgtgcctccacttcctgatctaacttctctggaccctgaggcatgggcattgtagaactgagttatcagattttaagagcatgtagggggtctgttttgtgacttaatgttatcttcagaaaatcaactaaaatctgtttaaatatcatgtctgaaataagtgtaaagactaaacggatgtggttacaatcttgaaactagaagctatagccagaaaataggtcaagaaaaaaatagacacaaattgcctggatcttggccataaaggtcaagtactgctggtcacaaaacaaggaggattcttcagagaaactgagggactcacataatagttctartaacaattacaacaactaacattta

SEQ ID NO: 903769 - DNA, 667 bp, Homo sapiens
atagtaagtaagttactgggcagggggccaggggaagcctcttcaaggggtggagggtgtgtaaaggagcatgcaataaaggcacagggttgtgataggtacagggatctccccctcacaccagacccatgggctcattaacactcccccctgctcacctaaacacaccctgccccacttccagcaaccactaatgattacgataataacaaaggcaactagcaggcaggacagacagttcaattattagaaagttgtctacggtgaaaactggggacagaaagataggctcttgagaccatatttctaaatcaggggccagtttgggagggagaggaccccagatctgtggctgctcagatttcctctcaccctgtccctagcccaccatctaccatctatctccctgataggatgggtgaccataggtccaggttgcccaagtttaagcttgttcccagagcagtcattactaaagcagggattcttacacttttgtgtatacaccaatcacctagagatcttgttaaaatgcagacttctatgcagtaggtctggctgggtcctgagattctgcatttcttaaaaactcctaggtgaggctgatgctgtttgcctgaggactagagtagcaaagatckacctaccactggttctcaaatgtaac

SEQ ID NO: 903770 - DNA, 586 bp, Homo sapiens
cagaaagacctgctctgaagtagcccccttcaagaacttccatctgcctttcccaccaaatcttttttttttttttaattaagggagcacaaacaaaaaatcaccgtgttacccttaatgaatacatctcagtctacacacaagagaaggcatcatgggacctggcagctctcagagggcattgggagtgtagcagctcttcctgctccaaagagccactctagagttttctagagtttttccttcagacgtcctggtgtttagttgtgtggcatacatgaggctttgtggcagttggttaatatactgtgggacaagaactgaactaggcactgtgtgggacagggaaagatgcactctgtggctttagggaatttgaaattaaaagataagatttcagattctttcaaagcccgagctaaacacatgaaaaaaacaaaaacaaaaacaacaacaamaaaaaacacagaacaccagagtgctgaaaacagaagaattgcagtggatggggttggaaaagaaaggcttccagttagaagtcaatttcacaccgtgttttgcaggagcgagtccagcggattcgtgg

SEQ ID NO: 903771 - DNA, 606 bp, Homo sapiens
actgagctcatattatgatttgtgcacttcatattttgcctcaattaattttttttacaaaagattcatggaagcctggtgtgtaattgtgtaaaaaagtggaaacttgcctatcagtagaagaatggatgaattacggtattgttacacagtgggattatgtataacagtgaaaatgaatgatctaaaactacgtttatttttgggtaactctataaaaccatccacaatatggtatgaaaaaaagtcatacaaggacacaaatgacattcctatgtcaaatatgttaagaaaattgtatgctcatgaattctacctatggtaaaaataatatgtgcatgggattagtaaacactaaattcaggataatggttatctctggttgagaagaggaatggattagagcaaaaggcatagttcaaccatatctgtaatattttcttagtctgcatggtgggtgtgcatgggtgtttattaaattttatgcctttctctatatttgaaatatttaatttgcaaaagaaataattataagaactctagttaaatatagcaaattaaaatttcacatttaccctcctrtccccttgcaactgtatcataatg

SEQ ID NO: 903772 - DNA, 552 bp, Homo sapiens
acaaacaaccccatcaaaattgggtgaaggacatgaacagacacttctcaaaagaagacatttatgcagccaacaaacacatgaagaaatcctcaccatcactggccatcagagaaatgcaaatcaaaaacagaatgagataccatctcacaccagttagaatggcaatcattaaaatgtcaggaaacaagaggtgctggagcggatgtggacaaataggaacacttttacactgttggtgggtctgtaaactagttcaacctttgtggaagtcagtgtgggattcttcagggatctagaaccagaaataccatttgacacagccatcccattactgggtatatacccaaaggactataaaccatgctgctatgaagacacatgcacaagtatgtttattgcaggactattcacaatagcaaagacttggaaccaacmcaaatgtccaaaaatgatagactggattaagaaaatgtggcaaatatacacaatggaatactatgcagccataaaaaatgatgagttcatgtcctttgtagggacatggatgaa

SEQ ID NO: 903773 - DNA, 618 bp, Homo sapiens
ccgaatcttactctgttgcccaggttggagtgcaatggtgcgatctcgacttgctgcaacctccacctccckagttcaagtgattctcctgcttcagcctctcgagtagctaggattacaggtgcacaccaccacgcctagctaatttttgtatttttagtagagatggggttttaccatgttggccaggctggtcacgaactcctgacctcaagtgatccacttgcctcggccttccaaagtgctgggattacaggcgtgagccaccgcacttggccagaaacggacttttaaaagtactaccctgctggctttgaagatggagtaaggagccacaaaccaaagaatgtggttggatttcagatgctggaaaaggaaaggaaacaggttttgccttagagtctgcagaaggaatgcaggcttgccaacaccttgattttagccagtgaaagccattttggacttgtgatttctaaggctgtaagatgatacattggtgttgtttaagctacctaatctgttacagtagcaataggagactactaagtatactaatgatgatgaagagaagtgtagaggttaagatcgcatactctagagtgggcctggctaggtttg

SEQ ID NO: 903774 - DNA, 621 bp, Homo sapiens
ttagacttggactgagccacatataccagcatmccctgtctccagcttgcagatggcctctccttgggacttctcagtctccataatcctgtgagccaattcctctaataaatctcctctcatatatttatatctatatcctcttggttgtgcttctctaacagactatataataataaattatgtttcaactgcatttcagaaatcatcttccaggaaattaaaaacgaaaacaaaataatacaacatagaagagtattagtgacagggtgacaaaaaatagagtgaaatctacctggattattctaatgaaagaacaaaatatacttttaagacactgaatagtagactctaaacacaactgaaattgaagtctctattcctcaggttctctatgctaatttgagaataaatacctaatttattttcatctatcagttttcagtgatcacaagaatttattctttattcatctaaaatgcagtttagattatccaaaggtattcaaaagttgcattatgcttctccagtttgtctgctttcaaaaagagcaaattattgttaagtcatttttagaaaatgttccttaacaaatgatacctagttaatacatatttaagt

SEQ ID NO: 903775 - DNA, 637 bp, Homo sapiens
tgagtagaaaattgggaacttggtgagctagaagtcagggaagtcccaggacaagtttgctcttggaagaggagaaggtgcagggggagaagagaacaagtaaaggaaacayggtgagtgctgtggcaggatggagatgactccaggtgcaggtgggtggctggtggtcatgttcccacttggttcaatttagatggcatcattaaaaagttccccattccacaataagcaaacttttcttgtagtctacaaaatgtgaaactttcctttccgctgtgagtgtgtaatgcttcatcccatggaacaattcagaaagttaattttatatgcttccgttagagaatctaactaaaagctgagggaaatgattgggaagataaaactacaatcgcaaagggaatcctgtaagacataatatactatgagcagtccgggtgattctttcccctcccctatatgataccattcaatacaaacatctaaaaagaactctcatttggctgttattcttcattctctaacagcagtaaaaatgactacagtttaaaaacttagttccaatgaccacaaatgttctaaatattcatattcagcataaattttaaaaatgagaggcctataaaatcatcaatgaatt

SEQ ID NO: 903776 - DNA, 633 bp, Homo sapiens
cttttcagatggctttgtctaayaggaatgatatttaagagcagccttctccaaatagcttcagctcttgctgccacattcccaaaagtttagtttattaccacaaaaagcagtggtactccttcactagataagctccttgaacacaaatatgatgtctttattatctttgaagccctaatattcagaagtttgagagatataacagtcattcaaatttatcagaaacagatttgtgtgggcttaaaggtggcccatatgataacttgtcaaactactttacatagtccacattcagcattgtcctacaaatctcctgagccagggtgtcatacaagcaaatggctattgatgtggtgaagcaaagatctcctcagctcttgagatcactaggcagtgtctaaggtggatagtatcagggcaggtagtctcatacatttaccccgtatagatatcaatgtctatatgtggcattacatgagcaagcattgctctggcctcaacgcccccaacaaactagtacatctccacttttacctcccagaactgcacacataacaaatatcacttaaaaacagagcattctattatcacttcacttatgatatgataatcatatcagggattatgatc

SEQ ID NO: 903777 - DNA, 713 bp, Homo sapiens
ataataatactaaacatatatgtacctaacaccaaagcaaccagatatataaagcaaatattaatctaaaaagagtgatagactccaatacaatagcatttgtacactttgacaacccaatctcagcactatacagatcatcaagatagaaaattaacaatgaaatattggatttaaactacatattaggtcaaatagatcaaacagacatttatagaccatttcatccaccagttacagaatgtgtattattttcatcagtccatggaacattcttcagaattgatcatatgttagcacacaaaacaagtttcaacaaatcaaaaaaattaaaatcttatcaagtctcttctcagatcacaaatgagtaaaataagaaatcaataacaagaggaacttgagaaactctacaaatacatggaaattaaacaaaaagtttcttgataaccattgggtcaaggaaaaattaaggaggaactaaaaaatttattaaaacaaatataaattgaaacaagatgtaccaaaaccatgtaatatagcaaatgcaatgctaagaggaaatgttatagcaataaaagcgtacatcaaaaaagtagagtccaaataaacaatctcrtggtgcacttcaaggaactaaaaaaagagagaagacccaaataaacaaaatcagaaataaaaataagattttataactgatgccacagaaatacaaa

SEQ ID NO: 903778 - DNA, 713 bp, Homo sapiens
ataataatactaaacatatatgtacctaacaccaaagcaaccagatatataaagcaaatattaatctaaaaagagtgatagactccaatacaatagcatttgtacactttgacaacccaatctcagcactatacagatcatcaagatagaaaattaacaatgaaatattggatttaaactacatattaggtcaaatagatcaaacagacatttatagaccatttcatccaccagttacagaatgtgtattattttcatcagtccatggaacattcttcagaattgatcatatgttagcacacaaaacaagtttcaacaaatcaaaaaaattaaaatcttatcaagtctcttctcagatcacaaatgagtaaaataagaaatcaataacaagaggaacttgagaaactctacaaatacatggaaattaaacaaaaagtttcttgataaccattgggtcaaggaaaaattaaggaggaactaaaaaatttattaaaacaaatataaattgaaacaagatgtaccaaaaccatgtaatatagcaaatgcaatgctaagaggaaatgttatagcaataaaagcgtacatcaaaaaagtagagtccaaataaacaatctcgtggtgcacttcaaggaactaaaaaaagagrgaagacccaaataaacaaaatcagaaataaaaataagattttataactgatgccacagaaatacaaa

SEQ ID NO: 903779 - DNA, 625 bp, Homo sapiens
taaaagccactggtctgttccttatttttgtgatattttacaggtttgtgattgttacactgacctttataaagacaatttggaagttcccccttttttccctctgtgctcagaaaaaatttaaacagctttggaaatcttcatacgtagaagtttttgaagactttgcctacagctgtttgagcatatttccaatttcttggtgtttatgggaacagttagtgttttggtcttttggggaatcaattgtagtaatttagcaagttatctttgtcatcctgggttttgaatttatttgcatagagcccatgctttgtttattatactttttgccagttgacagcatcgcacctcttaatgatgtacattctctacagccctgtaagtgaggaccactgttctttctaaccactgctagcttgacaggcagcaagggacctcttattccactttgcattttattgattacttacttataaggtgtttttctgagtaaatttttttttcctttttttaagatggagtctcactctgtcgcccaggctggagtgcagtggcacaatctcggctcacggcaacctctgcctcctgggttcaagasattctcctacctcagcctcctgag

SEQ ID NO: 903780 - DNA, 657 bp, Homo sapiens
  misc_feature 496: n = A,T,C or G
tcctggaggctagaagtccctaatcaaggtgccaactgatttggttmttgatgagatctctctttctgtcttgtaaacagtagtgtcctcatatagaagacagagaaaaagatttctctctcttttcctcttcttacaaggtgatcagtcctatcagattagggcatcacttacccctaattatctcctaaaggtcctgtctccaaatacagtcacactgggggttaaggtgtcaacataatgagttttgtggtgccataaaccttcagttcataagagtactaaatgagttcagagcagctggggtgggagaaaggaagtagatgctataagagtaaactgggggtgaggtagtgaaagatttagattccacttttatttagctaggtttatcagttagatagatttgacatggctgaaaaggtttagggagaggaaggtccccttagaggcatacatatagggtgggaatatggatattaaggagctattaagnaagtagagtcagtgggactagatcaattgcacacagtttgtaagaaagagagagacactgaggctggttctcaggtttcaagtttgggaaatggagggatcaggggtgatgcttttaagtgaagtagcaaatgccaggaaggagcagatcagagagagaga

SEQ ID NO: 903781 - DNA, 618 bp, Homo sapiens
ctgcatatggctagccagttttcccaacaccatttattaaatatggaatccttttcccattgcttgtttttgtaaggtttgtcaaagatcacatggttgtagatgtgtggtgttatttctgaggcctcttttctgttccatttgtttatatgtctgttttggtacaagtgccatgctgtttgggttaccgtagccttatagtatagtttgaagtcaggtagcatgatacctccagctttgatctttctacttaggattgtcttcgctatacgggctctttttttgttcctatgaaatttaaagtagtttttttttctaattctgtgaggaaagtcaatggtagcttgatggggatagcattgaatcagtaaactggagtaattttttgactcatctttatcctaggctgtctgatatccaatgtctgaaaacagttattttatatatctatatctatatatatatatttctgttttgatttttgttttggcagataggtcatccctagagcagttgatcrttcatgggctgaagcaaaagtcctgtcatactttattttgttatctgtcatcattctggaatgtatatgtcatgagggctgatatttggcctgctttt

SEQ ID NO: 903782 - DNA, 615 bp, Homo sapiens
tgcacaatgaatttcaggagaaaggggtgattgggcatcattgtagagtctccctggcacaagtttatttacaggtgtgtcctcagggagcagcagggaaggagaaaaagacaactcaaagaygtgctgtttggaattggccgtggctacaggcacccagtgctcaatcctgtaaaactaggggaacttttttttgcccagggaacaaaaggggaaagaatttaaccatcaatcagctactgacccctgaggtcaagggtggctccactgctattaacttccccatgcttccaggctgcatgtgcagggttctagagcaggctcctaggacagcccacaccatgctgtcagaaaggaacaggatacaaggggagtccgggatgggacaggtgctgagaaaggcaatcggagctcgcatagaactggttgctgcctcagtagctgaagaaagaggtccccagagaactgaagccatgtatgagacatgtctgatacaaacccgtccccaggtgtgtgtgttacacagcctcacctgggagacagaagcactgcctccctgtgagcttggggaaagctaacacaatggggccacatccaaatttaacattttcttcc

SEQ ID NO: 903783 - DNA, 609 bp, Homo sapiens
tcagataacatgcaaaggtatgctcaaaacaacctagttttccatcggcgacacctagtgatcttttttgcttattccaaatttccttacaggggcaagtccttggccagatctaggtgatcctggtaacttacagagaaaatcatctcagctgatgtggtctggctaaggctgccagtcacatagaggaaaaagaaaaggcagatccccagtgttactcagcatctactacatgtcaggcactgcttcaaatgcttggcatatactaattcattcaatcctcacaataacctatgagaaaggcttcgttgttgctccatcttatggatgaggacaagagtatctggccagctaaggaacttgtccaaagtcacactcaaagccagatgcaaacacggaagtcagatgccagagctgttgcttaaagctctgtgccatcctgtcttacggaacaacctggaaagaaaagcagagagaaataatgatgggcaatgacagagcaasattgcagatggggctgggggtgggttctagcccctatggctctggaacctttaggaggttctagaaggttctagagcctttcttcccttggattcctcaagcaac

SEQ ID NO: 903784 - DNA, 677 bp, Homo sapiens
taccattattaagtcaggaaacaatagactctgacgaagctgtggagaaataggaatgcttttaaactgttggtgggaatgtaaattagttcaaccattgtggaaaacagtatagcaattcctcaagaatctagaaccagaaatattatttgacccaacaatcccattactgggtatatacacaaaggattataaatcattctactataaatacacatgcacatgtatgtttattgcagcactatttacaatagcagagacttggaacaaacccaaatgcccttcaatgatagacaggataagaaaatgtggcacatatacactatggaatattatgcagccataaaaaagaatgagatcatgtcctttgcaggaacatggatgaatctggaagccatcattctcagtaaacaaacacaggaacagaaaaccaaacactgcatgttctcactcataagtgggagttgaacagtgggaacacatggacacagggaggagaatatcacacattgggtcttgttggtaggtggggggcaaggggcrggagagcattaggacaaatacttaatgcatacggggcttaaaacctagatgatgggttgataggtgcagcaaaccactatggaacatgtatacctatgtaacaaacctgcacattctgcacatgtatcctggaa

SEQ ID NO: 903785 - DNA, 677 bp, Homo sapiens
taccattattaagtcaggaaacaatagactctgacgaagctgtggagaaataggaatgcttttaaactgttggtgggaatgtaaattagttcaaccattgtggaaaacagtatagcaattcctcaagaatctagaaccagaaatattatttgacccaacaatcccattactgggtatatacacaaaggattataaatcattctactataaatacacatgcacatgtatgtttattgcagcactatttacaatagcagagacttggaacaaacccaaatgcccttcaatgatagacaggataagaaaatgtggcacatatacactatggaatattatgcagccataaaaaagaatgagatcatgtcctttgcaggaacatggatgaatctggaagccatcattctcagtaaacaaacacaggaacagaaaaccaaacactgcatgttctcactcataagtgggagttgaacagtgggaacacatggacacagggaggagaatatcacacattgggtcttgttggtaggtggggggcaaggggcgggagagcattaggacaaatacttartgcatacggggcttaaaacctagatgatgggttgataggtgcagcaaaccactatggaacatgtatacctatgtaacaaacctgcacattctgcacatgtatcctggaa

SEQ ID NO: 903786 - DNA, 677 bp, Homo sapiens
taccattattaagtcaggaaacaatagactctgacgaagctgtggagaaataggaatgcttttaaactgttggtgggaatgtaaattagttcaaccattgtggaaaacagtatagcaattcctcaagaatctagaaccagaaatattatttgacccaacaatcccattactgggtatatacacaaaggattataaatcattctactataaatacacatgcacatgtatgtttattgcagcactatttacaatagcagagacttggaacaaacccaaatgcccttcaatgatagacaggataagaaaatgtggcacatatacactatggaatattatgcagccataaaaaagaatgagatcatgtcctttgcaggaacatggatgaatctggaagccatcattctcagtaaacaaacacaggaacagaaaaccaaacactgcatgttctcactcataagtgggagttgaacagtgggaacacatggacacagggaggagaatatcacacattgggtcttgttggtaggtggggggcaaggggcgggagagcattaggacaaatacttaatgcatacrgggcttaaaacctagatgatgggttgataggtgcagcaaaccactatggaacatgtatacctatgtaacaaacctgcacattctgcacatgtatcctggaa

SEQ ID NO: 903787 - DNA, 632 bp, Homo sapiens
aagatttgtactatgtactaaagaacctacataaagagtgatttggaaccaacccaaatgtccaacaatgatacactggattaagaaaatgtggcatgtatataccatggaatactatgcagccataaaaaatgatgagttcctctcctttgtagggacatggatgaagctggaaaccatcattctcaacaaactattgcaaggacaaaaaaccaaacaccgcatgttctcactcatagatgggaattgaacaatgagaacacatggacacaggaaggggaacatcacacactggggcctgttgtgaggtggggggaagggggagggatagcattaggagatatacctaatgttaaatgaccagttaatgggtgcagcacaccaacatggcacatgtatatatatatgtaacaaaccacgttgtgcacatgtaccctagaacttaaagtataataataataataataataataataataataatagagtgattaataaacttaacaagaacctggtgtawtctggatgaatcatacttgataatgcccaaattatgccacatatctctaaaatattttaatccaaaacaaagactaatttaattttaaggcacttacattttagattaactg

SEQ ID NO: 903788 - DNA, 604 bp, Homo sapiens
gaagtagatgaggcaccaatacatgtttttacattatgagtgatctgaagctgagcatatgtcacttattttttacagtcctatctctattgaaaactgtgccaaaatatttaataatattcagcttcaatcacccaaaggtaaaggtcttgattttataacattcattgcagataaattatactgggcatctgtatgtttggtaccttaataatagcaaaaaacttttacatgttatttcatgtggtcctcaaaaatcctccaaagacaagaaagtatttcttttcattttatagaggaagaaatcatcagtaagtacctggtgagactgaggctcaaaaggaaatggttgaacaaaaagtcagccaacaagttggcagatacagaatactccattaaacaactgcacaattcatgtctttcaagccctcatggaatagtggctaagactgagaatattctaagccataaaatcaatcttataaaatttaaaataattgaaatcatgaagagtggtttctctgataataactgaataaaaagaaaaaatcagtaagagcaaggctamaaaatatcttcaaactcttgaaaattaaacaacata

SEQ ID NO: 903789 - DNA, 632 bp, Homo sapiens
tacctgggaggagtgagttcctccagttaaatgtggctgtagatgttggaggctarggaggctagtaaatatcaaaaggaaaagggagtgggaattgctatcatgtaaaatatcaaagttaaaatactaaggtgcattttccctgaagggaactcatgtctgactgctgtattcaaatacgtagctttggtaacaaacaaaatccgtatatgcaaatcaacatatccaaacatgccaagactgcttttccactgcacttggaaggatatattatgcctaaccctgcccaacaaattaaggtttgtgcctaaaatgttagattggactgtatgccagttagtctccatttattcctagtactctgtcctaagaatctttttaaaactatatcatgatgaattgaaatgaagataaaattgctcttttgtaactttatcttagtaatgtaaagattcagtaaattgatgagtcaggttgcagccctcatgtgaactgaaagaagttgctcgcttctgtgttgacttagatcaagacacgtcacgcatcctttctggggtagtacctgtggagccgggaagggtctcctgcagtgccattctgccttctcaatgagcaaaaccattttctaagta

SEQ ID NO: 903790 - DNA, 576 bp, Homo sapiens
aaagaaatgtgaacttgccttcttcctcatctagaaaacagaaaggaaaaagtgaagagagaaaaaagtggttagtaacgaactgttagtcatttcattatttaattttttaaaaaagcaatcagacatattgagaacattccatgatattatacaaaaatttttcttaggttataaaacatgtgaaaaaacacaaacaagggtctaaaatataaccatttaatagcatcaagtactagtcatgtctccctaccctgcctttaaaaatctgtgaactacttacgatgcactatacgattcttaagatgatgcgctgttgtagcatgaacagatacttctgaagctgaagcagaaccaaccatacatatatatatatacacacacacccacacatatatatacacatatacaaataagatactatgtatgggggtgtgtgtgtgcatgcacgtgtgtgtgtatrtatgtaatcaaaccacttctattgagatccctggactcaactacataaactttggcaaggatattctttttcacagcatttgaatctccaaatatagagataatattacattt

SEQ ID NO: 903791 - DNA, 608 bp, Homo sapiens
tgaggcacaagaataagttgaacccaataggcagaggttgcagtgagccacgatcgcgccactgcactcaagcctgggtratggagtaagactctgtctcaaaaacaaaacaaaacaaaacaaaaacaaattacagtagacacagcatattttgactgttgtaacaacactgccttagtcaagatcccaatagaaaacagatgacatatttatcttaaatgaggagagactgaggagagaaggagttaacttgtattcagtttagcaggatcttatcccagctgtgtcttacattcaaattaaattaactgattatatggccaaggtctaaaatccaaaatacgatgtgtgaagttatcaagaggaatgtcatttcacaaaaagttattttagaagtgattactatcactaaacatgtgagaaggggcttatggttgctttttgtctattgggagcaagaaatacaaccatggtaagatatagatctaatcaccaaaatcaatatagtcatatattcagagtgtactggaaacagaacacatatgacttaatttcataaggtacttatttaaaatcccaaagttgctctaaggaaggaagctgtaaaa

SEQ ID NO: 903792 - DNA, 602 bp, Homo sapiens
tggaaaaactctagaaatatgtattttaagatcagagcataaagaatttctataatttaaaatattacaaataaatagcatctgtagctttgctggatatgactaaacatttcaataactctgtttttgtatgattctataaaaaataattaggctgagtgccatagctcatacctgtaatcctagcactttgggaggccaaggtgggaagattgcttgggcttaggggttaaagcccactctgggcaacatagcaagaccttgtctctacaaaaaattaaaaaattagccaggcatggtggctaatacctgtagtcccagccacttgggaggctgaggtagggggattacttgagcccaggagtttaaggctccagtgagctaccatcatatcactgcactccagcctgggtgacagaataatagaataattgtattttatcatttttaatatgtttgctgtcccattttgaatacatttcattttaattcatttcttgttagggatgttttagtgggcatatrttatttgaaccacttagcatctattcccacttcaaatggaaatgctctgattgacctctcaggctccatgacttggc

SEQ ID NO: 903793 - DNA, 492 bp, Homo sapiens
gagcttgcaaactacccaggaaaagaatgtagcacaatgaattgttatgtattattccatttgttttaataatagacatcatgttagtccattttcacagtgctataaagacatacccgagactgagtaatttacaaagaaacaaggtttaattgactcacagttccgcatggctggggaggccttaggaaacttaacaatcatggtggaaggggaagcaggcacgtcttacatggcagcaggtgagagagagagtgtgtgagagcacaggaaaaactaccctttataaaaccatcagatctcctaggaactcactcactatcatgagaacagcaaggaggaaaccgcccccataatctaatcacttccctcccttcacacgtgaggattacaggtctctcccttcacatgtgggaattacaattccagatgagatktgggtgaggacacagagtcaaaccatatcaataagcaatatgcttattgcataag

SEQ ID NO: 903794 - DNA, 636 bp, Homo sapiens
tgattttaagtttcctgaggccccccccaccaatgtagaagtgtgagtcaattaaacctctttcttttataaattacccagtgttgggtatttcttcatagcagtgtgaggatgaactaatacagtaagttggtactgagagttgggtgctgctataaggcctggaaatgtgaaagtgactttggaactgggtagcaggcagaggttagaacagattggagggatgagaagaagacaggaaaatctgggaaagtttggaacttcctagagacttgttgaatggctttgacaaaatgctgatagttatatggacaatgaagtccaggctgaaatggtctcagatgcagatgagaaacttgttgggaactggagtaaaattcactcttgctatgctttagcatagagactggcagcattttgccccttccccagagatctgtggaactttgaacttgagagagatgatttaggatatctggcagaagaatttctaagcagcaaagcattcaagaggtgaacagagartagaagtttggaaaatctgcagcctgatgatgcaatagaaaataaaaccccattttctgaagagaaattcaagcatgctgcagaaattagcatgagcaacaagaagccaaa

SEQ ID NO: 903795 - DNA, 624 bp, Homo sapiens
tatgacaaacctgcacatgtaccctctcaaccaaawataaaagttggaaagaaaaaactaaatgtataaataaaaataaattttttttaatgaaagggttttacttttctttccccttacctcctgtcaatggctaaggctaattgtaagtagtaaaatatgattttatgccaggctaaatgctgctgaagaatagaggagaaagtcacacccacaagagagaacacacgcccgcgcgcacacacacacacacacacacacacactgacattcagttccctgtagacatttggaagttgtcagcagtagcataaagacagtcctaattattaaaattactcttgtgtggagagtgctttagaataagatgccgacaggcatgcaatatgttcactgcaccacgatctttttctttttttaaaaaaagaaaacttttatgagtattccactggctttcatcaaaatacctctccccacctcagtgacatataccctctcaaacattccaatgaaattaccaataaattctgattccataaggaatctaataccctaaagataccttttattattgagtttgttcgatggattttcttatacgtacaactataaaatttactacag

SEQ ID NO: 903796 - DNA, 640 bp, Homo sapiens
atacaaccctgatagattttaatattttactaattagtagaacaaaataattctctgtggaaataattctatctcagtattgcttgatgacaaaactcaacctcaggtctacaragatatttagaatatatgattcagaagctacaataagtcaacggttattggcttggaaatgaactataatgcagacaacaataaaagcgttcaaatatggtttgacttggtgaatttagttactatgtgatattggtatttagtgaggaactggtttaccataggaaattatttttaagccaaaacacaaagcaaatcaatatttttgcttctatggtattttacaaagggcatttctacttcaccacaatcaattttgccaacctgctaatgcctttgaccctgatccgagaaccttttgcttgaacttggtgtcccaagtaagataaatatggtcgtaaatgtggtttgtggagggcaaagggacagccagcctgagcttaaccaaccagtgctaagtgtaatattatggtgtagaagaggaaagaggaaacatgccaactcagagatgaaagaatttcctgtgcttcactcctcaaagcattcgaaattattgagttggctcctgatatacaggaaaatattc

SEQ ID NO: 903797 - DNA, 627 bp, Homo sapiens
ctgacaggaacccatctgtcagtctatccacacacaatctgaaagggactccagattaggctccctcttttagccacgcctacacaggaagcatcctgtggatggaatggaaagtatgccaggcctttgcacgcccctcacgcccccatctccttcgcttaacctcgacagcctcttacctttaaaccctagctaggttttcacacagccctatcaaataaaaaggacaatactcaaactgaattagagaatgagaattgtcgaggtttcttttaatttagatcaatgccagttttactcttcttctagagtcctttttaaggagatatcatccccaccagttgtgatcccagagaatcacaacagggcatggcgtaggaaagacctcgaagctcaattctctattataccatgcccaccatacgaaaggcatttaacctcccgcgtgattttgtccttaagatgctccacaagatctaacacaactcctacatctaagagtcgactcactaatttcaagggtttttgtttttgtttttgtttttataagctctgcgkgtggcacccgataacttcaagtttagagtgagcagtttcctcccaatgccgtttgctcaactacagtac

SEQ ID NO: 903798 - DNA, 560 bp, Homo sapiens
gcccaggctggtctcaaactcttggcctcaaatgatcctcctgtcttggcctcccawagtgctgggattacaggcatgtgccctggccctgggtacattttagaacaccctctttctctccttaatcctaaacattctaaagctgcctggagtcccaattccatgccagtcctcagcatgtttgccctgtccatagtgacatccatgcggggctagtatgcatctgaggtttaaggattactccagccttgaggctctgtgcattgtgtgcacaaagtttcttccataatacagaaagccctttaggtattgcgatttgtgtttatttgtcttgatttttaactgtctgcatgattttttcttgttcaaaagaataaagcaatccattattttgcttcaccatctttgaatagctgcatgaaaccagaggccttcaggattttatgcgaggaaaatatgtctacagccactccaatgtaaattttacacagtgtgaatctttccccaaagcccagtaaccagatgtgtaaaagatgtgtcaaccaaagcctctgtttgat

SEQ ID NO: 903799 - DNA, 685 bp, Homo sapiens
tttaaatgaaatttaattttctaaattaggaacctaaagttttgccttgatattgtaatttttttttgtaacctttctgcagcttaactatcattctactcctggagttttgtcttattattagaaacactatgcaggttatcttcagttgggttctttttcttcccttggttcttcattctaaacaataatatgtatgtttcatcagtctataatagagttatatcagtctattatagagttataatatgttatatataacatatataatatataatataaatattataactcaataatcaccttaaaaattttcttttaaaatgtaatattttatttataacttagaattatgagaagattgaaattcttttagaagactgtagtcaaatataattttcaaaatagtttctataccctgttctgctgttaagatatgaaaggaatattaaagcgctgtcaatggacattaaaccaccaacatgccacaatcgaaatcatatttctacactgcctaaatttagcaaattattgctaaaacccagaaacagcagggaagaaaagtcatcaaatacattcgttaacattctgcttttattttatggtcatgatkaattatttgtttattttgagggaaatgatttttaattaaaattggtagggtttatttcaaagggaacgtgtt

SEQ ID NO: 903800 - DNA, 586 bp, Homo sapiens
aatcacagtacatgtctattgaggagcagaaaggattgggaaaattaraacgaagaagctactccatgtggttactaagggaaccagactgagtttctaccgccttccagttacagcacttagaatttgccagctctttgattatcaaagtatgggaagggagaaactgagaaacagcacttgagtgtctcgctgcctcaagctggaaatgacacatttcagtccatagttcattggccaaaacagtcaaatggcccagtcaaaatgaaagggggcttggaagtacagagtgacatatggaatattacacaaaccttattatctctgcctctgtctactttaagcccagtgagtttcctaaataatcacctatctttagtaaatttagagctaccaagtagtctgggaaaaagataggctttaattgaactggtctctctctcaccccaataatttgaaatttacttaagactgttagtggataattcattaaattacaaggagtatacattaaacagctaagttgtgtgatacatgctttgattgcaaaaagtgaacacgttttagtgaggcagagcttcatgaa

SEQ ID NO: 903801 - DNA, 620 bp, Homo sapiens
agtttcagaagcatattatttggcttatcacytattattcagtgaggtagaaaaataaactaaatgaaaagaactaacatgtattaggggcctactagatcaatcactctactaattttatataatgcacaacaggcctatgaaggaattatggttattcaaaaaaaaaacagtgacgttgaaaaccctaaagtttaaatggagataaagtcctatttgtaaaatgtaaagaaatatatttggtatgaattataattgaggtcctggaaaatttctatgacagcattaaatggaaactttatgtaaaagtgtcatttagtcatttaacaaatattcattgagtgacatctgtgtgcctggcactgaacttagttctggtgatagagcaaggtcttgacaagcaatctcactgatgttatgtcccacaaaagaatttccacgtcgatagcattttcaaaaaaggaaaaaaaggaaaaccacccagaactggggtatgaagttcataaacttgaggaaagaataatattgagccacatactagtcggttttgtaaatcctgctgaagtgcagtcagtgggaatccatcagcaatctgttttaatgaaatgttccaatcattt

SEQ ID NO: 903802 - DNA, 592 bp, Homo sapiens
ctaatgtcttcttagaaggtatgtactgctgctcatgtgcaaatatatttaattttaatagattctgctctacttcttgttttcttatgttttcatctatattgctctgtraaaatatagttcatttattctaactaatgcctagtactccatgcagggttgtttttcagttgttatgcatgtgcatggtcatacaggttgttcaactatagaactgacttcatatggattggcaaatatctctgcttagggtctcctaaagcctcctccactggatctctggatctctccacaatccagcatctacagggttaacactaaaccctcccccacttttctttttggaaggggaggtgaaaggtgtccaggacgctgcttcagtgccaaggctggtattcattttgattgctttgagcatcattcctgactgctgtgaatccaccacattctgatgatttgttcttctagtgacagacagctagattgtctccaactgtctgccacctcaactttctgccaccgccaactttctgcctgatgaacatctttctgcatatccctctggatatgtgtgagaatttgggatatatca

SEQ ID NO: 903803 - DNA, 649 bp, Homo sapiens
ttaaaagatcaagggaattctacaagggaaacaagcagtgcttagagaagtgtgacacctaggagttygtagtgtccagcaagaaaggaattgagaatctcagaaaagaaagataaagagagccaaatatatctactaagatttgagctgaaaaaaaaaataaggacaaagtgagtaacatggaagaataagaaacccaagccctcattccttcatacagacaccaaatcaacaacaatatgtgccccaaaaaacctctatgagaactgcagaaacgagttaggaagtcacagtaccccagacaagcccaaaaccaagaatagctgcattaaaatgggtaagaagagtcattttatttcagccatgccagccccttccccaagctagcacagggcaatgggagtaaaatcccaatttgaaacttctccttgagagagaaaggaagagtagaaattaattttcaagggggtgcctgaggtgctggtttctgtctcgcctgactcagcaattataaggaattgctattacttgggatgcctggagctgctgaaaacaacacagagctcagcagcttatggcactaccggaaaaattgtaatgccacagacagaagctgccacagctcactgagatcaggagaaattaccca

SEQ ID NO: 903804 - DNA, 635 bp, Homo sapiens
ttttctcacacaaagcagaccagctactgcataaaatgataaagggattgtttctagattgggaagctgatgaatctgagttctagtcatgacttactgtataacttggacttgtgctagacagcctctatcccttttctgtttccttttctctttgatgaacatatatcattaagggggaaaaattaataggaaacatgccagctctctgtattaattttctgtagctgtgtgagccagtgttttcagattttagggacagatttgtattcagcagaaaagaatatcaagatttctctttaattacgcccatgtctgtggaaaggagatgatgttataggatcgccatgtgtttttctgacaagatgacttccaaggttctttattctgtgacttctaagttttgctttgggtctttttcttgtataaaagaattcacttttgatgttccttttctctagtgattttcactgctttattacaaaaaaaaaactggatgtgagatcagttgcaggaaatctggatcctttttcatgaaacattaaaattttcactaagtgttggcctggcacaaagcatgcctgtagtggtgytactaatctcctgtgcttgattagtcaccaagacagcttgag

SEQ ID NO: 903805 - DNA, 588 bp, Homo sapiens
acttcagcaatgagaccacctgtgagatctgtggtctggatttccgatgtaacacaggaacaagggaaagaataaggaaggggtcaygcagtcggtcccatcaccatggtggtgggcagggggctaagcattttgatgctctatttgatccaaagcatctttttcttcccctttaataagttttgataacttacaatagctcaaaatattatgggcatctatgcaccttaaaaacagtaaactgtcaatgaatatgcagagtcagttaaaagctcaagcctgcaagtcattactatttaaaaattacaaagtgtatcatatttttaaatacaagactttttttgaggtggagtttcactcttgtcgcccaggctggagtgaaatacaagactattattaagctatattaacaaaagtactattttgcttatcagagttgagtgaggtagttttaacaagttagtttctgtgaaccctccaacaagatgaaaggacttacaacactcagatacagctaagaaaaacttaagaataactgacaaaaagggaggcccaagagactttacccattcatccttaccaccgcaa

SEQ ID NO: 903806 - DNA, 588 bp, Homo sapiens
acttcagcaatgagaccacctgtgagatctgtggtctggatttccgatgtaacacaggaacaagggaaagaataaggaaggggtcacgcagtcsgtcccatcaccatggtggtgggcagggggctaagcattttgatgctctatttgatccaaagcatctttttcttcccctttaataagttttgataacttacaatagctcaaaatattatgggcatctatgcaccttaaaaacagtaaactgtcaatgaatatgcagagtcagttaaaagctcaagcctgcaagtcattactatttaaaaattacaaagtgtatcatatttttaaatacaagactttttttgaggtggagtttcactcttgtcgcccaggctggagtgaaatacaagactattattaagctatattaacaaaagtactattttgcttatcagagttgagtgaggtagttttaacaagttagtttctgtgaaccctccaacaagatgaaaggacttacaacactcagatacagctaagaaaaacttaagaataactgacaaaaagggaggcccaagagactttacccattcatccttaccaccgcaa

SEQ ID NO: 903807 - DNA, 588 bp, Homo sapiens
tcatgaaccaagagctgtcccagackaagggagtggtaggtggggtatgaaaatgcccactccaggtatgaacagaagcaaaacagctctatagcctgagggttgtctttgatttagagtcacagtttcaagctattcaaagcaaaagtccacagaaacttggggagaggagcatgggaccaatgcaagggaatcttaggcaagtagatgaaacatcaacaaggtttactgaaaatggatttcatcttgaaaaggaaaagaagtattaagtcatgcagaccatctaaatagggagagaaaatcaatcttgatttaatctatatgaagaagcaattgaccagatgaaagcaaaggtttagaggtgagaataactggaaaataatgggaatactcccagtttggtaaatgatatgaaagaacatttaatagagctcctgcaattcttgagtatacctggggtggaagcatgtcctttattcctatattctgtttccttaaactctgtacctgcaactattgagatactaagaatatatatgggaaatgtgagaatacttcatatataataaacatatatctatatatagg

SEQ ID NO: 903808 - DNA, 643 bp, Homo sapiens
aatgggatttctgggtcaaatggtatttctgggtctagagctttgaggaatcaccatactatcttccacaatggttgaactaatttaygttcccaccaacagtgaaaagcgttcctatttctctgcagtctcaccagcatctgatgtttcttgactttttaacaatcaccattctgactggcatgagatagtatctcattatggttttaatttgcatgtctctaatgatcagtgatgttgagctttttttcatatgtttggtggctgcatgtatgtcttcttttgaaaagtgtcctttgcccactttttaataggttgcttgtttatttattgtgaatttgcttaagttccttgtagattctggatattagacctttgtcagatggatatattgcaaaaattttcttccattttgtaggttgtctgtttgctcttatgatcattttctttgctgtgcagaagctctttagtttaattagatcccatttgtcaattttttggtcgcaattgtttttgaggttttcgttatgaaatctttgccattacctatgtcctgaatggtattgcctagattttcttctagggtttttacagttttgggttttacatttaagtctttaattcatcttgaattaatttttgt

SEQ ID NO: 903809 - DNA, 598 bp, Homo sapiens
aaattccaggcacttctggacttctgagaggacatgmgaaatgaagtatagtaaaaggaaacatggggtatctgagtcaaacaccatctaagagattgatctactttcctgaaagagaaattttagtagagacttgacatatttctttcgggacacttgtttttattttgcagcacagattttccttcagaagatctttactgagcacctactatgtgcttgtactgaatctgtgctgctgtgttatgtggtttgcagcaagggatggaatttgggcctttctacactaagttgtatggttcctttaatgggtgtgagtgtatatacaatccaaagatgaaaatgtgcaaataatgaaggtctttaatcatgccttcaatatccatttaacaattacctatttcaaactcaaagcctgagtatttacctgaagtgcagtttataaaaacaagtggttttcatcctgcctctgaccagaaataaaaattttacaattcaaattctgatgacaatttagtgttaacatgagtgagataacagattcctcctctcccactgttctgttaatggaagaagaatgtagctaatacccacaagt

SEQ ID NO: 903810 - DNA, 619 bp, Homo sapiens
accaccatgcctggccaattttgtatttttagtagagatgaggtttcactgtgttggtcagactggtctcgaattcctgacctcagatcatccacccgccttggcatcccaaagtgctgggattacaggcgtgagccatcgcttgaacctcggaggcagaggatgcagtgagccaagatcatgccatcacactcctgcctgggcaacaagagcaaacctccgtttcaaaaaaataaaaataaaaataaatttaaaagtttaaagaattaaaaataaaaaaaaagtcaagaagtgaatgataattatgcatgcacttttatctcagcaattctacttttaattatatgcccaacagatatgtataaatatgtaaaccttgtgctatatatgacatggacaggaaacaggaaaatactgggtagaagaggtcagttccccagcagaggtcccaccctcaagcctgaaaactcatggccataaatgagaacagacattctgtttttgagcccccaaaagttgccttttggcccacaatgcccccctattctgtacccatataaaccccaaacacccagcatgaacagaagagcagaagratggcagaatggtgcatcagaga

SEQ ID NO: 903811 - DNA, 591 bp, Homo sapiens
gtgcaagttttcaaagggaatgcttccagtttttgcccactcagtatgatattggytatgggtttgtcataaatagctcttattattttgaaatgtgttccatcaattcctagtttattgagagttactagcatgaagggtgttgaattttgttgaaggtgttttctgcatctattgatataatcgtggttttcctcgttgtttctgcttgtgtgaaggattacatttattgatttgtggatgttgaaccagacttgcctccggggatgaagccaacttgatcatggtggaaaaggtttttgacatgcagctggattcggtttgccagtattttattgagggtttttgcagtgatattcctcagagatattggtctaaaattctctttttttgttgtgtctctgccaggctttggtatcaggacgatgctggcctcataacatgagttagggaggattctctctttttctattgattggaatggtttcagaaggaatggtaccagctcctatttgtacctctgatataattcagctgtgaatccatctggtccaggactttttttggtttgtaggatattattgcctcaat

SEQ ID NO: 903812 - DNA, 654 bp, Homo sapiens
atttattatgttgaggtatgttccttctgttcccagtttttttgtttttgtcataaatggtgttgaattttatcaaatgctttttcagcgttaatttaaaggatcatgtggtttttgtccttcattctattgatataatgtatcacactggttgatttgtgtatgtcaaactatcctggcatcactgggataaatccccttggtcatggtgaataatccttttaatataagataatagtagtttacacatcacaattacagtattacagtattctgtgtctttctgtgtgtgtgcttactattaccaatgagctttgtaccttcagatgatttattcttgcttgtgaacacctttttctttcagaatgaagaactccctttagcatttcctataagacaggtctggtggtgatgaaatccctcagtctttgtttgtttgtaaaggtctttatatctccatcaaaagttggaaggatatttttgccagatatattattctagggtaaaagttttattttttcttcagcactttaagtatgtcatgccactctctcttatcctgtaagatttctacttgaaaagtccactaccaaakgtatttgaacttcatcatttgctatttatttattttctcttgctgcttttagaattctt

SEQ ID NO: 903813 - DNA, 622 bp, Homo sapiens
tgttgagtgaaacacatggtgcaagctgtcagtggatctaccattctggggtctggaggatggtggccctcttttcacagctccactaggtggtacctcattagggactctgtatgggggctccaaccccacatttcccttttgcactgccctaggaaaggttctccatgagggctctgtccctgcagcacacttctgcctgggcatccagacattttcataaaccttctgaaatcgaagcagagattcccagacctcaattcttgacttctgtgcacctgcaagttcaacactaaatggaagctgctaaggcttggggcttccaccctttgaaacaacagcttgagcctctgacttggtcccttttagtcacagctggagcgactgggatgcagggcaccaagtccttagacggcacaaaacagagggaccctgggcctggcccacaaaaccaatttttccttctaaacctctggccctctgtggaagggactgcyacaagggtctctgacatgccctggaaacattttccccattgtcttggtgattaatattaggttcctcattacttatgcaaatttctgcagctggcttgaatttctcctcggaaaatgggattttt

SEQ ID NO: 903814 - DNA, 652 bp, Homo sapiens
taagccttttcttaggtctagaagtaattgttttatagctctggtgctccagttgagtacatatatatttaggatagttaaatcttcttgttgagttgaatactttatcaytacacaatgcccttctttgtccttttttactgttgttggcttaaagtctgttttatctgacataagaatagtgactcctatcattggttctgtttatgtgatggattgcgtttattgatttgtgtatgtcgtaccagccttgcatcccagggatgaagccaacttgatcatggtggataagctttttgattggctactggattcagtttgccagtattttattgaggatttttgcatcaatgttcatcagggatattggcctgaaatttttttttgttttgttatctgccaggttttggtatcaggatgatgctggccgcataaaatgagttagagaggagtctctctttttctattgtttggaatagtttcagaaggaatggtaccagctcctctttgtacctcttgtagaatttggctgtgaatccacctggttctgggctttttttttggttggtaggctattagtgcctcgattacagaacttattggtctattcaggaattcaacttcttcctggtttagtcttgggagggtgtat

SEQ ID NO: 903815 - DNA, 533 bp, Homo sapiens
gctgtacgttggctgcaaggccacagggatggagctgcccaagaccatgggaacccacctggatacgagacacagagtcaaaagagatcattttggagttttaagatttgactgccctattggattttggacttgcatggggcctgtggcccctttgcttagccaatttctcccatttggaatggctgtatttacccactgtacccccattgtatctaagaagtaactaacttgtttttgattttacattctcataggcaaaaggacttaccttgttatgaatgagactttgggctgtggacttttgagttaatgctgaaatgagttaagactttgggggactgttgggaaggtgtgattggttttgaaatgtggggtcatgagatttgggaggggccagggtggaatgatatggtttggctstgtccccacccaaatctcatcttgaatttccacatgttgtgggagaggcatggtgggaggtaattgaatcatgggggtaggtctttcccttgctgttctcatgatagtga

SEQ ID NO: 903816 - DNA, 527 bp, Homo sapiens
ccagcttcatccatgtccctgcaaaggacatgaactcatccttttttatggatgcatagtatttcatggtrtatatgtgccatgttttctttatccagtctgtcattgatgggcatttgggttggttctaagtctttgctattgtgaacagtgctgcaataaacatatgtgtgcaggtgtctttatagtagaatgatttatagtccgttgggcatatacccagtaatgggattgctgggtcaaatggtatttctggttctagatccttgaggaatcaccacactgtcttccacaatggttgaactaatttacaccatcaacagtgtaaaagtgttcctatttctccacatcctctccagcatctgttgtttcctgactttttaatgatcgccattctaactggcatgagataatatttcattgtggttttgatttgcatttctctgatggccagtggtgatgaactttttttcatgtgtttgtttggccacataaatgtcttcttttgagaagtgtctgttcatatc

SEQ ID NO: 903817 - DNA, 603 bp, Homo sapiens
ctaatgggagagactaataaaaattcaatatatgtttacatgctaactacatgtgtacaarattatgttttatgtgttatatattatcaatacttcaatggatgccattctccaaattttgcacaggaatcacaatgcatgtaaaatgttgatagaatggaaacattttgattattcaagcattttctatgcaaatccaatgctgtgcctcacagtgacccaaatactctgcagttctgagattgtggagttgaccacatcatatgctgtctgaaatatttggccagaggaaactaatcatctttgttatacttttcacagggaagaagttagtaatagcaacctttaagtacaaagtcatatcccagttgggccattggccaaggacaacagataaacaaataataaaacaaaaaccaaattaacccaaacctctctctcagtacttctatggatacgtccgcaggcaactccatatccttctttaatgactgagttcacaaatttaaataatagtttactctaattttagtaatgcctctgcttccctcaacacacaaacatacacacacatgtagagcacttgacatctgggtaggcata

SEQ ID NO: 903818 - DNA, 620 bp, Homo sapiens
agccaaaaactgaaaaccacctgaatgtccatcaaaaggagaakagataaataaattgtggtatatctatacaatagaatattaatcatcaataaaggaatgaacagctgatacacttacatggatgaatctcaaaagtagtatgctgatcaaaatagtacattttgtatgatttcatttatacaaatttttaaaaagacaaaactaatctatggtgatataaatcagaagaataggtgcctattggggctgggaattgactggaaggtagcatgaaaaagctttctgaggtaatggaaatttttattttattgaggtgtcactttatcagtgggaccacttcacaaaagttaacagattgagcatttaatatctttactaacttatacacctgccacagtataagttactgtcacacccagtaagaaagcgtggaaaatatattagatggcagaatctgaatattatacaaagtatcttgacagattgaagttctcaactaaatatgacaggttgaaatgttatgtaagaacaaactcttcctcctctcccaaataagtctgtttcatcttatataaaattttacctcaattaagaaataaaaacaatatcatttttaa

SEQ ID NO: 903819 - DNA, 678 bp, Homo sapiens
tccctctaaacaccgctttagctgtgtcccagagattctggtacgttgtgtctttgttytcattgatttcaaagaacttatttatttctgcctttatttcattatttacccagtagtcattcaggagtagtttgttcagtttacatgtagttgtgcagttttgagtgagcttcttaatcctgagttctgatttgattgcactgtggtctgagagactgtttgttatgatttccattcttttgcatttgctgaggagtgttttacttccaattatgtggttgattttagaataagtgtgatgtggtgctgagaagaatgtatattctgttgatttggggtggagagttctgtagatgtctattagctccacttggtccagagctgagttcaagttcggaatatccttgttaattttatgtctcattgatctgtctaatgctgacagtagggtgttaaagtctcccgctgttcttgtgtgggagtctaagtctctttgtaggtctgtaagaacttgttttatgaatctgggtgctcctgtattgggtgcatatatatttaggatagttagctcttcttgttgcctcaattccctttaccattatgtaatgccctttttggtcttttttgatctttctaggtttaaagtctgttttatcagagactaggattgcaacccct

SEQ ID NO: 903820 - DNA, 627 bp, Homo sapiens
tataaaaaccagctcttcccttcctcagtaacttgctgcaactctccaacttctaagctagggacatgttactcagggcatgattgcaagaaacacagactttttccactttacccaaatgaatggaaatgaaagaattattggaaatggtttgggtattaacttcaaattccaaaagaaaagtttaactttttgagccttagttactcctctgctctaagctctccaaaagcatcccagatcaaaataaaattcaaagtctttattagagcctctgctgatctcaacttccaccactctctctgcttctccccatcccatccatccactgcagccataatagtctctctgcaattccttcaacttactaagcaggctcccgcctcagcacctttatactttttgcaccatatttctggactgttcttcccctccccaaaccccttccacccagagtatctcaggattgcttcctcatatccatctgttctctgcccaaatgttatmttctcagaaaggccatctccaatcatcctatataaatacacagaagagagaagttttcccgcacccacttccccactaatatggcctggctctctgttcccatctaaatctcatcttgaa

SEQ ID NO: 903821 - DNA, 547 bp, Homo sapiens
acagaagagagaagttttcccgcacccacttccccactaatatggcctggctctctgtycccatctaaatctcatcttgaattgtaatctcaattctaatccccacatgctgagggagggacccagtgggaggtaactgaatctgggggcggttacccccatgctgttctcataatagtgagttcccacaagatctgaaggttttataaggagctttctcccctttgttcagcacttctctcatctgccaccatgtgaagaaggacgtgtttgcttccccttccaccatgactgtaagtttcctgaggcctccccagtcatgcagaactgtgagtcaattaaatctcttttctttataaattacccagtcttgggtatttcttcatagcagcatgagaacagactaatacactaaattggtactgcagagtgtagggtgctgctataaggatacccaaaaatgtggaagcaactttggaactggataacaggcagaggctgaaacagtttgaagggctcagaagaagacaggaaaatgtggaaaagt

SEQ ID NO: 903822 - DNA, 653 bp, Homo sapiens
gagcatttcttgcgagattgatttggtggtgattatttcttttagcagttgcttgtctggatgtgcataattgtttggcttagttcctgggtgctttcagggggccaaagctctgtatgtgttccctagttgtggataccttctgtgtggcagctttctcagatactgtttgttgtagccatgtattggatgaattagcttacatatatcgttcagggcagaggatagggagaactcaggaaacttatctagcaccaagcccttcgcgagcatatcttttatttggtggtacagttcaggccgaaatccagaaggtggtgcttaagagtaagagctggttctcccttaggtaggctgatggtaagtggaagcacctgccttgatgtggggttggtggaaagtgatcctgttggagtgtgcttagttcttaggggaggggctgaggagtgcatcagctccttgtcattgttcagtgggaatgcagtctgcttccctatcatgactttgttgcaggactcatgaccttcacttcataaagactttgtctttttcattcctggctgcagtgtggctgcaggctstggatatgcccttctcatggctaccaccaaaatgagccctgggcacagcctttccccctaatccagagcagg

SEQ ID NO: 903823 - DNA, 572 bp, Homo sapiens
aaggagtaaaaacttgatggataataccgtataaaactctacaacaggctgacctgcttgaagctattacttactagaaattatttactgctgatatatctttctttttttttyttttttttttgcgacagagtctcactctgttgccaggctggagtgcagtggcgcaatctcggctcactgcaaactccacctcccgggttcaagtgattctcctgcctcagccttccgagtagctgggactacaggcacatgccaccacgcccagctaatttttgtatttttagtagagacggggtttcatcaggttggccaggatggtctcaatctcttgacgtcatgatccacccaccatggcctcccaaagtgctgggattacaggcgtgagccaccgcacccggcctactgctgatacacctttcttaatacctttccgtccacagtgtagtataactacctgcttacgtgatctcttccctgcagggtctatgttttgaatccccagggtttaacagaaatacctggcacatgctaaacactcaataaacattttttaataaataaatgagtaa

SEQ ID NO: 903824 - DNA, 658 bp, Homo sapiens
gctagcttgagttgtacttaatgaacakcatggtgaatttccctcagataataacaaaatcttctttatttgtctttttaaaaatttgtttaaagactggaccgctccttcagtcatgctgtgcaccaaaaaggtacacctcaggccactggtccctgactcggcccggagttttctacatcggccgagaagatggatacattgatatctgggaccttctggagaaaacccatgaaccagcccagtctcaaaacatttgcataactatgatcacctacatcaaaccctggatcttttcttgtatgttaattctaactaaataagctaagtcattttgggtaactcgggaacatcttgacattcatctgaaaagcctccaatgtttatttcttagttttttgtttttcttcctgctcatcccttcttatcccttcccttctcttcctttccttttcattcttctctcttccctttccttcccatctttcctcttccttttccttctctcttggtctcaaactttggacacaacctgagctcttctcactgttgcctcatcaagaatgatttctgagacacgtgtcaggcagaggctggttttgaactgcacgatgggaacatccttctcttctccgggtcagacaggatgacccggatc

SEQ ID NO: 903825 - DNA, 602 bp, Homo sapiens
gtattcagctgaatactgatcagctcatatgtgtgaagaaactattgaaggctggagaaaagaacacctgaaatgattgcagatagcagtgcactacaagaaatgttaaaattcatccttcatgcagaaggaaaatgctaacacctggaaatatggatttgcagaaaaaaaagacctctggaaatgataactacatggtaaagatataacattttaaaattattgttcacatctctttaaaagattattgtttatgcaaacataataacaacgtgtggtattttctgctaaagaaaacattcattaaggattctttgcttttcaagcggggagccctgagaaactagaagaattattggtaatggaaagtaggtgatttttaccctaaagggtgtcagctgtgaattctggtagcggactgtctttatactaaggaacttatgggttgccacaagtttggcttttaacagaatataattgcaamatctgtcaaaggctttttattctctctctctttttttttcctttgttttttttttttttccttggagacaaggtctggctctatcacccaggctagaatgcaatggtgtgatctcaac

SEQ ID NO: 903826 - DNA, 575 bp, Homo sapiens
gggatacatgtgcagaaggtgcagggttgttacataggtatacaygtgacatggtggtttgctccacccatcaacctatcatctacattaggtatttctcctaatgctccctccccttgcctcccacccctcaacaggcccactgtgttgtgtttggttttctgtttctgtgttagtttgctgagaatgatggtttccagcttcatccatgtccctgcaaaggacatgggctcattctttttatggctgcatagtattccatggtgtatatgtgccacatttctctttatccaatctgccattgatgggcatttggcttggttccaagtctttgctattgtgaatagtgctgcaacaaacacatgtgtatatgtgcctttatagaagaatgatttacaatctttgggcatataccccagtaatggggattgctaggtcaaaatggtattttctaggttctagattccctggagggataagccaacacttgttcttcccacaaattagttaaaactaattttacattcccacccaacagtgtaaaagcattcctatttctcccacatcctgtccag

SEQ ID NO: 903827 - DNA, 620 bp, Homo sapiens
tttcctgaattttttgtttatttttatttttattttttctgtaagctgtctatttccttaaatatttctcccttcacttcttgtatcatttttcggatttccttgcactgggcttcacctttctctggactccctgatcagcttaataactaacctcttgaattctttttcaggtaaatcagggatttcttcttggtttggatctattgctggtgaactactgtgattttgtgggggtgttaaagagccttgttttgtcatattaccagggttggttttctgattcctcctcatttcgctaggctctctcagaggaaaggtctagggctgaaggctgttgttcagattattttgttccgtgagtgttcccccttttcctatggatgtgatttcctgtgagccaaactgcagtgattgttgtctctcttctgggtctagctacccagcaagtccacccagctctgggctggtactggggattgtctgcacagtcctgtgatgtgaaccaactatgggtctttcagccatggataccarcgcctgttcccgtggaggtggcaggggttgcaaatggactccatgagggttcttagctttgatggtttaatgctgtattcctg

SEQ ID NO: 903828 - DNA, 533 bp, Homo sapiens
tgtctgttttatgataggttcagtaaaaaacagaatttaccttgtagttatttactggttatatagctggaaaaattattcttatcaactggaaaaacctctactcaagtttgtgctgttaaaatattgactagagttggtgaatgcagcagacgaagtgacagggaaggctggactgatgtcagtattttcaacaaaactcccctatggaaagtgtaggcttccaaggggatatttgaccctgactaccctaggccactctagagcagcaacaccttcacctctcttccgcattcccatacaaaaataccccaccctttcttggtctgcttaacggctaccaaatgccacctgctttcactctggctctgcttctaggcaacattcagaaataacatggtttcaaaaagtaaagatttttcttcataaacttttatactaatattttaacagctaatgttttcatacaattgtatactggctaaaaacagacccggaaaargattacatgaatgaatttgttaacatggggc

SEQ ID NO: 903829 - DNA, 533 bp, Homo sapiens
tgtctgttttatgataggttcagtaaaaaacagaatttaccttgtagttatttactggttatatagctggaaaaattattcttatcaactggaaaaacctctactcaagtttgtgctgttaaaatattgactagagttggtgaatgcagcagacgaagtgacagggaaggctggactgatgtcagtattttcaacaaaactcccctatggaaagtgtaggcttccaaggggatatttgaccctgactaccctaggccactctagagcagcaacaccttcacctctcttccgcattcccatacaaaaataccccaccctttcttggtctgcttaacggctaccaaatgccacctgctttcactctggctctgcttctaggcaacattcagaaataacatggtttcaaaaagtaaagatttttcttcataaacttttatactaatattttaacagctaatgttttcatacaattgtatactggctaaaaacagacccggaaaagrattacatgaatgaatttgttaacatggggc

SEQ ID NO: 903830 - DNA, 603 bp, Homo sapiens
agctcattgtatttttcacttttgaattgcattgatggtttgwgatgttgagcatctttttatctacttgttgaccatttttatgccttctttggagaaatgtctattcaagtattttgctcatttattaatctagatatttgtttttttgctcttgagttgtaggatttccttacatatttttggtatcaaccccttatcagatatatggttttctaatatttcctctcactccataggctgccttttcactctgtttattgtttccattgctttgcagtaacttttttactttgataaaatgccacttacctatttttgcttttgtactgtgtttttggtgtcatagccaagaaatcattgcaaagaccaatctcaaggagctcttcctttatgcttttatctaaaagtcttacaattttaggtattacatttaaatttttaatctattttgggttgatttttgtgtatgatgtaaaacaaggatccagtgtcattattttggctgtggatgtacagttttcccagcaccattaattgaagagactatcctttccccattgtatatttctggcatcgttgttgaagatcggttgacattat

SEQ ID NO: 903831 - DNA, 602 bp, Homo sapiens
tatgcaatagaaattcataaccaatcattatatttagccacttaacttttcattcaatatttgctaaagcactgaatttatggctaaaatataaatcaatagatttttaaatctaagtcatctartatacttgaaaagaataaaataaattgaatatatgtgactgactgaagccacttcaccttcagaaatatatacaacggatgtttttaaagaaagcataccatgatcaattttcaatataaaaaaatgaaatatcagcttttgtgtgacaaaagaaatgaagcaatttattgagttagtccaacataatacaattttgatctattatcctacaataagtattatggtcactttcagtcattaatagagcctctattcaataattaagaggttcattccatcatataataaacatactgatatataaaagctttaaatcttctctaaaatcattcctaaaatcagtcctgcttcagtctgaaaacctggagactgaaagaagctctttgtcatcttctctctttgtctctcctcctcctcacacctattcccagcttatggtctagtcaggcccttgaagaccccttgacctgagtgat

SEQ ID NO: 903832 - DNA, 623 bp, Homo sapiens
ccacaaaatttcctcatcatctcctaaaatacaactgagctcttayttatgtgcacacacagaatgaaaaacagagacaatgatatatcaaccaaataaatattggaattaaagctggatactgctcattagccaccccactttctgaaaaggctgttttttaattggttagatatcatctacatatgtgtgttttgcttaagttaaaggcaatttatgaaatgctggttaggttagactacaacattccttcttggaggcaaactcaattaattccaggatgtgataaataacattcagtttttcattttcccctgttcatgatctcagaagctaaaagtctggagtcaaagttaattttagatgactaggcaggttaaatgagtgtgtatcaacaacctttgttttctcttccctgggtatctccagcactgtggcactttgggagaggagcatgctattatcatagccaggtcctcaagagatcctcattttgtgaatttatctcagagaacagcaaaatattttccttatttgtctgtattgtgcccaagcttaggtgcttattttgtatatgaaaaaacctacttagtagcttaagaatcataaaattctgcctaagc

SEQ ID NO: 903833 - DNA, 531 bp, Homo sapiens
cagggtcagttcattgttactcttccttctctcatatccttaacttagtasagcagatttgactagttgtcctctgagtatccattctctactttttttttagtaatagaacttaaagtaatttgagtcaacaatgttcacagctaacagactgtctttcctagcatccctttcagccaggtacatatgactaacttttggccagtagtattaagtttttggtaacaattttcagtgaagcatcgtggaaaaaaaattcgtgtgcagctaggaaagtctgatttccctctctattccttcttcttcctatgttggaatatagatgtgatgccagggtctgagttccccgttttgaactggaaggtgaccatgaggatagaagccacacacaaaagatgataaaagagaagatagaggaagactctatggggataatttaggagccctgggctttatctctggatttattttgcgtaaggaagaattgcatttcttccttgatagacaattttcttttccagtctttgtttc

SEQ ID NO: 903834 - DNA, 617 bp, Homo sapiens
ctggctcaattgaaaataaaataaaattttagaaacgttaagaaaggaatattatgaacamtcttatctcacagattttataacctagttaagatggaccaattccttgaaagatacagtctattataactcatacagggagaaataggcaatctaaatactgttaattgtattaaaggaattaattattgaataaacttccaaaacagaaagcatcaagcccagatgggttcactggagtattccaccaaacatttaggaaagaaaactacaccaagtctctacagttgcattgaaaatatagaagcagaggcaatattttctaactcattgtataaggtcagcattacactaataccaaaagcagacaaaaatattgcaaggaaaaaaacacatcaatatatctgatgaatatagatgcaatatttctcaagaaatattagcaagtcaatccaacaaatttataaaaataattctacacttgagataagcctgggcaacatagcaagacactgtacctacaataaatacaaaaattagccaagcatggtggtgcatacctgtactcctagctacttgggaggttgaggcaggaggattatttgagcccaggggtt

SEQ ID NO: 903835 - DNA, 645 bp, Homo sapiens
gtgctaataaaaagggaaagtgtctgagaaactttcccctgggggcccactttggcttggacctggtatttaaaatccatccgggagactcaaaatcaagtagccaaaagaaaccaggaggagcgaacacatggatgggcagaagcagatgtaaggaccagggaatggatttgaacatcctgggagatgagaacagtaggggagggggcatgagagaggctcagcagaaggattcctgctacagagtctggaattgctactcttgcaagctttgttttctgtgcatctaagttgggtggttgggtagcaaaatgtaaaaggctaatgagttggtgtgcactcaattcatacagccagtcatctgccttggttttcattggctgtcttgttcccttgcctgcatttctggatcctttaatgtgctctctgggtcatgcaagcctcgcttgcttgggttcatttctgggcttctgcagagtaaatagattcttcctatttactgtcatggaaatacaatgcacacaatttatttgagaggtggcatggtgtatcttacatggttattttgtcrtttagaataataaatataatatgtgctcactctagaaaatacagtaagcttttacacaaagataaaataaaaat

SEQ ID NO: 903836 - DNA, 571 bp, Homo sapiens
gcagaggtgtgcctgggagaaggtagatgctattctctgggatgctttgtgctagggaggcaaataatatctcatatatgaatgccatatatgggggargcatggtgggtggtggactgactgttggtggcaacgttgctatttctgaaatgtcttgataaactgaagtggagggatctccacatagtgtgcctatgggtgtcagtcttatcatgtgtgccaataatttactgcattggaattcagtcacagttatggcacaaaaggaaatgtccaaccgaacatcctgctaatgaaggcagagttggtttcagaaaatagtggatgcagagataagaaatctgggagcagctgtttttaccactggctgatgatgctagaccccaggaacacatggtggagacctgggtggtggagttgcagtgtttggaaaccaaatgattgagaacagctcattcttagaagcagacagcaacatacaagagcttctctaggttgttgcggaggaggtaccaattcaataatttcataagtcctacttttatcttgccatataagttgatattaagtc

SEQ ID NO: 903837 - DNA, 552 bp, Homo sapiens
cctggagaactttgctgtctagcgaaaggattgtaaatgcaccaatcagcactctgtgtctagctaaaggtttgtaaatgcaccaatcagtgctctgtgtctagcttatcaggtggggacttggagaacttttctgtctaggtaaaggattgtaaacacgccaattagcactgtgtctagctaaaggtttgtaaacggaccaatcaactctctgtaaaatggaccaatcagctcactgtaaaatggaccaatcatcaggatgtgggtggggacaaataagggaataaaagcaggccacccgagccagcagtggcaacccgctcaggtccccttccactctatggaaactttgttctttagctcttcggaataaatcttgctgctgctcactctttgggtccacagcacctctaagagcagtaacactgtgaargtctgcagcttcactcctgaagtcaacaagactacaaacccactgggagaaatgaacaactccagatgtgctgccattataaactgtaacactcaccgtgaaggtctgcagcttcactc

SEQ ID NO: 903838 - DNA, 590 bp, Homo sapiens
taaataattattattatatttaaggaactaagaaatacaaagttgggatctcaattgtgatctaarggggaaagtacagtgtaaacaacttttgatgaaaaatgcctttctactggaggaatggtagttcctgccaatttaatatctaaaattggtgtgtgtgtgtgtgtgtgtgtgtgtgtgtgtgtgtgtgtgtgtgtgtatttccatctaaaacacatacagcctcctggtttgatatagtaagcacacaaacacatggaaggcaagagttcctgtttctactctgagccttgggattcctccaaatataaaacaatacaaattcatttgcagggtgaagttctttgagattgcatagaacttgtgatatctgtgatttgaaaacgcatgtttgctcaaatgggtgctatcaatgaatatcctgctatctaattggatactttctattcttatttgaatcctcatctctacaatatgactttgtagtgggagaatacatcagagattgcaccaaattaacacaaaaccagggaggaacttgccagagggagtggttgtgtgcctctgctgagacacagatctggaag

SEQ ID NO: 903839 - DNA, 559 bp, Homo sapiens
cagagttgaaatccgggggctttactttccatagaatttgtccctatgtcctcaaatgaattgctttaattaaaataacttagtgaccttttctttgctctcttggctacagaaattttccataaccytcagatttgcccttgggttgttaaaaatattgcactgaaaaagtgccttttgttctcccagaaatatctttttttgcaaacacctcttctttttatgatgactgtctattttagaggaaatctttgattgatacatgttaactccacagacttaacatacttcaagcctgggcaaaagcaaagttctcctaggtttgaatcttttggatctcacaaaatgatggagacttggtgggtctcaaaacgagcaagatgaaataaataagcaattatatgatcacttatttacaagaagatttaggatgatttgcaatcattgcaatatagcaaaactgcattaaaatatcctattttaaatgaacagttcttttagtgtaagagatatcatggttactcaaaataataatgaggatggctagatttagcaggga

SEQ ID NO: 903840 - DNA, 643 bp, Homo sapiens
tggttgttctgtccattattgaaagcacagtattgaagtctctacctaatattgtagaactgtttctgccttcagttctgctcatttatttttcttttaaactacgttttatttgtaaccaaatgatttcatgcaattcttctaaacagtgacattaaaaaatttccttatatataaataacagactataaatttgatcaaaattactagaataaattgtccacttctacagtgttctcatatccaacaaagttggtgcacagtatataaattctcaaagtccaatatttaaaaactcaggtgtttgactaactttaataaagtttcttaatgaaaataaatatatctccagtccatatatttttaagagaattattattctcaataactgctctagaaagataagtttgatacttttattctcctaattttacaattctgagtatgaaattttaacctttaaaatatagtcaggcatttctacctttctctcagcatgacaccaacagaaacacaagttgctagagaggaactaacrtgataatccagtgattttagtcccagtgaattacaggaagaggtacccatgtcactgcaattttaatatgtaatttatttttccttccctaatgtggataactaa

SEQ ID NO: 903841 - DNA, 562 bp, Homo sapiens
tgtcgatctatttgattcttccctcttttcttctttattagtctatctagtgacctattttatttatttttttcactcctggatttgttgatwtttttgaagagttttttcatatctctatctcctttagttccattctgatctttgttatttcgtgtcttctgctagctttggggtttgcttgtgcttggatctctagttcttttagttgtgatgttaggtttttaatttgaggtctttctagctttttgatgtgggcatttagtgcaataaatttccttctcaacactcctttagttgtatgtcagagattctggtacgttgtctctttgttctcattagtctcgaagaacttcttaatttctgccttaatttcagtatgtgctaaggagtcattcaggaggaagttgttcaattttcatgtagttttgtgattttgagtgagtttctcattgttgggttttaatttgattgtgctgtggtctgggatagtgttcgttatgatttcagttcttctgattaagtgacaaatttgagagtaagtcccttgtgatgatgagaa

SEQ ID NO: 903842 - DNA, 579 bp, Homo sapiens
atcatagcacatcacaaaaactgacttcaggaactatcactttaaaggcaatattcaaaatcattagagcaatcagtttacaactagtggggctgtacagaaagaaaaagagactaaacccattatctctcaccatatagaaaaattaactcaggatggattacagacctaaacctgtaaaagttccagaggaaacagaaaacacccttctgaacatcagccttggcaaacaatttatgacaaatacccacaaagcaaactcaacaaaaacaacagtaggtaaatgagacttgatcaaactaaacatgcacaggaaaagaaataatcaacaagagaatcagacaactgatagaatgggagaaaatatttgtaaactgcgcatccaacaaaaggctaatatccagaatctgtaagaaacttaaacaaatcaaaaagaataaaacaaataatcccattaaaatgtgggcaaagaacatgaatagatgtttctcaaaagaagacatacaagcttccaacaaacacgtgaaaaatgctgaacataccaatcatcagagaratgcaaattaagaccccacatag

SEQ ID NO: 903843 - DNA, 496 bp, Homo sapiens
agtgctgttttcagtagcaaaatgtgagaaataaactaaatgtccatcaacaggtaaaggataaacatagcatattattcagctacaatggagtattgtagttgaatattagcatatctatgtattaacatgaataaatataataaatagtagttgaacaaggatattgctaaatggtactccagttttgtggcacttatataaattttgaaaaatacacaacaatatataatttaaatggatccacatatatgcagtaaagcataaaaatatgcatggaaatgataaacacacaatttacaatagtaattccccctgaggatgaagaaggtcacaattgtatctgtaatattctatttcttwaaaaaaaaaaaccttaaaatgaacgtggcacaataataggttttgattaagctaggtggtagattcttgtgcatataatacgttattgtgtactcttctttgtatcttattctaggtatacagcatgtggtta

SEQ ID NO: 903844 - DNA, 609 bp, Homo sapiens
agcctttcaaacattctaaacctactgtaaatcccttttctccgtggaattcttaaattgcgttggtctggtaaaaggaattatttctagccaggcactgtgtctcactcctgtaatcccagcaaattgggaggccaaggctggtggatcaccttaggtcaggagtttgagaccagcctggccaacatggtgaaaccccatttctactaaaattacagaaattagccaggcatggtggtggacacctgtaatcccagctgcttgggaggctgaggcaggagaatggcttgaactcaggaggcagaggctgcagtgagctgagatcatgccactgcactccagcctggtgacagagtgagactctgtcttaaataaataaataaataaataaataaataaaggaatgatatctcagcaatcacactggaagaactcagaagctatacaaaatcacaagtgaagtgttatctgaaaaggactcaggaacatcacacccctaccacgagagacctgctgacatgcagtgtgaggytttgccctcagagaacttggaaggttctgttctccatgccctgctgattcattgtttgaccttgcccaaggactctt

SEQ ID NO: 903845 - DNA, 613 bp, Homo sapiens
ctattgaataactgcacattaataaacaaacaaaatatattccaaaaaagaaagccacatttctatgacctatactatttgtcagagtgaaccaaataactgtgagctatggaawagtgaagcaatggattagagtaagatgagctttctcagatacaaaatggtggtatgacttggaaaactagacaggccttcatttttgcacgtaaaaatcaaacacttgattagactaaatcaaagatttttacattgttttttcagaacctctgggctatatgaaaatgttttagagaaggctaaggaggaagaaatacagttctcctgagtggggcttttactcctctttctaccagaatagctctgtacgtatctttcttactattggggttcatcataagatttagtttaataaaaatgtttccctttctaaaaatacattaaatagtaggcgagttctatagtctttttcatatctcagagaaaatggggttcttcttattgtgtattttgtcctaaaatgttgaatgcctcagactttgcatccatccctcattcttcccttatttatagattttctaaccttgggtctggccacagggaaaattatatgaaa

SEQ ID NO: 903846 - DNA, 632 bp, Homo sapiens
gagcttgatattatataataacatttatcaaattttacaggatttatataactcagtgaaccaatatcttttaaatgatcaattataatgtatataattatgcatggctaaaagatccatccaatatgtgagatatatcaattagttatgtataatatgaaaatttattaatattactttagggtaccctttaatactaacattttagaaactacttgaattttggtgtagtttaaaataattaccttaaaaggctattgaaattctcttcttttaccaaatatatacttatgggaagtgatatatttatcatatataacaacccaaacaacatattacaataaattaaaaatagaagtagatatgaaaatccatgtatcttctgctaagatggatattaagtagatttgcagtaatctgggaccatgccattcttctaagatttgtgttttggaagatctaattatatttcacagaagaatgttatgttaacatgtaaaaggtttattgtattttaaaataaattaataaatattttgaaataactcgttttaaatttttcrtagagtaaatattgatacttttaacacatatatgtcctcaataatttttaagcatttaaaatgttcctg

SEQ ID NO: 903847 - DNA, 607 bp, Homo sapiens
gttaatatttagacattctcagtggtctcatgtgttagagttatctaaaagcataggaaatttgaattttgttttgttgcatttttwaatttcattcagtgtttaaattacgtgtcttggaggatggggaaagattagtcaacaggtacaaagttacaattaaatagaaataagttctggttttgtgttgcccagtagggtgatgatggttattattaagagtgaggtattgtattttacagaatagcttgaggagaggcttttgaatgttctcaccatagagaaattataaatgccttatacaacacacatatgtatcaaaacatcaaattgtatccctaaattatgtacaattacaatgcatcaattacaataagactcatatagtaatcacagtttaaatgaatgaaagaaaagtctcaaaaccataattagagcatcagactaggagatatgtttgtatggaaatgttaacttatttttcaggctatccaggtgtcagccccataattaaggaagggcagcaaaaggtttccctgtcctcaaattaaggctataagtaagtatttattgagcatccaactttagcctcgcagttaatttcttc

SEQ ID NO: 903848 - DNA, 652 bp, Homo sapiens
gtaatattattactttttcagctagttgtaattctgcaaaaaagagtgaaatttaatgctaatttaatctattcttggaacaatttcatggttgaatatgacagataaagagtcccacattcaaacaaataacattttgtaaacttacaataattttgatacaacaagaaacatttctgacccagattttgtggtacacagatggataaagagatatgtaaatacatagatagctggcaaacagatggcttttttttttttcctttttttttttaaacactggttgaaagtagccttccactgatgcatttttgcatgttgtaatatttaatattataataaagtgaggtagaaattcatagaagaggtagaaagtatataagtttaaaagtaagaatcactattctatttttgaaatattattgtatcacaactaataaaatgcaggcgtagatttgagaagaaattatacccacacattacttatttcttgtttactacaactcttcaaagcaaatttggatcttcacacacttaagcactgtcccatgagtaaaactgartgtatttagcttatccatttcaattcaaaatctgatctattgatattttccagcgcttagagattttttaaagaacacagttttgttgt

SEQ ID NO: 903849 - DNA, 635 bp, Homo sapiens
atcagctcgtatattattgttaattaaactctacagatggattaygagtaaaggaagcttatgtctcatttatatagagtaataagaatttctttctatgaaaatggtattgttattcttactattattatttcttaattttagaaagtcagtcatgtattgagtgtatattacagattgttatattctttgccatgcaatactatgttaatacactttttgtgattgtaataatgtgccctaagagaattctgaagatttgcatttgtatgtctgcttttcggaaccatttccaccattgccagtgctctctttccaccactttaataaagtaatagcatctttacggcatcattttccatgaagatctccttacccatatttttggacaaaatatgtttgatcctctgcaattcacttattgtttttgagtcatatagccttcctataaaaatgtgtctggcacttgcctcgtggaggtgtttttaatttcccacttacaagttctttattttatgtgtaacttggtttggaaaacaacaaatgacttaatttataatgataagattttaggataagcaaatatgccatgtcttcaaaatattctccatgatcctccaaagcagactattgtc

SEQ ID NO: 903850 - DNA, 623 bp, Homo sapiens
tccttcttaaacatgcataacttaagcaatgaactaatttacagagagcagtctgcacatgctctgccaactgagatgtggagagatagcacttatatttaatttcctttccacaaccattcaacacctgtatcttctggtttttgctattcacaaatcaaaccgtagggagagaaggtgatgccaaaataacagagctttaaaaattaaaaaaaaaaaaagacactggatgttaaaagaactttgtcaaactcgtttttactgcgatgaattatctgcagtcccagttacacctgaggttaccaggaatgctcaaatgccttgggcaaagattctattcagtacaaatattaagccttttaatgggatgtatatatctacatatacgttaatatatgtatagttttagagacctaagcactgtgaaattacaccagggcataagaatcaaaaggcaaaatgatcaacccaaagcaaagaaaatgaaacagaacatcctcatttaattgagtgtaacaaagtgtactaaataaacttggtaaaggaatgcaaatctgaytcttcaagcatacagttttaattatttaaggggtttgtcgcagagttaaggatgctttaactat

SEQ ID NO: 903851 - DNA, 647 bp, Homo sapiens
tgcttctgaacaataaagaaattaaaagagaaattaaaaagtctgagataagtgaaaattgacaaacaaaataaaacattgtatgcacctaaagctgttctaagagggatgttaacagcaataaatgcctacacatagcaaaaagaaagatctcaaacaacttaactttgcacatcatgaaactagaaaagaaacaaatcccaaaattagcagaagaaaggaaatcataaagattagagcaaaaataaattgaatagagactagaaaaacaatatgaaagattaatgaaactaagtttatttttttaaagataaacaacatcaactctaaagatgccaccaaaaaaaaatcctgttagactaataaacaagtaaaactgcaggatttaaaatcaatatacaacaatcacaatcattcccttactccctttaagggctctcttcagttggcttcaaaacacctccttccttactcttttcatttactgtgatatcctcattctttttttttttatttttatttttttactgcttcttcctgctctccctgatctctaaactttgaaatgctccagggctcagtccctggatctatactctttcctaattatactyactccataagtaattacaaccagtttcatgact

SEQ ID NO: 903852 - DNA, 655 bp, Homo sapiens
aaggtccttgtattagtccatttttatgctgctgataaagatatacccaagactgggcaatttacaaaagaaagargtttaattggacttacagttgcacgtggctggggaagcctcacagtcattgtaggaggtaaggaggagcaagtcatgtcttacatggatggcagcaggcaaagagagagagatcttgtgcaggggagcgtctcttattaaaaccatcagatctcgtgaaacttattcactatcacaagaacagcacagaaaagacttatccccatgactcaattacctcccaccagttccctcccacaacatgggagaattcaagatgagatttggatggggacacagccaaaccatatcagtacttaatggactgaattcatcaagtgattacaagtaaatatttttctttttaaaaatttaacaaatatattatattcctatttgttattatttataaataatgaatatatcaagcaataattatcaaatgctatatttaaatgtctagtgtttttaggaatattgaatatcttattattgttatactttactgattaaaatgccatgaattaacatacattgtatacttgctttacatatttaggtatagaaccagaaaattaattgtctaaaatctactccacag

SEQ ID NO: 903853 - DNA, 654 bp, Homo sapiens
tgggatgaatgcacacttcagaaagaagtttgtcagaatacttttgtctagtttttatgtgacaatatttccttttracaacaggtctcaaagcgctccaaatatgcacttgaagaatctacaaaaagagtgtttcaaatctgataaatcaaaagaaaggttcaactctgtgaaatgaatgcatacatcacaaagaagtttctcagaatgcttctttctagatttatgtgaagatatttccttttccactatagtccttaaagcgctccaaatatccacttgcagaatctacaaaaagagtatttcaaaactgttcaatcaaaagaaaagttcaactctgtgagttgaacgcacacatcataaagaagtttctcagaacgcttctgtctagtttttatgtgaagatattgccttttccaccataggcctaaaagtgctccaaatatccacttgaagattatacaaaaagagagtttaaaaatggcttaaccaaaatataggttcaactctgtgagatgaatgcacacatcacaaagaagcttcttagaatgcttccatgtagtttttatgtgaatatatttccttttctactagaggcctaaaagcgctccaaatatccacccacaaaattcacaaaaagagtgttaccaaatt

SEQ ID NO: 903854 - DNA, 570 bp, Homo sapiens
cctgaagattctacaaagagtgttacaaagctgctgaatgtaaagaaactttctactctctgagataaatccacccatcacaaagatgtttctcggaatgcttctgtctagtttttacgtgaagatatttccttttccactatagacctcaaagggctccaaacatccacttgcgaattaaacaaaaagagtgttttgatactgctcaatcaaaagaaaggttcaactgtgtgagatgaatgcacacatcacaaagaagtttctcagaatgcttctttgtagtttttatgtgaggatatttccttttccaccataggcagcaaaggtctcaaaatatccacttgcagaatctacaaaaagagtgttgcataactgttcaatccaaagaaaggttcaactctttgtgatgaaagcacacatcacaaagtagtttgtcagaatgcttctgtgtagtttttatgtgaaaataaytccttcccaacataggccaaaaagtgctccaaatatccacttgcagattctacaaaaagagagtttcaaaactgctcaatcaaaatatagtttcaactc

SEQ ID NO: 903855 - DNA, 656 bp, Homo sapiens
gcttctgtgcaacttttatgtgaagatatgtccttttccacaataggcctcaaatcgctccaaatatccacttgcagattctacgaaaagagtgtttcaaaatttctcaatcaaaagaaagtttcaactctgtgtgatgaatgcaaacgtcacaaagaagtttctcaaaatgcttctgtttagtttttaggtgaagatatttccttttccaccataggccaaaaagggctccaaatatccacttgcatattctacaaaaagagaatttcaaatctgctcaataaaaatatagtttcaactctgtgagttgaatgcacacttcacaaagtagtttctcagaatgcttctgtgtagttcttatgtgaagatatatccttttccaccagaggcctcaaagcacacaaaatatccacttgcagattttacaaaaagagtgttcacaaactgctcaatcaaaagtaaggttcacctctgtgagatgaatgcacacatcagaaagtagtttgtcagaatgcttctgtctattttttatatgaagatatttccttttccaccataggcctcaaaggtctccaaatatcccttgcagattctraaaaacagtgtttcaaaactgctcgataaaaagaaaagttcaactgtttgagatgaatgca

SEQ ID NO: 903856 - DNA, 656 bp, Homo sapiens
gcttctgtgcaacttttatgtgaagatatgtccttttccacaataggcctcaaatcgctccaaatatccacttgcagattctacgaaaagagtgtttcaaaatttctcaatcaaaagaaagtttcaactctgtgtgatgaatgcaaacgtcacaaagaagtttctcaaaatgcttctgtttagtttttaggtgaagatatttccttttccaccataggccaaaaagggctccaaatatccacttgcatattctacaaaaagagaatttcaaatctgctcaataaaaatatagtttcaactctgtgagttgaatgcacacttcacaaagtagtttctcagaatgcttctgtgtagttcttatgtgaagatatatccttttccaccagaggcctcaaagcacacaaaatatccacttgcagattttacaaaaagagtgttcacaaactgctcaatcaaaagtaaggttcacctctgtgagatgaatgcacacatcagaaagtagtttgtcagaatgcttctgtctattttttatatgaagatatttccttttccaccataggcctcaaaggtctccaaatatcccttgcagattctgaaaaacagtgtttcaaaactgctygataaaaagaaaagttcaactgtttgagatgaatgca

SEQ ID NO: 903857 - DNA, 569 bp, Homo sapiens
aactgctcaatcaaaagaaactttcaactctatgagatgaaaacacaaatcacacagaagtttctcagaaactttctatctagtatttatgtgaagatacattgtatttcaccataggcctcaatgggctcagaaataccctttgcagattctacaaaaggacattttccaatctgctgaagcaaaagaaagggtcgactctgtgagatgaatgcacacatcacaaagaagtttctcagaatgcttctgtctagtttttatgtgaagatatttgctttttcacaatagcctcaaatggctcagaaatatccctttgcagattgtacaaaaagaccctttccaaactgctcaatcaaaagaaagtttcaagcctctgatatgaaagcacacatcacaaagaagtttctcagaaagcttctgtctagtttttatgtgaagatatttcctttttcaccacagacctcaaacygctcacaaatatccctttgcagattctacaaaaagactgtttccaaactgctcagtgaaaagaaaggttaaactctgtgagatgaaagcacgcatcacaa

SEQ ID NO: 903858 - DNA, 627 bp, Homo sapiens
ttgcagattgtacaaaaagactgtttgcaaactgctcaatcaaaaggaatgttcaactttgtgagatgaatgcaggcatcacaaacaagtttctcaggatgcttctgtctagtttttatgtgaaaatatttctcttttcaccataggcctcaaagcgctccaaataaccatctgctgacacttctaaaagactgtttccaaactggtcaatcaaaagaaaggttcaataccgtgagatcaaagcatccatcccaaacaagtttctcaggaagcttttgtctagttttgtgtgaagatatttcctatttcatgataggccatcaagggctcacaaatatccctttgcagatactacaaaaggactctttccaaactgctcaatcaaaagaaaagttcaactgtgtgagatgaatggtcacatcacaaagaagtttctcagaatgtttctatctagttatgtgaagatatttcctttttcgccataggccttaaacygctcacaaatatccctctgcagatactacaaaaagactgtttccaaactgctccatcaaaagaaaggttcaattctgtgaggtgatgcacacatcccaaagaaatttctcagaatccttcagtctagttttt

SEQ ID NO: 903859 - DNA, 627 bp, Homo sapiens
ttgcagattgtacaaaaagactgtttgcaaactgctcaatcaaaaggaatgttcaactttgtgagatgaatgcaggcatcacaaacaagtttctcaggatgcttctgtctagtttttatgtgaaaatatttctcttttcaccataggcctcaaagcgctccaaataaccatctgctgacacttctaaaagactgtttccaaactggtcaatcaaaagaaaggttcaataccgtgagatcaaagcatccatcccaaacaagtttctcaggaagcttttgtctagttttgtgtgaagatatttcctatttcatgataggccatcaagggctcacaaatatccctttgcagatactacaaaaggactctttccaaactgctcaatcaaaagaaaagttcaactgtgtgagatgaatggtcacatcacaaagaagtttctcagaatgtttctatctagttatgtgaagatatttcctttttcgccataggccttaaactrctcacaaatatccctctgcagatactacaaaaagactgtttccaaactgctccatcaaaagaaaggttcaattctgtgaggtgatgcacacatcccaaagaaatttctcagaatccttcagtctagttttt

SEQ ID NO: 903860 - DNA, 622 bp, Homo sapiens
cattcatctcacagagttgaaactttcttttgattgagcagttttgagacactctttttgtagaatctgcaagtggatatttggarcactttgagatctatggtggagaggaaatatcttcacataacaactaaacagaagcattctcagaaacttctttgtgatgtgtgcattcatctcacagagttgaacctttgtttttattgagcagtttggaaacactctttttgtaatgtctgcacatggattttggagcacttttttgcctatagttgaaaaggaaatatcttcacatgaaaagtagacagaagcggtctgagaaaattctttgtgatgtgagcattcattttacaacgttgaaacgttcttttgattgagtagttttgaaacacccttttgtagaatctgcaagtggatatttgtagcgctttgaggaatatggtggaaaaggaaatatcttctcatgaaaactagtcagaagcattctcagaaacttatctgtgatgtgtgcattgaactcacagagttgaactgttcttttgattgagcactttggaaagactcttgttgttgtatttgcaaatggatatttggagtggtttgaggcctatagctgacaagt

SEQ ID NO: 903861 - DNA, 548 bp, Homo sapiens
caagtcaatatcttcccttaaaaactagaaagaagcattctgagaaacttatttgagatgtgtgcactgactcatagwgttgaacctttcttttgattgagcagatttgaaacactctttttgtagtatctgcaaatggatatttggggctctttgtggcttctgatttgtgcattcacctcacagagttgaaactgtctttggagtgagcagtttggaaacactctgtttgtagaatctacaagtgaatatttggagtgctttgaggcctatgatggaaaaggaaatatctccacataaaaacaaaagagaagcatcctccaaaacttctttgtgatgtgtgcattcacctcacagagttgagcctttcttttgagtgatatgtttggaaacactcattttgtactatctgcatatgaatatttggagcactttgaggcctatagttgaaaaggatataacttcacataaaaactgaacataagcattctgagaaacttccttgtgatgtgtgcattcatctcacagagttgaacttttcttttcat

SEQ ID NO: 903862 - DNA, 428 bp, Homo sapiens
tgcattcatctcacagagttgaacatttattttcattgagcagttattaaacacactttttktggaatctgcaagtggatatttggagtgttttgaggactgtggtggaaaacgaaataacttcacataaaaactagacagaagcattccgtgaaacttccttgtgatgggtgcattcatctcacatagttgaatctttcttttgatagcacagtttggaaaaactattttcgtggtgtctgcaaaaggatatttggagaggtttgaggcctaggtcaggaaagaaaatatatttacattaacacaagacagaagcattctgagaaacttctttgtgttgtatgcattcatctcacagagttgaacctttcttttcattgagcaattttgaaacacccttttggtagaatcagcaagtggatatttgg

SEQ ID NO: 903863 - DNA, 674 bp, Homo sapiens
ctgccctatgggtttagtgctagtcattggctgtaggtttcactgcgggatcctgtggctcctgggtgaggcagctcttactcagccaagggaagttctacgcagaagggggcagccatgagccatcagaaaccaacgggcacagaaactgggccattggggtacctgcttggtagagggactgtggttggggcaccacccagagtacagcagctactataatatataagatctattatttagctaaaaagaatagagaagttattttcaagaaaaaatttaatttgaaagttttgtgtgtagtatattggccatttaaattttgtttcactgcatttaagataaactctatattgtgttttcagttcctagagccatacagatacttgaaaccacaactgatttgatttgaagtgtgatatatacaaatacatatatacgtatatgtgaatatgtgtgtctagagacagaaaccaaattcttgaatataacaggtgttttctaatatttagcaccagcacaactgaggccacctctggttaaaggaatcaacagcacaacaatccatcttargtggtttccacctgaagaactgaatggaccctctcctatatatcagctggaaaggagagagtcatctctaccagctctgatgaccacgatgatgaaaggaa

SEQ ID NO: 903864 - DNA, 620 bp, Homo sapiens
ggtttatcagctattccttctttacagccttacatactttgaatttttactyatgttaatccaaataacctaatcatacatccctgttacacttatttcattttgtaagtgtatattttggctgattatttggttaatgttggtcaccatcactgggctgtgagctcctggagagcaaaattatatcctcaattcttagaatagtatttagcactttccagtaacttaatacgattttattttatttagtggatgaacgaatggaatttcaggttctgattgctctctactctttcttaggatggggattctccgccagcacatgccatcaatacttccttttctaaagtctcatattttgggccttttttttttttttcaatctcttgctttccctcctcttcttgccatctccctgtcccctccccttttttttcttcccagtctccaattatgctgatgtcttcaggactgggtttctcccttgtcacaaaactctactttgaccatcttttactttcaggaaaaatttccaaggtctttcatgatcttaagcctgattgcttctgttgtcacatatcctgccttagccacacttgtcttttcgatctgggcaggca

SEQ ID NO: 903865 - DNA, 599 bp, Homo sapiens
tgagatgtaaaaaaagacacaaaagattaaagaaactaaaagttggcttttggaaaaataaataaaacagacagactcctagctagactaacaatggcaaaaaagagagaagatccaaataaacataatcagaaatgataaagggggcattaacactgaaggcatagaaatacagaaaaccctcagaggctatgaccatctctgtgcacacaaactagaaaacctagaagaaatggatgagtacctggaaacatacatcctccaaagactgaaccaggaagttgaaatattagaccaataacaagttcagattttgaaacaatgagaaaaaatcttaccaaacagaaaaagccccggaccacatgtattcacagccaaattctaccagatgtataaagaagagctggtatcagtcttactgaaaatatttcaaaagattcagatggagggattcctccctcattcattgtatgaaccyggcctcattttgataccaaaacctggtaaagacacaatgaaaaaggaaaacttccatccaaaatccctgatgaacacagaggcaaaaatcctcaacaaaatgctagcaaaccaaatccagc

SEQ ID NO: 903866 - DNA, 654 bp, Homo sapiens
tgcaaactatttcactgaaaatttccaccttcaaatctttgaccagtttgttttgtacaattcactcaatctattctgtttcacttaaatcatatgtgttcctgctaaatacctttcctttttgaaaattgttgactgtggattttgtgttttcactacaaaaaaggataagtatgtgaagtaatgaacgtgttaattagcttgactgagccattccaaaatgtatacatatttcaaaccatcatgttgtacacaatatgtacactttttgtctgaaaatttaaaaatgaatgttgaaaattccagaatttttaattgctgtatgatttgcccttcctattaattattgcacataattcaatactctaatcatctttaaatatgcccatttcttggtttcaggaagaacaaaaatttctgaattttcctgtatgatgatatttgaatgtatttgtggaagaaacttttagtgtttccccagttgtatcactgaatgtcagggatcaacaccgcctcatttatcctcatccatggggttttactgctaacaaaatggggataaatccrtttccatttcccaaattccatagtgaaggcttactttctggaacctctctttgcacacgcctggtctcttagcctgggtctgtggac

SEQ ID NO: 903867 - DNA, 599 bp, Homo sapiens
aaagtgtctatcaatgggcaacgaatataataaaagattaaaagatgatgtacatccattaggaaaaaataattttaggaaaagtttagggaaattaattatggaaaattatgaattataattatgaatgtattattgtgtatattttggaggaggatttaaatatttgcaatgttcttcgatttgaggagacatgttccattaccagtattttaatactcaattttccaatataaacttgaaaaaatgtttattctcctatactttttgttatattttgtctcatttcttcaaatacagttacttaaataagtaatattctagtacatttaagttttttttttcagattgcttttttacaacactttacttttaccataatatataactcagataatggttgccagatcacccaaatatgcaagagaaaatggaagtctggatttcatgtcaaatgtcttatttttaaagagtatcaacttagtcaactataaaacagtgtctgagccaatacarctttttcttcaggacatgctttctcctcacttgtaaaggggttgtaatggagaattaggtaagagtctataatgagctatgtt

SEQ ID NO: 903868 - DNA, 626 bp, Homo sapiens
tacaaaaaaggaattcccacagactattaattgcatttgcttttcctactcactagggactactgcagagtttgacaagctttttttcccaagggtcagattgtaaatgtttttaggctttgtaggccacatactgtctcttttacttcttcttcatcctccttttcttctccttgcaatcctttacataggtgaacaccatttttagctcataggccatatcaaaacaggcctcaggctgaatatggtttggctggccagttttctgagctctggtttagtgaagttaagtaaggatccaggtctgagccattttgaaacagagcatgctacagtatcttaggatccagtcaactacacactgggaatgttcaaacctgtagctaaattcattaagtgaaataaggtagatgctttagtgagcaaggcaagaggaaactaacattggagtgcctaattggtgtgaagtgtcatgctaggcattttatataacataatctcattgagtcttcacgatawatttgtgaatcagatactattattattcttgtctgagagatgaggaaactgagactgagagaaaagttacttgtttaaagtccacctagccagtaagtgccatagcc

SEQ ID NO: 903869 - DNA, 626 bp, Homo sapiens
tacaaaaaaggaattcccacagactattaattgcatttgcttttcctactcactagggactactgcagagtttgacaagctttttttcccaagggtcagattgtaaatgtttttaggctttgtaggccacatactgtctcttttacttcttcttcatcctccttttcttctccttgcaatcctttacataggtgaacaccatttttagctcataggccatatcaaaacaggcctcaggctgaatatggtttggctggccagttttctgagctctggtttagtgaagttaagtaaggatccaggtctgagccattttgaaacagagcatgctacagtatcttaggatccagtcaactacacactgggaatgttcaaacctgtagctaaattcattaagtgaaataaggtagatgctttagtgagcaaggcaagaggaaactaacattggagtgcctaattggtgtgaagtgtcatgctaggcattttatataacataatctcattgagtcttcacgatatwtttgtgaatcagatactattattattcttgtctgagagatgaggaaactgagactgagagaaaagttacttgtttaaagtccacctagccagtaagtgccatagcc

SEQ ID NO: 903870 - DNA, 562 bp, Homo sapiens
cacaagtttctgtggctaccaaaccaaaatactttacagtaattttagcatgtcagctgcaggttctgtggttggtgggttgggraggtggttcagtctagcaggcacatcaacagcaatagttgatacctccctagggtcacaaaaggatggtagtcgtaattatctttgggcatcacatctgtttcaatgaagtcacctggtatttttacagtttcttatattacactgacttttaataaccaacatggaataccttttcacaaaataatgttagccaaaggtgataggcaaggtgttttaatagataacaaagggtagttgcttcaatgttaatagaattttattcctttgagctcctatggttgtgtgctacattgatttgtggatagggagatttaacccacagtagattttgaaacagcagaatattgttttgatgaaggaatatagccaggtagaccccttcttactgtttttctgctcccccatataagagaaaacttgaagtagatagcagattgacgttatgctttcaggagtgtcttctttggacaatgat

SEQ ID NO: 903871 - DNA, 593 bp, Homo sapiens
gggcactgaagcacaaagtacaagttgagcctcccaaatcccaaatctaacatgctcccaaatctgaaactttttgggcaccaatataacactaaatgctcattggaacattttggatttcagaactttgggtttgagatccagtaaatataatataatacaaatatttcaaaatctgagggaaaaaaacaaatttgccagactggtcccaagcattttgcataagggatactcaacctatatactcttcttcatttctgtcatcttcttggcttctgactcttggcctctatacaccagtgctgacactagaatttggccttcttcaattttatatacctctaggaccttggcattcttacaatgctggtggctttgctcacacattcacttgtttctaattgtattcatttcatttatgtgagcaatatatgaattatttaaaattcaaacacttcagataaaatcctccttgaccaacatctccaatcccaatccctcctccagaaataactactgttacayttaaaaggtatataactttgccaagtatccttccaaacctttctttatatacatacatacttatatac

SEQ ID NO: 903872 - DNA, 573 bp, Homo sapiens
gggattatttctaggtcagaagaaacaaaagtaggacaggaacagatgtagacagtttacatgatagcccactgatggcttttctttctttccattgcattggggtacaaggatagaaggaagtgaagaaggcttggagagggtttcccggagaatgggcaagtgagacatggtgtgatttctagggtccatttcagattggtgagcataagtttatagtgaaggcattatatactttttacattggcatgtgcaccagaaactatgtcaataatgagtaaaaattcctgataaagttgaagttaggatttttgccttttgaagaagaaaaattattaagtcaacaattaggaaaagcaatctcaagaaatagaaggagttagttgctctttcacattagaaaaattgttttcatccacagaagttttaaatagctttatggagatataattcacatattgttcagttcagccacctaaaatgtacagttcagtggtttttagtattcacagatatgtgcaaccatyaccacaatcaattttagaacattttcatctccctcaagagaaattc

SEQ ID NO: 903873 - DNA, 659 bp, Homo sapiens
acaaaagaaataaataaagagaataaggatgtaacttctctaatggaaaacttctctctttttttccaaccttcttggctgtaacacaaggaaggagatacccagaatagtgattatcctatcagctgrgcattgtgcagtgccttgttcacactttttggcaacattttcagataaatgtttggattgggggaaggaaaacacagtaaatgtctacaaaaagcctgggtcaatttcaatgaacaaataaataaataattagagaattataaattaaaataaagtagcacattttgctcataaaatttacagatttaaaaatattaacagtattccataagagtaaaagggtgcaaaaacagactcataaattgtcaatgggagtatataaattcagaatatccttttagaggataatagggcaggatacatataagatatttgagtgcacatatattataactcggcaagataggaatcaatcttatagaaatagttacataggagaaaaaagacatattaaaggctatccattgaaaaatttgaaaccgcttaactgttcatcaatagaggcatgatttagtgtattttggtgtatgaattaatgtctatacatgacatacaaagctctataaggcatattgctaagcaaaaggaaa

SEQ ID NO: 903874 - DNA, 664 bp, Homo sapiens
acatcaaagaatatgaaatactttgggatacatctataaaaatatggtcaggatttggatgttgaaaactataaaacactaatgacggaaattgtaataaactccaagagggcccccagtaacccctgcccctggtatgaaagtcctggaattactgttctcccacacggaagagggctgaactgtgaactaataggataccgtggacctgacagtgtatgacttctgggtctgggtcatagaagacgtgtggcttccaccttgctaccttgggtcacttgctctgcggaaggcagcttccatgacataaggacactcaagtagccctatagagattcccaatatttagtgaagacctgagttctcttgccaatagtcatgtgagtgagtcacaccagaaaggtattcttcagccccagtcaagccttcatatgaccacatcccttgctgacatcttgaccgcaagctcatgaaggacccagaatcagatcaacccagttagactgccctcactgacctgcaaaaactgagataataaattctcgttatttgaagccactaggttttgragtcatttgttatgcagtaatggaaaatgacacaggttttggtacctggaagtgagatgttgccataacaaatattaaaaatgtgagagcatttc

SEQ ID NO: 903875 - DNA, 564 bp, Homo sapiens
tcctcttttaccttctgggggccatatgtttctgttttatgtatgtgattttaatctactgacccattacagagtgtggacatgggggagaaggcaggtatgagcgaggaaaggggagggcagagggtaggacatctctgggttattctgtctctcccctagccatatttggccccgtggagtgtaaatccctctgtgaagagcatcctaatgctgaaagtgtgtctgaatgcaactcaaaatgtggcatttgtcactttaagctaaagaaggagctaggctttgtggaagaaaccctattatgcacaaaacttgccccaagtttcagctcagagattgcataatcctgaaattgatgtcctccttgtctgctttttagtagtttcaattatctccatggtttactacattttaaaggttgtaaacttttaaagactcattttgtrttcaaggagtttgtttgttcctttgcttttttatagaccaaaggggcacgattccgtcaagggaaagactacgttggagcaatccctgtggatctgaaacggcgcttggacagcatca

SEQ ID NO: 903876 - DNA, 587 bp, Homo sapiens
cccagaaaccccagttaagctgtttaaagtataatccaattcaatttactkaaaataatagtaacaaaatttaaatcccttgcttctagttagcccttttcaactgcattttcagcaattaccaccaaaagaactgcattaggacaaagattctagagcgggtataatggtcaaatgccatttgaaggcaaaaacagtctaccaggaacaaaacattaaagttcccaaccttgccaaactccctgttctgcgtattctgcctctctcagttcaccttccagctgcctggaagaggcaagtggaaaatgttagttttctggagagatgagaatggaatttaggggttggtagggggtgatgggctcactcacggaccgcaaggcacaagagaagtggcgaacgtctcccaggcaaatgaggcatgaagaatgagggctggagtcaagggggagatggagcaagtataaaaaggcagaggacgcgcaggggccgcgaataggggaagggcacgacgcgcaatccctcccgctccagcccggggagaggggcgggggatgccgcgcgggtcaatttgcctagcattgttg

SEQ ID NO: 903877 - DNA, 607 bp, Homo sapiens
ctagctctttagataatacatagaaaaaaagaaaaggaattatctgtttaaataagtattagtgaatatagcctactttataaagcttaggagtgtttatgcaacattactagcattattcaagcagggatttggatggcatctttaaggttggcatttgaaacttaatctgaaaatttaataaagacaggttttttaggaaatttgtgattgctacagcaccgttttcagagctaactgaagatcttctattttttataattaatttgcatggtcctcatttgaaataaaaaatagaatgatgttattgatttatattctccacataatgatgtaatctcctttctcaagctgtgaattcatcagttgaaatcattaaatttattcaagacaggagtttttagcataattttttctcagaaggcattacttgattttgtttttatacaaaatgtacaaaacataagaaaataaaataattactagaatggaatgtaacacccctttgtggtacractggttggttggctgatctgcttttggaaactaatatcatattcaggagagagaaatgattctgtggaatccgaattattgtatataaaat

SEQ ID NO: 903878 - DNA, 576 bp, Homo sapiens
attccatggctaaaggtggaaggggaagagagggtgagagcamgagtgcaagaggtggtagaatttgcttttataataaactcactcacacaataatgacattaatccattcatgagggcagagccttcatgaactaataatcacatattactaggccctaccacccaacactgttccattggggataaagtgttcaacacataaactttgggggacacattcaaaccacagcaaatattaacacactgatgataattttccgtccaaaataccttaccaattattttattttattttattttcaatagtttcgagggtaccggtggtttctggttacatggatgaattttatagtggtgaaatctgagattttagtgcacttgtcaccagagtagcatatgttgttcctaatatgtactttttaattccatactcccttccatcctcaccgtttctgagtctccaaaatccatttatcactcgggatggttttggatacccatagcttagctcccacttataagtgaaagcatgcattatttggttttcaattcctgagttacttcactcagaat

SEQ ID NO: 903879 - DNA, 617 bp, Homo sapiens
attccacagaagagagtccagtcttacagagatattccctgcagttgaactcttggtatatgctcatttaaaattgtggatggggtatacttggattagttcctatcaaagcaaattactacctaagtaactcttatttccttacagtatagaagttacaagtacaccctgttctctctacccttctcattcttggccaatcttccaagattcacccagtaaatatttagtaccctgtctaggtcaggagtaatactgggattcatcacatttaccaagctttttgaaattatgtgtttactcatttttctctcccagtaagccagttttaatccagggatgtctggatgggtgggtctgtgtgatgacactttgtgagattatatgcaacactttatgtctttgaacatataatatgtcattttctgggcagagattcaatatacttcaccagaatttcaaaaggagccatgtgacataagaagtacctccatcataatttggatattgagcacctcagtggttaagatcataaaccctagatttagcccaatcacctayaaaatatgtaatacatggtaaatgacacaattatttagcttgagtttcctctctgg

SEQ ID NO: 903880 - DNA, 617 bp, Homo sapiens
attccacagaagagagtccagtcttacagagatattccctgcagttgaactcttggtatatgctcatttaaaattgtggatggggtatacttggattagttcctatcaaagcaaattactacctaagtaactcttatttccttacagtatagaagttacaagtacaccctgttctctctacccttctcattcttggccaatcttccaagattcacccagtaaatatttagtaccctgtctaggtcaggagtaatactgggattcatcacatttaccaagctttttgaaattatgtgtttactcatttttctctcccagtaagccagttttaatccagggatgtctggatgggtgggtctgtgtgatgacactttgtgagattatatgcaacactttatgtctttgaacatataatatgtcattttctgggcagagattcaatatacttcaccagaatttcaaaaggagccatgtgacataagaagtacctccatcataatttggatattgagcacctcagtggttaagatcataaaccctagatttagcccaatcacctataaaatatgtaatacatggtaaatgacacaattmtttagcttgagtttcctctctgg

SEQ ID NO: 903881 - DNA, 601 bp, Homo sapiens
gggtggatgtttagcataaaacatgtttcaacagttttaatggatatrgatttctgagacaacttacattattatgacctgttagtagtagtagcacttagttcacttgttgagtaaaggatgggaacaattatgttgtgatgacagatttccattaggtttttttttttctgccacatatctagacgtgacttagttttaatgtacctgaatactcccatagtaaagtgtattgtgatttcatcaaggagggcaataattattaagcagaggaatctttagtctttctctctttgaatatctaactgatcttaaaaataaagtggcttgtctatttgcagttgattttctacatgtgtttgtttccagtaattcccgccttcttaccccggagtagtttaacccatctcttaattgtccctagctgatgtctagaaggtctttttaaacttcttaactgcacaatgagccctcagtggacaccttgattgtgtttgtttgggaaaatgccaagcactaatgagtattttgtttaatgtaatggaaactgaaagtacatggcttcttccctgactgatcaatgcccacttctgttgtttga

SEQ ID NO: 903882 - DNA, 601 bp, Homo sapiens
gggtggatgtttagcataaaacatgtttcaacagttttaatggatatagatttctgagayaacttacattattatgacctgttagtagtagtagcacttagttcacttgttgagtaaaggatgggaacaattatgttgtgatgacagatttccattaggtttttttttttctgccacatatctagacgtgacttagttttaatgtacctgaatactcccatagtaaagtgtattgtgatttcatcaaggagggcaataattattaagcagaggaatctttagtctttctctctttgaatatctaactgatcttaaaaataaagtggcttgtctatttgcagttgattttctacatgtgtttgtttccagtaattcccgccttcttaccccggagtagtttaacccatctcttaattgtccctagctgatgtctagaaggtctttttaaacttcttaactgcacaatgagccctcagtggacaccttgattgtgtttgtttgggaaaatgccaagcactaatgagtattttgtttaatgtaatggaaactgaaagtacatggcttcttccctgactgatcaatgcccacttctgttgtttga

SEQ ID NO: 903883 - DNA, 633 bp, Homo sapiens
aagccaacattagagataactgtgttacattatcttaaaaatgcaagcaaaccagtaagttatttatgaagttctgaatttgatrtggagtacagtgatgtcttgagtatatttttgggaaacaacttgattttcttcattaatttgaaaggtttatatgaagaaacagaaaaattagagcaactcctacctaaaaagtttatagtattgtaaaagaagatgatcggaatcattcccaaatatttttaaggcctaacaatctgcattcacccttctcagccttagtcccatcccatgctatagaaaccacttttctgaaacagattgtgtaatgattcttgttaatcaaggttcaatttacaaatccaaaattatagtggtgtctgtcaaatacttcagaagataatgttgtaaaatctccaaaattagttcaaagaagcatttcctccaggaaaatctacacattcaggtcctgtaaactggatataatgtctaagctgtggtgctcagaaagttctaactcagtgatagacaactcccataaatgtgtaggtcgacacctagtttccataaacacagagcacctgtaactgtatttctctatttgtggcccactgggtctttcctgtgcat

SEQ ID NO: 903884 - DNA, 638 bp, Homo sapiens
atctgctattttgtaatgattaaaagtggaagtcacttactttgacttttttaagtcattttataaatttggtcaatgtcttttaatatttcagacttattgttttcccacatattactttagatccatgtttttcttcccaatgcccagcactcattcataaaaatataaggctacccagattctatattacaaaaaatagggaaacttggacactagcagaatattttaaatgagtgactatagaaattagttcaggttttcttctgtcatttaaatcttatcaaggatcagagataatccaacatataaatataaggccattcaaagatactgagcttttttttgggaaaaatgtcagatctctgattaagaaacaggaagaagcaaaagacacaattagaacctgttgctttttggcacaacttattccacttttatttgaattttggatgttcatgtgattgatatcaggcttcccaaatattagctttaaaagatgcatgattatgatgctwtaactttaaacttggtcttcaattaacccttaaggatgaatagactggtgctttttgttttgttttatttttctgttctcttacaaccatgacatggatgttcccagtacctttgttgca

SEQ ID NO: 903885 - DNA, 560 bp, Homo sapiens
catcaggtagttctcgtgccatgtttttcagctcagtcaggtcatttaaggacttctctacactggttattctagttagccattcgtctaatcttttttcaaggtttttaacttctttgcgttgggttcraacttcctcctttagcttggagaagtttgatcgtctgaagccttcttctctcaactcgtcaaagtcattctccatgaagctttgttccgttgctgtcaaggagctgcgttcctttggagggggagaagtgctctgatttttagaattttcagcttttctgttctgttttttccctatcattgtggttttatctgcctttggtctttgatgatggtgacatacagatggggttttggtgtggatgtcctttctgtttgttggttttccttctaacagtcaggatcctcagctgcaggtctgatggagtttgctggaggtccactccagaccctgttttcctgggtatcagcagcagaggctgcagaaaaatgaatattgctgaatagcaaatgtttctgcctgatggttcctctggaagctttgtctcagt

SEQ ID NO: 903886 - DNA, 522 bp, Homo sapiens
accatagtgtccatgtttcatgatccaaaattaagtctgaatctgacaagctctaatcttctcttgtgaaaactggggtagaaaaattragaacagggcagtcctctcatgcttataatccacatggtgctttctcttccttctttcattcatttttcagccacattcaacatttaactcagtagttgtgtggctctcaacaaatgttctctgaattttgaaaaatgagcatataaatgttatcagcacagtttttataaataataagaatttaaagattacacatgttgtatttattaatccatgaaagatttattgataatgtaataacttttgtagctctgaagttagtgctttggaggcaatcccagatttttttttctttttttccttcctaatatccaagagtcacaaagtcacatcagtactaccctattattatctgtcccatcccctctattttcacagtcctaattcatgtgcttgttatattctgtctagatgaaaagaacagtgtcttcc

SEQ ID NO: 903887 - DNA, 649 bp, Homo sapiens
aatcaagcataaaatttaaaagtaacaaaatatttgaaagtttctaaatgtaaagtttcatgcaaattagtatgaaccattcctcacagatattagctttcatactttatgtatatttgtacattgcatatatttaaacttttgtaagactgatttgttaataacaaaatcttcctatatttatctctgattttaaatctcatgtatgacttatacacagcattaaaaatatatttaattatagcactaaaagaaagaagcagcagcatcctaggtttattttgttataatttgtttttgtaattttattgaagccctcatttctgaattggaatagaaacacaagtgaacacttcaaagctcttgatataaacaactgacttcaaaaagctaaacgtgtgtaagctctgctataaacctgctccttaattatgttccattttgtgtttaaaaccatacatgcgtcattttatttcatttttcccgttctgtcaggagtgttattctttagtttattttcagtcttgctttgaccgataatattttttgatcaatgaaaaggctggtgtttccaaaagtaatggtatgtaataaaactgttctactctcacaattaagagcattttattrtgtaataaaatcagtttct

SEQ ID NO: 903888 - DNA, 589 bp, Homo sapiens
atggtgaaaaatacaaaattagcagggtatggtggcacttgtctgtagtgccagctacttgggaggctgaggcaggagaattgcttgaacccgtgaggcagaggctgcagtgagctgaggttgcgccactgcactccagcctgggtgagacagagtgagattctgtttcaaaaataaataaataaataaataaaaataaagtgtatttgggaaatatttagcagggaagattacaggaacaaataaacaaaaatggacttaattatggcaggtatggtacaaattcacatgaatctttaggatgaaaatactaaggaagatgaatgaacttatgaggcagtagagggaaaaaatgagaggtaagcgatatgaaaaggaaatgaaagaggagtcaaacattagtgaaatgttctctctgtagttctttaagaataaaaaataatcttcctgaagcattagttttacaaaacatttaggctagagttgaatgacagctgtatamaaggataatgtctaagatagaagacacttaaaaacagtgtttttctaggtttttaggatatatatagataattagttagggtcattg

SEQ ID NO: 903889 - DNA, 637 bp, Homo sapiens
cacacagcatttggctgaataattgtacaaattttacaatggaaaatgtaatgccagcaaagtcattctcctgagctataaaatgttgctttgcattcatccctaaggtatacagtatttttaaagtatacatttctgtatctgtatttatctaaatatatgtaatatatctatgtatattaaaacctttgtcttgcttttttataatgaccatggagacgtgacatgacataaatgttcttagctctcttcaatcaaaaatcttgcatcctgtaaatggtcgcttataaaaaagacaaaaagattcttaaatacttaaaattaggacctattttaggtaccatttaatccaatgattttcagttttgtatttctatattcctagtaattctttagttaaagtattctaaaatctattttcaaattttctaaaaacaattataaaaattatatatttaccttggctaaggtccataaggtagaaaaaaacaccaaggcaaagttaacttagagcagtaatgtgtaaaaaatatatggtacaactgatataaatttaaataaccactaattagtaaattcattcttatggaaacagtcttccaaaatacrggattgaaagagcagtaaaaaattgata

SEQ ID NO: 903890 - DNA, 581 bp, Homo sapiens
cttcttctctctctttccttgtcatctttttttttcattttaccacaacttatcattgtaactgaaatgtgcagatgctctgtgcccatgtgaaaatgcaacagctgtattagtgatggtacacaacctcrattacaggtaaatatcctaaggacaaaaaactggctcttcttctttatcacaacactagctactaatgaattatgtgataatttgtcaagtgcttgtactattggctatgtaattatgtggaaatcccctgctgaaaacctgaaacctgtccctgaacttcatatatatattttggagatggagtcttgctctgtcacccaggctggagtgcagtggtgtgatctcagctcattgcaacctctgcctcctgggttcaagcgattctcctgcctaagcctcccaagcagctaggattacaggcatgtgtcaccacacccagctatttttttttttttttgttatttttagtagagacagggtttcactgtgttagccaggatggtctcgatctcctgacctcatgatctgccagcctcggcctcccaaagtgctgggattgcaggaatgag

SEQ ID NO: 903891 - DNA, 581 bp, Homo sapiens
cttcttctctctctttccttgtcatctttttttttcattttaccacaacttatcattgtaactgaaatgtgcagatgctctgtgcccatgtgaaaatgcaacagctgtattagtgatggtacacaacctcgattacaggtaaatatcctaaggacaaaaaactggctcttcttctttatcacaacactagctactaatgaattatgtgataatttgtcaagtgcttgtactattggctatgtaattatgtggaaatcccctgctgaaaacctgaaacctgtccctgaacttcatatatatattttggagatggagtcttgctctgtcacccaggctggagtgcagtggtgtgatctcagctcattgcaacctctgcctcctgggttcaagcgattctcctgcctaagcctcccaagcagctaggattacaggcatgtgtcaccacacccagctatttttttttttttttgktatttttagtagagacagggtttcactgtgttagccaggatggtctcgatctcctgacctcatgatctgccagcctcggcctcccaaagtgctgggattgcaggaatgag

SEQ ID NO: 903892 - DNA, 695 bp, Homo sapiens
tagggtggagttattcatattctttcttgatccaatgttgaagattctgataatttcttgtctatatgttgcttttctttctttaacttttatttgaggttccagggtacatgtgaaggtttgttacataggtaaactcatgtcacaggggcttgttgtacagattattttatcactcaggaattaagcccagtatccaatagttatcctttctgctccttttcctcagcacaccctccaccatcaagtagactccagtgtctgttgttcccttctttgtgttcatgagttctcatcatttagctcccacttataagcgagaagatatggtggttggttttctctttatgtgttagtttgctaaggataatggcctccagctccatgtgtgttcccataaaagacataatctcaatctctctttttttgtttaatggctgtgaagtggctatgttgtctggggcatataccctagggtttgttgtcatgcaccaggaaaatttaggacacattcacacacaaggagtttaggagcagaggtttaataggcagaagagtaaagaaagagaaacagctctatctatatagagagaggggtctctgagtggaaaggatgggctggcagcagatggatgggattttatagtcaggtttgaggaggtggtgtctgrtttatgtatggcttagagattggt

SEQ ID NO: 903893 - DNA, 555 bp, Homo sapiens
gctggagaccattatccttagcaaactaacgcaggaacagaaaaccaaatactgcatgttctcacttacaagtgggagctaaataatgagaacacatggacacatagaggggaagaacacacaatggggcttatcagagggtggagggtgggaggagggagaggatcagaaaaataactaatgagtactacgcctaatacctgggtaacaaaataatctgtacaacccctaccacacaagtttacctatataacaaacctgcacatgtacccctgaaattaaaataaaaattaaattaaaaaaagaaaaataattgacagcatctagtttggaaataacgaaataaatctgtctttatttgcagtcaatagatcatatatgtagaaaattgtgtaaaaggttactagcactaataagtgagtttaccaaggtggtaagatataatatcaatatactgaaagcaattgcatttctctatactagcaacaaacattatgaaattataktctttaaaaatatcatttacaatagcatcaaaaattttttaaaatacta

SEQ ID NO: 903894 - DNA, 572 bp, Homo sapiens
cactgccccgccctagttcagaccttggcccttttcaccttccctgttataataaatgccctctttacctgtctcccagctacagcttttcccctccccaaatactccctccctgcttccctcacagatgccagaatgacccaatcacctcctatccttcaaatccaatgtttgggaattctaaagctcttccttattttttttgactcctctactgactactcatttcctgaaactttctcccaacttagatgtgtcacttcctctctcagaattcttcagtgactccagcacctacaggacacagtgaaatctctcttcctggagtaccagattcctcacaatctagctccggaccctgctaagcctctcctccttaccgctttttcccctgaatttctctcctagcccctgtggttcttctgaatttccatctctctttgcacacaatgcttcctctggcttggatgccttctccctcccctgcctccacttcatcttccaagtctgttgtctcatttttctcccacaaatgtttatagyattccttccttgtgctagactctgtcaca

SEQ ID NO: 903895 - DNA, 617 bp, Homo sapiens
aatgagggtatagatgctgtgagttmattgttgaatgagtacatggggggtattcatcagggttctccagagagatagaagcaatagaattacatatcatgtgagccaacacaggcatatgaagactgaggagtcacatgatcaatggtctgtaagctggagtcccaggaaagctggtggtgtaatttagtccgagtccaaaggctcaagaactgagaacaccagtctgagagggcaggagaagatggatcccagcttaaacacagagagcaaatataccctttctatgctactccttttcttccactcagactctcagtgatttgaatgacacctgctcacactgtgagggtggatcttctttgctcagtctacctattcaaattctaatctctctggaaacatccacacagatgaaattacaaataatattttaccagttatctgggcatctcttagcccagtcaagttgacacattcaaattaaccatcacatgttatttattatatgattctctacttctgttacattttacaaaatgatctaaagtatgaacaaaaagatacgaaaatatatgacaataatttaaatataagtgagttaccagtaaattcac

SEQ ID NO: 903896 - DNA, 648 bp, Homo sapiens
ggggagagaacaatctattcaacaaatggtgctggaaaaactgaatacacatattcagaaaaataaaattagttctctatctctcattatatacagaaataaacttaaaatggataaatacttgaatgtaatgcccaaaactatgagactatgagaagaaaacataggggaaagtttcaagacattggcctgggcaaacattttatggagaagaccgcaaaagcacaggcaacaaaagcaaaaaatagacaaatgaaattatattcaactaaaaagcttctgcacaccaaaggaaacaatcaacagagtaaagaaacaacctacagaatgggagaaaatgtttgcaaactattcattcaacaagggaattaatatccagaatatacaaggaactcaaacatctcaacagcaaaacaacaaataatccaatttaaaaatgggcaaatgagttgaatagacatttttcaaaacaagacatacaaatggccaacaggtgtatggaaaaatgctcaacatagctaatcatcagggaaattcaaatcaaaaccacaatgagacatcatctcacctcagttagaaagactattaccaaaaaagcaaacaaaaaataacaawaacaaaaaaccaaaacagatactagagagaatg

SEQ ID NO: 903897 - DNA, 625 bp, Homo sapiens
aagaatctgagaattctaattgattcagagaacagtgcctaytcctattatctatagtttaataacaggtctttgatagatcaataattcagtatttttccagtggattatatcatacactatattttaaaattaaaggaaaataagaataaaatgaattctgacacatgaaaaatgttgcacatttatatacgttacttaaatccttatttttgtggttaaattgttatggaggaaactacagtgtaggatttcatttcaccataatgtagtaaacataactttgggtataactttccttcccatacactattaagagttttcctcccaaaaaggaagagaaggtatgtttgaacataatcattgaaagtatacaccaaatattgtgtagaaagactaaaatcttgacactcaacacaaaactctgtctcttatttaatggagttttttttctgtgtgtgtgaaataatctgttatgaggttgtttgcactttctttcctttctttttaaattcactttttctctacaattgctatgcacgtccatgaaaacaacagcgctctaacttccagtgctggtcttctcacttttcctatttttccatttcccttttttataatatat

SEQ ID NO: 903898 - DNA, 588 bp, Homo sapiens
acggagatagagagtagaaggatgtttaccagaggttgggaagggkagttgggggagagggtgggagaaaagtggggatggttaatgggtacaaaaaaagacagaataagacatagtatttgatagcacaacagggtgactatagttaataataacttaattgtagatttaaaaatagataaaagactataattgaattgtttgtaacacaaagaataaatgcttgaggggatggataccccattcgcccttatgtgattattgtgcattacatgcctgtatcaaaatatctcacgtaccctataaatatatatacctatgtgtacccacaaaaattaaaaataacaaaattttaaaaaaacgaaattagattaaaagtaaatgaggacaagaggaggcaagagggttctaagaaactatgtgtgtaactagaccagacattagtctgaaaaacaagtatatggagggcagaaaagaaaataaggagaaattatgggacatgatggtgaagaatgggctgtctgatttagtgattttataggcagaattgttctaggtgaaggcaggatctagggtgtaactttggga

SEQ ID NO: 903899 - DNA, 601 bp, Homo sapiens
cccagaacttcatatccagccaaartaagcttcataagtgaaggagaaataaaatcttttacagaaaagcaaatgctgagagatttgtcaccatgaggcctaccttaccagagctcctgaagggagcactaaacatggaaaggaaaaaccagtaccagccactgcaaaaacaagccaaattgtaaagaccgtcaatgttaggaagaaactgcatcaattaacaggcaaaataaccagctaacatcataatgacaggatcaactttacacataacaatattaaccttaagtgtaaatgggctaaatgccccaattaaaagacacagactggcaaattggataaagagtcaagacccatcagtgtgctgtattcaggaaacccatctcacgtgcagagacacacataggctcaaaataaagggatggaggaagatctaccaagcaaatggaaagaagaaaaaaaaaagcaggggttgcaatcctagcttttggtaaaacagactttaaactaacaaagatcaaacgagacaaagaaggccattacataatggtaaagggatcaattcaataggaagagctaactatcctaaatatatatgcac

SEQ ID NO: 903900 - DNA, 601 bp, Homo sapiens
cccagaacttcatatccagccaaaataagcttcataagtgaaggagaaataaaatcttttacagaaaagcaaatgctgagagatttgtcaccatgaggcctaccttaccagagctcctgaagggagcactaaacatggaaaggaaaaaccagtaccagccactgcaaaaacaagccaaattgtaaagaccgtcaatgttaggaagaaactgcatcaattaacaggcaaaataaccagctaacatcataatgacaggatcaactttacacataacaatattaaccttaagtgtaaatgggctaaatgccccaattaaaagacacagactggcaaattggataaagagtcaagacccatcagtgtgctgtattcaggaaacccatctcacgtgcagagacacacataggctcaaaataaagggatggaggaagatctaccaagcaaatggaaagaagaaaaaaaaaagcaggggttgcaatcctagcttttggtaaaacagactttaaactaacaaagatcaaaygagacaaagaaggccattacataatggtaaagggatcaattcaataggaagagctaactatcctaaatatatatgcac

SEQ ID NO: 903901 - DNA, 655 bp, Homo sapiens
gccacaatagagtaaatctctaaatcaatagcaagaactttagaagcttgacaaacacatgaaaattaaacatgttagtgatgaatgggtcaaagaataaattaagaaggaaattgaaaaatgatttgaaacaaatgaaaatgaacacacaacatatcaaaatctatggaatacagcaaaagtcccagtaagaggaaagttaatagcaataagcacctacatcaaaaaagtagaaaaatttcaaataaaaaacctggccaggtgcagtggcttacacctgtaatcccagcactttgagaggctgaggtgggcggatcatttaaggccaggagttcgagaccagcctgggcaacatggtgaaacccccatctctactaaaattacaaaaattagccaggtgtggtggcacatgtttgtaatcccagctacttgggacgctgaggcacaagaattgcttgaacacaggaggtggagtttgcagtgagccaagatcctgccactgcactccagtctgggtgacagagggagactcwgtctcaaaaaaacaaacaaaaacaaaaaagcctgatgatgcatctagaagaactagaaaagcaagagtaaaccaaaaacaaaaattgtaaaagaaaagaaacaataaatatcagagaagaaa

SEQ ID NO: 903902 - DNA, 625 bp, Homo sapiens
gatggtattgcctagattttcttctagggttttataattttgggttttaccttcaagtctttgagtttctttttaataaagtgtaaggaaggcattcagtttcaattttctgcatatggctagccagttctcccaccaccatttgttaaatagggaatcctttctgcattgcttgtttttacctggtttgtcgaagatcagatggttgtaggtgtatagtcttatttctgttccatcattttggtgtctttttttgtaccagtgccatgctcttttggttactgtagccttgtaatatagtttgaagtcaaggagcatgatgcctccagtttttttttttttttttcttttcttttttttccttaggattgtcttggctataagggctccttttgtttcacatgaaatttaaaatagtttttttctaaatctgtgaagaatgtcaatggtagtttaatgggaatagcattgaatctataaattactttgggcagtatggccattttcaccatactgattcttcttattcatgagcatygaatgtttttccatttgtttgtgttctctctgatttccttgagcagtggtttgtacttctccttgaaggggtctttcacttcccttg

SEQ ID NO: 903903 - DNA, 380 bp, Homo sapiens
gttgtagccaggatggcagcctcagcaatctggctccagagtccccaggcacttaacagttcaaggcataattggtaaggatcttagttaaggagccaactgagtagttgatgcgagtagaggaagggagggagacaggcagaaatcattttgcagggagggaataaggaaagcttgtgggaatgacaaagccttcacagaaaggtgcatttaaactaggcttggagattgaaaacatttttgatatatggagastagaatgtgaatgatggggcaaaaccccacccaaaatggttaaggcaaaatggaaatattttggcttatgtgcctgaacaatctagtgggagtagctctggctttgagctgagcttgatcagggc

SEQ ID NO: 903904 - DNA, 621 bp, Homo sapiens
atcttttattacctcttctatttctctagccacaaagaatcagaaaaaggaggattctggagtggttctcaytctcgtagacaggaattaaaaataaagtctggcaaataacatttatcaagcaatgtcttctcatacatccccatctcaaagtttaatatgctctgatgtgtgtactcaaggtcttaatagaatcagagatggttaaataaaaatccagagaagaccaatatgtgtgtgtgtttgcacttgctttgattccttttgtggttggttcttccgtgtgtgtgtgtgtgtgtgtgtgtgtgtgtgtgtgtgtgtgctttgattccctttgagcttgagtcttctgaggatctgcaatgcaggctagagtgaaactgctggcaggcatttgatttttctcaactagtgacaagaaaaagacaagaggaggacacagccaaagggggcctgatggctaaatgtgtggtgagtggctccaagttttatgagtcaaatactgtatttctgaatgaaatcaatttctaggttgcacaaatgttcatggcctatttacaaagaaaatagaaacctcaactgtgattctaaagctatcacttaacttggtgcccacatcca

SEQ ID NO: 903905 - DNA, 653 bp, Homo sapiens
tgaaggaaataagagttagccatgacaatatctggagaaaaagcactccaggcagaggaaacagtcaatgcaaaaatcttaatttgaaaatatgctagtggaaacatactggaacaatagcaaaaaggccagtatagctatggcaaagtcaggaagggagagagagtagaagatactgtcagatcatccatggtcttacagaccacagcaagaactcagattttttctttgagtaaaatgggagcttttgcagggacttgtacagaaggatgacacgatctaaccttatattttaaaagacactggttgctatgatgaacataccatcataggagggatctatcagaaagctcttcattaactggggataggggataggtgatatcagtggaagcactgaaaagtggtgagattctggatctattctaaaggtagagccagtactatttcctaatgaattggatggtgattatcagaggaacagaggaattaagaataactccaaagcttctagcctgggtaactggaaggataggaattgccataaattgaaagggagaaggttgcaagtggctcggttttgcagaaagagaaagtaataagatcttaagaaaaatcartgaattagatagagctccagagagggtaagctg

SEQ ID NO: 903906 - DNA, 627 bp, Homo sapiens
acaccatgttaccggtacaaaaacagacctatagaccaatggaacaattaaggctgtacacctacaactgtcggatattcaacaaacctgacaaaaacaagcaataggggaaggattctctattcaataaatggtactgggataactggctatttgcagaagtttgaaactggaatccatccttacaaccatatataaaaatcaattcaagatggattacagacttaaatgtagaatgcaaaactataaaaaccctagaagacaacctagacaatatcattctggacataagaatgggcaaatatttcatgacaaagtcatcaaaagcaatggcaacaaaagcaaaaattgacaaatgggatttaattaaactaaagagcctctgcaaagcaaaggaaactatcaatagggtaaatagacaacctacagaatgcgagaaaatttttggaaactatccatctgacaaaggtctaatatccagcatctataagaaacaaacaacaaacaatgycattaaatagtgggcaaaggacattaacagacatttttcaaaggtatacatacgtgcagccaacaatcatatgaaaaaaagctcaacgtcactgatcattagagaaatgcaaatca

SEQ ID NO: 903907 - DNA, 627 bp, Homo sapiens
acaccatgttaccggtacaaaaacagacctatagaccaatggaacaattaaggctgtacacctacaactgtcggatattcaacaaacctgacaaaaacaagcaataggggaaggattctctattcaataaatggtactgggataactggctatttgcagaagtttgaaactggaatccatccttacaaccatatataaaaatcaattcaagatggattacagacttaaatgtagaatgcaaaactataaaaaccctagaagacaacctagacaatatcattctggacataagaatgggcaaatatttcatgacaaagtcatcaaaagcaatggcaacaaaagcaaaaattgacaaatgggatttaattaaactaaagagcctctgcaaagcaaaggaaactatcaatagggtaaatagacaacctacagaatgcgagaaaatttttggaaactatccatctgacaaaggtctaatatccagcatctataagaaacaaacaacaaacaatgtcattaaatagtgggcaaaggacattaacagacatttttcaaaggtatacatacrtgcagccaacaatcatatgaaaaaaagctcaacgtcactgatcattagagaaatgcaaatca

SEQ ID NO: 903908 - DNA, 580 bp, Homo sapiens
acttgttcaaggccaggaaaacagcaagtggtagagctagcattcaaattaggtctatgtgctcccaagcccatgttatatcaataactacaaggatgatattatcacagtaatacaatstggataggatgatataaacttggggatgagtttcaagctgatgaccaagagaaactcatattcagctcccattctattttgcttctgcattacctatccaagagagttgactggatactgcttgccatgaacaacaagccaatctcagaactgcttgtacttctgaaatagacggttgatatgttctctcatacgtgcaacaccatgtgtagaaaaaagtggccaaagtgtttttaggctgcattattgttgattatcagagcagatgttggaacttagaagatctgaattaaaatagtgcctctgctgtggggttgggtgggttattttccttctctgagcctatgtctttattgagcaaatgagtataatagtatctacctcatggtattggtgaacagattcaaattggatgaatatacatatggcatagttgaatgtactatgtatccttgtaaat

SEQ ID NO: 903909 - DNA, 619 bp, Homo sapiens
tttcaaagaattcagaatatcacatggtagaactagaagaatcatatctcaataagactaagtccttgccactaactagaaccaatgcacaaccacttctagaagacatgtattaatacaaatacatagaaagaaaaccacatgtgctttttcattttgccaggcacaatagtaggtactttataggagaaatcttactgaacacaatcaatagtctttagagttatcaaaattttgaaatagttcattaatccacatagtattgagaccagacctgttaataattagacaaagataaaattaaagatggctgtattttctttaagaaaatccctaggtatggctgtcaaaactcagagaagaagcctagcagcagagagaaactgaactgcataatgaaacaacactatttacaaagactcaacttttaaaacgtgccatacatgatcatttcacatcctttctgaacacagctgccttaaaccaactctaccacccattggccagcacagaaagttgtttaaaaactgtttcctggccagctgcagtggttgacgcctatmatctcagcactttgggaggctgaggtggaaggtttgcttgagcccaggagtttgaa

SEQ ID NO: 903910 - DNA, 570 bp, Homo sapiens
tccatgaagcatatcaaaaaatgctccgcrtaactaatcatcagagaaatgcaaattaaaaccacaatgagatactctcttacatcagtcagaatggctattattagaaagtcgaaaaacaacagatgttggtgaggacgtggagaaaagggaatgcttatacactgttggtgggaatgtaaattaatacaatgtctatggaaaatagcatggagatttctcctagaactaaaaataggtctaacattcaatctaccaagcaatactgctactggggtatgtactcaaaagaaaagaaatcattatatcaaaaagatacctgcacctgtatgtttatcacagcactattcataatagcaaagataaggaatcaacctaagtgtccatcgacagatgattagataaagaaaatgtgaaatatatatacaaatatgtgtgtgtgtgtgtgtgtctgtgtatgaatactaatcagccataaaaaaaggctgaaattttgtcttttgcagtaaatggttggaactggaggccattctcttaagtgaaataactcagaaacagaaagtcaaatac

SEQ ID NO: 903911 - DNA, 212 bp, Homo sapiens
aaatataataaaatgccaaagtgacactggaaaaatcaataattctactcagcactayatattaaatcagctctttaatacatatttctaaggcagccattgccgccatatttaaatctacccagttgagagacataagtcaattgtgaatcccacagcgattaagttttttacccgttaatttcaaagcagtttgtttattttgttgcttt

SEQ ID NO: 903912 - DNA, 592 bp, Homo sapiens
attggcaatagccctatcattctctatggcgatgctcagattgtaccacgtttggcttgtgagaatatctccaagctgaccatatctttctggcatgtccccatcatttttttttgttcttttttgagacgaagtctcactctatcacccaggctggagtgtagtgacgcaatctgggctcactgtaacctccgcctcctgagttcaagcgattctcctgcctcagcctcctgagtagctgggattacagtcatgcaccaccactcctggctaatttttatatttttagtagagatggagtttcaccatgtcagccaggctggtctcgaactcctgaccacaggtgatcctcccacctcggcctcccaaagtgctgggattacagacatgagccactgcacccagccctccccatcattcttaaagtaattcttcactttctggtatacaaccagtatttcaaattaattatgttcttccgacaatgaactcacatcagrcattactctaaagaaccctagtttgtttttttagtttgttttttagaggaagtttgtattcaataactgagttgtagatagtatgtgtgatg

SEQ ID NO: 903913 - DNA, 629 bp, Homo sapiens
gtgaaggtctctgacgtgccctgtagacatttggcccattgtcttggtgattaacatttggctcctcrttatttatgcacatttctgcagcggggttaaatttgtctccagaaaatatggctctcttttctattgcattgtgagcctgcaaatttttcaaacatttgtccttttgattcctcttgaatgctttgcagcttagaaatttcttttgccagataccctaaatcatccctatcaagttcaaagttccacagatctctagggcagtggcaaaatgtggccagtctctttgctaacgtataccaagagttacctttactccagctcccaacagtttcctcatctccatccgagaccacctccacctggatttaattgtccatatcactatcagcagtttggtcaaagccattcaacgagtctctaggaagtttcaaactttcccacgtcttcctctcttcttctgagtcctccaaatctctagggagtttcaaactttcctacgttttcctgtcttctgagccctccaagctgttccaacctctgcctgttacttccaaagttgcttccacattttcaggtctttacatcagctccccaccaccttggtaccagttttctgtatt

SEQ ID NO: 903914 - DNA, 629 bp, Homo sapiens
gtgaaggtctctgacgtgccctgtagacatttggcccattgtcttggtgattaacatttggctcctcattatttatgcacatttctgcagcggggttaaatttktctccagaaaatatggctctcttttctattgcattgtgagcctgcaaatttttcaaacatttgtccttttgattcctcttgaatgctttgcagcttagaaatttcttttgccagataccctaaatcatccctatcaagttcaaagttccacagatctctagggcagtggcaaaatgtggccagtctctttgctaacgtataccaagagttacctttactccagctcccaacagtttcctcatctccatccgagaccacctccacctggatttaattgtccatatcactatcagcagtttggtcaaagccattcaacgagtctctaggaagtttcaaactttcccacgtcttcctctcttcttctgagtcctccaaatctctagggagtttcaaactttcctacgttttcctgtcttctgagccctccaagctgttccaacctctgcctgttacttccaaagttgcttccacattttcaggtctttacatcagctccccaccaccttggtaccagttttctgtatt

SEQ ID NO: 903915 - DNA, 495 bp, Homo sapiens
tgtaatagtggccacccaaccagactgcacgctaatttaattgcctaaactgtctgagctatgtcattcccttgcatattgtatcccatatcttgtaacttaagaaaggacattttttttctgaaagcgctcctctttctttttcatcagagcttttctctttattgcagattccctttacctcaatatatttcactcaaaatgtcctaatatatttcactcaaaaacaaaaaaaaaaatgcaaaagaaaacaaactcccttgactctataaaatacctttttgtctttctcctttaagaaaatatctcaaacggcttcaacttagtcaatggtcccattttctcccttttttattctctttccaactcactttcaacccatcacttgacaacattaccartgactttcatatctttaagcctgactttgactttgaacaaaacttgaaagaaataatcttttatttatcttcttttgcatttgaggaaatattt

SEQ ID NO: 903916 - DNA, 603 bp, Homo sapiens
gtgactgtttgcattacagaagaattctttgtggtataaaaggattagctgtggggtttctttaaatagcatctcccytagtgcattaaagtgtttatttatagatcattaactacttgaccaagatgctgcagggcagagtagcttaaagacaactggtcaggaggccctaccagtggaagatcaattaaactcaagacaaagtgcctttgaaatagtacttcaagtcaatgggatagaggattcaattacctaaatttgtttcatctgggtagggagtgcatgcattgagtgaacagcacacctgtgtgttctcattcacatagaaccaacgtgagtgtgttctccagtctatgtgcctaaactctgatatgtccagggtcatagctatgtttggcctcctttttgttgtgctttaattaagaggtaaaattattaaagtggcagatgtttccagcccgagaacctggacccagttatatcaagcagatggtcccaagcaagacaacatcctttaatgaagaagcatttgcaattcatgagaattcatgatgtccatttctttccctctccaatgttctgcttgtcaggggtcccattgtg

SEQ ID NO: 903917 - DNA, 595 bp, Homo sapiens
gcaagaatggcctaatacaggtatcttcaaggatctttgtccacatgtttggaatttcttttcttttttttttttttttgagagggagtctcactctgtcacccaggctgragtgcagtggcgcaatctcagctcactgcaagctccacctcccgggttcacaccattctcctgcctcagcctcccgagtagctgggactacaggcgcccaccactgctcccggctaatttttttttctgtatttttagtagagacggggtttcaccgtgttagccaggatggtcttgatctcgtgacctcgtgatctgcccgcctcggcctcccaaagtgctgggattacaggcgtgagccaccacacccggccacatgtttggaatttctgtagattagattcttggaagtcatatttctggatcaaaggtcaattacaatttaaaattggaattgctgcccaatttccactttcataacaatgatttctcacctttataatatcaatatttgcatttttgccagtattatgggtaaagtatttttccttcatgttttattctacacttgcttgattagcagaaaagcccatcatctttatat

SEQ ID NO: 903918 - DNA, 606 bp, Homo sapiens
atagttacaagaaagctgggagaagggaggtcccaaagtcaccttgtcattagttctatacaaggtgatcctgaaggtccagtataaatccaagcactaaattagacttcaaaagagattttagtgcctgttttccagggaccacgactgcaggccttgaatgacctaacatgtcacaggcttgtgtcactccattctggagaggggacactgttgcagtttgataactgatctaacagcaagtcagacatccctctgttgccctgggttcattatactctatcaccttaataaacaccctcatcctctgcttattcagccatagcctggttctctgacttgaattatttgggacagccaggtctctcgtgagtgacttgtcgagttatattacggtacgtgacctactttgtacaggtctcagactgcggtacaagcagtgcacaaaccacatcagtgtcctcggaatgtctcagtagagacagcatagactcagaatctctgaagaaatcttcagggtcagtcatgctaacctcttcctcttccgcaccayctatgagcttcactcagctgcagggtcattgaagagtggccaactggccgaca

SEQ ID NO: 903919 - DNA, 319 bp, Homo sapiens
cttgccactgctttccagcctggtgacagagtaggaccccaactaaaaaataaataaataaataaataagctaaatatcagaacctgtgaaagcaagcaccaacctgtatacccatagggccataagtggttgcttaatccaaggggtcagaatctaggccaggctcagcaccactgggaactgggtaagggggacacagggcaatggctcctaatgacctggagtcatcatttgcctcttatctgtgaattaaggcaactgacawgcaaccccacttagggaaacagggtcctcagatatgtcaccttgagtcccact

SEQ ID NO: 903920 - DNA, 621 bp, Homo sapiens
agctggttattttgctcattagttgaygcaatttctatctagcattgatggtctttacaatttggcatgtttatgaagtggctggtaccagttgttcctttccatgtttagtgcttccttcaggagctcttgtaaggcaggcctggtggtgacaaaatctctcggcatttgcttgtctgtaaaggcttttatttctccttcacttatgaagcctagtttggctggatatgaaattctgggttgaaatttcttttctttaagaatgttgaatattggccaccacccccccaaccttctggcttgtagagtttctgctgagagattagctgttagtctgatgggcttccctttgtgggtaacctgacctttctctctggctgcctttaacattttttccttcatttcaatcttgatgactctgacaattatgtgtcttggggttgctcttcttgaggagtatctttgtggcattctctgtatttcctgaatttgaatgttggcctgccttgctaggttggggaatttctcctgaataatatcctgaaggttgttttccaacttggttccattcttcccatcactttaaggtacaccaatcaaatgtagatttggtcttttcac

SEQ ID NO: 903921 - DNA, 594 bp, Homo sapiens
ctgcttcccttttacattctgcttcccttaaatataagttccaactcmtatctttgctgcagcatctgaatgcagactgttagaagcagccatgccacctcttgaatactttgctgcttataaatttcttctaccacataccctaaatcatcaagttcagacttccacagatccctagggtatgaacagaatgcagctgagctctttgctaaggcaaaacacgtgaccatttgctccagtccccaataatttcttcatatccatctaagacctcctcagccttgactctgttgtccatttcattatccgtattttggtcataaccatttaaccagtccctaagaagttccaaactttccctcacttgctgtcttcttctgaatcctccagacttccaacttctgcccattacccagttccaaagttgctttcacattttcaggtacccccttggtactgattttctgtgttagccctttcttgcattgctatgaagaaatatctgaggctgggtaatttataaagaaaagaggtttacttggctcatggttctgcaggctttataggaagcatggtgccggcatctgctcagct

SEQ ID NO: 903922 - DNA, 541 bp, Homo sapiens
tatggtttggatgtgatcccaatgtgatccccaatgttggcagatctcccatgaatggcttggtgactcctcacagtaatragtgacttcgtgctgtcagtccacacgagaggtggttgttgaaaagagcctgacacccctcccctctctcttgctccctctgtggcatgtgacgcaccagctcccacttttccttccaccatgactgaaagcttcttgacatcctcaccagaaacagatgctggctccatgcttcttgcacagcctgcagaaccatgagccaaatgaacttttttctttataaattatccagcctcaggtattcttttatggcaatgcaaatagactaacatgatatacaaatgggtgagtacacatacatatgtgtcctagctctgtccactaagagaggctagagcaacaactctccagtggccaggagaacacccagcgcccaggtcttgggctctataccattttccaatcaaaggaaacaggatccctggagaaaggagaaatccaggaaagaaaggcagaggct

SEQ ID NO: 903923 - DNA, 623 bp, Homo sapiens
gcttcctgatcaccttacttcaatctcatttcttctaaattctaacagtattgactatacttctaatttgctacttatcatctcctgcctcctgctttrcattattggctgtgctttctttttttttgagaagaagtcttgctccgtcgcccaggctggagtgcagtggcgtgatctcagctcactgcaacctctgcctcctgggtttaagtgcttctcctgcgtcagcctcccgaatagctgagattacaggcacccgattggctctgctttcttgggtatgtatatatttactctttttttttttttgtatttttagtagagacggggtttcactgtgttagccaggatgttcttgatctcttgacctcgtgatccgcccgcttcggcctcccaaagtgctgggactacaggcatgagccaccacgcccggccttacatatatttactcttaactgcactgacaactttttaaactatagatcgggtccccagtgtaagtctggggatatcaattaagattcccctgtctaatttttgacactaataccaactacgcttaataaatgtgttgatgagtttaatgttttatgcattagatagatttcagtatgaaagagatc

SEQ ID NO: 903924 - DNA, 631 bp, Homo sapiens
ctaggtcaatataaactgatatttcaagttggaggtcataatgttgcacctgaggaatgctactgagggtcttaaaagtgtgtttttgctgawgatggaggaaaatcaatctctggccgcctggaacagtggcctcttacaagccatgtccagccattggttgttgaggcttaaatgggccaacctcagagtctctgcccatgagcaaatggctcatttctttcaaaggaagcagcatacgaggctctgaagatcacatattttggaagtttatggctctttatcattcttgggtaggagtttcatgtctgcctctccagtcttgaaagaataagcccaggggaacccttaattcaaatgtgaccataggtctctcaaatatcttctagaccagtgctgtccaattgaaatataaaatataatgtgagttatgtgtgtaattttagatttcctattagccatatcaaaaagtaaaaagaaagatataaaacatactttaataatatattttatctaatctaatatatacaaaatatcatgtcaacatgtaatcaatatttttaaaattaacaataaaacattttacattccttttgggggtacaaatgtggtgtgtattttatacttaaaa

SEQ ID NO: 903925 - DNA, 654 bp, Homo sapiens
ttttaggtaaatataatgttgtgagggcaaaacttcacctctatttccacaaaacagaagaggagcaatttatgaagctatttgattcattctcaaggagattctttcttagttaataaagatggttgcagtcctgttttgagtttctgggtgggacttttcttttcttttcttttttctctcttttttttttctttttgagatggaatcttgctctgtcatccaggctggagtgcagtggctcgatctcggctcactgcaacctctgcctcctgggttcaagtgattctcctgcctcagcctcctgagtagctgggattacaggtgcctgccaccacatccggctaatttttgtatttttagtagagacggggtttcatcatgttggtcaggctggtcttaaactcctgacctcgtgatccacccacctcagcctcccaaagtgctgggattacaggctgggtgggacttttcaatatgaaagatcttagatttttaaagtttgtcatttgcctctgctgctgtgtggagatttccattttggaaacattytgctcagcgtcaggactatgtgagctgctgcagttatgtgacctccttccctgtcccttccagagggcaaggatttctgctgggaagggctgaacagacaca

SEQ ID NO: 903926 - DNA, 620 bp, Homo sapiens
tctaacagtcaggtccctcagctgcaggtctgttggaatttgctggaggtccatcccagaccctgttttcctgggtatcaccagyagaggctgcagaacagcaaatatggcagaacagcaaatattgctgcctgatccttcctccgttagctttgtcccagaggggcacctgcctgtatgaggtgtctgttggcccctactgggaggtgtctcccagttaggctacacagtggtcagggacccacttgaggaggtagtctgtccattctcagagctcaaatgccatgctgggagaaccactgctctcttcagagctgtcagacagggatgtttaagtctgcagaagtttttgctgctttttgttcagctatgccctgcccagaggtggactctatagaggcagtaggccttgctgagctgcggtgggctccacccagtttgagcttcccagacactttgtttacctactcaagactcagcaatggtggacgcccctccccctgcctggatgcagtctcacaggtccatctcagactgctgtgctagcagtgagcaaggctctgtgggcatgggacacatcgagccaggcacaggagagaatctcctggtctgccagttgc

SEQ ID NO: 903927 - DNA, 620 bp, Homo sapiens
tctaacagtcaggtccctcagctgcaggtctgttggaatttgctggaggtccatcccagaccctgttttcctgggtatcaccagcrgaggctgcagaacagcaaatatggcagaacagcaaatattgctgcctgatccttcctccgttagctttgtcccagaggggcacctgcctgtatgaggtgtctgttggcccctactgggaggtgtctcccagttaggctacacagtggtcagggacccacttgaggaggtagtctgtccattctcagagctcaaatgccatgctgggagaaccactgctctcttcagagctgtcagacagggatgtttaagtctgcagaagtttttgctgctttttgttcagctatgccctgcccagaggtggactctatagaggcagtaggccttgctgagctgcggtgggctccacccagtttgagcttcccagacactttgtttacctactcaagactcagcaatggtggacgcccctccccctgcctggatgcagtctcacaggtccatctcagactgctgtgctagcagtgagcaaggctctgtgggcatgggacacatcgagccaggcacaggagagaatctcctggtctgccagttgc

SEQ ID NO: 903928 - DNA, 619 bp, Homo sapiens
aattaggaaatcaagtgaaaacaaaagaaatttgatatcaaaatactggccacaggtttttttgtttcgttttctttctttctttctttctgagatggagtctcactctgttgcctaggctggaatgcagtggtgtgatctttgttcactgcaaccttcgcttcctgggttcaagcaattcttctgcctcggcctcctgagtaactgggattacaggcacccatcaccatgcccagctcattttttgtatttttggtagaaatggggtttcaccatgttggctagactggtctcaaattcctgacctcaagtgatctgcttgcctcagcctcccaaagtgctgggattacaggcatgatccactgcacccagcttgttacaggtttttaaaaaacatcaaggaggatttctgcttttcttacagctgcacttctccatcacacatttcaatttcatagttaatattattatatatttgaattatatttataatatacaaatatatttttatgtaaaattagaagtcccagatcccattttctgcattactctcctaagcaaatgctattattaatgtattgtgmattacaatttgccatcattttaaaataagaggttt

SEQ ID NO: 903929 - DNA, 661 bp, Homo sapiens
tgttcagccatcaacaaaaattacaagcaatgaaaaatggcaaggaaaaaaaagtatgaaaagacaaggcaagcatcagaaccagatccagatataatacagatattggaattctcagtcagggaatttaaaatcactaagattaatatgataaggggtctaatggagaaaggcagagatcattcaagaacaaatgggcaagagaagcagaaagacactgtaagcaaaatcagaaggaaaggcaagaaatcaataaaaaacactacaacaaataaagaatgccctcagcaggctcattagcagactaggcacagccaataaaatattcagtgagcttggagagttgtcaatggaaactttccatattaaaatgtaaaaacaaagtaaaataaagcaaacagaacagaaaatcaaaggactgtgggacaatttcaaaagatgtaacatatgtataagtgaatatcagaaagagaagagagaagcagaagacatacttgaagctgcaatggccaagaatgctctaaagtgacacaatcgcttttaaagcagtctggcagttcctcaaaatgccaaacatagaatcaccatgtgacccaacaattccaccctttgggttatactcaagaaaaatgrtgtccacacaaacacttgtccatgaatg

SEQ ID NO: 903930 - DNA, 705 bp, Homo sapiens
attctctatgggaaaggcaccaggatgagaaattctcctgaactgtatgaactaatcttcacaggaaactttttaagtaggttttattatccttcaaaaaggayaggaaaactgaggctgggaagggttaagtaactggcctatactcattgcagcataagtatcacagcttaaatgtgttccattctttgcctgaccccaaacctgtgctctaaagcattgtggaacatcaaaagcctctctgccttccctacagtccaaaaattctcaattttctactatgggagctattaaaattacactagataaacctgtattttaaaagtattcaaaacaaaacacaacacacttacttagagcaataataataaatattacagaataatataatccttcccgttctaaaatatttttaaagaatatgataactttatattgggtcctagataccatactgtatttagggaatttaccaagatagagctggctttattgtaagtcaagcaaaatgaactggcgttcttgtaagctgggttcagtctactattatcggttctgtacagtgtctcctcgtgtgctagtgaaacaggatggggggcgaggaacctccttcccatcttttactagcctgagaagtatcttttcaatattttataattttgcctttggcaaagggctgcttatctcctgggaattcaggcacat

SEQ ID NO: 903931 - DNA, 606 bp, Homo sapiens
acaataaaaataaaagttaataataatagtatgctcatattgttctaagccagtaagtttgagtgatttgttacccagccatagaaaactaatataggatacaaacacaagttatttcttccactaagaaaaccctctcttgacctaacttctactctcagtgccccccttttatctttttccttttatagcaaaagaccttcaaagggtaggcctatctgtgtctccaattccctctagttctctcccaaactcacaccaatcaggcttctgctcccatcactcctcagagttgcttttctctaagacctcagtgacctccatgttgctaaatccagtggtgaattctcagttgttcattatttgacccaatctgcagcactagtacagctgatcaccctcctcatgtaaattctttcttccttggcatctgccataccacaattgcccagttttctccctgtctctccgccactccttttcagtctcctttgcttgtcactctcttctccatggcccatcaacatggggatgccycactctcacttgctcatgtcatttgctctcatggctttagctaccatccataagttgatggctcccaaa

SEQ ID NO: 903932 - DNA, 653 bp, Homo sapiens
tgcagaagctctttagcttaattagatcccatttgtcatttttgcttttgttgcaattgcttttgacattttcatcatgaaatctttgcttgtgcctatgtcctgaatggtattgcctagattttcttctagggtttttatagttttggggttttacatttaagtctttaatccatcttgagttaatttttgtataaggtgtgaggaaggggtccaatttcagttttctacatatggctagccagttctcctaacaccatttattaaatagggaatcctttctccattgcttgtttttgtcaagtttgtcgaagatcagatggttctggttactgtagccttatagtacactttgaggtcagatagcatgatgcctacagcttttttctttttgcttagcattgtcttggctattcagactcttttttggttccacatgaattttaaaatagtttttttcctaagtctgtgaagaataaatggtaatttaatgggatatagcattgaatctataaattaytttcagcagcatagccattttcatgatattgattcttcctatccatgagcatggaatgtctttccatttgtttgtgtcccctctgatttccttgagcagtggtttgtagttctccttgaagaggtccttcact

SEQ ID NO: 903933 - DNA, 537 bp, Homo sapiens
tcgaggctcaatgtggattaatttgagcattaaaaactcctttgaggatcagggagcagttttaagggggctaccacacatttgtgacttttacttccaggagccctactaggtttgcacaatgagggtcagggagaaatttcctaatgcttccaacaaggaacagggaaaaagtaaccattccgaaatacacccaggtcactctgttcttcttatggcctgtctcaaaagaaactgtgttacccagagcccaacagactgagattatagcagagcctaaaccaccggggagtagggaaatatccaactccagcccctctatccttcccattgcacctaaagaggaaaaacccccaaaacccaaggagcacatgtggagatcatggcccaggggtagaggctcactgtgggactgggtcctaatcatcagattatacaaagcatcccccttcccmtgcaccttaccacaataccagtagggctcctgtataataacagatgaacgcaacggaaagaactgtatgacccatgccttat

SEQ ID NO: 903934 - DNA, 599 bp, Homo sapiens
cttgaaaataagataaatgaatgaattcgtctggagaacatgagatccacttattatcccagataactatatttatttataatgttataacgtaccctcatccatttctaaagattatttcagatgacttatagtaacaaatatacaggaaccaaatcattaagacacaaacaaaaacttaaagaccacagatatggaggggaaagtatgatattcagccaagtgagatcctcaggtaaacgctatgtccagcagagattagttatcatcgtagcaatcattgcatctgccagttgttaccacatactctgttccagttgcttcatagacactatttcattaaagcctcctgacccacctgcaggtaggtattattgtccctggtttcaagatggagtagcagtccagtgattatggtagtttgccaaatgccccagcttccgcaggtccccagcaattctgtcagcctgtgagatcagcttattcaagcgacacaaaactctatcccccagccttcttgccccacctacatctcargaagcttctttctccagactttgcctcttagactgttggctcccgtcctgcccctgttcttt

SEQ ID NO: 903935 - DNA, 657 bp, Homo sapiens
acttaattagtttagtatatttgaccatacacttttctatcacttaatgatatacatgtcattctctctacgtatatggttccacttttatcacaatagaacggtagggccagaaattggatactgtagagtggaaaaatttcaatgatttatgaagatgagaagaaactcactgtattagttttctgtggattacaagcaagtcacacattttgaatgtactcaaggaaaactatgctaaagagactgccagtgaaccactttagctcattctagttcacattctgctctccggtcccaatgtttcacaatcaaatgcaaaatatattcacctcatccccaaattcccaaaagtcttattttatttcagcatcagtacaaggttaaaaattcaatcgtctacatctggtccagttatatatagatgatgctcctggttgtaatttattaagtacagctcacggggtacaattcctctctattgtgaacctgtgaagtaaaacagccaaattggctaccaaaacacatccagcatacaattgtggaacaagaataggatrccaactacagacattgcaggtcaaaaggtaagaaatacaaggtaaaggaagggtcactggtccatgacaggtttgaaatacagctgtgctaactcta

SEQ ID NO: 903936 - DNA, 653 bp, Homo sapiens
cttcaggaatgtatctgtttgctagggctagcataacaaaataccacaraatgaatgatttaacaacagaaatttatttcctcacagttctggaagctagaagactgagttcatggtttggtttcttctgaagcctttctctttgccttggagatgattgtcttcctcccgtgtttacacatgatcttctttctgtgtatgactgtgtcctaattttctcttcttataaaggcaccaatcatattaggttggggtccacctacatgacctttttttaaccttagttgcctctttaaaaggtctgtctcaaatacagtcacattatgaggtacttggggttaggactccaatatgaattttaggaggacacagtgtagtccataccaagtaatctctttgattttatgactgaccctataaccttcccctatacatacgtattttattttgcatatcctgagtcagtctctgtttcttgcaaagaacccactgactaaaatggactacttatttttactcagtatatgtgtatctcagatacaggactcgttgaactattatgccattttatggcctgtttacagagaatataaaaatacatggccattcagttgtgtgagagagactttatgaggcctgactgagcagggaca

SEQ ID NO: 903937 - DNA, 616 bp, Homo sapiens
aggaatctaacaagttctcagccmtatcttttctctcagagtctcccccagcctcagtggatttactattcatattcagttctcacagaactaaagtctgtttaaatgggataactggaagaaagccagctcaagactatgtacatatgtgttatatggcttgcttttttttattattcttgggaaatattgagaatggtggagatccactgggttgagttttgcatcatgtggtttctatacttttctaaataaaactgattcaataattctacaaaataaaatatgataaactgagaaaattgcatgtttactttttactcctgtagtgtatgcatagtatccatggttttgaaacataccaaaataaatgttggtatcaaaatgaagaaaatcatattgtatgtcatatgattccaatgatctttgaaaatgagatgaaacatatataattgcacttatgacttaagcttgtattttcctttacttacgtgacagtgtatcagtacatgagcataagatgaaatggtattatgatggtcctttgtattgttatacggctaagattttaacatttctattaaaaggaagatagtaaagaggacattaaattggt

SEQ ID NO: 903938 - DNA, 580 bp, Homo sapiens
gtttattcattcattaaccaagcaaatgtaataggtgttagatttctggtrgggagagaagtaagcatgatatgtacaatgacaacgaagaagcttacttggtagaacagagagtctgataggagttgttaggaaacagacagagagagcaaatatctggacaccctgagagacagaagtcagtggctcatgagaaactgttctaaagttttgaagaagagaaacatacaagaaaagtggtattagagaaaaattaatccagaagtgtactcaggatccttggtggcaggttagtacacacatgcacacacatatataatctgcttacttgaaaaactggtttggccatgctaaatcttcaagaaaaacagtatttaaacatggcaatgaatacactcgcaggcaaaaacggtccataatccctgactctggttttcagttgatatcagatagccccattctagcccctttctaggaaattttttgtaatcccatcatcaaacataacgtagattgggttttccattaccattaaaaagaaaataccaagaagtttttcatcggcacccagaaatccatg

SEQ ID NO: 903939 - DNA, 580 bp, Homo sapiens
gtttattcattcattaaccaagcaaatgtaataggtgttagatttctggtggggagagaagtaagcatgatatgtacaatgacaacgaagaagcttacttggtagaacagagagtctgataggagttgttaggaaacagacagagagagcaaatatctggacaccctgagagacagaagtcagtggctcatgagaaactgttctaaagttttgaagaagagaaacatacaagaaaagtggtattagagaaaaattaatccagaagtgtactcaggatccttggtggcaggttagtacacacatgcacacacatatataatctgcttacttgaaaaactggtttggccatgctaaatcttcaagaaaaacagtatttaaacatggcaatgaatacactcgcaggcaaaaacggtccataatccctgactctggttttcagttgatatcagatagccccattctagcycctttctaggaaattttttgtaatcccatcatcaaacataacgtagattgggttttccattaccattaaaaagaaaataccaagaagtttttcatcggcacccagaaatccatg

SEQ ID NO: 903940 - DNA, 662 bp, Homo sapiens
aatctgttggctctgctctgaatcatactccagccatctgaggtggggtctttgacagcctttttcctgcctgttcctactgtcatggaaacccccrgagaaagctctggtttcctttatgctctgactttaactacagtctggaagttacctggcatcctcctggaagttcctttacacactcccacctgaatgtcagacctagaaggcctgagaggtcaccctggccacccactcatttcctcagtgaggagactgaaccccatcagggagactgacttgctcagggctccactgtgtgatgggggcagaaccaggccaaaattcagtcaaccttgagtgcatgggcattggaaccgagctttgcccacagagtagagcccactagtgcccctagccccccagaattttctcaagcccaaacctcctcttagtgttccacagacagctgagcctggccactccaccccatccctccacagaggcagattcctcagcaaattgaggggtttccaggcctcctcctcctttccccttagactcctgcctcccacgtccgattggcctcagtcttacagcccctaaccccatcctctgccagctctgccaaagctccacagaaagaccaaagtatctctgatttcttgctctggaaatatcat

SEQ ID NO: 903941 - DNA, 631 bp, Homo sapiens
tatgctttgggtcttgggtggttattctatagtgaaggtcctggttttgacagatttgttcacagtcatttttttctaatgtggggggttaggttatgagagaaagccagggtttctttgcagttcactctgcttgcctggaatctcatttgatattaccatgggctaaaactgccaaactagggaatttggccagaaaatctaatctgtgaacacaagcaatcatttatattttctcaaactactcaccttgggttgtatttaagacttattctgaaataaactgtagctttaagactataagagaaagctgcttattaaaaagtttccatttgccatgtgattggcataattagcatcttttctatcaaatgtttttgcctacagaaagtaaattttaagtgcattttcaaaggtttgttaaaataaaaggggtaattctggttgcatctatttttcaaggcaaattgccaaaaaaagatcaatgtggtagtgccttttgtttaaaaaagcattttacatacatttgaaatccagacagatstattaagctaaacaccttacaaaatatgatttattcaattgtcctggcaaagacttaagaagaagatgtcattttgagctcttttgt

SEQ ID NO: 903942 - DNA, 667 bp, Homo sapiens
ttaggtcatgtttactaaaatattcttattgccaggctttcctgaaaggtgacagaatttagattttcatctcaagatttctcagtagaatagtgaaagctaacattgtaatgttggcaatgtgccaggccgtattctgagcactttgtatatattgattcatgcacagatgaggaaactgagagtaaataatttcctcaagttcttgcagctgatacatattcgaattgggatcagaatccctgcaccctgactactgtatctgtgtcttaatcatcctgctaaaatgcttatttagtgatcaacacacttagttgtatgccaaccatagaccaccatctaaaccatacacaggtaatgtcactgtaaagaaatatatggcttctttttactcatccaccacgtaaactctttaacaaatagtaacaatgccataagacttatgtcaagtttcaaatatctaataaaaccttttcatattctatgatttacacattagaaagagctagtgaaatgtattgcatccatgccttttctacaatttttagtatggtaagatacatataatataaaatttttccatttcaatcatttttcactacacaacttagtggcattragcacatttgaattcttgtgcaacattcactaccatctatctctgtct

SEQ ID NO: 903943 - DNA, 616 bp, Homo sapiens
attcacatgaaacctcaaaagagaccaaatatccaaggcaattctaaacaaaaagaacaaaactggaagcatcatgttacccgacttcaaactatactrcagggctacagtaaccaaaacagcatggtactcatacaagaacagatacatagaccaacagaacagaacagagaacccagaaatacaaccacacacctacaaccatctgatcttcaacaaacctgacaaaaacaaaaaatggggaaaacattgcctatctgatataaagtatttcatctaaattctgatgatttggtttgtattagaatgtctgtttttaataagttttgcatttatctttttctttcttctttctttttttttgagacagagtcttgctctctgacccaggctggagtgcggtgtgcagtggtgcgatctcagctcactgcaacctccacctcctgggttcaagagattctccagccttagcctcccaagtagctgggattacaggcatgtgcttagcattaagcctagttaatttttgtatttttagtagagacggggtttcgccatgttgccaaggctggtctcgaactcctgagctcaaagtggtctgctcacctcagcctct

SEQ ID NO: 903944 - DNA, 615 bp, Homo sapiens
cagagtaaattgaaacagttcttcccaaatcaaatcttaaaatcactctacttagaaacaacaattgatcaatttggcttcccattatgctccatttcctactcatattgtaaaagaaaaaaaatcmtttgcttttttgaaaaatggggaacgctacaattgacttattttccatgaaacattcatgtgtaactggcaaattttaaaaaagaaagctgattatgtatactgtcttaaatcacagagatgccatttagaatctatagtttcctagcccagctagagtcagtaagtcaggccgtaacacactgttaccatttggacttggccaaaagaaaacgaggccttgaaaatcctcaactgtggtggaccacagcctcacccctctcccacggctctggagatttccaatgggctgaggcctctctgtccaacagcagagatgaagccataaatcagactttccttcgaatcatggggagaggactggggcagttactggctatgtttgttctccacaaaggccattctatcccgacttgttcagagcagttactttcagatttaaactgaaaggaatgcatcgattgagtactgcacacacttaaagtgtaa

SEQ ID NO: 903945 - DNA, 581 bp, Homo sapiens
agtttttgtcattcaaggagcttacccatatcatctaaattatcaaatacgtggacatatatagagtttttgtaataatcccttatccttttaatgtctatagaattaatagtgatgttccttctttcatttctgatattcataattttgtgttttctttttttgccccttagtctgggaagaggtttatcaattttattgatcttaagaaataatctatttttggtttcattgattttctctatttttctctggtttttaattttttgattttcacttttatctttacttttttcttttctttgtttactttgagacttaatttaatcctcttttactagattcttaacatctagatcatggatttcagatctttcttttttcctaatgtaagtgtttaattctataaattacacatgtactacttctttagatgcatcccacatgtttgatacattgggttcttgttttcattcaacttaaaatayttcttgagctgagcacagtgccacatgcctgtagtcccagctactcagtaggctgaagtggggggggtcacttgagcctaggagttcaagacc

SEQ ID NO: 903946 - DNA, 611 bp, Homo sapiens
tcaaagaaaggggaaaagcttgatctagrcagggcactaaccctaatggtgaaagctctggactctgtttcttattatgccactgaaattgctgtgaagatctgagccacacactgtgtctgttgttgggtcctaaatatttttcattcaagccttctcaatattcatccacagaatctatgtcataatgagcccagaagcataaacacttcaatagcagagttaccaatagaggatatccaacaaatagagcctatttcttaaattttcattacgccaagaacaacagaagatttctggaaagcatgaggtaactattggcctatttaagaagcttctttgttgatggaaacatggatagtccttctctgcctgtcttcttaattgcctgctttcctctgcagccttaaataggaaatgggctgaaaaaattggcaaataagaggacacacacagcttcatttccaagagttgaacattttggaagcgattaggaaaggccttcaggttttctcttggacaggtattgttccaggattttgaagatataagatacaactcaaatatccacaccctcatccattttactttggcatcgaggcaaaggtctt

SEQ ID NO: 903947 - DNA, 658 bp, Homo sapiens
tgtgtcccagagattctagcatgttgtctcttttttcttattggtttcaaagaacttctttatttctgccttaattttttatttacccaggagtcattcaggaacaggttgttaaatttccatgtagttgtgtgctttgagtgaatttcttaatcttgagttctaatataattgtgctgtggtctgagatactgttataatttcagctctcccacatttgctaaatagtgttttacttccaattatgtgataatttttagagtaagtgccatgtggtgccaagaagaatgtatatgctgtctttttggttgcagagttctgtagatatctatcaggttcacttgatccagagctgagttcaagtcctgaaaaaccttgttaattttctgtctcaatgatctctctaatattgacaatgggttgttaaagtctcccactattattgtgtgggagtttaagtctctctgtgggtctctaagaacttgttttatgaatctgggtgctcctatattgggtgtatatatatttagaatagttagctcttcttgttgagttgatttctttaccattatgtaatgccyttctttgtcttttttcatctttattggcttaagtttgttttttcagaaagtaggactgcaaccccttcttttgtctg

SEQ ID NO: 903948 - DNA, 604 bp, Homo sapiens
agctttaaaatgttgcttgcactattaatatgccatcaataggactgtatgcaaatttctattttataaacataaaaagggcttcagctttcaagtaaataaaggtaatcagtttatctttttcaatgatagttatttagtgaatattttagaaaactctgaatagttttcctaaatagccgatgataaagtaagaatataaaataaaatgttgagattcactgagttaaattaactcaataaatgtttctttgtttttattgcattaaatcctcttttgaacttttagctctaaagattattttaaagcaaactaattatttgggtggtagtttatttattttaatagagaagattaaaaaaagaaaaaagaacctgttttaaaattataatttctttttaagtatcttggaaatctctttaacctcagtaattggaatgtatatttctgatggtataagtaggattttaattctaaaagcaggaaaacttccgaattagaatagttttagagcaaaaaagaaaggtaytagttaaaatagaccaatcatccataatgggttataatcagtgcatttgttccttcactcaattgggagataag

SEQ ID NO: 903949 - DNA, 631 bp, Homo sapiens
aagatctctgcacaaaactacaaaacactgatgaaagaaattaaggattaaacaaacaaattgagaaacatcccatgtttatggatcaaaagaattaatatcattaaaatgaccatacttcccaaagcaatttccacattcaatgcaatttctaccaaattaccaatgtcatatttcatagaattagaataatcctaaaattagtatggaatgagaacagagcccaaatagccaaagcaattctgaacataaagaacaaatctggtcctgacttaatcactatgcaatctatgcatgtaacaaaattgaacatggattttatcaatttgtacaaataaaaaaatgtaaaaaaagaacaaagctggagactatagtagccaaaacagcatggtatttttagacaaatggtatggaatagaaagctcagaaataaagccatatatatatatatatagtgtgtgtgtgtgtatacacacatacatgtatatataatgtgtayatataatgttttctacatgttctaatatttatattccattccattatacatattccatttctgtatataggttatatagaattggaagactatctgccattaaaaagaatgaaatcctgtcatttgcagcaa

SEQ ID NO: 903950 - DNA, 562 bp, Homo sapiens
taagcaccttcttcacaaggtggcaggagacagtatgagcatgtgaaggaggaactgtgaaacacataaaaccttcagatcttgtgagaactcactcactatcataagaacagaatgggggaaaccaactctgtgatccaatcacctcactccatggatacatggtgattacagatccctccctcgacatgtggggattacaatttgagatgagatttgtatggggacacagagccaaactatatcatacacattaaatagctcagatgacaatgttttaatatgtatcataccacacatttttttaagaaagaaaaaacacatctaaaaattttaaccacatattcacaatttttcatttaattgacctttctttcatatcttttcttatatttggtgtcatttttgtttcatttaataacatcatttctaagagtgcaggtatgctrttgatacatttttctcaattttcctttatatgaaaatgtctttgtttctatttgtttaataaattaattatagaatacagaataattatcactttaatgcattttcttgtctg

SEQ ID NO: 903951 - DNA, 673 bp, Homo sapiens
cttcctacctttaaagtttatcttgaaagttcctaggaaaagtcagctatttgctgataagatttacaaaaattaacaataaaagtaatcctgagaatggatatattaccagtaaatttccyacaccttggttgccaatgttcgctcactgaagtaacttgctatactaaatgcattctttctgcttctccaagaagcagacatccagacagcattagatctgcaagagatttattggagaaaatgactgtgaagaatagaagaaaaacttcagaccacaatgcagatttgacctgtgtgaagaagagtggaaagaaggaggtttgagcagaaaaagcatcagactacagtgaagttctgagaaaaatatggccagggtaaagcatcctccagtcaaagtcacctgtcagaggagtcctactttccaaaggaatgactcagcatcttacagagttctctcagtaattggctgggagcagcataggagaaggagagctttgatatagatgtgagtctacagaagcctcagctgggattgtcagtcaactattctccctaaagcaggagatttgagtggcttatttccatggccactactcaataagtagtacagaggcttaagcaatccaccacggcctcacaagtatttaggaccaaaggctcataccaccac

SEQ ID NO: 903952 - DNA, 620 bp, Homo sapiens
cattgttattgttacctacattaacaataacatttgtaaagcatattactatttaaatgagaaatcagataaggtcttgaaattcaagggtcttattagagcaaaaaacaagtgattgcaaaaaacaagtgattggataaataaatgtaatgataatttagttaagcatagatttgatgacttctaaaagagttaaattatacagaacacacagaagacttacccaaatacagagtgttcaaactgccatcagaggatttgaggagtcaacttaggtgaatgggcttaggggtttatgtggattggaggctgaccccaataagtatggggaaaactctgtgccaggaaaaaataaataccaactttaaaggatttaatagtccagtgaagcagaggtgtagtgggaaaaaggagatggaagttagatgcaaagaagaaatcagcctgctaagccaaataggctatacacagaggtaagaaaagacaaaaagctgttsgtggatacacacaaagggaaagaatcaagactaggagatcccagtgaagctggagaacaggggatgtagtaatggagaaatattgttaaaagtggaaggtatgaaattgtgattccagataag

SEQ ID NO: 903953 - DNA, 620 bp, Homo sapiens
cattgttattgttacctacattaacaataacatttgtaaagcatattactatttaaatgagaaatcagataaggtcttgaaattcaagggtcttattagagcaaaaaacaagtgattgcaaaaaacaagtgattggataaataaatgtaatgataatttagttaagcatagatttgatgacttctaaaagagttaaattatacagaacacacagaagacttacccaaatacagagtgttcaaactgccatcagaggatttgaggagtcaacttaggtgaatgggcttaggggtttatgtggattggaggctgaccccaataagtatggggaaaactctgtgccaggaaaaaataaataccaactttaaaggatttaatagtccagtgaagcagaggtgtagtgggaaaaaggagatggaagttagatgcaaagaagaaatcagcctgctaagccaaataggctatacacagaggtaagaaaagacaaaaagctgttggtggatacacacawagggaaagaatcaagactaggagatcccagtgaagctggagaacaggggatgtagtaatggagaaatattgttaaaagtggaaggtatgaaattgtgattccagataag

SEQ ID NO: 903954 - DNA, 605 bp, Homo sapiens
cacataaagagaatttttttaaaaatcacatgatcacctcaatagaggcagaaaaatcatttgacaaaatccagcatacctttatgattaaaacccttagcaaaatcagcatagaaragacataccttgaggtaataaatgccatctatgacaaacccatagcgaacgtcatactgagtagggaaatgttgaaatcattccccctgagaattggaacaagataacaatgccaattttcaccacttctattcaacatagtactggaagtcctagccagagcaatcggacatgagaaagaaacaaagggcatccatatcagtaaagaggaagtcaaactgttgctgttcaccagtgatatgatcatatacctagaaaaccctaaagactcatccaaaaatctcctagaactgataaatgaatacagtaaagtttcaagatacaaaaccatgtacacaaatcagtagcattgctatacaccaaaagtgaccaagctgagaatcaaataaagaactcaaccccttttaaaacagcagcaaataaataaataaataaataaataaataaataaataaataaaataaaatacttgggactatacctaacca

SEQ ID NO: 903955 - DNA, 605 bp, Homo sapiens
cacataaagagaatttttttaaaaatcacatgatcacctcaatagaggcagaaaaatcatttgacaaaatccagcatacctttatgattaaaacccttagcaaaatcagcatagaaaagacataccttgaggtaataaatgccatctatgacaaacccatagcgaacgtcatactgagtagggaaatgttgaaatcattccccctgagaattggaacaagataacaatgccaattttcaccacttctattcaacatagtactggaagtcctagccagagcaatcggacatgagaaagaaacaaagggcatccatatcagtaaagaggaagtcaaactgttgctgttcaccagtgatatgatcatatacctagaaaaccctaaagactcatccaaaaatctcctagaactgataaatgaatacagtaaagtttcaagatacaaaaccatgtacacaaatcagtagcattgctatacaccaaaagtgaccaagctgagaatmaaataaagaactcaaccccttttaaaacagcagcaaataaataaataaataaataaataaataaataaataaataaaataaaatacttgggactatacctaacca

SEQ ID NO: 903956 - DNA, 582 bp, Homo sapiens
ccagagtccacaggaatgagccccagagacctcccaacrcccccctcagagcaaggacaagaaaaccaattcctttgctatctcttcatctccttactgtttctcaatttcccaacttttgtaagttcctgtttttctttcaatgcagctacaaggtcacaagcttaaccctgtcactgtttgattaactgtgtttgttctgcttctgtaagcccacttgcctgcaccatgagtttcatgccattagactcccgccaccccaatcaaactagccagcccctttcaggagtatgtataaaagtcaagccctgtctttgttcagggctcagcttttggatgtgaatcttctgggccagtggccacttaaataaaatcctcctgtttcacccattggtctctctggtccttctgattcctgcaacattacaaattcacttgtaaggctacacatttatatttcactattattcaccatgattgtacaattttcataacaagactatttcagatttcaaaattatgagcctcatttcaagaaaaaatttaattgattatgtttaaaagcaaaagattcttcctgaa

SEQ ID NO: 903957 - DNA, 652 bp, Homo sapiens
gtttcttttctctcttaagctagaaaaaaaaaaatccaagctctctcatacttaaatgcaaagtgaaaaaccttttctttcttcattctcctctcactgagacaccaccagtttcctcagagcaatatatgctaattctttccattttctcataccttaatcacttttgaaaccacatctggagcattatacaagtctagggtctttatccacagagaatacaataaaagagatactcatgattctttctcaagcaattgaaatttaccttcggttcccgaccactccatagaacctgctttcaccacgatgacaatttgtctctattgcacagtgcatgacacattcagtctttccatgctctgtcagtcaacagtgttagatgctgtagactctgccctcctgtccggatttccctgacatcaacatcacctgactttaatcttccctctcatgtagctttttctttgtctcttctcaagattacatttttgagcccattctgttcacactgatggtccctgggatctgtactcatctctctcctttctcacattaaaaactttcatgaacttttacacattcccatgtcatcagttaaggtstattcttccagctgtattttttacccccgattacaatttcttttttt

SEQ ID NO: 903958 - DNA, 652 bp, Homo sapiens
gcacctactctaaaattgatcacatagtcaaaactaaaacactcctcagcaaatacaaaagaaatgaaataataacaaacagtttcttggaccacaacacaaacaaattagacctcrttattaagaaattcactcaaaaccatccaactacatggaaattgaacaacctgctcctgaatgacttttgggtaaataacaaaattaaggcagaaattaagaagtttttttgaaaccaataagaacaaagatacaatgtaccataatctctgggatacagttaaatcagtgttaagaaggaaatttatagtactaaatgcccacatcaaaaagctagaaagatctcaagttaacaacctaacatcacaactaaaagaactagagaatcaagagcaaacaaagcccaaagctagcagaagacaagaaataaccatgatcagagtgtaactgaaggagatagaggcacaaaaaacacttcaaaagatcaaaaaatcctggattttttttgaaaaaaattaataaaatagaccacaagctagactaataaagaagaaaagagaggagattcaaataaacacaaacaggaatgacaagagagatgttcctgctgaccccacagaaatacaaacaaccagcagggaatattataaacacc

SEQ ID NO: 903959 - DNA, 499 bp, Homo sapiens
agataggagcagaggaaaaaatataaataaccagatggccgtgactttttggctccaacagaaaactgtagttgagaaagactgatagttcgatcaaaaaaaaaaaattccccaatacaaaatttcagcacttgaaatctatcacccacagagcgtaccacactagagtataactccagtagccaagatagatttttatgagccttatgtctcttagcttcaatactggagaatctgatatagcaaaaacgactggaggaggaggaggagtaaaatggaatagacttctttattctgttgtactgaaatagcaagtattgaagaaacagcaacatcagtgagcaggtatgggaaattttgcattcagaatatgatcatttctcagcacctctgcccccaccaacatcctggtccaggcctccattaattcttatgtattattgcattgacctcctctctgcttctcccctcyccgctacagttaattctcagcacaacc

SEQ ID NO: 903960 - DNA, 668 bp, Homo sapiens
tatactctttaattacttcttgagtgtgaatgaagcccgcgctagtcaaacaaaagtgtgagcggtgctgggctagctaatatggtctgtctgtggatggaacacagcctgccagttcattctttccttgcttaatgaacactgcattgaaattttttcccccaaatttgtagcttctaattagctttgaaatgattttgtggttcaatttaaagtctgccttatcccttccgtgattcctttgggactggttgttcatcaaaaaagaaaaaaaagaacattttgcatttttatagtgctgtgcactggcccatggaggggcagcagatgttcttgagttctcccacccacacatccaaatgcaaataatcttggtgctcctggcaaacttctacctcataaagcattactcttctagtattgacaaaggcttcatcccacaaaatgttcatgaagaacaaattcaaacactaacacataacggtaaaatgtactttatgtacctgaaggagctctcaacttgaaattggataatcattgtgtgaycttgggtaaattttttattctttcttaggcttcaattttcttatatggaaactaaaattggtactatccacattatcagactgtgcttgacacatagttggcattcaactattaacttttgt

SEQ ID NO: 903961 - DNA, 614 bp, Homo sapiens
tatttcagtttcaaggatgggtactgggggaggctgggggtggacggggaacctgagggtgcagagtggggtttgtcatgcctgtcttcatctcagcggccccactctgagtggccctatctttgcccatcttgattcttctcagtctttcaagccaggctgaaccgagcctttcctgactcccccagttagaaggaatcagccctgtctctatgtttctgcagatttttgaaaaggaacaactgtccttgtacaaagcccaacagacctccttgccttttccaccagaccctcgggctctttatttactttgcctccttctgcccttagcggggtgtgtatgtggaggaaggcagcgttggggagtgggcaatgcaaggaatggagcatggagaaggggaaggaagctgtgcatggattgatggacacgcaaagaactaactaacacagggctattttacgcatatacacatcgtatcttactatacacagcctgtgtatgtgtacacagtggctattaggtattacacacacgtatgcatataaaacacatatagcatacagtgtytattgtaagatggagaacatagcaaagggtgctatacagcataaga

SEQ ID NO: 903962 - DNA, 622 bp, Homo sapiens
gctctttttgcttctggtgcccttctcctcttctgttctcctgggggcaactactatagacccaaaccactgttgccagagctgacagcaaagccctttctgcccctcagtggcatctggggcatagtgtctgatatccctacattgaggaaggcagtgtggtgtggaagaaagaatctggtctgtgaggatcagactgagaggagtgctctaccacttactgacttaaccttgcccagcctcggttttctcctcattcattcaagccatacatattgattaaatgcctcatctgggcactggggatgcagcagtgtcacacccagatcttggtttctgccttcagggagcttacagtccggtggaggggcatggacaagcaatgtaaaattaaatgatgggccattttaatcacaattatggcacaggccacagtggaccatagtgggtgttctgggggctcattacagggatcccgacctgttttggaaggcagcagcatttaccccggaattggagttcatcaggtggaagcacattccagggaaaggggccggcgtgtgcacagtccagaggcaggaagkagctgcagagctgggctgtggtttctgccctgcctgtt

SEQ ID NO: 903963 - DNA, 622 bp, Homo sapiens
gctctttttgcttctggtgcccttctcctcttctgttctcctgggggcaactactatagacccaaaccactgttgccagagctgacagcaaagccctttctgcccctcagtggcatctggggcatagtgtctgatatccctacattgaggaaggcagtgtggtgtggaagaaagaatctggtctgtgaggatcagactgagaggagtgctctaccacttactgacttaaccttgcccagcctcggttttctcctcattcattcaagccatacatattgattaaatgcctcatctgggcactggggatgcagcagtgtcacacccagatcttggtttctgccttcagggagcttacagtccggtggaggggcatggacaagcaatgtaaaattaaatgatgggccattttaatcacaattatggcacaggccacagtggaccatagtgggtgttctgggggctcattacagggatcccgacctgttttggaaggcagcagcatttaccccggaattggagttcatcaggtggaagcacattccagggaaaggggccggcgtgtgcacagtccagaggcaggaaggwgctgcagagctgggctgtggtttctgccctgcctgtt

SEQ ID NO: 903964 - DNA, 606 bp, Homo sapiens
aggaaacccatttgaaatagtgacagcccagtgagaaggggatgctagtactcacacatttacttatttatttattattttttgagacagggtttcaccctccatgcctaggctggagtgcagtggtgcartcttggctcactgcaacctccttctctctgactgaagcaatccttccacctcagcctcccgagtagctgggactacaggtgcatgccaccacagccagctaatttttgcatttttttgtagagacagggttttgccatgttgcccagactggcctcaaactcttgagctcaagtgatccacccacctcagcctcccaaagtgcttggattataggcatgagccaccacgactggcccttgccctcttatttaaattaagttttatataagttataaagcacattttaactagattctatcctacctctttcagtagatccccttgggctactccttcaacttggcctcagtttgttcaactctgatattctcctgattctaaaatgccacttattggtagatgtaatatgtatacattgcattttgtaaagtaatgttttgctttgatgattcttagttgtgtaatcctctctga

SEQ ID NO: 903965 - DNA, 640 bp, Homo sapiens
tgatggatttctgaagtcttttatgatgcagtaaaatttttcttagctaaaaaaatgggaaatgttttatcctaaaattgagaacaagagcccagtacagtccccttctagtgataaatttattataacttagcatcttatgggcataaaaataataatctaaacttgagttttttattattaaactggactccatgggacaaattcaggagattcatgaacctcaaacaattatgtgcctactgggtgttaacgtatatctggagtggaaggtggagtctatcactttcatcaggttttaagaggtttgaaacactgtactggctttatacgaccttatatttatattcccactattaggctagtttcaaggagacacttgacactggggctaggtcctctatttcaacttacaccatgttgagaaaatggattttaagaaaaatgtgcatgcgtgtgtatgtctgggggttaaggaaatagaaaaaatgattacaatccacggtatgsaatgcttcccgagtttgcagtagagactcctggatgctcaagaacaagaatgaggttgtggctagtaagggaagcgagggttactaataagaatcttaaagacaagctctacttcacattcaatctccaa

SEQ ID NO: 903966 - DNA, 640 bp, Homo sapiens
tgatggatttctgaagtcttttatgatgcagtaaaatttttcttagctaaaaaaatgggaaatgttttatcctaaaattgagaacaagagcccagtacagtccccttctagtgataaatttattataacttagcatcttatgggcataaaaataataatctaaacttgagttttttattattaaactggactccatgggacaaattcaggagattcatgaacctcaaacaattatgtgcctactgggtgttaacgtatatctggagtggaaggtggagtctatcactttcatcaggttttaagaggtttgaaacactgtactggctttatacgaccttatatttatattcccactattaggctagtttcaaggagacacttgacactggggctaggtcctctatttcaacttacaccatgttgagaaaatggattttaagaaaaatgtgcatgcgtgtgtatgtctgggggttaaggaaatagaaaaaatgattacaatccacggtatggaatgcttcccragtttgcagtagagactcctggatgctcaagaacaagaatgaggttgtggctagtaagggaagcgagggttactaataagaatcttaaagacaagctctacttcacattcaatctccaa

SEQ ID NO: 903967 - DNA, 623 bp, Homo sapiens
gggaccaagttttgagaaccactgccttaaactctcaataaagtgtgcctgtatttggaccgcagctttacagcatgagagcatcagatgggctctgagtctcaggtgtgactttgaacttcttagccccaacccccaacccctcaccaccaccatgctttgctttgtttgcttgccttgtacttgaagtgtcagccagaaagtggactttgtttcctacactaatttagggccttatattctctccagcctcattggcaataggatgaggatggatcacaaattctttaaagggccaaaggaggctcctccatcttgcctctgctatttcataccaaacagactcatatttgagtcttacatctttgaaaccccagccagcccattctaagtctaggtgacacagaaacctgctgggatgtagggttttaattattcatatctatgtcttatctgtcatatgaaagaaaaccctatcactagccaaaaaaaaaaaaaaaaaaaaaaacacaaaaaacaaaaaaaacgaactaactggctgtctcaggaagcactggcatttgaaaacctcccggagacagcagyagatagtgactaaagacacagacttagggtaagatcga

SEQ ID NO: 903968 - DNA, 604 bp, Homo sapiens
tgggagaattcatagctttcaggatgtgttttatatatatatatatatatttctaggaagataaaataactttgtaaatgctaagtaaaacaattactttattggaaaattggagacattgagaaactagctggtgctgtccaaaagctgatagacactgtgatctaaccatattacttgcctaccatcttcaaccaaaagtacaaagctactcagaaatcatcccattgtttatcatgacctttacaatagtaaaccctcaggtcttcagtacttcctcaaatagcagaagggtagaagaataaaaagagaaaataagtaattacaaccataatggttttctcttgaagggtagtgagtggttttcttttatttcttctattaggcaatctcatgacttattttataaaaataataataagagatcttggtctcttaagctttaattcccatattggtcttggtaatgaagaaatttytacattctccataggagtgtctaggtcactttcatccatatgctcttgatccctaaggagctgatgtaagatgtaatcaactgccagaagtgaatcccaggaagactgccccgtagcctgactcc

SEQ ID NO: 903969 - DNA, 603 bp, Homo sapiens
ttcatttaaggaagcaaggagaccaagagaccccacccccacaatttgcasatggtgccaaaggttgcaatttgcaatcccctttaagttcacgattaatcggtactttgctctaccaacgccaactcctaccccatttcatcgattaaggggttttacactttacaagcagtcgcgctgtaagtaaaagatctgatcactggaagcccagttcggaagaatctaattgccaaactgtccctccacccccacccccacccccctctcactgcccttgaattgatgcaatgaatattttggacatgtggtgacgcggtgacaagagccagggctgcggccaccacacacagatgtacctacgcacacctatgtttggacaaatacagtcccaccacacacacggtctcacacactctggattcatatatgtacgcgaacctgcgttctgccattgccatctgtctaccaagttgctactatgctttccactttcatgcagcctaatgcactttggctttctaaaaaaaaaaaaaaaaaaaaaaaacctataaactaaagccaacttaaactgggcttctgctcctaaacgcgtttaattgatga

SEQ ID NO: 903970 - DNA, 602 bp, Homo sapiens
ctgggtcctgggaacagccactgggcccagtcgggggggtctcagcacctatcacaaagaaagtgccactgggcctagggaaggacaagaagtaacatgtcaaagatgggacagaacccacctcctggcagggagtggggcacacatatgtgcatgttcatatatgtgtcagaatgcgtatttgtcagtgtatgtgtgtcagtgcacataggtataggggctgtctctcagaattcctgagggctttccatttgatcccagtggttgaagatggagtatgatcccaaatcccttaggtggatgtggcctggcagggggtcagcaggagggaggtccctgtctccttggcttccagcttccaggctctggcactcccactgttaggaacaggtacctttagggacacaggagtgtaagccactgtttccgtctgggttttgtcatgtgtaggtcccagcggctttaagccaacytgaaaggttcatttgggagtcacgggtatgtgtcaacaaaagcccaccagaccatcaatgaagtgggcaaaagctctgggtgaactcttggctcaggtatcaggatatgctgggtgagggaaataatgg

SEQ ID NO: 903971 - DNA, 579 bp, Homo sapiens
catttttctcatggccccatggcacttactctaaaattgaaaaagtaagcagaagtaaaatactcctcagcaaatgcaaaagaactgaagtcrtaacagtctctcagaccacagtgcaatcaaattagaactcaagactaagaagctcactcaaaaccatactattacatggaaattgaataacgtgctcctgaatgacttttgggtaaataacgaaattaagccagaaatcaagaagttctttgaaactaatgagaacaaagatacaacatactagaatctctgggacacagctaaggcagtgttaagaaggaaatttatagcactaaatgcccacatgaaaatgctagaaagatctcaagttaacaacctaatgtcacaactaaaagaactagagaaccaagagccaacaaaatccaaagctagcagaagacaagaaataatcaaaaccagagctgaactgaaggagattgagacacaaaaaaccattcaaaagatcaacaaatccaggagctgtttttttgaaaaaattaataaaataggtaaactgctagctagaataataaagaagaaagagag

SEQ ID NO: 903972 - DNA, 632 bp, Homo sapiens
tataaaccttttataaataactggaacttccatgtccggtaagacaggaaaaactagagaagggaaaagatcatctttaatttttaaaaactaagtaagtatctcttaggccttggcagaaactatcctaatagagacagtttccagaaggtcttattctgtggcctaaaacaaaaatgttttattccctcaagcttcctttttttttttttttgccaataacttaatagtttgttagtcaataatattacaaatattttaaaattatttaatataaatagttggcagcaaaccattccattacagagttaaattaccagtacaacagacagactggagatttagacacctggaagataacaataaaataagctaaaatatttagcaaaaaatttaaactgaaggcgtttacctagtgtccataaaagcacaagcttactttctttgcttgggcgtgttggccactcaggcacctggacacctacgaacctgcagcttctgctcctcattgaaaggcagtcttgtttgccagccacgttggatgtggcatgaggagaaggayagtcaatgagccagccaggctccagcactctcctgcccacctctgcctcaccctcagctggggatgctac

SEQ ID NO: 903973 - DNA, 589 bp, Homo sapiens
taaaactgataatctgataatatatgtatgtgttgggtgcaatttagaacttttattattytaagaacactacaagagcagttaaagccatggcttctcaaattggcatgtccaacccccttattgtctcctattccccccagagtatcagatgcatcatataaaaactgtcatttttatatacatgctccctgagacagggcagctgtggttctacctctttgaccagttattttatatttatttttaaatgtacatatttatttgagagctgaattgtgtatactcagtattttttattgatgaggctgaggaaggggtagggaacagtgaaggcaggattccatgaacacagtccaagagtacctgtaagactaaaggaacctagaggctatcagcaagtgagttaaaggacctttctttttggcattgatcccaacctgagaagaagtaatcataagagactgaggtatacggggaaaaggaagaagaatatcattaatgttctaagaataatgtcatggggataaatacttaagagctctgttctatacctttttatttataaataatattaatagtacattaa

SEQ ID NO: 903974 - DNA, 635 bp, Homo sapiens
attgcaattaaaacagccattagataccactacacacccattagaatagctaaaataaaaaaactgacaataccaaatgctggtgaggatgtggaacaatatgaactctcattcattgctagtggaatgcaaaatggtaaagctactttggaaggcagtttgacagtttcttacaaaactaaaaatagttttgtctttttttttttttttgagactaagtcttgctgtcgcccaggctggagtgcagtggcgcgatctcggctcactgcaggctccgccccccggggttcacgccattcttctgcctcagcctcctgagtagttgggactacaggcacccgccacctcgcccggctaattttttgtatttttagtagagacggggtttcactgtgttagccaggatggtctcgatctcctgacctcgtgatccacccgcctcagcctcccaaagtgctgggattacaggcgtgagccaccgcgtccggcctccaaaaatagttttgtcttaacatatgatcccgcaattgcactgctaggtatttagccaattgaatytaaaagctgtctacacaaaaacacgcacatgaatcttcatagccactttactaataattgccaaaaactggaagcaa

SEQ ID NO: 903975 - DNA, 547 bp, Homo sapiens
ggtgtggtttagtgtctgggctagagaacatggttgaactctctgcactgagggcattaaagctgctccttggtttccaacccaatacccctgagtaattactaaatgctccctgggagarcatttgctttccacagaaaagaatcttgctgcctggggagaggggaggagaacctggaggagtgtaattgaaaaatgctccttgggtgattctggttcctcctcccctccctaccctctgcttcagggaatattaaagcagtcattggtccaagatgctttcagttttaacttttataagaaattgaatataagaggaaaaacatttttttttgtctcagtaagtaccaaactcttattttttcttttggtctttgagaaactatctaaattgatgtttatacaaatttacattatacttttttgcttcactaggaaatggccatccatccttcatgagaaaggatgggaaaagatgccaaacatttaatgacaaataaaaccctaagtaacagattccagacagcagacagaaaattctaagtgg

SEQ ID NO: 903976 - DNA, 651 bp, Homo sapiens
taagctttggagggattattggaaagacatgatactgttttgcaatgtgaaaaggacatgagatttgggaggggccaaggatggaatgatatggtttggatctstgtctctaccaaattttatgttgaattataatccccagtgttggagctggggcctggtgggaggtgattgaatggtggaagtgtttcttataagtggtttattaccattcccttaatgctgttctcataatgaaatctggttgtttaagagcctgtagcacctcccctttcactgtatttcttgctcctgctccaaccatgtgaagtgtctgctccccctttaccttctgccatgaatgtgagtgtcctgaggcctccccagaaacaaaacagatgccagcaccatgcttcctatatagcctgtggaaccatgagccaatcaaatctcttttctttttaaattacccagtctcaggtatttctttgtagcaatgcaagagtgaacaaatatagaccctaatgatgagtttatatgctttattaagaaaaagaagagagagagagagattgctctccttctgtattggatatagcaagaaggcagctatctgcaaaccaggaagaagattatcaccaagaactgaactgattggcatgttgatcttgg

SEQ ID NO: 903977 - DNA, 605 bp, Homo sapiens
tggcatgcagtggcatcacaattaacaaaactgtcacctgagctaaatggtgatgatatacttacttaatatttctgtcttctgatgggactctaaataatgggttcatattttgagtctcttggagagaaaaccgtaactgcctgtggctttccttggctagtaggataaaataaaaacttattcccatggcttttacttctctataacatctggtccccttccaatgtcatctacccatctgtccttgtttgcaaacctccaatcttcctcccagaccacctggaagaaaactctgacccatctaatggcctttgacgtaatggttccatccagttggaacgctctttacccagattttgtacggctggcttctgtccattattcaggatgtaggtcaaatgctgccttagcaaaaagtcattccctgaccaaaaaattaccacgtctatctgggaaagttggtcattaccttgacacttgaatatcactcatattaactaagaaaataaatagaataacgttaattgtatttccagtgagttatattcaagggaggatacagttgtatatcattgttwaagtaatcaaaactctactactta

SEQ ID NO: 903978 - DNA, 576 bp, Homo sapiens
caggacagagggcattcaagcagggaaaatgccagacacttttaaaaccatcatatctggggagactyactcaatatcatgagaatagcatgggggaaacccaccaccatgatacaattacctccacctggtcccagccttgacacatggggattatggggattacaatttgaggtgagatttgggtgaggacacagaatcaaaccataacaacagcatccccttggtgatatgtgagttgtcactcagtaagttcacacaagatttggttgtttaaaagagtctggggccaggcacggtggctgatgcctgtaatcccagcattttgggaggctgagacagggggatcacctgagcttgggagttcaagaccagcctggacaacatggtgaaaccctatctatactaaaactacaaaaattacctgggcgtggtggcacaaaacctgtaatcccagctacctgggaagctgagacaggagaatcgcttgaatccaggagacagagattgcagtgagccaagatcacgccattgcactccagcctgggtgacagagggagactccattaaaaaaaa

SEQ ID NO: 903979 - DNA, 615 bp, Homo sapiens
tgaatatggagttgcaaaagatagaacacagtattttgttttgttttgttcttgratagtcactggtctttcagaagggaaattgagtctccatcactgggcagacgtccaatcaatctagctctgaagtttcaagaccataagactcagaagggtatgaaaattactagataagtcatatgaagaagtagagtaaacacagtcacattcaacacattgttctgaaattcaaatttgatcaggaggttaaggagcaaatgattcatttgaaaaacaataattttttcaaatgattgacaatgtggctcaaatttgtatatcagaggaaaaaaggtaagattgttaattgagaataagactgacttgagaataaaataccaagcagataaaaataaaattgttcaataatttcaagtcaatgcagtgcttgaggatggtgaggctattttgtcccaagagctgaggaaaatactcaaacactgataaggtaaaggattgtaagagaaagcacagccaagatgacacatttatataagaatgcaacaaggaaggtcataggtaagagaaaggtctgaattatatggggtgctagctattatggggcttttatgtgtt

SEQ ID NO: 903980 - DNA, 596 bp, Homo sapiens
ccccaagtctatgagggaaaggaatatcaggaagctgagattggaaagtgaagtggccaaagtcataaaatacmaagcaggactggaataaaaaagacttaccgattccagtatccgtgctcatttcactacatcatactgcttacttaggactttattgaatacaagagacaaatattcatgaaagaattagagaaacataggaaattgtatggctcagggtctgtttccttctttgtgtgcttaagctgtttataaatgtacaataaatgttagttcctttctctctgctagagagcagagattaaggcaattttgtaaactgcccttgacttgtctgtgcaggcagaggcagagtggggtatcagctctagagtcagtcaaagcccacctctcccatgttttagcatataattttggctggccatttattcttcctaagaataagtttctcatctgtaaagtgaaataacacataaagttgtaaatattaatctaaataacttagacatgatactacctatttttattattgttatttttttgcagttagtattacagggtaatcagacagtgatatgcaaagcctgttttgc

SEQ ID NO: 903981 - DNA, 637 bp, Homo sapiens
aatataactcatagtgggatatcagtagttaagaaagataatctaacagaaggttttatggtactcacaataattgtggcatcaacaaagcttctaattagtagygatgatgcaatgttgggaaaattcatggacaacctaagttgaaaagtgatttagaagagttttatctaaatattacctatttgtctgttttcatgctgctgataaagacatacctgagactgggcaatttacaaaagaaaaaggtttattggacttagagctccatgtggctggggaggcctcacaatcttggtggaaggcaaggaggagcaagtcatgtcttacatggatggcagcaggccaagagagagcttgtgcaggggaactcctctttttaaaaccatcagatctcatgagacattggctatggtgagaacagcatgagaaagatgaaaccagtgaaagatgattcaattatctctgaccagctccctcccatgacacggaattatgggagctacaagatgagatttgggtggggacacaaagccaaaccatatcatctattttactcttattttctatctcatgtgatcataggagttacataagacatatatgtaagttcaaaagtattattttcactatatat

SEQ ID NO: 903982 - DNA, 637 bp, Homo sapiens
aatataactcatagtgggatatcagtagttaagaaagataatctaacagaaggttttatggtactcacaataattgtggcatcaacaaagcttctaattagtagtratgatgcaatgttgggaaaattcatggacaacctaagttgaaaagtgatttagaagagttttatctaaatattacctatttgtctgttttcatgctgctgataaagacatacctgagactgggcaatttacaaaagaaaaaggtttattggacttagagctccatgtggctggggaggcctcacaatcttggtggaaggcaaggaggagcaagtcatgtcttacatggatggcagcaggccaagagagagcttgtgcaggggaactcctctttttaaaaccatcagatctcatgagacattggctatggtgagaacagcatgagaaagatgaaaccagtgaaagatgattcaattatctctgaccagctccctcccatgacacggaattatgggagctacaagatgagatttgggtggggacacaaagccaaaccatatcatctattttactcttattttctatctcatgtgatcataggagttacataagacatatatgtaagttcaaaagtattattttcactatatat

SEQ ID NO: 903983 - DNA, 541 bp, Homo sapiens
atgcttgctcaagtcttctgtccattctctattggattgtgtgtgtttctctggtgacttatagtaggtctttgtatattctgggtacaattttgggggctcayttttagggtgtaacaaatcacttctcccagagtgtggtttacttatttattctcttaatggttttttgttttgttttgcttttaaacagaagtttttaactttaatatactagagttaaatttatcactttttctttatggttagtactttctgtgctatgtctagtaaatctttcactaccttgagatcataaagatattcttcaattttgtcttttaaaagtttcatacttttgcttttaatataactcctaatccacaaggaattttttgtttatgtgtgtaaaagggatctgtaataaataatctaattccatttttgatgtttgactaccaacagctttcaggctccacccctccccctttccctcttgcccagcatctggcaaagctgattagaaaccccaggtgccccctcccttggtgccaaggagaag

SEQ ID NO: 903984 - DNA, 378 bp, Homo sapiens
gcctgaagaaccatcttccacacaccccaccagacacacacgagctagttaattcctactcttycttatgctttagttcttcacaacttgcttacataaatatgagtaggtaaattatttattttacataacatttataaaaattatttatcatttgatttttttaaattaaaatgtggttcctgccagaataaaagtttcctgatagaaaggaatgagtctgctttttcacaagttgtattcacagaagttagagttgtctcttgttgtatagatgtttaataaatatttttaatattaatgcttagtaaattatgcttgagtaataacagtaaaaagataatttgattaaaaagtgttattagtcattttgataag

SEQ ID NO: 903985 - DNA, 633 bp, Homo sapiens
atgtcactgtgttgtttctccaatcttgtttctgtaacccggtcaactttttatcacatttcagtgtacattttgggttgtctgctgagctatttccrgggttcatagtatagtgcttagtggggaagaggagggaagaacagagaggaatagatctagatcattttctctggactgggagtttctcactgtacttcaaaggcaacaaaaatagaaacccatgagttcaagagttttgatttttatgttccacaagtaagtgaaaacatatgatgtttgtctttctgttcctggcttatttagtgactataatgaataataacctaattgtacagtttaaaataactaaaagagtatacacaaaggttaaatgcttaaaggcatggagacccccttctccataatgtgattatcatgcattgcatgcctgtgtcaaaatatctcatgtacccataaatatatgtacctactgtgcccccacaaaatttaaaaataaaaattaaaacaagaaatccaagaatatatacttcatgtatgtttttggataagaggacaactgtgacatcattctctatgaatatctaaaaaatcagtgttaacactgtggaagacacaactacaacattagaagga

SEQ ID NO: 903986 - DNA, 637 bp, Homo sapiens
ttgtctttcaggccagccggcttcacacatgtgccacgtgcgcccctcgctcagaagggatctgtactcggtttggatctattgttgccatcttgaaactcttaatactctttgaacacggggcccgtattttcattttgcactgggtcctgaaaattgtgtagctggctctactttcagggattgtatcagaagtctcctcctcaaagaggccttcctcggccacttatcctcaagtagctcctccccttctaagttactggctatcccatcattcccacttaattttcttcataacagttgtcatgcttttatacattctggcttctatatttatttgtgtattgtccagttccctccctttggaacgcagcgtgggcacctgcaacgcagagaccactgtatctccggtgcagaatgtaatgagtgcctgatacatttgccgaataaactattccaagggttgaacttgctggaagcaagagaagcactattctgggtaaaatggaaattttaaatgtacttgatatttatatacatcctaatcaataattaaatttgtgtagtgctgatctaaacagataaattctggcttcatgatgatggtkaagtggaatataattttctcattttgtat

SEQ ID NO: 903987 - DNA, 651 bp, Homo sapiens
gactcagatatgatgttgtaaccatcattacaactgtcataacttcaaaataattttattgatgtgttaacagattgttaattttaattgtgattgtatcaaaaagatgaaattatcagaaatcaatgtaacaaattatgtgcaatccaaggacaataacagaaactatataaaatataaataaatggagagatattccttgtacatgaattgcaaaacagtattattaagatcttaattctctccaaattaagaatttgtaaaatcccaatcaaaattttagcatttatttttataaatattgtctatcataataaaatatgtaaatatgaattaatttattatagtcatgtttttaaaaaaggacatacctggagacattttcctgatttcaagacttactgtaatgctacagtcattaaaactattgtaatggtgcaatatgggttgatttgtgtcacgccctcttacaaagaaagatatgattgcatccccaacaatttagaatgtgatcttctttgaaaaaagagtgctcacataggtaatcaatttaaagtgaggtcattaggataggttctaactcaatataactggtatcctcatgaaagggaaaaatttggtaaartctgcaaataggaagaatgccatttg

SEQ ID NO: 903988 - DNA, 544 bp, Homo sapiens
tatactttgctgctgcagagtgaccagacatgggcacagaaagatgagttccaaggactcctgagtgatgtctttcttgccttctccattcaaacactagctagatgtctgaggcttccaggagccaagtttgaacataagtatcttaaagccaagcttttttgctcttagctcttagttttccaaatggagatgttacatttaatgaaaatgaaaaccctctgtaaagaatcctttagcagacaaagccagttaggcctcataagggaccccaaacttgcttcatttgcaaacataagtgaaataactgaagctatttattgtaaatgcccatataatttaacttaaaaacataacatgctcaaccaatcagaagaaaccaacaaacttataattagattactaaatattttccaaaggatagaccaaacaaatctgtataactgtgcaactgtcagtgatcaaatatttgtctgtcttctctgttagtcccacaaaagccaatatcttatatttyctaagggaagcttctaaacaacttctg

SEQ ID NO: 903989 - DNA, 690 bp, Homo sapiens
ctaggaaccgtgagacttaaagtggcaaggacatggaagaatctgctggaagaagtcagccacctacgttaaccaggagattttatttacataaaagtctcccccagtaaagataattgcattggaacagactttttgaaatgttgatgatcacccacaggactatctatgtgaaaataataatgaccttaaaccaacaacaacttgaaaacttgatttgtgtttcttataagaagccaactccttagagtgactggactgaggattccacaaggaatttggacttgaaattttcagaagttattgatattggtactgaactcaactgaagaggtattcttgcaaacatattactagtttcatagactgccttgctgtctcattcatagcacggtggtttcagttactttaaggatcacgtttttctagaaaacaaatttattttttacattactttttctttctgtactcccagtaatggttcccacaatctcatttccgatcagctccaaattgtactccatataaataggttttgatttacaaattgaaaaatctgattatttataaagtaaaaatgaaaaaatcttcattagtcatttttgataataacattttagctattttaggtaaaagtagctaaaatgcatscaagtacttgggccctaaatttgatacaaaaatgttttc

SEQ ID NO: 903990 - DNA, 572 bp, Homo sapiens
attgctaattcaatttcagagcttggtmttggtctattcagggtttcaatcccttcctgatttgatcttggagattgtgtttttccaggaatatatccatttcctctaagtttcctaatttgtgtgcatagagttttcctagtattctctgaggatctttcaagaaaaataaacaatctctgggaaatacgagattatgtaaagagaccaaatctataactcactggcattcttgagagagaatgagagagaataaacaacctggaaaacatatttgaggatacagtcagtgaaaatttttctaatcttcctaaagaggttgacatgaaaatccaagaaatacagagaactccagctggatactatgcaagatgatcatccccaaatcatagtcgttagatttaccagtacacgcaaaagaaaaaaatttaaaggcaggtagaaagaagtgccaagtcacgtatagagggaacctcatcaggcttgcagcagaactctcagcagaaactttataagccagaataggttgagagcctattttgggcatcctttaagaaaaaaaattccaagca

SEQ ID NO: 903991 - DNA, 704 bp, Homo sapiens
gaatggttttgatcaaaatactgatagtaatatgctgatagtaataaagtccaggctgggtcccagatggagaggaggagctaatctggaactggagcaaaggtrattcttgctatgcttcagcaacaaaaactggcagtgtttggcccctgccctagagatctgtggaattttgaacttgagagagatgatttagagtatctagtgaaagaaatttctaagcatcaaagcattcaaggggtgacctgagtgctctttaaagcattcaatttttttaaattatactttaagttctagggtacaggtgcacaacatgcaggtttgttacatatgtatacatgtgccatgttggtgtgctgcacccattaactcatcatttacattaggtatatctcctaatgctatccctcccccctccccccaccccacgacagtccctggtgtgtgctgttctccttcctgtgtccaagtgttctcattgttcaattcccacctatgagtgagaacatgcggtgtttggttttttgtccttgtgatagtttgctgagaatgatggtttccagcttcatccatgtccctacaaaggacatgaactcatccttttttatggctgcatagtattttattcattcactgagacatggtttggaatttgaacttatgtttaaaaggaaagcagagcataaaggttcagtaaatttcca

SEQ ID NO: 903992 - DNA, 585 bp, Homo sapiens
catctcacaccagttaggatggtgatcattaaagtctggaaacaacagatgctggcaaggatgtggagaaataggaaagcttttacattgttggtgggagtgtaaattagttcaaccattgtggaagacagtgtggcaattcctcaaggatctagaaacagaaataccatttgactcagcaatccctttactgggtatatacccaagggattataaatcatgctactataaagacacatgcacacacatgtttattgcagcactataccctatagaaaagacttggaatcaacccaaatgcccatcaatgttagactggataaagaaaatgtggcacatatacaccatgaaatactatgcagccataaaaaagaatgagttcatgtcctgtgcagagacatgggtgaagttggaaaccatcattctcagcaaagtaatacaggaacagaaaatcaaacactgcatgttctcactcataagtgggagttgagcaatgagaacacrtggacacagggaggagaacatcacacaccagggcctgtcaggtagtggggagcaaggggagggagaacatttggataaata

SEQ ID NO: 903993 - DNA, 668 bp, Homo sapiens
gaaatataatgaatgaaataaaaatacaatagagagtatcaatagcagaacctattaagcagaagaaacaatttgtgaacttgaccacaggctatttgaaacaaacacacacagaagagaaaaataaagcataaaaagaaactaagaaaactttcaagattttggggacagcatcaaaagagaaaacatttgagttacacaatttcaaggagaagaagagagagacataggagctgaaagcttatttaaagaactaatatcaaaagatttccaaatctggggaataagaaatatcttgaatgtaaatggattgaattctccaattaaatacatagagtgactgaatggttgagaaaataaaatccaatctacagactgaatgctgctgatagcctcactgtacatgtaaggacacacaaagactaaaaatgaagagataaaaaaggatattccctgctaattagaacaaaaaatgagcaaaggttgctacacttatatcacacaaagtaaattttaagtcaaaccctatacaatgagacaaagaaggtcatcatataataacaaaggagtcaatttccactgggagataacaattgtaaatgtatgtacacccaatatcagagtacctaaayacataaagcaaatattaacagatctgaggagagata

SEQ ID NO: 903994 - DNA, 605 bp, Homo sapiens
ttcttgcaagaaaaagaaaaaaaatggcaattttgcttaaaaattggtcccttcactctctctgagcatcaaaggtagtaaaaatccggtgcctattttcttacctataatgctcaggggagatgaatgatttcacctgagagtggcttttatgccctcctttgttatattattccataaaacatggaagattggaggaagaaggagtcagggatgagtgagcatgctgctgtcctcccagaattcctttgtaattaattggtaaaagtatgaataaacaaatccactaatgttttcttgaatggctaatttattaatgaatttcaaatataaattcattattattcttcacaaatatagttctagttttaaagattttctttgctttttattttttaaatatttttatttactgttaaagttatttaatatattgttgtttctctctttccattgtaatgtaaggcacatgaggacagggcctatgtctatgttcttctttacataccccaatgattagaatagtgactggaacatagtaggtactcaagakatacatacaaaatgagtgatttttatttttatgttcaacctcttaacttatc

SEQ ID NO: 903995 - DNA, 504 bp, Homo sapiens
aacatgaggggaaaaaactccgatgtcaaagaccctgctggggaagctttggaagaaaacacaaaattatttctcaatgataaggacagtattttacatagagagtcaaaatagaatagttgccctttagcataatgtttacagagagaaaaatagtctacagcctgttagcttttaggatttttttttttctttttgagatggagttttgctccttttgcccaggctggagtgcagtggcgcaatctcggctcactgcaacctccgcttccagggttcaaatgattctcctgcctcagtctcccaaatagatggaattacaggcacccttcaccatgcctggctaatttttatatttttagtagagatggggtttcrccatgttggctaggctggtcttgaactcctgacctcaggtgatccacctgccttggcctcccaaagtgctgggattacaggcgtgagccaccacgcctggccagctttcagaattatgtacagata

SEQ ID NO: 903996 - DNA, 634 bp, Homo sapiens
acatggctttgtttttctcactgtcctggtcatcttgtgtgaaacaatgtttaatctcttaggtttcatacaggaatttaatgctcaaaaatgacacaattcttcagctgtattctaatayattttgtactataggctgtattttatcaataccacctattgctttaccttcttttcagaagcgcccccagacttttaattcagacagagctttgggtcaacaaatttcttagatagcttctatatcaactgctgtcaagacaagattctcttgattatacttgtcctattgatttttttaactctaagtttttagacttatctctgctacatttcatctttttatttttttaattgacacagagtttgcatttgtcgcccaggctggagtgcaatggcacaatcccggctcactgcaacctccgcctcccaggctcaagcaattcttgtgcctcagcctcctgagtagctgggattacgggcatgcaccgctatgcccagctattttttgcatttttagtagagacaaggtttcaccatgttggccaggctggtctcaaactcctgacctcaagtgatccacctgcctctgctacctttcaacttcttgccattgttttaatctactaagaga

SEQ ID NO: 903997 - DNA, 593 bp, Homo sapiens
cagaattgaaactttcttttgattgagcaytttggtaactgtctctttgtagaatctgcaaagggatatttctcagaggtttgaggcctgtggtgaaaaaggaaatatcttcatgcaaaaactagatggaagctttttgggaaacttctttgtgatgtgtgtattcatctgacagagttgtacctttcttttcattgagcattttggacggattcttttttgtggaatctgcaaagggatatttgggagcccttcaaggactacaatgaaaagggaaatatcttcacataaaactagacagaatctctctgagaaacttctttgtgatgtgttcattcatgtcacagagttgaacgtttctttggattgaccagttttgaaactctttttataaaatctgcaaagggatatttggaatccgtttgaggcctatggtgaaaaagcaaatatcatcacataaaaaaaagacagaagatttctgagaaacttatttgtgatatgtgcattcatctctctgatttgaaccttcctttgattgagcagtttgtaacattctttttgaggaatctgcaaaggtatatttctcagtggtt

SEQ ID NO: 903998 - DNA, 576 bp, Homo sapiens
aatatcttcatataaaaactagagagaagttttttgaggaacttctttgtgatgtgtgctttcatctcccagagctgtaccattcttttggttgagcagtttggaaaccgttttttgtagaatctgcaaagggatatttctgagcgatttgaggccaatggagaaaaaggaaatatcttcaaatgaaaactagacagaagctttatgagaaacttctttgtgatgggtttattcatttaacagagttgaaactttcttttgattgagcagtttggagactgtctttttgtagaatctgcaaataaatatttgggatccctttgtggccaaaggtgaaaaagggaatatcttcacataaaaactagacagaagctatctgagaaacgactttgtgatgtatgcattcatctcacagagttgaacctttctttttcttgagcagtttggaaaaagtcttttgtagaatctgcaaagggatatttgasagccctttgaggcatattttgaaaaaggaattatcttcacataaaagctagacagaaattttctgagaaacttttttttgatgtgtgcatt

SEQ ID NO: 903999 - DNA, 631 bp, Homo sapiens; identical to SEQ ID NO: 901496

SEQ ID NO: 904000 - DNA, 594 bp, Homo sapiens
catcacaaagaagtttctcaaaaatcttctgtctaatttttatgtgaagatattccctttttcactgtgggccttaaaggaatctgaaatatccctttgccgattctacaaaaagagtgttgtttccaaactgctgaatcaaagaaagattcaactctttgagatgaatgcacacaacacaaagaagtttctgagaaagtttctgtctagttttatgtgagtatatttcctttttcatgataggcctcaaagggatccctaatatccctttgcagattttacaaaaagatcaaaactgctcaatcaaaagaaagtttcacctctatgagatgaatgcacacatcacaaaaagtttctgagaaagtttctgtctagtttttatgtgaatatgcttcctatttcaccataagcctcaaagggatcccaaatatcccttagcagattttacaaaaagaatgttaccaaactgttcaatcraaagaaaattacaactctgtgagataaatgcacacgtcacacagaggttcctcataaaccttctgtgtagttatctgaagatatttcccttttcacattttaccacaaagggctccc

SEQ ID NO: 904001 - DNA, 594 bp, Homo sapiens
catcacaaagaagtttctcaaaaatcttctgtctaatttttatgtgaagatattccctttttcactgtgggccttaaaggaatctgaaatatccctttgccgattctacaaaaagagtgttgtttccaaactgctgaatcaaagaaagattcaactctttgagatgaatgcacacaacacaaagaagtttctgagaaagtttctgtctagttttatgtgagtatatttcctttttcatgataggcctcaaagggatccctaatatccctttgcagattttacaaaaagatcaaaactgctcaatcaaaagaaagtttcacctctatgagatgaatgcacacatcacaaaaagtttctgagaaagtttctgtctagtttttatgtgaatatgcttcctatttcaccataagcctcaaagggatcccaaatatcccttagcagattttacaaaaagaatgttaccaaactgttcaatcgaaagaaaattacaactctgtgagataaatgcacacrtcacacagaggttcctcataaaccttctgtgtagttatctgaagatatttcccttttcacattttaccacaaagggctccc

SEQ ID NO: 904002 - DNA, 561 bp, Homo sapiens
cattctttatggacaacatgcaaagggatattttggaacccttggaggcttactgtgaaaaaggaaatatcttcacataaaatgtagacagaacctttctgagaatcttgtttgtgatgtgtgcatttatctcacagagttgaactttttatgattgagcagtttttgaaacagtatttttctaggatctgcgaagtgatatttgagggcactttgaggcctatggtgaaaaaggaaataccttcacacaaaaactagacagaagctttctgagaaactgcattgtgatgcatgcattcatctcacaatactgaccttttcttttgattgagcactttggaaacattctttttgcagaatctgcaaagggatatttctgagctgtttgaggcctatgatgaaaaagtaaatatcttcatataaaaaacagagagatgcgtctgagaaacttctttatgatgtgttcattcatcttacagaattgaacatttcttttgattgagcagtttggagrcagtcgttttgtggaatctgcaaagtggtatttgggagccctttgag

SEQ ID NO: 904003 - DNA, 574 bp, Homo sapiens
tctttttgtagaatctgcaaagggatatttgtggacactttgaggcctacgttgaaaaagtaaccttttcacatgaaaactagagagaagatttctgagaaacttctttgtgatgtgagcattcatctcacagagttgaaactttcctttggttgagcaatttgtaaacagtcttttgtagaatctgtaaagggatatttgggacccctttgaggtctaatgtgaaaaaggaaatatcttcaaatagaaactagacagaagttttctgagaaacttatttgtgatgtgtgcattcacctcaaagagtttaacctttcttttgattgagcagtttggaatcagtctttttctagaatctgcaaagggatatttttgagggatttgaggactacagtgaataaggaaatatcttctaagaaaaactacacagaagctttcagggaaaattgtttgtgatgtgtgcattcaactcaaggaattaaaatttttatttgattgagcagttaggaaacagtcttttggtagarcatgcaaattgatatttgggagtcctttgagggcctatggtgaaaaa

SEQ ID NO: 904004 - DNA, 564 bp, Homo sapiens
ggtttatatgcgaagatatatcctttttcaccacaggcctcgaagggttctcaaatatccctttgcggattcttcaaaaacactgtttctaaatttctcaatcaaaggaattttcagttctgtgagatggatgcacacatcacaaagaagtttctcagaaatcttctgtctagtttttatgtgaagataattactttttcaccataggcctcaaatcactgagaaatatcccattgcagattcttgaaaaagactgtttccaaactgctgagtcaaaagaaatgttcagctctgtgagatgaatgcacacatgatgaagaaatttctcagaaagcttctatctagattttatgtgaaggtatttcttttttcaccataggcctcaaacccctgagaaatatccctttgcagattctagaaaaagactgttttcaaattcwtcaatcaaaagaaagattcaactctgtgtgatgaatgcacacatcaccaagaagcttctcagaaagcttctgtctagtttttatatgaagatatttcctttatcaccataggcctcaaagcacc

SEQ ID NO: 904005 - DNA, 640 bp, Homo sapiens
ctcaaatatcccttttcagattctacaaaaagactgttttcaaactgctcaatcaaataaatatttatctctgtgagttgaatgcacaaatcgcaaagaagtttctcagaaaacttctctctagtctttatgtgaagatatttcctttttcaccataggcctcaaagcaccctcgaatatccctttgcagattcttcaaaaagactgtttccaaactgctcattcaaaagaaagtttcaactctgtgagatgaatgtgcacatcactaagaagtttctcagaaatgttctgtccaatttttatatgaggatatttcctttttcaccatatgcctcaaaccactcagaaatatccctttgcagatcctacaaaaagactgtttacacactgctcaattaaagaaagattcaactccgtgaaatgaatgaacacatcacagagaagtttttgagaaagctcctctagttgtaatgtgaagatattccctttttaaacatgatcctcaaagggatcccaaatatccctttrcagattctacaaaaggactgtttccacactgctctatctaaagaaagtttcaaatctgtgagataaatgcacgcatcaaaaagaagtttctcagaaatctgtctagttttta

SEQ ID NO: 904006 - DNA, 625 bp, Homo sapiens
tctgcattaatctcataatgttgaatctttctttggattaagcagttttggaacactgtttttgtagaatctgcaagtgggtattgtgggcscttagtggactatggaggaaaaaaatatcttcacgtaaacactagactgaagcattatgagaaacttctctgtgatgtgtgcattcaactcacagagatgaacctttctattgattgagcagttttgaaacactctttttgtagaatctgcaagtggatatttgtagtgcttggtgtcctatggtggaaaatgaaatatcttcacataaaaactagacagaagcattctcagaatcttctttgtgatgtcagcattcatctcacagagttgaacttttgatagaccagtttggaaacagtatttttgtagtatctgcaaatggatatttggagtgctttgaggcctattttgaaaaggacatatcttgaaatgaaaactagacagaagcattaggagaaactgctttgtgatgtgtccattcaactaacagagtttcacctttcttttgactgagaagttttgaaacagtctttttgtagaatctgcaagaggatatttggagcgctttgaggcctatggtggaaaagggaat

SEQ ID NO: 904007 - DNA, 631 bp, Homo sapiens
tgatgtgtgctttcatctcacagagttgaacctcccttttgattgagcagtttggaaacactcttttggaagtatatgcaaatggatattttgagcgttttgaagcctatcgtgaaaaaggaaatatcttcacataaaaagtagacagaagcattctgagaaacttctttgtgatgcatgcattcatctcacagagttgaaactttcttctagtggagcaatttggaaacagtctttttgtagaatctccaaatggatactagtgagctgtttaaggcctatggtgaaaaagggaatatgttaacataaaaactagacagaagcattctgagaaacttctttgtgatatgtgcattcatctcacagagttcaaactttcttttgattcagtgctttggaaacagtcttattgcacaatctgcaaagtgatatttggaatgctttggagcctatggtgaaaaaggaaatatcttcacttaaaaactagaaagaagcattctgagaaacttctttgcaatgtgtgcattcatctcacagagttgaaactttcttttgattgaacagtttrgaaacagtccttctgttgaatctgcaaatggatatttgtgagccctttgaggcctgtggtgaa

SEQ ID NO: 904008 - DNA, 634 bp, Homo sapiens
tcagaaacttcttttaaatgagtgcattcatctcacagagttcaacctttcttttgattgagcagtttggaaatcatctttttctggaatctgcaragggatatttctgaatggtttgaggcctgcagtgaaaaaggaaatatcctcatataaaaactagacagaagctttctgagaaacttctttgtgatgtgtgcatccacctcacagatttgaacttttattttgattaaggattttggaaacagtctttttctagaatctgcaaagggatatttctcagcggtttgagtcttatggtgaataaggaaatatgttcacataaaaactagacagaagctttcttgtaaacatcttatgatgtgtgcattcctctcacagacttgaaacttccttttgattgagcagtttgggaacagtcttttggtagaaactgcaaagggatatttgagtgcgctttgaggcctatggtagaaaattaaatatcttcacataaaaactagaaagaagctttctgagaaacttctttgtcatgagtgcatttatctcccagggttgaaatttcctttgattgagcattttggaaacagtctttttgtggaatctgcaagaggatatttgggagcccttcgag

SEQ ID NO: 904009 - DNA, 702 bp, Homo sapiens
ttaccactgaccccacagaaataaaaatagccgtcagagaatattaagaagacctctatgcacacaaaccagaaatctggaagaaatggataaatccctggacaaaggaaccctcccaagactgaaccagaaagaaactaaatctttgaacagaccaataacaagctccaaagttgaatcagtcatagtctactgatgaaaaacagcccaggaccagattcacagccaaattctaccagatgtacaaagaagagatgatagcatttctgtagaaactattccaaaaattgagtaggaggaactccctcctaactcattctatgaggctagcaacatcctgaaaccaaaagctggcagagacacacacaaaaaattcaaaacttcaggccaatatccttgacgaacatcaatgcaaaaatcctcaacaaaatactggcaatccaaatccagcagcacatccaaaagcttatccaccatgatcaagttggttttatccctgggatgcaaggctggttcaacatacacaaaacaataaatgtgatacatcacataaacagaactaaagacaaaaaacacatcattatcttaatagatgcagaaaaggctttcaacaaaatcaacamccttcatgttaagaagtctcagtaaactaggtattgaaggaacatgcctcaaaataataagacccatctatgacaaacc

SEQ ID NO: 904010 - DNA, 619 bp, Homo sapiens
acgccagtgagaatggcgattaataaaaagtcaggaaacaatagatgctggtgaggctgtaragaaataggaatgtttttacactattggtgggaatgtaaattagttcaaacattgtggaaaacagtatggcaatttctcaaggacctagaaccagaaataccattgacccagtaattcaattactgggtatatacccaaaggaatataaatcattctactatgaagacacatgcacacatatgtttattgcagcactatttacaatagcaaagacatggaaccaacacaaatgtccatcaatgatagactggattaagaaaatgaggggggctggcatcctatatgacttgcacccagatcaagaaacggcattcacagcatccctgaagccccccttgtattcctaggcacagtcactaactctcatccaaaggagccctctatctgatttctaacaccatagattaacttttctgtttgatctttatgtgaactgattccatgatgatttatgtatctggattcttccactcaactttttttgtgtgtgtgggctttatccatacttttgtatagagatgcaatttctcattcattctcatttctgtattatacc

SEQ ID NO: 904011 - DNA, 630 bp, Homo sapiens
tccacagggctacaggcattgttagaagtttggactgtttggcttatcaggtgctgtgcatctttctgagtcccagtgttgttaatcaacatagacggmagactagttaatgctgctgttagtaagactgtggcaaagattagaaggttatcaaacagatataaacaggagttctaggattcctatctaacatatgaaattaacaactaataggtatctttcgttgatagttgatttgattgagtgcatgtggataaaagtcaacaagtgaacaacttgattgtctgctgaattaatagaatggaagaactttaaatggttctgaaagctaatttaattcagaaacctccgtgagatttcagctcttttgtgaaactagtgaataaaatgttggcaattcattgagaataaaaatgtgagcattagcttcttctgttcttggaatttttaaaatgtgtataaaaatgttttttacaaggagggagcatttaacttaggagtatgctcatattatcctctaaacaaacactgggaattaaaacaaaggaaaaccgccttttaaatttgccttgagtttacagtccttcctatttcagtctctctcttgcatttgtcttctcagacattttc

SEQ ID NO: 904012 - DNA, 634 bp, Homo sapiens
cctcattcaatgctttgtaaacacactattatgatatctttccctttctagcgatgtatgtgggctttcctatagtcatttcagtagatgctatagatattatggtatttgggraactatatttcaatgtaaagaaggcaaggtgtcatgctttgacattgatttggtgggtaagagtgagaaagtgcaagtgtctatgggaatacacaacatacttaatacctttgaagtatgtactgaagacttgcagtgaggaaatgcccttgtacttctcctttaagagggtattttttatatgtaagcttttcattggtttactctaagcatcctagttttttggctgctgagtgcatgaacgatatcttggggccttttattactttcttaataataatcgccttctcattggcaagggagtcacctcccaatggtaggggaattacttaggtctctctctgtgctcgtgtgtgtgtgtgtgtgtgtgtattttatgcaggcaagttggatttttgacgtgtactttgagccaagccaagtacaaataattttaatttcctgaaacaagaatttgaattaagggtgccagaggctagatatcaccattaaacctcgtaattctagcttgaacatggct

SEQ ID NO: 904013 - DNA, 603 bp, Homo sapiens
gcctggtgaaaaaacccagaaggatggaartaaaatgcttctatttacgtttcgtgactaaaatcgagagctctgtgatctatcttcctggagacttaaatttaagcgtcattttttatatttttttgtcatgagccaaactcaaaatatacttttaacatatagtcatttaagattaacaaagaataattttcaggatacagtaaacatgaaaatgtggggggtggggtgcaggggatgagtgtgtgtgttcaactgatgtgttggcaaaaagagagcctgtgcagatttaaacagatgaaaaagaagagaggagagagggaaaagggaggcagagaatgagggaggagagaaatcaccctttgctaagtggctggcaggatcagttccctgtcttttttcttcccaaagatcctagaaagtcagatgtcagtatccccaatttgcagatgaggaaactagccatttgtccaggccactcaactagtaagtcatagagctggattgtaaaaccaagtcttctaacccaaacctgcaacccattttcactgtagcccattaatgcaggtcttgcctattaggggaaaataagctttgaaagca

SEQ ID NO: 904014 - DNA, 668 bp, Homo sapiens
ttataaaacactgaattctccagctccttgcctactccctgctgctgctgtttttctgtctcctggtttctaatttctccatcactttgytgcacatcaaaactatttagagggaatggcagatttagatttcactccagcctgagtccgttgaggatagacaattaagggaccttgagccaagtccctttatctctctaagtttccattttatcatctgtaaaatagaggggttgaaacattaatatttcttcccatattctgtagttctttggagaatttatgttctcaatcacactatgagtggtataacaacaaccaccacatataaaaagggaacaaaatttgccttaaaatgtcaacaaacatggtgcagcaaggttattacacacatcagaggaggaaggtttttgtaagtcaagttcccaaatgagcttcttctttgtctagttttagtcattctgcagggaagtgggtggcatacaagtcttgagtataaaccagatcccaaattcagaggtccattgtaagactgcaatatgccatcaggagcatgtataaatcattgttttttgagggtttgccatctacaagtgttttgagtgttgatgcagactagaaaactttctgaacacaacctccaatccttggtgtgtgatcctgtctga

SEQ ID NO: 904015 - DNA, 668 bp, Homo sapiens
ttataaaacactgaattctccagctccttgcctactccctgctgctgctgtttttctgtctcctggtttctaatttctccatcactttgttscacatcaaaactatttagagggaatggcagatttagatttcactccagcctgagtccgttgaggatagacaattaagggaccttgagccaagtccctttatctctctaagtttccattttatcatctgtaaaatagaggggttgaaacattaatatttcttcccatattctgtagttctttggagaatttatgttctcaatcacactatgagtggtataacaacaaccaccacatataaaaagggaacaaaatttgccttaaaatgtcaacaaacatggtgcagcaaggttattacacacatcagaggaggaaggtttttgtaagtcaagttcccaaatgagcttcttctttgtctagttttagtcattctgcagggaagtgggtggcatacaagtcttgagtataaaccagatcccaaattcagaggtccattgtaagactgcaatatgccatcaggagcatgtataaatcattgttttttgagggtttgccatctacaagtgttttgagtgttgatgcagactagaaaactttctgaacacaacctccaatccttggtgtgtgatcctgtctga

SEQ ID NO: 904016 - DNA, 647 bp, Homo sapiens
aaataataacatttatgagagagtcatattaataagtaaatttaacataagactgactggtaattgctacagcagaatcatttcagaagtgctaaagaaatgctacatttaattctagtaaataaaaaaatgtctttttgctagccgttgatatatgagaatgtgggaaagccatgaaactccttgcgtatgaaacaaagtcttattgtacttttcttggggtacataaaaagtaccttaagaaaagggtacagcagcaggtgaaaaaccatttgaaatgaaagattgactagcactgataaaaaagtattaaaacaatgatgtcttttggatttatttttataaactgtctttgaaaatgtttattagtaaaagaatgatagttatgtattaggggtatagtggacagtagatttcaaagggaagacagtagaaacagaatgattacattttctaactcatgagaaggaagcaattagccaagccacagatggagaatataaagggagagatagattttagaaacattttaaagtcttggacttgctgactggccacctgtgagaatgagagtagtgaaatttatrgcttgaacaatctgtagattttgtgacattaacagatagcaaccacagaagtaaaagaca

SEQ ID NO: 904017 - DNA, 539 bp, Homo sapiens
agttttataattttaggtcttatattcagatctttgatcctttttgagctaatttttgaatatattgaggtccaactttattgttcagtatgtgtatatctaattttttcagcatcatttattgaaagactgtcctttccatatcgaatttccttggaacttttaatcaaaaaccatttgatcatatacatgagggttcctttctgggctctgtattctattccattggtctatatgtctgcctttatgccagttctgtactgactgttttgattataggagttttgtagtcactcttaaaaatcagcaaatatctttcagcgatattctcctttactcaagattgttttggctattaagggtccttagagatcacatacattttaagatgtttttctcctttttacaaaaagaaaagtcagtggaattttgatagggattgcattgaaactgtagatgttttgggtagtattgatatcttaacaataytacatctttgaacacaggatgcattaccatttagttatgtcttttaaatt

SEQ ID NO: 904018 - DNA, 586 bp, Homo sapiens
gcaatcaaacaaggaacaaaccacaaagatatacaggatgacctaagggaaagaaatttggagattcacataagtctcattcatgccrctttccctccatggaattgatcattgcttctaatttatctttcagcatagaatgtgtgctcagttgcctcatttttcaccccagccaactaagaaatacttgtttaaggttgaaatcaacactgaacatcataaaacatagttcagttatacactttttataataggatatattaatgctttgtgtgtaccaggcattggtctaaatattgaacaggtatgaacatttaatttgcacaaaatttaatgaagtcagtattattgttattaccacattgcaaaagaggcaagtgagacacagaaaagtcaaatgatttgctcaaagtcacatagttaataagggccagaagagggacacagacccaggtatctattccagagtctgtgcaccacaattttattttattttgtttacttattttttttgagacagtcttgctctgttgcctagtctggagtgcagtggcatgatcttagctccctgcaacctctgccttca

SEQ ID NO: 904019 - DNA, 601 bp, Homo sapiens
aaatcataaagacttaggcttatataattagtaragatgatttgatagacatatacaaaaatagtgaactcaaattttcactcagaaaatgtaaacttaaactatacttcaaggaaaatttttagcattatatgagaaaagaaagactaagaatcagtgatctaaacattcatcccaagaagtcaagaaaagaaatcttagcaaattaaacaaagaaaacaaagtgaaagaaacaaaataaaactaaaggcagcaatctgtgaaaaagaaccaaactctcaaaagaaagaatagactaataagatgtataacttgctgggaagactgatcaattatattgttttcttagagaagattgacttttgcttgtggcctgaaacttttctggggctaaattatcctcagtccaattacggactgagatggttaaaatactgactctattccttgtaactactagcttatttctgcttcactctcattcctggattggagtgctttggggctcccatcagaagcctacagttttttatttttttatttttttaaaccagaggcccatgcttctcagacccctaacttttctgcccagtcctatgag

SEQ ID NO: 904020 - DNA, 636 bp, Homo sapiens
gatataccaaatgtaaggaaattctccaaactgtgaaagtttcttacattgccaatgctaattcgcatttttaaaaaaatagtgatctatggatgcctatcctatagcaatcatgcaaaattttgggaataaatgagagatgaatgaatactaaacttgagcaggaaactgtcttcatcccatgagcctgattttagtccataaggattatgctgtgtctccattaaatcagaagtgttataattctacttttgacccattgccaaccgttattttaaatctaccaaatagccttttgttaagacgcttaaggggctaaacactgtggttcaaaaccataaaaagattcccggttgttgatcaggcaacataaaatgggttgtcttaagacctgggcaagcaggggttcacttctcaaataagcatccagatgtaacagaaggggctataaagatcttctgctttggtctcccgagtatgaattgttttgtgatggggcttcatctgtgtttgtagaatgtcatctttcccatttcrtccgatagaaaaatgtcatttctttccctgctctgcccaaatgagaattttaaggaagctgaacactgcgcacattccagccagcgagtgggagaaaaa

SEQ ID NO: 904021 - DNA, 600 bp, Homo sapiens
tgggtttaaaacctggctatgatttgaatgtgtcctcttcaaaagtcaggcactgccaatatgatagtattgagaggtgcrgcctttaagaggagattaggccatgagggctcctccctcatgaatgggattaaaggtttttataaaaggacttgacggagaaagttcgtctagctttcttccaccttctgccatgtgcagacagccttcttcccccagcaagacacaacgagtaggtctgcaccagacaccaaagctggtaccttgatcttggacttcccagcctccagaactatgagaaaataaatttctgttctttataaattacccagtctcaggtattctgttaatagcagcaaaaaaaaaaaaaaaaaaaagactaagacactgatttagccactcactcactgtgtgactttgggtgagctatgaagcctctatgtcttggtttcctgatctgtcataaaggttagtaacaaaggtacccacctcataaaactgttgtgaggattaaagaagttaatgtgtttaacatgcttagaccagtgccaggcatgtgaaggtgcacaaagcttgttagctgctattttattcactaca

SEQ ID NO: 904022 - DNA, 646 bp, Homo sapiens
cccggtacctcagatggaaatgcagaaatcacccatcttctgcgtcgctcacactgggagctgtagacccagtgtaagagctgttcctattcagccrtcttggcttccagctctctagttcttttaattgtgatgttaggtgtcaattttagatctttcccactttatcctttgggcatttagtgctgtaaatttccctgtaaacactgctttagctgtgtcccggagattctggtacattctgtctttgttctcattggtttcaaagaactttatttctgccttcatgtcattatttatccagtagtcatacaggagtgggtttccatgtagttatgcagttttgagtgagtttcttaatcctgagttctagtttgattgcactgtggtctgagagacagtttgttatgatttctgttcttttgtatttgctgagaaatgtttcacttccaattatgtgatcagttttagcataagtgtgatgtagtgctgagaagaatgtatattcggctgatttggggtggagagttctgtagatgtctattaggtccacttggtccagagctgagttcaagtcctgaatatttttgttcattttctgtctcttttatctaatattgacagtggggtgttaaaatctcccact

SEQ ID NO: 904023 - DNA, 638 bp, Homo sapiens
atgcattgaatctcagaataaaatggcgtgtggtaaatggcctatgtcagcttttactatattaagtcagaaaatatatgagttgaatgaattttcttggtagaatagcacatttgaaattttttagagaaaactaatttgtgtgagtttaacaattatattacatagaaaatatatgaacaactgtcattaattttatttactatttatgtatttgattttttaaataattacttagtaaacaaacagtaatagttggtgattacatgttgagtatcttccttagtataattaaagtatgattgcttttttaaaaatttgccttcataatattgaaaatataatttttaagaattttttaattattagattattctgcaagcatgtaaattttaatctgcaatgaacactgaactattcatcttaaaacttgactgtaaatgttacatcaataaatgaaaaatatacttactttagcaatatttctatagataagtagaaagagagcaagccagaatttcatattgctgtaacaaacctgcatcgtggaaaagatcagactagtgtactagaaaatgcctgcaagcmgcaaatctggatgctcatattaggagagttactgcaggtgacatctattc

SEQ ID NO: 904024 - DNA, 623 bp, Homo sapiens
gtgtgtgtgtgtgtgtgtgtgtgtgtagctgttataggtttttaaattttaggttaccataggcttgcacataacatcttataactcattattttaaatttattacaacttaacactaattatagaaacaaacaaataaagagaaaactaaaaacctctacactctaacttcatttccctacttttaaactttttgttgtttctattcatttcttattatactatgtttgaaattttggtagtaatttttgatggggtcctcttttagtctttctactcagcatatgagtagtttatacaccacaataagagttatcacattctgtgcttttctgtgtactttcaattactagtgagttttctaccttcagatgatttcttgctcatttaggtctgtttctttcagattgaagaattccctttagcatactagtaggacagttatgaggttgatgaaatcccttagcttttgtttctctctggggatgtctttatttctccttcatgaatacaggatatttttgctctaaatactattctaggataaaagttcctcttttwtatcactttatgtatgtctcccttgacctgcaattttccattgagaattatgctgccatttt

SEQ ID NO: 904025 - DNA, 633 bp, Homo sapiens
catttgaacaatgaaataagacagtagagatgcatcatgagcctcaacaatgatggggcatgttcagggtatgtctgcttgagatgatgggatgaaaatggtaatttacctctgtgatcttgctctctgaaatttataatctcaatctattcataagaaaaatctataatctcaatctattcataagaaaaacatcttatgtttttctattcataagaatagaaaatgtttatcatttcataagaatatgtttatctattcataagaaaaacatctaacaaattctaataaaacaataaaagcaaaattcctggtcagtattcctcaaatgttaaggtcatcaaaaccaaagaatgtctgtgacaccgttacagacaagatgaataaatactatgtgttatcctggaaggcatcgtggactgggacaagaacattaagttaaaatctgaaatctgaataagtatgcactctactttatactaatgtaccaacaatttatagtaattttaacaagtgcaccatattcatatactatgttaatcataaacgatactgtgtgcaggggcatttagaaattctccataatatattttaagtttttccrcaaatctgaaaatcttataaaatataaag

SEQ ID NO: 904026 - DNA, 669 bp, Homo sapiens
ctttctgacatggttaggctctgtgtccccacccaaatctcatgtcaaactgtaatccmcacatgtcaggagagggacctggttgggggtgattggatcatgggggcagatttccctcatgctgttctcatgatagtgagtgagttctcatgagatctgatggtttaaaagtgttgcacctctctctctctctcttgctgccatacaagacatgccttgcttcccctttgccttctgccatgactgtaagtttcctgaggcctccccagccaggcagaactgtgagtcaattaaatcccttttctttagaaattacccagtctcaggtagttctttatagcagtgtgaaaatggactaatacactttcttaaactaaatcttatgttaatataccaagagataagtccattactgtcacaaggaagtcagtgcaagtttctcaataaataaatatttagggttggagtttgaaattaaaactttcattttctaacacaagtcttgtttcaaagatacagactgttttacagaagacataccctacatatagtcttgaatgagattaaagggtgatgagtcacattccagataataatctataatttataccttcttatatacttctattcacttcctaaaaggtaaatttgagaaatttaatgtactta

SEQ ID NO: 904027 - DNA, 519 bp, Homo sapiens
tgtccaatactctttggaaatgagcaaacacattgtagattggtaccaataaaatatgttttcattgaaacagctagtatgtgtactttaaacwtcaatcattatcataaaactcattttcctttctgctttggcttccactaagcccagaaaaataatataaaatgacgctcttagtacatgggcgtacattttgggcatatttgctttttcctttaaaaatattactaatctgacagtattttcaagtgtcttactataagccatctcagatccttttttggaagtactagggtagagagggtaaataatgaataaacatgtgaaacatttcctttattttgatcagcaggaggaagaccaacgcttcttatcataaacacaagttcctgctatacacaacacatccttgaattctagggaagccaagatgtacatgaaatgactgcaggtcttaaaggtcttgaatctaattgtggcactggggcatatgtagagataaatatcacgtagcatatg

SEQ ID NO: 904028 - DNA, 573 bp, Homo sapiens
ttccaatcagtggtaactaaggacgccggcgacctagcaatagggaagccctgctgtccgcggctggtctggtcatgcctgccactctttcccatcccccttgccagcgcaatccacaccgcctgcttccccaatcccgaattattttttactacaaccctctcctgcccagggtttgtatcagaatggatttgtataaacacacacccaggagttatttacccagaaatcagcgaaacggacacttgttaacgttgcgggtttcacttgcgtgctggtgggcctggaaattgaggcacagttccaacaccagggcggattcaggcctttttccaggcatttgtgagaagccagtattctgtcaccaaacccatgagcacttttcaaatctcattaatccctactcgcaccctgcctccccataattccccccttcccccaaatagaacggtgagtgttgaatttgctttacattcggtcggtccgtcttaaatagggatttcccctcttacataataartggagcggccaggcaaaagaactgtggaccggaaattagcccccccttgtttc

SEQ ID NO: 904029 - DNA, 563 bp, Homo sapiens
acttttttactgaaaatgttcacctgcttttaattcaacttataataattagatctacttagtgtgtgggaattaaagttacttaacatggacaattgtagcaagtacacacaaagagtacacagagttgggtttgaatcctaactttgtcaactaataaggactgttttgcttgtcatttacagaaaatctaacccaaattggcttaagcaaaaatataaaaaataaaatgacagggatctttattagtggtcaaactttagacacatcaacctaggaaatcaagtgctatatttaaatactgtttctctccttatgataacttacttttcatccattgggtgcaattctctggcaagctacattagataagagctaacaggtcccagttaattttcaagttcactagagttagaaagaacatattttttgatatatcaaattaaagatgaattcttttgtcttaggtcatggccctatttctgaaccaattactttggccagggtttgaaattggccaaacccaattcatatatayacctccaaaaccatcagggataggt

SEQ ID NO: 904030 - DNA, 634 bp, Homo sapiens
cgcgtcccctgccccacgacaagccccagtgtgtgatgttcctcccgctgtgtccaagtgatctcattgttcagttcccacctaagagtgagaacatgcagtgtttggttttctgtycttgagacagttcgctgagcatgatggtttccagcttgatccatgtccctacaaaggacatgaactcatccttttttatggctgcatagtgttccatggtatatatgtgccacattttctttatccagtctatcattgacagacatttgggttggttccaagtctttggtatcgtgaacagtgctgcaataaacatatgtgtgcatgtgtctttatagcagcatgatttataatcctttgagtatatacccagtaatgggattgctgggtcaaatgataattctagttctagatccttgaggaatcgctacactgtctttcgcaatggttgaaccaacttacactcccacccacagtgtaaacgcgttcctatttctccacatcctctccagcatctgttgtttcctgactttttaatgatcaccattctaactggtgtgagatggcatctcattgtggttttgatttgcatttctctgatgaccagtgatgatgagcatttttttatgtgtctgtt

SEQ ID NO: 904031 - DNA, 634 bp, Homo sapiens
cgcgtcccctgccccacgacaagccccagtgtgtgatgttcctcccgctgtgtccaagtgatctcattgttcagttcccacctaagagtgagaacatgcagtgtttggttttctgtccttgagacagttcgctgagcatgatggtttccagcttgatccatgtccctacaaaggacatgaactcatccttttttatggctgcatagtgttccatggtatatatgtgccacattttctttatccagtctatcattgacagacatttgggttggttccaagtctttggtatcgtgaacagtgctgcaataaacatatgtgtgcatgtgtctttatagcagcatgatttataatcctttgagtatatacccagtaatgggattgctgggtcaaatgataattctagttctagatccttgaggaatcgctacactgtctttcgcaatggttgaaccaacttacactcccacccacagtgtaaacgcgttcctatttctccacatcctctccagcatctgttgtttcctgactttttaatgatcaccattctaactggtgtgagatggcatctcaytgtggttttgatttgcatttctctgatgaccagtgatgatgagcatttttttatgtgtctgtt

SEQ ID NO: 904032 - DNA, 622 bp, Homo sapiens
tatcagttctaggagccttttggtggagtctttggtgttttctatgcatagaatcatattgtctgcaaagagaaatcatttgaattcttcttttcctatgcagatgcattttgtttctttctcctgggtgattactctggcttgcactttcagtacatgttaaatagaaatggtaggagtgggcatctttgtcttgttatagttctcaggagaaatccctccagtttttgcccattcagtatgatgttggctgtaggtttgtgatagatggttcttattattttaataagatagtaagagggctcttattatcttattatatccttttgatgcctagtttcttgtgggtttttatcatgaagggatgttggattttatcaaaagccttttccatgtctattgagatgatcatatggtttttgtttttaattttttaatgtggtgaatcacatttattgatttgcaaatattgaatcaacctagtatcccatgaatgtagcccacttgatcatggtgaattaactttttaatgtgttgttggattcaatttgctagtattttgtttargatttttgtggcaatgttcatcagggatattggcctgcagttttatttttttgtt

SEQ ID NO: 904033 - DNA, 649 bp, Homo sapiens
aaaagaagaaagaggctagatattgcagttgggtwggcaactaattatttatgtaaattagaggaatctgagggagtacaagagggacatttactcaaatgctaaagtttaggcagggcagtttgcaagactctgagcaaattggggaaaaaaagtcatctttcttaattatattttacgaccatctgttatgtttgttgtaataactaaacaaatcttactctaactacaagtatatagtagcttttggagttatggtagctaaagtcttaggaaaacatagatggagtatagaatgcttgaactgagtcataatggataggtaggaattagttagataaaaaagagggagtacattgtagcagagggcacacaatgagtaaggtcacagagaaataaaataccatggcaacactgaagaaatacaagctgttccatatttttgctgcttgaaacacatgttagggaacagttagagctaaaatgggagagattgacagagcctggtcattgtggttctggaataatgccaaattttatggcttagtagacacaaatgccataagattaacacatacaggaagagataatacaggaatagaaggtagaaatggtttgaacatgttgagtttgacacacttatagaccc

SEQ ID NO: 904034 - DNA, 649 bp, Homo sapiens
aaaagaagaaagaggctagatattgcagttgggtakgcaactaattatttatgtaaattagaggaatctgagggagtacaagagggacatttactcaaatgctaaagtttaggcagggcagtttgcaagactctgagcaaattggggaaaaaaagtcatctttcttaattatattttacgaccatctgttatgtttgttgtaataactaaacaaatcttactctaactacaagtatatagtagcttttggagttatggtagctaaagtcttaggaaaacatagatggagtatagaatgcttgaactgagtcataatggataggtaggaattagttagataaaaaagagggagtacattgtagcagagggcacacaatgagtaaggtcacagagaaataaaataccatggcaacactgaagaaatacaagctgttccatatttttgctgcttgaaacacatgttagggaacagttagagctaaaatgggagagattgacagagcctggtcattgtggttctggaataatgccaaattttatggcttagtagacacaaatgccataagattaacacatacaggaagagataatacaggaatagaaggtagaaatggtttgaacatgttgagtttgacacacttatagaccc

SEQ ID NO: 904035 - DNA, 544 bp, Homo sapiens
aggcattttgcacaatggtggcagaggcatcgggatgtsaatttagcctcccagtctaactgtgtagaaggacaatcccacccttttctgctcttactgcgttttttccccttttttaaagttagctactttaaaatcacttatagaaatcacttccacacaaaacttctttttgtgatttaacctttaagtgataaaatttcttgtgaattccaaaaatccctacactttacttttattcattaaaatactgtacctatactttcaacttttaaaagtgttattataaaatgctcattaaatttatgtaatatggaaagtaaaagggaacaaaaatctgctgtctgcatttcctagtaccattcttcagaggtatgcactgtgtacatgcgctccataattatgtaaacataaatcacatgttttttaacataaatggtatcatctgttacatgctaatccacaacatgaatttttatataaatatattttgaacatatttccatatcaggacacataattgtttcactgctttcaatagttg

SEQ ID NO: 904036 - DNA, 544 bp, Homo sapiens
aggcattttgcacaatggtggcagaggcatcgggatgtgaatttagcctcccagtctaactgtgtagaaggacaatcccacccttttctgctcttactgcgttttttccccttttttaaagttagctactttaaaatcacttatagaaatcacttccacacaaaacttctttttgtgatttaacctttaagtgataaaatttcttgtgaattccaaaaatccctacactttacttttattcattaaaatactgtacctatactttcaacttttaaaagtgttattataaaatgctcattaaatttatgtaatatggaaagtaaaagggaacaaaaatctgctgtctgcatttcctagtaccattcttcagaggtatgcactgtgtacatgcgctccataattatgtaaacataaatcacatgttttttaacataaatggtatcatctgttacatgctaatccacarcatgaatttttatataaatatattttgaacatatttccatatcaggacacataattgtttcactgctttcaatagttg

SEQ ID NO: 904037 - DNA, 559 bp, Homo sapiens
taaatggagttaagcaatgaaaaatgagatgaaaaccacagatatcttttctaaataatgaagttatcaacattccagtataagcctactgtagttctctctctttcacacagtttgtgctaagagttttcacttcttgtttcagtataccatagaaattcaagaaaatactctaaattcaaatttgctcgagattagagtaattgatttggatgaagagttctcagctaactggatggcagtaattttctttatctctggaaatgaaggaaattggtttgagatagaaatgaatgaaagaacaaatgtgggaattttaaaggttgttaaggtatggtataattatcctaaatattttgttttcttaatcttttttcaaaatgttaaacttaaaataaaatgatgctaacatttcacaaacttggcttagtgaaagaataaaaattactgtgttttaaatatatatataacatagagctttttaatatagtctttctgcttataatcattttagaaaaacaggtattgaattttaactggaracagtttgtcaatacag

SEQ ID NO: 904038 - DNA, 632 bp, Homo sapiens
gtccatttttaaaataatatttaatgctaggatgtgttggcagtaaggagcagtgttagtagaaaagagatatattaattttcattgatctttctgaaaccctttaaagtatttttggttttagatcatattaaaggggtgattttaatgagctaatcacttgaagattattcttatctgtgtatgtgtgtgaagcaaagtattctggaaaacataaattcaggtagatattttgaatatatctagatgttaaaggtaattattatccacacaaaatatgttttgaactaatccattctaaatgtcttaagaaaagtacatttaccgtaatgttcaactaacttgggggaggaaaacatgaaagttaaaattttcacatcctgttaagacttcaatttattttaaacaaatccttagtcctttgttggtaatggctacatttatttttgtgcacagagatgtatgaaacagatttactctaaccccagcataaagaagttaggagccagagagttagctgtgaaacatctgattctcaagaagttccttcacctctctgagtcataagttttagaatttttaaagtagaactaattcaggagtgacatkctatggcactggatgacatattg

SEQ ID NO: 904039 - DNA, 627 bp, Homo sapiens
gacatcttagggatgggggagaggttgtaattattctytttaccacatgtagtgtttgtgtagtcatttgcatttgcttctaatgtgaaggccttgaccaacaggccatgttggatttaaatagctcctttaatcagtttgcatcctagatattattttgaccattgaggaggctttgcctaccacagtttgattaattatacactgttgttttttctctggtgaattcctagaggagaatcttgtgttttgatttctaatattttaattgaatttaagtaagaaaaactcacaattgcccacatgcaatcagcataatagagggggttgtattttagaccatgggtcatcagattaatcagactattactagtcctgccagccatttagccattaaaacaagtacacatacacaaaacaaggatagttactgaagtgacagaattggcccaaagctagactgaccaaagttttgaataaactgaagaaccaaactttgacatgcttatctgaatgtaattggaaattcagatctctatacagtcacttatccttaagttctaagtcatcgcatttcatctgttatttataatctcatttgtatttcagaaaaaaattcaatacttc

SEQ ID NO: 904040 - DNA, 457 bp, Homo sapiens
atcatcttttaattttttaaaataagattaataaaatattaactggccgggcatggtggctcacgcctgtaatcccagcacattgagaggcagaggcgggcggatcatgaggtcaggagatcgagaccatccyggctaacacggtgaaaccctgtctctcctaaaaaatacaaaaaaattagccgagcgtggtggtggcagacgcctgtagtcccagctgctggggaggctgaggcaggagaatggcgtgaacccgggaggtggagcttgcagtgagccgagatcgcgccactacactccagcctgggtgacagagcaagactccgtctcaaaaataataataataataaaataataaaataaaataaaatattaaccaagtgatagtttcctatgcttttatcaattcaattcaccaaacatttattgaattcctattataggtcttatgctatac

SEQ ID NO: 904041 - DNA, 608 bp, Homo sapiens
tggcataatctatggaggaagttgtgtctgaaggagttcagagtgtgaraggagcctaggagggttactgaagcaactcaagaaagaccatgtagactacattaagtagtttacattttatcttcacagcaatgagaaagcattggcggttttataaacagagtttcagaataatcagatttgagttttagagtttctgagttttagaaaaatcactctcaatgcaatttcagtttcagttttgggaatagaatctattttgtttccctttaaaagcaacattaacaattttttgacctattacattttaaaagcctatattaaaggtagtttgttggccgggcacggtggctcatgcctataatcccagcattttgggaggcgagacgggcggatcacgaggtcaggagattgagaccatcctggctaacacggtgaaaccctgtctctactaaaaatacaaaaaaaaaaaaaaaaaaaaaaatagctgggcgtagtggcgggcgcgtgtagtcccagctactcgggaggctgaggcaggagaatggcgtgaacccggggggcagagcttgcagtgagccgagattgcgccactgcactccagcctg

SEQ ID NO: 904042 - DNA, 674 bp, Homo sapiens
ttttaaatcggcctctcaggtgcttatacaatgggcccatgtacaaagcgggcatggtagcagaatttgagggtatgcataagctcgacaaacaaaatttggccttatcagtagtttattgccactgttaaataccagagttgcaaaaagcagaaactaagtctgtgctcctatatggcgccatggcccagtgtggatcacttacccagcttgtggcagattgattatattgaattatttctattggatgtcttctatcatggaagaactgacaatttgtcctccctgctatagatgtctgttctaataagatcttttatgcccttatggcaaggattctgctaacattatcgtctatgaccttattgaatactttactcactgttatgatattctgtacatgtttccaaagaacagattttataacaaaagaagtatagcaatgaactcatgctacaaaaattcactagccaagcaacatttctcgacattcatttaagtcatacttggggtgcatggaagtgacaaaactttttaaaactaaaaaataagcaatcatgcagagggattagaatgagcaaataccaaaaggaacagaagatttgctcttttctttttaaatttattttgcaaatatatamatatttgtaatcggtccattggcattttattct

SEQ ID NO: 904043 - DNA, 664 bp, Homo sapiens
caggttgctacctgttcaactcacaagagtctttggtggccaggaacaagtcctcgtrtgctgtaatcccatgcatggttctcaactttctctctgctcagcccagcatttgtgctttccctccatttgctctaaatgctctccttccaaggatctctgcagaatgcattagtcttcttggtctcccagtccctcggtggcagatgttcctcctagctggtctagtcggccatcttgcctccatctctccagttccctttttggaagtcaaatttatttggtataatatagtcattccagtcttccagtacttactttgcacagtttaattttcaatcatatgtacttttttattgcgttgttttggttaaagcatgtctcttgcaaacagcatatagttgatattgctttttcattcattatgaaaatattttaattagagtgtttaatttgataaaatttaaagtagctaacaatgcagttaatttagttccaccattttataattgatttcctttaggcttcttgttttctgtttctccttctgtgttttctttgagagtaactgaatatttaaaattctatttaatttatctttggaatgtttagctctgtatctttgtattatatcatgatggttactctacaggttaacatatatatc

SEQ ID NO: 904044 - DNA, 694 bp, Homo sapiens
ggaacatggacaccacctcttgaaaggggagctgcaagactctaggaactagcagcatatatgtgatggaaagtatggttgtggccaattttgggaaagaaactgccacatgtacaatatttgtcagagtatgcttaccagccacccgccttggaatcatctagggcactgttttttgttttgttttgttttgttttaaaaaaagcattcctgcagctggagcccttcccccagggattctaattctctaggtcagtgctgagacctgggaatctgcatttaaacatcaggggtaattttgatggatactaacacttgaagacaaaaaattctgaacaaacgagaacaaaaaaaacaataagcaaaacaaaaagaggtgccaggtgctttttttttttatgtttttgagacagagtctctcactgtcacccaagctggagtgcagtgacatgatctcggctcactgcaacctctccctctgagattcaagcagttcttctgcctcagcctccagagtagctgagattacaggcgtgtgccactgccccctgctaatttttgtatttttagtagagatggagtttcaccatgttggctaagctggtcttcaattcctggcctcaagtgatcctcctgcctcggccttccaaaattctgggattacaggtgtgagycactccacctggcctccttt

SEQ ID NO: 904045 - DNA, 589 bp, Homo sapiens
tattagttggcctttatagaaaaagtttgccaacctctgatttagagcatgctaactgacaaaraaccagaagtataccattagcctcgatagaaaggccaaactaatttaatgtctccaaccataagtatataaatgcacaaaataatttctaaaataatatctaatttctcataaataatatctccatagttttacatctaaaacttagatgtttcttaaaatattgttcatataacaagatagaagtaaaattctttaattttgatgacacaaaatagtatgatttgcaaccagtgggaagaaaattaattaacattagagttatcaccaatgagagaaagggacaccaatcaagatagctagtacaacaaattattcccaatactataatgatccagtaatatgggaagcatagacatagacagcatacaaatatgagaaataatgtgtggaatctgaatggaaacaaaagaggaacctcagaacggtgacaacttcagttttgtaaatccagccatgtttaaggacttctggggcactgcagaacagctttttgtcattatttctttccttcttccaactccaa

SEQ ID NO: 904046 - DNA, 668 bp, Homo sapiens
tcaaaagacataaaatttcagctggataaacctagagtttacaagggtattgggaaatggattttaaaaaaatacttctgggagagtaatgttgcagkctttcaaaaaagcagtttgcgttaattaaggtttttaattctgtatacttctagggatttattctaagggaattcatatgattcacatacagattccaatatactaatctcagcattatgtatactaatgcaaatttgaaagcaatgaacattgatttaataaactgtcacattcatataataccatgtaggtattaacatagtaagaaaaaaagtattctaatatgaaaagctatattcatgacaaattattaatttaaaatcaagttaaatggtttatttataataatcctttctttctcatatctctttatatgcatgtagacaggataccaaaatgttagcagtgatattctctgggtagtgggattatcaattataaattttctttttgtattatttgtattttctaaatttcataaaataggtattattttataataaagttttctaaaattgcattgcatatatcatgtagcttacccttcttttttcttttaatttccaatttatgcattttctaatcacaagcaaggtcaagaaattgagagagaagagttggctgaagaa

SEQ ID NO: 904047 - DNA, 637 bp, Homo sapiens
aggtgctctgaatgcctggagacctgcctagacaagtgtcagagaggacccctgcaccccatactacaatctatgtccaggaagggttgggtggctcaggctgctggaccaggcaaatgggtgctccagatacctgcatttttgcctgcatgtgaagcagggagagacccactgcaccataatctattttgaggaagggtggagcagctcaagctgctgaactaggaaaatgggtgctccaaatgtctggagatctgcttggtcatggagcagagatagccttgctacaccacaatctatgtacttaaatggtggggtgactcaggctgttgaagcaggtgaatgagtactctgaatgcctgcagatctgctaggtgtggagcagagagaacctgactgcgccacaatctatgtccaggaaaggtggggtagctcaggctgctggtccaggcaagcaggtgctctgaatacctgctattttctctggggatggagaagagaggacaccactttgtaccccaatctcaggaaagcagggtasgtacaccagcagtggcacatgcagatcagttcctgcttgccaagctggactttgctgcaagtgttgccacccaggagaaactgcagctgtagtatc

SEQ ID NO: 904048 - DNA, 637 bp, Homo sapiens
aggtgctctgaatgcctggagacctgcctagacaagtgtcagagaggacccctgcaccccatactacaatctatgtccaggaagggttgggtggctcaggctgctggaccaggcaaatgggtgctccagatacctgcatttttgcctgcatgtgaagcagggagagacccactgcaccataatctattttgaggaagggtggagcagctcaagctgctgaactaggaaaatgggtgctccaaatgtctggagatctgcttggtcatggagcagagatagccttgctacaccacaatctatgtacttaaatggtggggtgactcaggctgttgaagcaggtgaatgagtactctgaatgcctgcagatctgctaggtgtggagcagagagaacctgactgcgccacaatctatgtccaggaaaggtggggtagctcaggctgctggtccaggcaagcaggtgctctgaatacctgctattttctctggggatggagaagagaggacaccactttgtaccccaatctcaggaaagcagggtacgtacaccagcagtggcacatgcagatcagttcctgsttgccaagctggactttgctgcaagtgttgccacccaggagaaactgcagctgtagtatc

SEQ ID NO: 904049 - DNA, 636 bp, Homo sapiens
atcttaaacaccctggcaaactatccagtacgtgctgttgcataaatgctgtagagtccgatggctaagtccctgatcctgggagtccaccagtgcagggttcaacttgctgcatcccttattattgagggaccccattactaagttctctccaagcctcaatttccctatttgtcaaattcgcataataataagtacctgcctctgtggttgttgtaaggattaaatgtaaagcagttagcactctgcctggcacatcgtgactgctcaattcattttatctacaatattattgttattgttgtcattgttgttttattaatacatgtggcttgaccaagataatatggtggcaaaccaataatttgtgtatatttggatacttcatgaatttctctgcaaccaccttttccacacctattgtatatcacgtgaacagttatgattctgtattgatgtcaatggggggccatctggagtggctgctgccattgtgctggctgcaacagggaggcactggctgcaacagagaggcacagctgggytacatgccctgccccttctaagttggggtggcagttccccaggtgccactccagctgcccaagccatggctgcagaccccagcatccctgt

SEQ ID NO: 904050 - DNA, 579 bp, Homo sapiens
ttttgtcattttcagctatagtactgtttgaattattttcatacaaataatttcctacataatctgcagtatttattctttctggttgaccatcaaatattccttctctaagccatttttttgcttcaagtaatgaagtctgactcacagaagtttttctactacaacttgtgtaaaaagctaaggctgaattttcaatgactgaataaggggactgatttgtgtaacaagttgcaggactttttgctgtttctttttctacattttcatgtactttaactttcaaaaagatactttttgatgttttgagattttcagtttgtctacataaattatcacttaagagcttaggtggcaccacagtctcaatagaaacaaggtttttatcattattgagagaattctgcatttctttacactttggggcagctgtgatctcaatggtctcacatgctaattcaaggtctttacaggcctctctgtactttagggtctttgcccattgatkgctaaaactggtgatttcactagtaccttgctctttttcatcaaaaaggtttttcactttgtccaaagatt

SEQ ID NO: 904051 - DNA, 645 bp, Homo sapiens
gactgaacaggcaagttgcagaatgacagaaaattttcgcacaccttgcctgtgacaaggaactaacatgaaraatttacaaggaattaaactatacaacaacaggaagaagaaccaaataaccctattaaaatgagcaaaggacgtgagtagacatttccaaagaacacatacaaatggataataaatatataaacaatgctcaacatcactaaccatcagggaaatgcaaattaaaactacagtaagatattatcttacaaaagccacagtgactattattaaaaactcaaaagtatcagatgttggtgaggatggaaagtaacaggaactcatcgacactgtagatgaggatgtggactaggacaacctctatggaaaatggtatggagtcttcccaaaacactggaaatagaactgccatttgatccagcaatccgactacggggtaactacccaaaggaaaataaatcattacttcaaaaagatatccatgcttctatgtttaccacaaaactattcttaataacacacatgtcaacctgagtgtccaccaacagatgattttataaaagaacacagcacatatgcacaattcaatactagtcaaccacaataagaaatgaaactgtgtcttttgcagca

SEQ ID NO: 904052 - DNA, 610 bp, Homo sapiens
acaatgtacattatttgggtgatattacactaaaagccaagaccactatggaatatatccatgtgcaaaagttgcactcatagcccttaaatttatcaaataaatgtacacacaaaaaagttaaaaatataaaataattaacagttgaccaatgatcttaaaattaaaatttagaccgggcatagtgtctcacgcttgtaatcccagcactttgggaggtcgaagcagatggatcatgaggtcaggagtttgagaccagcctggccaacatggtgaaaccccatctactaaaaatacaaaaattaaccagatgtggtggcaggcacctgtaatcccagctactcgggaggctgaggcaggagaattgcttgaacccaggaggcagagtttgcaatgagccaagatcgtgccactgcactctagtctgggtgacacagcaagacgccatctcaaataaaataaaataaaataatataatataawataatatgtaaaaaatgatcaataaatgaaattactatcagttgaaactcattaaatttaaagacgttttctactcaagtaactataagaacatgaatgtcaagtttcagatgggaaactattttca

SEQ ID NO: 904053 - DNA, 601 bp, Homo sapiens
aaattactatttgacaaaatttcttaattctgtgtctaataagcctaataataaagctgtttgtgaaggaaaatagtcatgaaaatttatgctcctttttataccaacatctgaaacaaagtggacttcgagatacagaaaagttactgctccacctgcccataattccatatcctaaatgttgcccgggagtcaaatagcctctaagtaaggcaccttttgattcttttctttacaaaggcccctttcaggctttactcagatgtagaacatgccacaaatctccccattcctcattacttatcccttccagagtctgaggctctgtctctggagatctcaatcctgggaccagtgggggcaattaacgtgcattatgcaggcttgagtatgtttcatcttcagagataatcatattggagacaaaaactacataatatgcatacacgctcatgtgcagtcacacacacacttacacacacacagatcaggctgttaacatagcagtattccttccagagtttcctctyctaatcttaataaattatctttgcgctaacaaactttttctgccatgagaggcaccattaccttcaaattt

SEQ ID NO: 904054 - DNA, 641 bp, Homo sapiens
tttttactttagtatgttccaatcatcaataacaatcttcctgtgtyaaactattggtttgtcttaagtgatgtcctaagtgaaacacacagtacactagctttgccttcaaagctttcttttacttaagtaatccagccacatagaaaaaaataaatattgaatagtatttttagacagtaagatagctctcccacccaagaccctcagttcttctaaaagaaaactgctattcctaagtcacatatagataatcagtgcatttacaaatatgtgtataaacacatggctttgggcatttaatttttaatttacataatgcataatattaacaggtaatagttttacatatttacaaggtacacgtgttattttgatacaggtatatagtatgtagtgaccaaatcaaggtaattgggatatctgtcacctcaatcatttatcattactttgtaagcacgtttttaaataaattatagcgtactaatcacacatttctgtactttatttcacttagaactacttcttggacatattgcttcttatcaaaatgtatacatctatcttaattcttaatggctgtgtagtttttcattctctaaatgtaacatgatttattgattcagtcacctattaataga

SEQ ID NO: 904055 - DNA, 650 bp, Homo sapiens
tcattatggtgatatgaatactgtccayatcagtgacattaattactgtcagttgagagaatacggtacatattcttgaagtaagactctttcatcaaaggtgacccaatgtctaccctttaaatctatattgtacacacttaataatataaggtcagtgaccacatgaaataaagatatggagtaggagaaggctgcaacagctacccacaatgcattatagaacaaacctagcactgccactatttcaatatgggcatagatgggatatatgattcttcagaactcactagatctgttaccaggctaaccagttattccccataaaactcatgacttcttacaaatcatttgctggaaaatttttatatcctaatttcctgagatgggctctacattgtggcagatggctttttgacctcttaactgtacactcaaattttatctggcttgtaaaagctctatgacatttagcacagactgtatcatacattctatatgcaatagaaaaaaggttcccaaggatataagctataaacaaagcgcttgtagtagtgtaatataagggagtaatagttgttgctatcgttattttttaattttaattgacatactaattatacatatttatgggataaaatatgatgctt

SEQ ID NO: 904056 - DNA, 585 bp, Homo sapiens
tctcataatgaaagcacagccatattgtgacacttgttattttatggttcactgaagagccgcaataacaaattttaaatacctatcaaatgtcataaaatgtcatttaatattgttcttsgtttgttaaagggaaaatgaaaactgataaagttcatgtatattttgtgctagttcaataaactaaataccatactctaagactttcagcaaacatacagtcaattgtaatatggtaatattaaataagagggtactacactttttcaagagaaagtggtcttattaaaaaggttattttaatgatgctctaaacaatttctttggctgcatcacagcataggttcagttcataataaaagttgcctttgaacgaagtattctaaatttttacaagactccaattctcctgtgcaattacggaatttgaaatgtaattctcctggaaccataaaagaattaagaccagagaactgctgttaagaataaagcaagataaaaaggaattgcttcaaagaccctttttattcttctattttttagtgccacgttatattccaagtcactatgttgttatggaaaagg

SEQ ID NO: 904057 - DNA, 454 bp, Homo sapiens
gggtctcactatgttgccaggctggtcttgaacttctgggctcaagcaatcctcctgccatgacctcccaaagtaattcaacacattgttattgagcatcacaatacgcgccaggcactatgctgagtgctggggaggaaggaatgcataaatccaatcctggcctccctgagctcatggccaagtagagaaagctaaacagaagatgataaagccttgttatttcatgcatgatcctaggaacttgttagggaaaaaaaccatgggaagtagaaaaccttctgctcacttgtcagccaaaaagaggaggataatcccagagccgaggaattctccatgacatctacttccgtctttrtcagcagctcttggttaatccagttccccaggcctcttctcctccccacgacttagaattaagttaaaatgccaggtcctctccagatgatagagt

SEQ ID NO: 904058 - DNA, 551 bp, Homo sapiens
cttccagaccctcaatgactcaataatatagcaaattatcctttcctaacttctaaagcctctccccttcctccctgtgtttccagttttcttttcttttctttctttctttcttcttgagagggagtcttgctttgtcacccaggctggagtgcagtggcatgatctcaactcactgcaacctctgcctgccaggttcaagcgattcttgtgtgtcagcctcctgagtagctgggaccacaggcattcaccaccacgccaggctaatttttgtatttttcgtagagacagggtttcaccatgtcagccaggctggtcttgagctcctgatctcaagtaatctgcctgccttggcctcccaaagttctgggattacaagtgtgagccaccatgcctggcctccagttttcattaataatataccattcatagtataatttttgactcttccctgcactccccttttttattctcwaatgcaaatcctatgaatttaatctctccaatgaaacaaggagaaactaacaaaaacaaatatcaggaggaaataa

SEQ ID NO: 904059 - DNA, 666 bp, Homo sapiens
ccatgagacagaaggaagagctgaattggagagcagaaaaaagaatggagaaaaaaattagaataaatgaagacacacacacacacacacaaaagagggyaggggaagaaaatctatattttgattaatgttttgctttctaaatagcgttaaaatgaagaacaatgtttaatttattcttaatacatattaatttgctgacattgttgggggaaaaagtgaacaaatattcctgtttgcatcttcaaggaaatctcagctgcttcattaattagagacaatatcctctatataatacctgcattgtactattaatacacatgagatagctcaaacgatttaaaatacgacatttcccattgcaatttatatttttccaacattatgatatttttcatgcaagatttccgcaccacttaatagtttccaaaatcattttgaaattgtgtgtttataagcatattcttggatagaagtgaatccccatctcctttcaaatgtatcataatgcatgccagacttacttttcccacattaatgttttcttattgaagataaggtctagataaacatacctgagaaatgaaaattgtgtgtttattgaatttattgtttttaacaatgtcaaaagcaaaaaaaaaaaaatggaaatgttttccacaactg

SEQ ID NO: 904060 - DNA, 583 bp, Homo sapiens
tggcaaaggtccccaaataccagtggaaatcttagtgagtgtgtctcctccaactaacgcaacccgttctctgactgggagatctaatcctgtgcttccaggtgttctgcaatccgcatktgcattctcaaaagctagagccaaagtcaaagctagcatttctgcagccacagaagaagacagtacaagccaattttcatcctccctttcctgttcaccaccctccaaaggtgctgtaggtggggcaaaaaattccctcaaaccctgaaatagtaacaaaaagatggtatgtaccaaactccaaacaaaaaagagaaaagaaataacaaaattattccccatgttaccctgattcaaaaacttccccttctttgtatctctagggcactgaccagtacctttttagagcactgaacttatgttgctgccagcagacttgtaacggggtttgtcattcatctggttgattttagttttttctgttccagcaaaccttcctcgttcaagtccctataggaccctatctgtccctgtctatccctgcaagtttctgctggcttctgctagtctctactagtctttg

SEQ ID NO: 904061 - DNA, 674 bp, Homo sapiens
ggcaaaactctctttgtaatgtagacttcagcaatggaaccttcctccaggatagtagccaaagtgaggggtggaaataggtctcccttcctgggasccttaggcagccctcaatgggtaatagtaataagtgtcatgtagggagccctatgatttacaaagtgctatttcagtgtttcacttgattatcgtaatagctcagcaagggatatgtaagaggaataatagacatgttagtgttggccacagatttgagaagaaaagagaaacatctactagatcaaccttaaatgtccccaccattgttcttgtcttggtccatgaatgccagtgttttcagtctgatgattggtctggggaagaatcttttgttcatattggattaattggtatctcattcctggttgcaaacttttcaccgtcccaaaaggtgaattcctcatcttttgtactctggggctctgctacagtggaggtgtagaaaagctgccttcaatcccactcttgccttctgaagttcagtttcacatctaactggggcataggcaaaaggatatgatggttcttgaatgttctcaacctgccacatctgtaactctcaaattctgaaaactaacatgtctcttttaaccagcccagctctatctttggctctggtcctacacatcacacag

SEQ ID NO: 904062 - DNA, 592 bp, Homo sapiens
aaaatcaagcacatctcaggctactccacagaactaggcagtgccagaaaacagttgcacaatgttgacaaatgtgatgcaagaatataatgcccagccaagaagttatccaagtaaaaaggcaacagacagatatttttaaacatgaaaaaaactcaggaaatgcagcagccataaatcaatggctaaaacttcaaaggactcaatggcaaaacctaatcatttaagaaaggaagctcaagagtgattaatcatcactgaatgtatctactgaaatttacaatttaaaaacaaatttttaactctaattcctggtcttttttaatgctgcattcaaatcttcatagattctcttattttttttctgttgttgctgtcaaaattatctatctctacctgttttctggcactgcatgttgttaccacagagaaaataaggccttcctggttttcttctaaagatttttcttattctttctctgcatgctgagcacccataaagtgcacttctaggtgaattgcrttttctgtttggaatcttacagtaaagtttaaatggctgtggttagacagagcagatctgagtcactat

SEQ ID NO: 904063 - DNA, 586 bp, Homo sapiens
gtgtgcaggcattgaaagagttgttcttatggaaggtgtatgtgagttttttgccttgtcctgtgagaatttcctatggctcagttttgttgcaaggagcatcttctttggcacaagtacttgtaattccttctactcagctcctatccacagaggtggatcccacagcttccccctgctggagcccctttgcctggaggatgaggaactggcaaaaaggactcaagactagctccttttctggtgtccttggacctataagaaactcacacaccgttaccattgcaaatgttaacttggctgctgcactgtcttcctctttcttagtgtgccatcatctctctttaattcatagggaatggtcagcaagtcctagcagatagatagtatagtctttctccaaatgcgaggcagtcgctcatcttgaaggcagtaagaaattatattcagtaatygtcaaatcccattcagtaatcgtgaaatcccttcctgccaccttggcttaagggctggatagtacctttttccatgaacactatagtccacacaagcccagtgactatagcaactcttccctctctccctc

SEQ ID NO: 904064 - DNA, 586 bp, Homo sapiens
gtgtgcaggcattgaaagagttgttcttatggaaggtgtatgtgagttttttgccttgtcctgtgagaatttcctatggctcagttttgttgcaaggagcatcttctttggcacaagtacttgtaattccttctactcagctcctatccacagaggtggatcccacagcttccccctgctggagcccctttgcctggaggatgaggaactggcaaaaaggactcaagactagctccttttctggtgtccttggacctataagaaactcacacaccgttaccattgcaaatgttaacttggctgctgcactgtcttcctctttcttagtgtgccatcatctctctttaattcatagggaatggtcagcaagtcctagcagatagatagtatagtctttctccaaatgcgaggcagtcgctcatcttgaaggcagtaagaaattatattcagtaatcgtcaaatcccattcagtaatcgtgaaatcccttcctgccaccttggcttaagggctggrtagtacctttttccatgaacactatagtccacacaagcccagtgactatagcaactcttccctctctccctc

SEQ ID NO: 904065 - DNA, 579 bp, Homo sapiens
tgcaaagctaccatggtagtgatgatgtggtagtgtggagagagcatagatgtgaagaattgagctttataatttgtttttaaatgtagttacatacatgggagcaaataaattaatgatagcattttaaagggagaaaaggctcagggaatgacattctgggaaaaaatatctagcaatctacaaaataatgcctgtttcagactttcttgttttgttcctattaattttggaaatatgttggctagagaaagaaaaaattaaagaggaaatattgtttgattgtgaatgagatttaaaaatttccacagcattccttaaataggaattatagctctgtctgaagatagacagttgtaagattacagctaggataagccaacttcatagatagtttcagaaaataaaaggctgatattttaattaaatccagaatttgaagatttaaaaaaaagagagatgattgkttgtgtattgtagggtagagggctcattctaagaatgctttttcttttccccatcaccacccactttcctgtgaattacctataggcacaactgtcttcttcaaaacattgg

SEQ ID NO: 904066 - DNA, 647 bp, Homo sapiens
gaataaagtaaccagaatttaaaattataacccaattaatttagtagcttcatataagctcacactatttgatcataatttattataccaatcttctatttgaagtcatttatttgttaatatatatttatatgttacaaaataatatgtctttgagaatatgtatttttttgtacaatttaaagcaatttcctcatcaaaaatttgtggaaataaaaaagctgagtcaaaaaataagaaagttttattgtaagtaaaataataaaatgttctctaacaataaaattaacatttgttctaattatctgctaactaggcaggggcacggtggctcacacctgtaatcccaggactttgggaggccgaggcaggttgatcacttgacgtaaggagtttgagaccagcctggccaatatggtgaaaccctatctctactaaaaatacaaaaaaaaatagccaggtgtggtttcacatgcctgtagtcccagctactggggaagctgtcgcaggagaatcattcatttgaacccaggaggagacagaggttggggtgatttgagatcgtgccactggagtccagcctgggcaacagggtgggactccatctcaaaaaaaaaaaaaaaaaraaaaaaattatctgccaacta

SEQ ID NO: 904067 - DNA, 647 bp, Homo sapiens
ttgttcatttctttttattctttttcacacataggctcaaaataaagggatggaggaagacctaccaagsaaacggaaaacaaaaaaaaggcaggagttgcagtcctagtcttggataaaacagactttaaaccaacaaagattaaaagagacaaagaagaccattacataatggtaaagggatcaattcaacaagaagagctaactatcctaaatatatatgcacccaatacaggagcacccagattcataaagcaagttcttagagacctgcaaagagacttagactcccacacaataataatgggagactataacaccccactatcaacattagacagatcaacgagacagaaagttaacaaggatatccagtaattgaactcagctctgcaccaagcggacctaatagatatctacagaactctccaccacaaatcaacagaatacacattcttctcagcaccacaccacacctgttcccaaattgaccacatatttggaagtaaagcactcctcagcaaatgtaaaagaacagaaattgtaacaaactgtctctcagaccacagtgcaatcaaactagaactcaggattaagaaactcactcaaaactgctcaactacatggaaactgaaaaacctgctcct

SEQ ID NO: 904068 - DNA, 635 bp, Homo sapiens
ctggtaggaagtgtgcaggaaagaggagttgggcatagggtgtagrgttttagatctgagcgagtagggatgcacagccctgtgtggaaataaggagggtgaaatgggggacaggctgaggcagggatgaatgtcggggagtcaagaattctgtttcagacttttttgcagtgggattttcttcttttatttgtttatttttattgcttggtccacgttgcttcttggtgcatttccctacttatcggaccctcaggaaatgctgacagtacggcagttgaggtagaaggaaaaaattgtcataacgaaataccaagaaaacaaattaaaaatattttagtgaaacaacatttcaaaaaagcattactttctgataattctataagaaaaacaagttactctatattgagcaatctcattttttagttaaggcacacatataattaatttaatcagccggctggcacggtggcttatgtctgtaattgcaggcactttgggaggctaaggcaggaggatcatttggactcaggagttcaaggccagcccgggcaagttagtgagacctggtctctactaaaaattaaaaaaaaaaattaggtgattgtggtggtgctcgtccgtagtcccagcta

SEQ ID NO: 904069 - DNA, 617 bp, Homo sapiens
tttgcagggacatggaggaagctagaaaccatcattctcagaaaactaacacaggaacagaaaatcaaacatcacatgttctcactcataagtgggagttgaacaatgagaacacgtggaaacagggaggggaatatcacacactggggcctgttgggagttaggggtctaggggagggataccattagaagaaatacctaatgtagatgacaggttgatgggtgcagcaaactaccatggcacgtgtatacctgtgtaacaaacctgcacgttctgcacatgtatcccagaacttgaagtataataataaataaaagaaatataaaagtcacaggatgcttgtgatagtatctattacactgatgttgacatcacatggttgactatgtggatactccaagtgaaatttcttgcagttctcagtgctaggaaaatctgtatttctggataaaaactcaaaacttttagaaaaacgttcaggttttatagtcyagaggtctaacactgcaatcttttccaactttaaggtttaatgatttacttaaatctaaaaatagtacattgcagatgtatttaaacagtgtgcctaggtagtatgtttatatattaagattaa

SEQ ID NO: 904070 - DNA, 584 bp, Homo sapiens
gttaaatgctttttaaacaatgtcatcatttaacagatttcaagatatttttgattaraaataacatttgaaattttatattttactgaccatagagtgagagccaaggtaaatattgactctcgctttgggtcaataaattctgatccattgctcaagagaagtcaatatctactttattgtttctctagactccaaataggaactttgatagatgtctttaaattttctctcaagtttctgatgggatgtgtttagcaactactatagctgctgaaaagttgtgcagttaatcattagatagatcctcctatcttgaaaataaatgaaccaataattagtaaagagatgaactgctccactttcttcttcaatcacatatcagtgtatgaaaataaactaatgcacaagaggaaattaaccattctaaaggtttttattactagaatctaacattctaatgatttcctgaaatctaatagacataaattattccaatattatttttatttttatcttatttgattaatgtagctaccaagagtttctctgtgatgatagggcattagataaaagtaaataca

SEQ ID NO: 904071 - DNA, 585 bp, Homo sapiens
gagtgatatggtttggttatttgtccccatccaaatctcatgtctaattataatcctcacatgtcaggggagctggtgggargtgattggatcatgggggggatttcccgcttgctgtttttgtgatagtgagtgagttctcacgagatttgatggtttaaaagtgtgtgccacttcccctttcactctctctccctcttgtcaccatgtgaagaaggtccttgcttccccttcaccttctgccataattgcaagtttcctgaggcctcccagtcatgcctcccattaagcgtgcagacctgtgagtcagttaaacctcttttcttcacaaattgcccaatttcgggtagttttttatagcagtgtgaaaacggactaatacagtgagatattaagaatgaatactaggcctggcaaggtggctcatgcctgtaatcctagcatttggaaggctgaggcagcaggatcacttgagttcaggagttcaagaccatctggggcaatatagcaagacctcctccgctaaaaaaaaaaaaaaaaaaaaaaaaaaaagaaaatagttaaaagaaattagtctggggttgt

SEQ ID NO: 904072 - DNA, 612 bp, Homo sapiens
tatttcattttttaaatgaaggagctgagggacaaagagattaagtaacttacataataaggtcacatagatttgattcatccattgaatcaatttttctatgctacataacaaatcactacacacttagcagctttaaataacaaaagtttattatttcatcatttctgtgagtcatgagtccaggtatcgtagattaataccttcttctactcagggtctcaccaggcagaaattaagctgtcagccagagctgctgtctcatttggagcactggatcctcttctaagctcattggttgtttgcagaatgtatttctctggtgttgtatgcttgagatccctgttttctgactagttatcaaccagggacttctctcagcttctgcaggctaccctccagtccttgccatgtaaccacctcctcacaatatgaaatctatagtcaagaggaaagaagctctctcatgcttcactctcttttaaggactctcatgattaggttagacccacactgggaaagctctgttttgatgaactcsaattaaaaagtaacatatcataagagttatatctcatcataatcacagcttcttcctctgcttaccaccac

SEQ ID NO: 904073 - DNA, 556 bp, Homo sapiens
tgcgatgccatttgcgtgggtagagggtaggcagagaagccatccttaaagaactgagaatcaagctgagatctgaactgtaagcacaaatttagttaggcgtagagagagaagaaggaaatcgcacttgaggcaaagggagtacatgcaacatccaaaggttttgacattcaggggaaagaagaggggaggctgaaagaagactgaattttctggaccccagcatgagaaaggcaccaaaacataaagctgaaacttcatggaacctggaggcatgcagagctttggcagccacttgcagaattagatccttatgagaattcaaatcacttccttccatatagcttaactatcaggaatgagaatgaggatcacttacaccaacaagatttaactgtttattcttaactggagattcttgctcagaaagttaaggctgtaartcaatgaataactttattgtttactttaggaaattcctgctaaccgatttatccaaacaaacacttgactcatctctcccatcaggacaaaagaatgttcacctgcagaaaca

SEQ ID NO: 904074 - DNA, 643 bp, Homo sapiens
aatccagcagggcagtcaaaacttaaagctccaaaatgatctcctttgactctgtgtctcacatccgggtcaggctgatgtaagaggtggrttcccatgatctttgggaccatgtggctttgcagggtatagcccccttctggctgctttcccaggctggcattgtgtgtctgtggcttttccaggcacatgttgcaagctgccagtggatataccattctggggtctggaggatggtggtcctcttctcacagatccactaggcagtgccctagtagagacccactgtggggactcccaccccagatttcccttctgcactgccctagcaaaggttctccatgagggctttgaccctgcagcacacttctgcctggacatccacgtgtttccctacatcctctgaactccaggcagaggttcccaaacctcaattcttgacttctgtgtacacgcaggcccaacaccatgtgaaaaccaccaagacttgggccttgcaccctctgaagcagtggcctgaactgtacattgaccctttttagccatgctgggatgtagggcaccaagtcctgaggctacacagagcagcaaagctgtgggctgagcccacgaaatcattttttcctcctaggcctaccagctt

SEQ ID NO: 904075 - DNA, 594 bp, Homo sapiens
aacctaatagtggcagttaacattaaattaaaggccagtaaccagattaaaaagtcttagtttgtgatttttttaaactaaaaawggatatgtattaaatgatgtttgagctgaattcaaaatatggggaaaatcccaccaatttgattaaaaactttcaatgagtatttaatgagtacctacccttgcccagtgaaggacgctcttagggatataatggtagagaatataatctctgcttaccatgaatttacaatatgactgggtaaagaaaacaagcagatttaaagcaaaacacaaaagctcaatggctaaaactgaacgctataggagatctgagactaaagggaactataagaatcgtcatggccagaaaataacatttcataaaaggttaatttaaagagaatgtgggaatggaatgtatttcagtggttccccttgtccctgcaaattagcttccctacacagctgaactggcacagagataggtaactgtgcagcatatcaattgtttaggacacaagagcttaatgtgatgaaaaatgatataggttgttttgaatattgtagttgttagcatgcaaatggcaa

SEQ ID NO: 904076 - DNA, 643 bp, Homo sapiens
ttaagtaaaccccagcagtgtttacttaatgaaagtgaacactcatgtcataccctgtcatttgtgttctctagttcttttgatgatgcaccttcctattgattcttctagacacagaagattctgctttaaaaactgtttgggctcttccttttttgtccccagctagtgtcaagcatctgtcctcctaggctcccagaggttattcagtatctccctgaggctgctgtcccccatatcctcatcttatgccaccctaacttctagaaggaagagacagacaaacactgaccactctcctcaccatcacattaaatagcaaaacagaagagaaggggaacacttattaaggctgcacccaactcatgcacacacacatgaaatcatctgtttgttaacaaatcagtcttcatgcatataatcaacacattaaatgccttcaataggcctatgaagttggtattatctccatttcacagatgaagaaactaaagctgagaaagatgaattctttccytgagattcaacctgtacatattagagctaggattcaaacctaggtctgcctcaaatcaaagccagtgagctctctattactggtaccgagaatgggttcaaaaataaggagaatgggttaccatta

SEQ ID NO: 904077 - DNA, 627 bp, Homo sapiens
ggatggtgttggcttcattgattgttgattctatttcacattaaaactaattttaaatgcactatttacaacaagtttctacaaatttactaaaattcatgggattgtttcctctgctgatttacmtattggtttataagtatggtaatttgcagtgacactatttctgatgtattccatctccatctcctaattaaagtaagttttgcattttttctgaactttcaacatgttctctgtatttttcattgaagctaattctgtttcctctgctcttttgggagcctgataattaaatacatttcaggtgccaacaagctaaatatccccctcccttgcaatcctgtcctattttcttcccttgtttattatttctgttttaaatatcactatatcatcctcaacaaaagcaaacatgtattgaatgtctgctgtggtgatgacattacagtcagtaacatgaagatacgtagactgagatgcgtacagacacatatatacatctatatatatgtatatttgagagtcaaagttcacttcctttgtgttgttagtctcccttgtcttatttaaagcaaaactatatttccttttagcttccctccttttgaattctaatacttttct

SEQ ID NO: 904078 - DNA, 631 bp, Homo sapiens
ctgaagagggccacataataaatattttaggctttgtggtacttgcaatctctattgcaactactcarttctgccattgtagtgaaagcaaccgcagataaatacataaatatataaatgaataagcatgcctgtgttccaataaaacgctattggtgtgcaggagtgagtgtgtgtgcttgtgtgtgaaatacataaatacataaatgaataagcatgcctgtgttccaataaaatgctattggtgtgattgagtgtgtgtgtgtgtgtgtctgtgtgatgcgtaatgctgaggcatagccatcatcctgtaaaagaggtggcatgctgtactcagttaaacctggtgtagtgctggtaccaaggggaagctcactaaatatttgtggaagaagggaaggagagagagaggaattattcccattttatagatgaagaaattccactgcagagcaccagtgccatgtgaggttgaggaagccattgtcattttccctaatgaatctacaaagaaacagaattccataagcaaggtattgaattttgctcctaagagaatcttatacgttcagtcgtcttcagagaaggagagcactgatggcctctggtggatcactggggctctgggatg

SEQ ID NO: 904079 - DNA, 569 bp, Homo sapiens
ataatatttctttccttactacatatataatgcatgtaaattatcttagcatagataatagtaaaatgtagtaaaataattagaaaatgatgcttttggggtatttattaccttcgttcttaatataatttttagcttttatagtttaagtattattaatggttgtatttaacaaccagcttgcaaaatttctgaaaatttaacagttgatgctttggagctagcgcaagccagctccagcattccactcactaagtgttatgaagattaaaaagaaataattaattttaaaatgcctaatagtgtcttggaggatcataggtcttaagtaaatcttcattttgtttcctcttatttcgtgttttattaagccccatcctactcctcggagtccatgacagcatctttagttttaacaccaattccaaagacaaaatagcttcatgcactgttttgaatattcagacaaactggtaagcaggatttacttactattattctgctaaaaagggtcagcttgaatatawagaagaaagacaccgacatctccatctaccttgtaattgtgt

SEQ ID NO: 904080 - DNA, 597 bp, Homo sapiens
tttaggcgcaacagaccaaccagaccagaatggattcatccatrctaagtgccatgtaatcaaactgactcatacggaccagttttccaaaaaacaggagattcctagcagcagttggaagaagccccatttgtctgaaacagcatgatacagaagttccctccattttgaccttataaggaaagtaacctgtaatgcccattctactttttattccttttttcagccataaagtccatctccttttctcagcttacaggatcttctttctaaagctttagatggaatgttgcctgacacatgactcactaatgaaagccagctacatctctaaactaaattggtgagaatgctacttattttttttaacaacagtaataagaggaagagtagaatagctaaaacttagtaaatgaatatttgggtcaagtgctgttctatgtgctttacacatgttaactcattaatccttaaaacaagcctttgagataaaaacaatggcattagctgcatttggtagatgaggaaatggaggcacgtgggggcgaggtgacttggtgacttgtccaagtcatacagtggtgaggagcagagctg

SEQ ID NO: 904081 - DNA, 618 bp, Homo sapiens
ctcttttgccttccaccatgtaagatgtgcctttgtttctccttygtcttttgccgtgattgtgaggcctccccagccatgtggaattatgagtgtattaaacctccttttcttaataaataacccagtttgggatgtttctttatagtagtatgaaaatggactaatgtacctccattatggcattaatcaattattttattattatttattaataataataaataaacatttattagttataataataaataaactattatatctggattttaatggaatgggacaggtcttaacagccataatgaattaaatgcctaatctgtgtttggcaacatatctacacaattatagttttagaaacaactcagcttctgactgtgggtccttcataaatcaagcaggaagtgattttaaaatgactccatgatgttgaaattggcacttagacactattttcggagaactcaataggaggagcttttctctgtaacttgggaggaccagtgaactccaagttccttgtgggcaggcaccacacttgacactcgtctccttcatacctcttagcatactgcatgtggcagatgcttaaagagtcacgatagattgtgatta

SEQ ID NO: 904082 - DNA, 619 bp, Homo sapiens
aacattacaaacaaatggtgtcttcactctgccacagtaaattgtatttgctatccaatgtgatttttttgtatatacctatttctcatttcatttttttcttcagtcttctacatagatgatatggtttggctgggtcccaaccaaatctcatcttgaattgtagctccctaatccccacatgttgtgggagggacctagtgggaggtaactgaatcatgagtgcaggtttttcccatgctgttcttgtgagaataaataagtctcatgagatctgatggttttgtaaagggcagctcccctgcacatgctctcttgcctgccaccatgtaagacatgcctttactcctctttcgccttctgccatgattgtgaggcctccccagccatgtggaactgtgagtccattaaacctcttttttaaaaaaaatgacccagtctcaggcatttcttcatagcagtatgaaaatggatgaatacaacatatcacagctactctgctgcatttccactcaattatgcatcatggatatgcttttgctttaatctaaaaatgtgttcatgcttttmtgctggaaacatttactttatattaaaataataagtaccccaatataat

SEQ ID NO: 904083 - DNA, 647 bp, Homo sapiens; identical to SEQ ID NO: 900717

SEQ ID NO: 904084 - DNA, 646 bp, Homo sapiens
ttaaactgttaattaccagggttattaccaatttttctatataacttccttcttgctttttctttaaaaccagaaatgatttttacatggcaaggattgctgaagaaggtatgagcttgctgaacaatggatggtttaagtttaggtctgtgctgcccaatatagcagagattaattagccttgtgtagctattgagtatttgaaatatgtaagtgtaactccatatttcaaagatctaagacttagtataaaaatatacatatctcaaaaattttttatatcaatttcattcccaaatgataataattcagatatgttgggttaaagaaaatactgttaaaattaatttcacctgctttgtttttcttttaatgtggctctcaggaaatttaaaatcataactgtagctcagatttgtagcttacattatatttctgttggaaagtgctggtcaaggtaaccttcatcaattcttctatattctattaaaacaaatagttgagcatctcctagtttataaatgtcttggtgtcataacctatgtatctttgttttctctttagaatgtagcacagggcattgcaaatattgtactaaacagttaatacatgtattytgaattgccatcaattgaaattaacaatt

SEQ ID NO: 904085 - DNA, 649 bp, Homo sapiens
atttaaggtttctgagtatcttttcatggcttgataactcacttctttttggctctgaataatattccattgtctggatgtaccacaatttatttatccatgaacctacggaagcacatcttgttttttttctaagttttggtaatgatgaactgagcttttataaacatctgtgtgcaggttttggtgtggacatattttcaactcctttgggtcaatatcaaggagtgcactttctggattgcatggtaatagtacgtttaggtctctatgaaactgccaaactgtcttccaaagtagaagatgtgttgtaacattttgcattcccaccagcaatgagtgagagttcttcttcctccatatcattagcattttgtgcatctttagcattttatgtcggtgttctggatttgggccattggaataggtgtgtggtgataattcatgtggcttacgtttacatttccctacacacaaatgatgtaaagctgctttttatatgctaattttttacctgcatagtttctttggtcagctgtctgttaaggtctttggcccaacattttttttttttttttttttttttttgagacagtgtctcactatgactcccaggmtggagtgcagttgagccatcctggctcactgc

SEQ ID NO: 904086 - DNA, 613 bp, Homo sapiens
ggatatggaaagaaatcaagttgaagaggtcatrataagtacagtatagtctggaatttaaatttggccgtttataggccatgggagcatttgagagtcatgacctgttttgtgttttagaaataaactgtgtcaagaaaagtttgcaggaaagagtctctctttagtaacttgggtaaggaatgttaaagcccaattcatggcaatgagaaagaaaaatggtaggagaaaatgcagtgggaaatattaaggcaatcaaagtcattagctttcatgtctcactggatgtgagtcaggtttaacactagcattctggcccccattactgggaggatggttgttctagtaactgctacaggaagtggaaaaggagaaagggattacattgagcgttttagaaactgattctggagataatcatgaaagacaagacatcactcctctgtcagtgcatttaattctggattgttttagagcagcttcctttttttcagttatgtttaaacacttttttgcttgaaaaaataacaggattgcttaaagaaaaaaagagagagagagaaattagttaacctagtgagaaaggattttatcctatttgttttatgaaatg

SEQ ID NO: 904087 - DNA, 617 bp, Homo sapiens
tctgtacgtcaccatcttcaaacaccaaaggtagagaaaaccacaaagatggggaaaaaacagagcagaaaaaccagaaactctaaaaatcagagtgtctctcctcctgcaaaggaacacagctcctcagcagcaatggaacaaagctggatggagaatgactttgaggagttgagagaagaaggcttcagaagaccaactacgccgagctaaaggaggaagttcaaaccaatgacaaagaagttaaaaactttgaaaaaaagttagacgaatggctaactagaataaccaatgcagagaagtccttaaaggacctcatggagctgaaaaccacagcacgagaactacatgacaaatgcacaagcctcagtagccgatgcgataaactgaaagaaagggtattagcgatggaagatgaaatgaatgaaatgaagtcagaagagaagtttagagaaaaaagaaaaaaaagaaaccaacaaagcctccaagagataagkgactatgtgaaaagaccaaatctacgtctgactagtgtacctgaaagtgacgggcagaatggaaccaagttggaaaacagtctgcaggatattatccaagagaactttcccaatctagca

SEQ ID NO: 904088 - DNA, 608 bp, Homo sapiens
actgcccagtaggggcagactgacacttcacacgactgggtactcctctgacacaaaacttccagaggaatgatcaggcagcagcatttgcggttcaccaatatctgctgtactgcagccaccgctgctgatactgaggcaaatagggtctggagtggacttccagcaaactccaacagacctgcagctgaaggtcctgaccgttagaaggaaatctaagaaacagaaaggacatccacaccaacaacccatctgtacgtcaccatcttcaaagaccaaaggtagagaaaaccacaaagatggggaaaaaacagagcagaaaaaccagaaactctaaaaatcagagtgcctctcctcctgcaaaggaacgcagctcctcagcagcaatggaacaaagctggatggagaatgactttgaggagttgagagaagaaggtttcagaagaccaaactactctgagctaaaggaggaagttcaaaccaatgacaaagaagttaaaaaccttgaaaaaaaattagacgaatggctaactagaataaccratgcagagaagtccttaaagaacctcatggagctgaaaaccacagcatgagaactacatgacaaa

SEQ ID NO: 904089 - DNA, 662 bp, Homo sapiens
tgagaatataaaagtgaaaaataaatattatgactctgcycctgtgggagtagacaagaaatacacaaatagacatacaatataattttacatagtgattagctctgtgaagaacattaaagaagggcaaagaaacaaaaaattgaaggaggtttctactttagatacgatggtcaggcaaaacctttctgataaggtaacattagcaacctgaatgaggaagcaaagtatttgggagaagcgcctccttgaaagagaattctaaggagggaattgctttggatgtcaaggagaagcaagggttttggggctggagtagggaggcaggcagtttggtcactgcctggtgtgtcagtgatatggctctaggttgtatgaactgagacctaccaggggaggcaacacactcaatggccacctgttcagctattcagtttgaggacaaatatcagggggttgagagcagaagagagagataatctgccttatttacaaaactaaaacaagtgcacaaaactgagtatatgtcataagactgtagctctatggatttgcatgaagtgaataatagccagattgagaaatctgaaattaatagaaacatgaattccctcttgtgcttcctccaagtcagtactcaccatcttcacaaagataagcac

SEQ ID NO: 904090 - DNA, 650 bp, Homo sapiens
gaaaaacaattccagtatcaatggcaagtgttaattacggttgttaatgtaattatcatggattatttttgataatataacatagtgaacactgtgctaggtgctttacatagttagcctatacttcctaaaactgccctagaatataggcattcttttctccatttgactgatgaaaaaatattttttatatgtaattctaatttcccttttttgtgactacttaagtacttaggttatgcttatgtgatcttatttttatcccacttaacaaagtgagaagctccatattttctcacaccacatttttaaatgactgcataacccgacatgttatatggtcatttaaatctaaatgacaccctacctgagatgaagctcatgatatatgtagccatttctatgtgtttagatgtttatgtaatgcaaaagttttcttttgtaaatgagatggcattttggatctcttttgcacattgctaattattcctttaagccaggtttccagaagttccccagtcattgagcatttctgaggctcttgatgcatatgccaagtagttatggagaaagacacagcagcttacctctgcaggcatcattgtgtgaaaggaagacccaggctctcycaccacccttgaacagaagcc

SEQ ID NO: 904091 - DNA, 652 bp, Homo sapiens
gaatataaaggagctattttcartaattattcaaaactaagcagttctgccttcacttcaggtcagtagagataattctcataaggtgctaagccttaggaatcaaatccatttggggtcattacacacaattgggaaaataaatacctctatggcagctccccagacctacagattgcaggtctgatcagaaggctgacagagaaatttattttttaagtagcaacactacaaaggacaagggaacgtgttcaagtgctcagtggcagatattggctatagttaacttggtagatagtggctgctccttcaccactctcctattcttatcctagtgatttacccatctgctttttacccatgggcttccaaacagcacggtaagtgttctagaaactcaattaagctagtggaatcagatggcaggaggtagatactctctgaaataggccaaacattttccacattggtcagctctacaaaactgagaaagaacttttgtttttccttctacatacagtaccaaattaatggagccttgtaatttaaattgtgttcattagaatcttctcatttaaaacttcacaaagtcaggttgcctgtggggcagagaaactgtaatgagccggcgtctgccaaagttagggcaatg

SEQ ID NO: 904092 - DNA, 635 bp, Homo sapiens
ctttgcggcaatatttgtctcatcgcatgtctcamatgcaattctggagttctgctctgaatacatattcctctaatcacaggagatacagtggttcctgctattgcaatgccgtcagtgctcgcataaatagcttacatatatgccttcctgctgtagcttctacttccttcctccttcctcccccttttcttcactcaattcttagccagtgaaaacactgccaaggtagagattggatggcccttcctcttctccttcattctctcttgccctttgccttcctcttagcaatactttctaacatatttactatgtgccagaatttgtgctatgcactttaaatagaccattcaatttagtcctcatgacagtatcatgggctaaattttattatcccattaaaaaatagatatgagatgttaagtaatttcttcaaaatagcctgtcatggccagtaaatgtctgaactgccttttaagcctgggtttttggactccaagtatataccacttaccatgatgtaatgatagccactattccacatgcatgtatatttgctgttgacattgatcatcactttagtagaagttaagaataaaaggttatcagcttctgggaaccatattttacaa

SEQ ID NO: 904093 - DNA, 643 bp, Homo sapiens
ttaattgtaaagagtgaaggtaacaatcttaaataaagagtttgttgcaaaaagaaaccagagtgtcaaaaaactaaagatgaaaatttattggtggttttgtaaagggcgcctcctttcttccttgggacaggttcatagtaattggaacaatattttcaaaaatattagcttctaaatcataagggcaataagcaccaaagttggcagctgacacaagaagcctaattacatctttttgcttcttcttcacaataagtatatttattgcaaatgttctctactctttttgcctgagactcataagagggaagcataaacagaagttcgactaaatcctgataattacatcatcaattatattacagaaggcaattaaatcacatttctgtgttgaatgcaattatgttttattaaaaatattacaaaaaagaataggtctcttccaaatgctgtttgcttttgttctgctaccatataggacaaagcctggaaaaataaaatgacatcagatttttgaaatgaaaaattaacctaacattccccaaattgctgtaaatatagaaccttgcaaaagcactcacaaatctatctttcctcaaggcacyggaattcttaacaaatacttattaagaatctgtgt

SEQ ID NO: 904094 - DNA, 620 bp, Homo sapiens
ttttatgaggccagcatcatcttggtaccaaagcctggcagagacacaacaaaaaaagaaaatattagaccaatatccctgatgaacattgatgcaaaagtcctcaataaaatactagcaaatcgaatccagcagcatatcaaagagcttatccaccaagatcaagttggcttcatccctgggatgcaaggctggttcaacataggcaaatcaataaacgtaatccatcacataaacagaaccgatgacaaaaaccacgtgattatctcaatagatgcagaaaagggctttgacaaaattcaacagcctttcatgctaaaaactctccataaattaggtattgatggaaagtatctcaaaatagtaagagctacttatgagaaacccacagccagtatcatactgaatgggcaaaaactggaaccattccctctgaaaactggaacaaggcagggatgccctctctcaccacccctattcaacatagtgttggaagttctggccagggcaattaggcaagagaaagaaataaatcgtattcaattaggaaargaggaagtcaaattgtccctgtttgcagatgacattattatatatgtagaaaaccccattgtctcagc

SEQ ID NO: 904095 - DNA, 574 bp, Homo sapiens
gtatatgtaataatgaaaaggccttattattgcagagtatctatgtgacagggattcaggagtggttgagatgtgtggttctggtacagtgtttctcataaagttgcagtcaagrtaccagctgggactgtcagtctgactgaagctagaggatttgtctacaagctggcgcattcacatgaggaggcctgggtttcttgacggctgctggaaatagacctctgttcctgaacacatgggtctttccatagagctgctggagtggcttcccccagagagaatgaccccagcagcagaaagaacaaggtggaagttacactgtcattttacaatctacatttcacagttgttctccatcatatctaccgtgttcttcttgttggaaggtagtcactaaatattgcccgcagagagaattaaggcttcaccagagggaggagtttcaaataatttctgggcatatactaaaccatcacgagttatttttatcatttcacagactgaccaaactaatttacttaggcatgatttctagtcattttttgtactataatatgtcagagcatctttctga

SEQ ID NO: 904096 - DNA, 626 bp, Homo sapiens
caatttgattggatgcattttggggccacgagatcaaacagaagacctggataatctttttgttatattaatatttcacccagtgttttaccactgcctaygggcaaagaattgaatttgacctgccttggaattagattttctttttaaattttccattaggaaaatattgctgactcttgtcctagattttcagtctattaaaaaatattctcatccatggctaaaacacatagaaatttttatattttaagttcctccttagaacttagtgttttggtctccctttatatcacaattggaaaaacattaaaaatatgaaattaaagcaaaatacctggaagcaactgtatatagaatcacaaatcatctatccaagagctaagacattgctgcttattactatttatatatacaaaattaattaaagatgtgatagttctcttccaagctaaatcctgagtacccttggaacagagactgtctcattctctttggtcctgacctcaagtgatccgcccacctcagcctcccaaagtgctggggttacaggcgtgagccgcggcacccaacagtcgcattccctttggctagcccattacctgcatagcaactggaactcagga

SEQ ID NO: 904097 - DNA, 686 bp, Homo sapiens
tactactgaacctggatatagaaaagaattctcctggaaccttcaactgcattgcctagaatttggactgtcatctgaaaaaggcayaggatggcaaatatccaaggaaaagctgcaatggcacctgttgcatgtccaagtttcagacacaaaaacaaacgtgctgagttttgtttttggctagaataaggtctctggatttgagacatctgtaaagtacacagatcaggaaaactgccttctatagcaagtatgtgcaaggtatgctcttagaagcagtaactgaggggacaatgtccattcaggccagccagagaatatgtcatccacctcagagaaaggtatagggctggaggtccctgagtaggtagggggagggcagtaggaaggattctatagagtccaacaaagcattctttgagagaaagaaccagcatttatttgcacatctgccaaactgatggcctcaatgccagattccaatggcaatgatcaagttaaaccttgcgcttttcttctagttcctcttctttgcctgatcttaaaggagccagacgcaacagctaacaagtggtagaagaaatagaacaaaaccagtgaagaaataggccatgttttggcccattcctcaatgctgccggttgtagaacctgggttatgcctaagccaagaccggggaataccaa

SEQ ID NO: 904098 - DNA, 686 bp, Homo sapiens
tactactgaacctggatatagaaaagaattctcctggaaccttcaactgcattgcctagaatttggactgtcatctgaaaaaggcacaggatggcaaatatccaagraaaagctgcaatggcacctgttgcatgtccaagtttcagacacaaaaacaaacgtgctgagttttgtttttggctagaataaggtctctggatttgagacatctgtaaagtacacagatcaggaaaactgccttctatagcaagtatgtgcaaggtatgctcttagaagcagtaactgaggggacaatgtccattcaggccagccagagaatatgtcatccacctcagagaaaggtatagggctggaggtccctgagtaggtagggggagggcagtaggaaggattctatagagtccaacaaagcattctttgagagaaagaaccagcatttatttgcacatctgccaaactgatggcctcaatgccagattccaatggcaatgatcaagttaaaccttgcgcttttcttctagttcctcttctttgcctgatcttaaaggagccagacgcaacagctaacaagtggtagaagaaatagaacaaaaccagtgaagaaataggccatgttttggcccattcctcaatgctgccggttgtagaacctgggttatgcctaagccaagaccggggaataccaa

SEQ ID NO: 904099 - DNA, 599 bp, Homo sapiens
catccctgggacctccctttttttttttttttttaataacatttactttaaarttacaactgtaaattcttcctcccttcctttgagatataaatatttttccagcctcttgacattttttaccacccactgatgtctttctcaaggacctggaggccatccttttgaaatgtagtaaaggaagatagtgtcactattttccagtctctgtgagtggtaggagcctaacttcaataggagacaattagcaaacacagatgacctaatcacattggcaatcattctgctaagaagctagctcaccccagtgcttaaaagctcttctaccttttatttcagtagaagtcttcctcccctactacagtagcctgaataaactcatcttactatttttaacaagtgtccagtgcatttttacttagatgggacaaagcctaggccttggactttaccaagtcccctgggtgattctaatactgacccaagtttgagaacccctttagcttttgtagtatttttcaaaacaccacagtaataagtcttgaaatttatttgtggttataagacaaatttgtaatgccggagaaatactcccttac

SEQ ID NO: 904100 - DNA, 480 bp, Homo sapiens
gcattaaaaaaagatatcaaaatctattaatgctttctatgaccttttatagatgaagacaaggcaaaaacatttttcccaaaaaatcaatttaaattattactataaaatttctgaatgatctgctgtgcaataggggcatatattttcctaaaattaagacttaaataataggtttatattgactatcgattagtagcaaaactttagagatgtccatgaatcctgatattctggaagttgctagaaatatagaggaaattaaaattaacagtcttgtaccagattcttattgcctatacttcatatttctctgtatttgtagcttgtagtctctgcagagtcttttcaatttgaatggtaaagaataatggctgccaaacatggctaaccattaaaatcatggttgttaggaaacaagatctccagccccatmattgattcaatgatctgggggcagatggtgagggtgggggaaag

SEQ ID NO: 904101 - DNA, 607 bp, Homo sapiens
acccttccctcctccatctccttacgtggtcgatgacgtatgaaatcaaggtagggaagagaggtatggagtctttcttgtgataattcaaattaatgtgcacgtgcttggtttactgaggctgattcaaagtcaagcaggcaaatagcatctatcacaggaatcagagacttacctaccctactagggtagggtgtaggggaatgcatgccacaagaaagcctaagtatgcctaaaaggaagaagtgcctctactaaagggggaaggaaattcagaaaatgagttattggagagctgtaacaatctttacaggattcataactcagtctaggaaactccatacctggaatttctctagagaaaaagaagctgtgtcaagatgtttctgttatgttcagctagaaatgcatccaactttatttgaatgatttataaagatttgtgttgttatttttaaacatagactttgttataaagattttttaaaagaatttgttagtaagtatcatgtacttatrcacacacagagctttttaatcaagtcttaatctccataggcctgacacctatgtgatatacagacccagatgaaaggataatgacagt

SEQ ID NO: 904102 - DNA, 673 bp, Homo sapiens
gttaaatttctctaatacatttctgaattatttcaaagtgttctcttgaagtttattaaactcctttaaaacagctattctgagttttttgcctgagaggtcmtacatctccatcactttagggttggtctctggtgacttatttggtccatttggtgaggtgatatttccccaaatgttcttagtgcttgtgggtgtatggtaatgtctctgtattgaaggattcagtatttattccagtctttacagtctggatttctttgtgcccatctttcttcaaaagaccttctacaaattctaagtacactgttgtgttccctgcgtcaatggctcctgcagccatctcagcactggtggttattctaagcccaggttttccatgagtctcatgaggtctctgatgttggcatggctctccagcacagatgtacgtgggaaagactcaagaaaagtacccatactgtatgggaaagctggccaaggaaagctggccaaggactcaagcctgggagactgtcatggttgcccagataggcacacctcccagcaggtttctgcacaggtaggataggttccttactgcagcaagtggagctagagctgagactggacccctcaggatctgctgtggatggtggctggtaagcctgtcttgctggctcaaatgggtaca

SEQ ID NO: 904103 - DNA, 579 bp, Homo sapiens
atctagagaggcagtctggctacagcagctttgctgcactgcagtgggcttcrcccattctgaacttactggcagctttgtttacatgttgaagggaaaactgcctactcaagcctcagtaatgatggatgcccctcccccaccatactcaagtgtcccaggttgacttcacactgctgtgctagcagcgaggatgtcaagccagtggatcttagcttgttggtcttcgtgggggtgggatccactgagcaaggccacttggctccctggcttcagccccctttttaggggagtgaatggttctttctcgctggcattccaggtgccactggggcatgaaataaaactcctgcagctggctcagtgtctgccccaacagctgcccagttttgtgcttgaaatccagggccctggtggtgtaggcacccaagggaatctcctggtctgcgggttgtgaagaccgtgggacaagcctagtatgtgggccagacagcaccacccctcacagcttcccttagctatgggagggtgtattctgaccccttgtgcttcctgggtgaggtgacaccctaccctgct

SEQ ID NO: 904104 - DNA, 595 bp, Homo sapiens
agaggaacgttcataacattaaatacctacatcgaaatgtctgaaagagcacaaatagacaacctaaggtcacatctcaagcagctagagaaacaagaacaaaccaaacccaaacacagcagaagaaaagaaaaaactaagatcagagtagaactaaatgaaattgaaacaaaaacaagacaaaagataaattaaacaaaaaggtggttctttgaaaagataaataaaattgacaggccattagtgagattaactaagaaaagaagacagaagatacaaataagttcaattagaaacacaaagggagatattacgatcaataccatagaaatacaaaatatcattcaaggctactatgaacactttcacatgcacaaactagaactcctacagtagatggatagattcctggaaatatgcaaccttcctagattaaaccaggaagatatagaatctctgaacagaccaataataagcagcaagattgaaatggtaattaaaaggttaccccccagaaaagtscaggactagatgaattcacagctgaattttattagacattcaaagaaaaattgataccattcctattgacagg

SEQ ID NO: 904105 - DNA, 632 bp, Homo sapiens
aaatagctctgaaaggagagagctaggacatattccatattccatatggtggtgtacrcatagtgtattaagaaattcagggtggtgattggctcttccactcaccccaggacagataaactaaatatagaaaaatcttcacatggcaactaaaggatgcacacgcccatttccttcatatgaaaaacaaatttaaataacaacaataaaaataaaacaacaatggtcaaaaacctggaaacagatggtggagccatcacctcagtgatattatgatagcccacagcaaggaaaacataaagtttaggagctaagagtaaccttagataactactaactcaactacgttcactttatagttgaaggaaatactggcaaaattccaagtggctttgcctggttccagagtgagatagaatgagttagtgtgagaaccaaagtgtctcctctgcttgttctagtttgagcagtttttatttatttatttatttttgacagggtcttgctctgtcagccaggctggaatgtagtggtgcaatcttgactcactatagcctcggctccagcagttcttctgcctcagcctcccgagtagctgggaccacaggtttgcaccaccacatctggttatt

SEQ ID NO: 904106 - DNA, 614 bp, Homo sapiens
gacacaataaaaaatgatacaggggatatcaccactcatcccacagaaatacaaactaccatcagagaatactataaacccctctatgcaaataaactagaaaacctagaagaaatggacaaattcctggacacatacaccctccaaaggctaaaccaggaaggagctgaatccctgaatagaccaataacaagttctgaaattgaggcagtaattaatagcctatgaaccaaaaaagaaaaaaaaaaaaaaaaaaagctcaggaccagatggattcacagccaaagtctaccagaggtacaaagaggagctgataccattccttctgaaattatttcaaacaacagaaaaagaaggactcttccctaactcattttatgaggccagcgtcatcctgatatcaaaatctggcagagacacaacaaaaaaagaaaatttcaagccaatatccctgataaacatcgatgtgaaaatcctcaataaaatactgtctaactgaatccagcagcacatcaaaaaccttatccatcacaatcaagttggcttcatctctaggatgcamggctgcttcagcatacacaaatcaataaacgtaactgaccacataaacagaa

SEQ ID NO: 904107 - DNA, 689 bp, Homo sapiens
tacgaaatcaatgtgcaaaaatcacaagcattcatatacaccaataacagacaaacagagagccaaatcatgagtgaactcccattcacaattgctacaaagagaataaaatacctaggaatacaaaccactggtcaagggaataagagaggacacaaacaaatggaaaaatattccatgctcatggataggaagaatcaatatcatgaaagtggccatactacctaaagtaatttatagattcaatactatccccatcaagctaccattgagtttcttcacagaattagaaaaatctactttaaatttcacacggaaccaaaaaagactccgtatagcaaagacaatcctaagcaaaaagaagaaagctggaggcatcatgctatctgacttcaaactattctacaaggctacagtaaccaaaatgcatggtactggtaccaaaacagatatatagaccaatggaacagaacagaggcctcagacgtaatgtcacacatctgcaaccatctgatctttgacaaacttgacaaaatcaagcaatgaggaaaggatttcgtgtttaataaatagtgttgggaaaactggctagccatatgcaaaacaytgaaactggaccccttccttacactttatacaaaaattaactcaagatagattaaagacttaaacataaaatctcggatttt

SEQ ID NO: 904108 - DNA, 622 bp, Homo sapiens
gaagacatttgccttcctattatttcattgcaggaggagatatgtttatttaaaagcagataagtttatttaaaagtagagctaattgtttaggttaaatgaagaaagggcttacccaatgttctgtcttacccagtgaaactatgcccagtcatactgtcttgatgaaatagggagaggaagaggaggaaaactaccacttagccatcaacacctttccataggcctggcactgtgctaagcaccttctgtacagaaattcagttaaactttcctgcagcattttggagaagatattactcccatttacagataaagaaacggaagcatggggaacttaaataacttacacaattaatcagtggtgcagctggaattaaaactcaggtcagtgtgattaaacagtccttctcttaacaaaagctctgaaagagcatttacatgtttggctcttgttaggttatatagtacaagcctcagacacttctactcatgccatcaaaggctgataataatagatcagtaaactttaagagaactatcaaattactcttaatccatttaactcytaagtaatagatactgtataagtctcaattgtaggtgatctgtgcctgatgct

SEQ ID NO: 904109 - DNA, 533 bp, Homo sapiens
aaaaaagaaagaagagagggaaagaaggaaagaaaaaagaatgaagaaaggaagaaaagatggtgagaataaattctcttattgttaagtgaaccactttagatgatcccacaggaggtatttaataaaggaataataaaaatctcatctggctaggcatggtggcttacgcctgtaataccagcactttgggaggctgaggtgggcagatcatgaggtcaagagatcgagaccatgctgcccaacatggtgatatcccatctctactaaaaatacaaaaattagctgggcatggtggcacacacctgtagtcccagctactcaggaggctgaggcaggagaatcgcttgaacccgggaggcggaggttgcggtgagccgagctcatgccactgcactccagcctggcaacagagcragactccatctaaaaaaaaaaatcacagctgacaggagccctgagatgccagcagcacagttcctgggggcctctctctatatcccttggtcactccatttgctgataagtaacta

SEQ ID NO: 904110 - DNA, 655 bp, Homo sapiens
ctcccaggttaacgccattctcctgcctcagcctcccaagtagctgggattacaggcgcccaccaccacacccagctaatttttttgtatttttagtagggacggggtttcaccgtgttagccaggatggtctcsatctcctgaccttgtgatctgcccgccttggcctcccaaagtgctgggattacaggcgtgagccacctcacccagtcaaattatagtgttttaaagtcacttggaatagttcatctctgtctggttatgacacctggatacatagttatgttcctttgtgtcattttacttttgaatattttagaaattgtttttaaatttaattttgttttatagaatatttacatggttctaaagtcaaacttacatgaatataattttaatgaattttctctctgaactgaaattagtttgcttattttaatttttaaaaacagatgcaatattgtttccctaggtaccactctttaatgattattttataaaacatctttctgaaacagaataatcccagaaagacagtctatataacactgggtgatcctcttttgggttgctttaaagctaagtcacctcatattcaacctaaagtagagagaaactggaatttcatgctaattagcctcctagttcctttcat

SEQ ID NO: 904111 - DNA, 722 bp, Homo sapiens
ggcaaacatttgcagcctgtgtacgaagtcatgaagtgaggataagcagaggtttaattcaaattattatgtaagggtttgaaatttgggaccctctagaagatatcacttcaacttcagaattatgaggcaagaataaattccagccagcttaaatgatcaataatggagtcctgttttgttctgctagttgaaattgttagtggaaataaagaatgagctgtaagcatgatgggaaatatcttactggaagaaacacttccagctttgtggtatattagaaagattaagggctaggtgtaagtctggattcaaatcctgatgtttccacttgttatataaattaaacaggcagcaactgctctgagcctttgttttcttccctgtaatgtggcagtgatagtagcattcatggcattactgtggtaattaaataagatcatgtactagtgcaggattattgctcaatgctatagttctcttccctaaataatataaatgctggagagaaacagctgtctcagaaattttttgaatgttctaatttaacttgagcatgtggacattacatagcccacgaagcaagtttcygaacttaaaaacaacaagaaaataagtatgtgctagcctccaaaatgcgtgtatttaaaaaaagagtcaagattatatgtattggaattgatctggccgtctgcaggaaatggtgatcaggccctggagtc

SEQ ID NO: 904112 - DNA, 625 bp, Homo sapiens
atgaatgttatctagaatttccggtagcgcatgctattggtgccctgcccatagtccttgattaattatcatttctatgcttgtgggtgcaaattgcagtcagctatcacctttgccaggagggctctacaggtagacctgaagtagaagggcattaactctctctagggaaagccctcaaacaattacagaagttggtggataaatattcatctccctacccccttgggcagaccctaagctgtgagttctgcaatgatacttagagtttcccagtggggttaggcttcaattgtccagattgctaacatatttgacaatgcaaactttatttcttttcttcccctttccactatgaaaaagtttagatatttcctagtatcagctcctaactaaactatttgtactcaaatctgtttctcaggatctgcttctaaggaaacccaaataaagacagtttatacacggatgaaaatttattgaagttgaatattatctaaagtaaaaccaaaggttttccattctgaaagtgaatcaaaatctgttgatggttcatagatacaatattgcaaagataattacrtttaatccccaaagcaaccatatgatgtttttagggggagct

SEQ ID NO: 904113 - DNA, 678 bp, Homo sapiens
aataagttcttttgacaaactgactgtaatttgaaatatggccaatgaaattatttgtgaatttttaattttttgtattgaacaaaagcttcaaaatgcatctttaaaaaatatgaaacttttaacaggtctcactttcaatattatgagatacagtttacattatatataaaagaaaaaggctcatacatataaaatagtttttttaatgccgaaaagcaaaagcatgtatttggagatcaaaaatcaacttcaagtctttctcacctctagctcccttctatgaggcagaattttcttcaagccatactaaatagttttctactttagttcaagtcctataaagcctaaaataatataaacatacagaataagagaataccaaatttcatttactggctttgatttaagaaaaatattgaatgcatactcactttaatagaagaaaagcatctggacaaataatgtagatctaagttgtcacttttatgaaacaatgttaccagtcatctcatctcctgtattctcaatacattccaggaatttaaagttcatgttaatagtttcaataaaatttcaaaccaatctatgtgtagctatatatatacatatatatatatatatatatatatatatatattktgttgttcttcttcttctgttgtgtttgtgtttttt

SEQ ID NO: 904114 - DNA, 764 bp, Homo sapiens
aaagaaataaagggtattcaattaggaaaagaggaagtcaaattgtccctgtttgcagatgacatgattgcatatttagaaaaccccatcgtctcggcccaaaatctccttaagctgataagcaacttcagcaaagtctcagcatacaaaatcaatgtacaaaaatcgcaagcattcttatacaccaataacagacaaactgagagccaaatcatgagtaaactcccattcacaactgctacaaagagaataaaatacctaggaatccaacttacaagggatgtgaaggacctcttcaaggagaactacaaaccactgctcaaggaaataaaagaggacacaaacaaatggaagaacattccatgctcatgggtaggaagaatcaatattgtgaaaatggccacactgcccaaggtaatttatagattcaatgccatccccatcaagctaccaatgactttcttcacagaattggaaaaaactactttaaagttcatatggaaccaaaaaggagcccgcattgccaagtcaatcctaagccaaaagaacaaagctggaggcatcaagctacctgacttcaaactatgctacaaggctacagtaaccaaaacagcatggtactgttaccaaaataaagatgtagaccaatggaacagagcagaggcctcagaaataacatcacacatctacaaccatctaatcttytacaaacctgacaaaaacaagcaatagggaaaggattccctatttaagaaatggtgctg

SEQ ID NO: 904115 - DNA, 558 bp, Homo sapiens
gtggaggctgcctagtgccgctgcctagtgccagcgcyttaagaaccccacatcctatacatcttcccagtatgagtgtgtttacacaccccaccccagtgcaacatgtctgccccacagtggatccgcagacacataaatatcattcagatcttggagaaagctgcttttacaggctttgctctataaatagggatagtggaagcattgccctggaaacctgttagcttatactcttgggcctttttataactccagtgagacaaagacccacccccagagttgtgattatttttgtatatgccacctagttcatagttacccactagtaggatccagtgatgtttctgcatcagagtgaaggaatttctaaatgagagcaaactctctgccatgcattgacatcggggttctatagaagtcgtcagatttcaggttataaagcagtgtgtaataaaagcaaacatggaaggtagcatagaataatactagtatctatcactgatgcaaaagaatctttttacagtgcctgctctgtgccaggcgtgtgttatttaa

SEQ ID NO: 904116 - DNA, 389 bp, Homo sapiens
cccaaccttaaggagccttgtctagagaaaggtgatcaacatgttcaaaaccaccacatgtgctggaatgaaggcacgggcaaaatgcttgatgctcccaccgggcaaggagccaacggatgatgggcaggaactgactgggccaaggcaggggaggtaattgctgctgccgctaacacatattaaatgctgactctagtgacagatactaggcggagtgctttacagacgtgatcacacttaattttcacaattgctattatctcactaattcagatgtggcaagcccttggttaaattaatatttttcccaagaacgagcagctggaatggrgctcagaactctcgttctgcacagaggagggtacaagccccaccgtcgtgccatc

SEQ ID NO: 904117 - DNA, 653 bp, Homo sapiens
gagtggtgagagtggacatctttgccttgttgcagttcttaggaagaatgcttccaacatttgcccattcagtacaatattggctgtgagtttgtcaaagatgactcattattatgaggtatgcttctttgatgctagtttcttgggtttttttaattgtaaaaggatgttggattttattgaatgatttctctgcatctatagagatgatcatatggtttttgtttttaagtctatataaattttatttcttaacataaactctatcaaggacaaggcacttttgtaagatataccagctatttagttcatcctaaagagatgaagaatttaatcatgtgaatgcagtcttctttacattattaactgaaaaacaatgggtgtcctttccaactcttttaatattaggaatcaaaaataaatcagaaggaacctaatcataacagtaaggtggatggctacagttttatgatagaaattttcacaaatctgttcttgcttgatgcaagtaatgaataggagcattgttgtggtacagaaggactctccggtgaagtttagctgggcatttttctgctaaagctttggctaactttctcraaaatctcttataatgagcagatgttatcattcttgggctctccagagagcca

SEQ ID NO: 904118 - DNA, 675 bp, Homo sapiens
tcattaaatattgtgaggggagtcggagaaaataattataaagttttttaaaataccaaatcagttttaacactttggtatatttccttctacttttgttttattttgtttttagcaagtggatctttcagtttaacagaacagattttttttttttttagaaagtacagcaatagaaattgaggcttcagaaaactgatgcaagtggatggtttatgtatttgtaacaatagactaccgcaataactaaatctatatagtcattagttctgctaattttctttgccctgattcaatttgatagctattgtttgtactccttttattccagagcttccagctggtagtagtcaacacacttatgtcaaacacaattttaaaggcctagctctagggctttcacagctgtggcaccagatagtattgcagttctcatagctatccttcctcctcctccaaattttcatagactattcaatcaataggtattttttaacacattcaaatcatttaacagcatcctagaaatagaaatagcttggaaatcatacacatacagacaaaagtttgaattttaacttttcagttcattaattatgtgacctggctcaaattaatcaacctctctgaaactctatctgtaaartcaaatcatacttcatctctcactttata

SEQ ID NO: 904119 - DNA, 576 bp, Homo sapiens
taaacaacttcagtaaagtttcagaatactaaatcaatgtacaaaaatcactagaatttytatacaccaataacattcaaactgagagtcaaatcaagaatgtaatcccatttacaatagccacacacacacaaaaaaaacccactagaactgcatctaaccatagaagtaaaaggactctacaaaaagaactacaaaatgctgctgaaagaaacaatagatgacacaaacaaatagaaaaatattccatgcttatgagttggaagaatcaatattgttataatggtcatactgcctaaagcaatatatagattcaatgctattcctatcaaactaccaaaatcatttttcacagaattagaaaaaatctattctaaaattcatatggaacaaaaaaagcctagattgacaaagcaatattaagcaaaaagaacaaagccagaggaatcaccttacctaacttcaacaatattataaggctacagttaccaaaacagcatagtactggtacgaaaacagacaaataaattaatggaacataaatagagaacccagaagtaaagctgtgcacctata

SEQ ID NO: 904120 - DNA, 597 bp, Homo sapiens
tgatgaaccaaactgagttgaactatactgaagagaagccaattagtatgtatctgtgatattttaatattgtattaggcttgcttatctccagcataaacaaaagattgtgagcagggcagccagcatagatgcgagtttttggaaaactgctagtatcagtaaaaggaggataattccagattgtctgtcttcttctttctcctctatctcccttttttcttcacctcttcccgcacagaaatgactgccctcaaaggaaacaaaagtcaatattccaaatgttctttggccactgaacatttggaaatattaaagttctcaaaatgcaaggcaaaaaacagtaaaacacacaagcaagcaaacaaaaaatgcctagctctaaggtcttaacatttactggtaaattttgagagaagtgattccatttcttcatggacataattattcattgttccaatcacttttgcatgcacacgattttgtcatcatttttatgagtaacaaacaagcttgtgaggtggtttgacttttctgcatttcattaawcaaattccctggttgcctttccaattgaaatacagctgttatgctaac

SEQ ID NO: 904121 - DNA, 628 bp, Homo sapiens
ccttctcctgcccttctccaaagcaggttgtatgactttcattcaaaatgtgcccttctatacctggaagaaaagagcatccttatctctgaagacacaaggacacagagaagcacatgaacaaataggccttgctaagttccccaaacagttgtcctccaatcatatttctctacaactactcactcttcttcaaacctaagcataacaatgtacagatttacctgtatatttcaatttccatttatgaaagctccgtgtcataaaaaacttacatcaaatacatttgtatgtgtttctcttagtaatctgtcttttgctacaggggtctcagccatgaacctaagatgggggaaaaatatttcttttcttctataatctccacctctatctgtatctatttatatctgaaatctctatgtaacatatttcaaaagaggtacaattgattaattagaaaaataacattaaaattttactggatgatgagattacaagtaawgttttttactgatttcattttccaaattttctgcagtaaagggataagggttttctttttagtatttcattaagcaaatgagagtgagagcaagataaagagagaaagtaaggagacagtacgcag

SEQ ID NO: 904122 - DNA, 628 bp, Homo sapiens
ccttctcctgcccttctccaaagcaggttgtatgactttcattcaaaatgtgcccttctatacctggaagaaaagagcatccttatctctgaagacacaaggacacagagaagcacatgaacaaataggccttgctaagttccccaaacagttgtcctccaatcatatttctctacaactactcactcttcttcaaacctaagcataacaatgtacagatttacctgtatatttcaatttccatttatgaaagctccgtgtcataaaaaacttacatcaaatacatttgtatgtgtttctcttagtaatctgtcttttgctacaggggtctcagccatgaacctaagatgggggaaaaatatttcttttcttctataatctccacctctatctgtatctatttatatctgaaatctctatgtaacatatttcaaaagaggtacaattgattaattagaaaaataacattaaaattttactggatgatgagattacaagtaatgttttytactgatttcattttccaaattttctgcagtaaagggataagggttttctttttagtatttcattaagcaaatgagagtgagagcaagataaagagagaaagtaaggagacagtacgcag

SEQ ID NO: 904123 - DNA, 603 bp, Homo sapiens
cagcagtgggcgagagggcattatttagtggatggaggtaaggaaaaaataaagcgtatgaagtcgaaggttgagcactatgtggaaaagttttattgttaagcagggaacctgtgtctaggctctggggatgagatgcctagacttgggagggggtgtggggagaactagggtgggtccttcaaagccaagacactgcaaacgctatttgtgcccttaggatagcaaagtctctgatggttgctgttgtgctgatgatgtgtgaactgtcccggggagggtctcctgcttgggatatggtgatataagatgtggtgcccagctgcccctgctatgcacaggtcatgcgggtcaggattgggtggcccagtccactttgcaccagtatcagccggctcatggccaagtcagggtttatcagtggccacagtggtgggaggtgaagacagtgctcttctcatatactccttttatttattatactcycctgcccatttctaccatctacatcatatggcatatgggaacacgaagtttgatcctggacactaccctcagcctcttggagcctcagcctgctcacctctgaggaaggaggataaa

SEQ ID NO: 904124 - DNA, 669 bp, Homo sapiens
aagccacactcctcatcaaagcttacaacgttctgcaraatccagggctgttacctctctccaacatcatctcattcatcactcctttgcgtgtgttctggccacactgacctgctttctgttcttggaacacaccaacattttggtgcattcggacctttgctcctgctaccctctcctccggtgaatttctttttccaacattttgctagctccttttcatctttcatattttagctcaaaggtcaatcttcagaaatgcctttctgagaaactatttaaagttttcacatcccctctccctaaccaaagttatatttataaaataccatttatttccttcataattattttttacaatttgacaaatatttttatgtattcctttagtttctgtctcctgctaaaatgactgtaaattcatatcagtaggtgcactgtctgtctgggaacactgtaaacactgtttactgttgcatgcccattacctagaacctaacttggtagacaaaatgtacttaataagttcttgaaatccataataatcaagaccacgtattttgggtctgaggtctacacctgacataagacttggctgagcagtatttgaggaataatgaaagcagcataccgagaatatgctgaatggtaagttcaaagaaagaggct

SEQ ID NO: 904125 - DNA, 644 bp, Homo sapiens
gctatataagacatgcctttgctcctccttcgccttccgccatgattgtgaggcctcccaagccatgtggaactgagtccattaaacctctttttctttataaattacccactcttgggtatttctttatagcagtatgaaaatggactaatacagtaaattggtactgatagagtggggtactgctgctaaaatactgaaaaatgttgacatgactttggaactgggtaacaggcagagtttggaaccttttggaggggtcagaagaagacaggaaaatgtgggaaagtttggaacttgaacttcctagagttgtggagggtgccaaagacaggaagatgtgggaaagtttggaacttcctagagacttgttgaatggctttgaccaaaatgctgatagtgatatggacaatggattgcaggctcaggtggtttcagatggagacaaagaacttgttgggaaatggaataaaggttactcttgctatgcaaagtgactggaggcatttttttccctgccctagagatctgtagaacattgaactttagagagatkatttagggtatgtggtggaagaaatttctaagcagaaaattgttcaagaagtgacttgggtgctcttaaaagcattcagttttgttca

SEQ ID NO: 904126 - DNA, 592 bp, Homo sapiens
ttgtgcaggaaatgcaagtggtgaccttagcatggggataacagcrggctattttagcaaagtgaagcactgctactatgtattgagagagtacctaataaatcagttaaatgtgtcaaattggaaatgattaagatagttttcaagtgatatctcagcatccatttatagataaactagtaatatgctaaaagaagttgttcttataagaatatccattgatacagatccttaatagtaatattcattaatacagatccttaaaatactctagtgttatttctttcatcttagtggaagcttacctttccatagtgctctcaacttatctaaggaaatttataagttttaaatcctatcatcttcaaagtcaacctataaagaaggatgggcaagtattatgatcagcaatgaccaggtgagggaaatagggtactgagaggtttacttttctgttcaaagtaggtgatctggggttgattccacatctgttggtgcctaatctttggatatttccaacagccccaaaaaggaaagaaagcaacctcacttatgtaaggaaaatgaatctataattactattttttcccat

SEQ ID NO: 904127 - DNA, 647 bp, Homo sapiens
ccacactgttttctataatgatttagctaatttacactcccaccaacagtgtaaaagcattttgtttttctccacaacatcgmcagcatgtgttgttttttgactttttagaaggttggtacaaaagtaactgtgtttttttgccattaattttgatgacaaaagccacaattacttttgcaccaacctaataataatagccattctgactggtgtgagatggcatctcattgtggttttgatttgcatttctctaatgatcagtgatattgagcttttttttcatatgttagttggccacatgtatgtctttttttgagacgtatctgttcatgtcctttgcccacttttaatgaggttgttatcttcttgtaaatttgtttaagttccttatacatgctggatattagatgtttatgagacggatatgtcgcaaaattttctcccattctgcaggttatctgtttaatttattgatgatttcttttgctgtgcagaagctctttagtttaattacatcccatttgccaatttttccttttgttgcaattgcttttgatgtcttcatcatgaaatcttagcctgtgcctatgacctgaattgtattgcctaggttttcatctagggtttttatagttgtgggtttt

SEQ ID NO: 904128 - DNA, 471 bp, Homo sapiens
ggtcagatctttaaagggatcctcaatggktcaaaatcaagctgttagtagggttgcattctttctagaagctcttggggagaataggtgaccttgccttttccagcttctagagactgcccctgtgggatcatggcccctttaattttaagccaggagtgtagtatcatagaaactcactgactcttctgcttgcctcttctacctattaacatccttataattgcattgagtctacctgaataatcaacggtaatcatcttctctaaatgtcatcagattagcaatcttcattccatctgcagcatcatttccctttcgccaaataacctaacatagtcacagtttctggggaagtcgatacaggagatgttattttgtgtacaatccttgataaataatttaaaattttaatacatactttatttatgcctacaaattaaatattgacatataccatataaatgtatt

SEQ ID NO: 904129 - DNA, 663 bp, Homo sapiens
ctagaaggaacccatcctatagggtaaagatgaaaatgaaaaaaaaaagaaagaaagcatgcgacaacacgtttggtttattgctgctttagtaacttcaaatccccacattttgaaaataggaagttaattcccaaatatctttaactacccttcccttcaagcttgagtattcagattaggagttcatgattttatttaggagaatagactccttaacaggatctctgtcgaggaatctactttctatacaaattatagtgttttgcagatgtgtattagttatacattgctgcatagcaagaacacgacaaacttgtgacttaaaataacatacatttgttactgcatagtttctgtgggtttggagcccaagcatgattgactttggtctccaggtaatggtttacttagagtctcaaaaattttcagtcatatttttggctgtggctgtgatctgagcctctatcagggaacttatgcagttgttcgcaaaatgcatttccttgcaggttactaggtgaaagacttaattttcttgctgactgtaagctataggtgatccttagctgctagcygtgtggccctctccatatggcagtccacaatatttgagcctgcttctttaaagtgattcagggagagaaaatctccttgcaagat

SEQ ID NO: 904130 - DNA, 642 bp, Homo sapiens
agaagtatgtcagatttgaagactattaggcaaaccacaaagtaaaattgtctgaatccttgtaagcctcacaacatcaagcatgcatactttggcaaatgctatgcccctcattaagagataatatttgtataacatctacttgccataaatcccatgtgtctcattggacgtattaccactaaaaattattaatgcaatcacaattttgcaaaatgtttatcatctctagtaaaaccactatgtaattattatcatttcatagcttaacattaagcagcatttaccaattttgctgttagggtgatttaatggcatgtcaaatctctggaatggtgaaacaccttcaggtatgcagtatctttcatccacaaatccctgctatttacaactatcaaaacatatcattacaagcaaaaggcagggagatagaagggaacaaatacatgcattattcataaactgtatttctcttctgctagctttctcaaaaatcttcttttctttaggagatgcccagaagcatccatttagattagtttattaacaagatcattgatcagaaatccatgttgtaagacatcttgttgatcagcaagaaaaaaataagatacctatsagatgtgaaatctaatattgtag

SEQ ID NO: 904131 - DNA, 652 bp, Homo sapiens
agatttgttaggaagattaaataagatagtacagatgaagcacacagtagggaggcacatagtaagtgttgagtaaatgttcactattgctactaacataatgttctttagaccttacaataatgcaatccagttaactgtagtggaggctggccggggatacagagcactcaaattcaggcatatataagtgtatgcgtgtgttcatgcatccttggctataggtggctagtgcggattgaatctgtctagtcagcgagcattagcagtgaggcaggctctacagaatgccatgcttgctattcccagcaggggtagagctgtatatggaccacacagatagttggtaaaccactaatggagactaagtgtatttaattcagatcatacatttttcacggacaaaaatgatcagagagactgatcttggccttaaagccaaattcagggcagagggggagtggccactgaagggattttggaaataatctccaaccttccccactgccctaaatcacctgatgctgttgacaatatcataggggctcatcctaacaactgtatcttatcttggatggctgaggagtcagatacgtgaamtaaattatacagccgctctcccctaccaaaaaaaaagaatttaaaatgctaa

SEQ ID NO: 904132 - DNA, 622 bp, Homo sapiens
ctaaacataatttaaaagtctcctattaatctacctttctaagaccactaactataggactataatgctttctgtgtgtgtttgtgcatgcatgtatatgtgtatatgtgcatataatgaatatgtatttatatggttaatatatatacacacataaaacacagcatgtatttgttttaaaatgaaccgctgaatcatgctgtgtaaactgtagttagaatttgtctcttagtaatctatctttagagtaaaaacacatcttgctttatattttttagggtctttggacagaagagaggaatcggttggtgcataagttaggttttcatttctgagttggttgattggataaggtttaggtgaggggagaagagcttgagatggacaaaataggcaaagaatataaataagaaatggttttcaaaaaggaaatgggtattttaaaacagaatccaggtgagagaggggtgaggggattgaataacagactcaaagcagtaagtcaatgctttgcccccayccagaatctgaatctgagctaactagtttcaaacaatacaggggacttagtatatgagctttgatgtcaccaaggaaacaaccagttgggaaagggtgggtg

SEQ ID NO: 904133 - DNA, 657 bp, Homo sapiens
attatcaaaattattaatctagtcccccatgggaaacaactttatcaatgggagtacagtgcttatgtgcagttcctcctgcctttaatcttacagatcctattcatttccaatgttccaatcagtacctttacccttgtcccctctagtgatgttatttcagacatttgtgctacagttagagtctcttatcacagattgcattttttcctgggatcccctgacctcctaaattttttttcaaatatgtatacatgaaggttcaccctttgcactgtaaagttctatgggttttgacaaaggcataatgtcaggtatcctccctcacagtatcacacagaatagtttcaccactctgattgtgcttcacctgtttatccctctgtcttccctctcaaactcctggcaatcattgacgtttttactttctctataatttttcctttttcaaaatgtactataattggaatcaaatggtatgtaatctcttcaaagtggcttctttcactaaacaatatgcatttacattcttccatgtctgtgtgtgtcttgatagctcatttctttttataactgaataatattccataacayggatgctccacagttgatttatttgcccattgaagtacatcttagtttcttgcagtttttgat

SEQ ID NO: 904134 - DNA, 420 bp, Homo sapiens
gattcttgctaccatcatccctcacctggatgattatacaatagcttccaaatgattctccctgctattaaaaataagtcagatcatggtgtgcttctgctcacagatgttcattttactcagttaaagcccaagcccctaccctgaccgacggagccctgtgggttctccagctcaacccacacatctcctccttcctccctgcactccagcctcagggcctgtttgccactcctcaagcccaccactctcatccaggggctcagcacttgctgttcactctttttggaattccccagcccctatagctacatggctcacttcctgtcctcctccagtgacacttcaaatgtcactttmtgagtgatgtttgtggactttatacctactacagttacgtatatagagaaaatatctgca

SEQ ID NO: 904135 - DNA, 597 bp, Homo sapiens
aacaaggactaaacatcaaagactataggaacaccacgaagtacattacagacaagattctgaaacataagttattaactggwttctttacatttttatttcagtaactttattgtaaaattattgttatttatatattttaaagtaccaaattcacatctattctcacataaaatttagctttccactcatattaatgccaaatatctcatagccaaattttagtgatgtttttatgtcaatttgtgcagaaaaataagacacaattcaagagtcagatgcagatggttctactaaacatttgttttctatttcagtaatttctgactttatctgtataatttatttccttctacttccttcagatttcatttgttgtcatttatctaactttctaggctggatatttagatcatttattttatgacatttttctttttattagtttatgagcccataaattttccttctaacaagctttagcttcataccaaagtacttgtatgtcacattttattatcattaagtttagaatactttcttattttcatttaatttattctttgatccacagattgtatagaagtataccttttt

SEQ ID NO: 904136 - DNA, 563 bp, Homo sapiens
gtcttcagtgataagaactgaactcagtctggagaaaattcgaggttgaggatcaaagggaagaaggctcttggtgagttttagcatgtagaagagagccagcgaggagggtggccactgtgagagctgaaaaatgaagttatcaggcagcatttgagacaggcttatagtttgagttaacctcccgaataaatgccagaggagaacgctacattcgttttcagaactgaatgagtatttcattgaaatgtaccagtcaattctttgtgcaattctttgtcatttattagaaatttgaagagagaaagcgttagtaacatttttcagatgctctgtgtgggttatttgaatggctttgtagataaaaatagatctgggccgggcatggtggctcatgcctgtaaccccagcactttggtaggccaaggcgggagaccacctgagcccaggagtttgagaccagcctgggcaayatggtgccccgtctctattaaaaaaaaaaaaaaaatctgattcaacttccttatgattctttattagatttttgcctgtgtgtaattaaa

SEQ ID NO: 904137 - DNA, 510 bp, Homo sapiens
ggcagaaaactgaaactggatccctttttacaccttatagaaaaataaactcaagatggattaaagacttaaatgtaaaacccaaagccataaaaatcctagaagaaaacctaagcaataccatccaggacataggcatgggcaaagatatcacgacgaaaacaccaaaagcaattgcaagaaaagctaaaattgacaaacgggatataattaaacagctgatgcacagcaaaagaagctatcatcagagtgaacaggcaacctacagaatgggagaaaagttttgcgatctacccatctgacaaaggtctaatatccagaatctacaaggaacttaaatttacaaaacagaaaaccccatcaaaaagtgggtaaagtgtatgarcagacacttctcaaaggaagacatttatgtggccaagaaacacatgaaaaaatgctcaacatcactgatcattagagaaatgcaaatcaaaaccacaatgagataccagctcactccagtcagaa

SEQ ID NO: 904138 - DNA, 694 bp, Homo sapiens
tcactcactattgtgagaaaagcatggggggaagtgccctcatgatccattcacctgccaccaggttcctccctcaacatatggggattacaatttgagatgagatttgggtggggaaacagagccaaaacatatcatctggatattttggatattttaacaatattagttatggcattgacatctcttgattgtcatttttctcaagaattggtcatattgtcttggatctttgtatgtgcaatacattttaattacattttaaatattttgctgtgagactctgggttgtgttaataaaaatcctttggaggatgtgtgtgtgggtatgttgtattttatcagataatccacctggtcaggtttagtatgtaaattctgtttaatcttctgtggccagtggttccaatatagttttcaaagactttgttattttgtttgggtctatcctggaactcagggtttagggtgagacttgggcattgttttatactatagattattgtaaaaatattttttatgctaatttgcatctgttttgcatatacagtatgagggtgagcccagaacttgagccagttcacagataaaagtagggaatcctcttctccagttcttccttccgaggagtttctctgtgggtacattkctcctgtcctctggctaaaaagctgaaatttcactcagaatttta

SEQ ID NO: 904139 - DNA, 598 bp, Homo sapiens
atccgtcaatctaagaatagtatttagagtgcatgctcttatgagaatctaatgccaccactggtctgacaggaggtagagctcaggtggttggagacccctgctctaaagggtatcttgggggtattgagctgctccatttcctgcctgtaccagggtaatttctcaaatagcagagctgaagtcaaaacgaagaaaaataggagaaagtagggtaggagctctaacctccatcactctctggcgtgaccttattgctacttactggtgggacctggggcaagttcttcaatctctctgattccatttttgatgtgtaaaatagaaacaataatacttacctcatagggttactgtaatgataaaatgagctagtatgtgtgtgtagcacttagaaaatgagtgtctcacacatagatataccatatgtgctagctataactactgttttattccacttaattcttgccatctgaaatgaacatcttgcattctggtttatgtttgcttgctccagacctttcacacaacttaactatgtcatgcttcaaagcatggtacagaaccyggccacttctattaatttgttccagcctta

SEQ ID NO: 904140 - DNA, 588 bp, Homo sapiens
tctactaacaaattgctctagctcacagattagtcttcattatatcctattagtctgttccttgtactttctttagcttcctttgggtttccatatatgaacaagctaccttgcatctaaaagtttgagaagccatcatttcctctgtgtccatctcttttcataggagctttagtcacattatttggtgtgagataatctcataaggcagtttgtggtccagcactcaatcccccacttcatctttatttcttactgttttgataaaaaaaaaacatggactcgttttgaggatcctttgtctccattaacttcttaatgcaagtcatctaccagcctggaagaatcatctcatccccatttagacatttagacaactattccaggtatattcaggtcaggcaaccgggtggggcttcatcatgctgtactggtgtttccccctcagggcagatttgctgttccagggctgcagtagtccagagacaaagatccctaatcactcccytgttggcatcccaactcagccaagtcgtcctccatgtccaaagggagatatttctcccatttaggggtaatataacacct

SEQ ID NO: 904141 - DNA, 593 bp, Homo sapiens
catatataccaatggaacagaacagagactttagaaataacaccacacatctacaactatctgatctttgagaaacctgacaaaaaacaagcaatgaggaaaggatttcctacttaataaaaggtgctgggaaaactggctagccatacatagaaaactgaaaccggaccccttccttacaccttatacaaaaattaactcaagatggattaagacttaaatataaaacccaaaaccataaaaacccgagaagaaaacctaggcaataccattcaggacataggcatgggcaaagacttcatgatgaaaacaccaaaagcaatggcaaaaaaagccaaaattgacaattgggatctaattaaactaaagagcttctgcacagcaaaagaaactatcatcaaagtgaacaggcaacctacagaatgggagaaaatttttgtaatctactcatctgaaaaagggctaatatccagaatctacaagcaacttaaatttacaaraaaataaaaaccccatcaaaaagtgggcaaaggatatgaacacacacttctcaaaagaagacatttatgcagccaacagacatgaaaaaatgc

SEQ ID NO: 904142 - DNA, 657 bp, Homo sapiens
tgcaaattctggctgaggcaatcaggcaagagaaagaaatcaagggcatccaaacaggaagagtggaagtcaaactctctttgtttgcagatgacatgatcctatatctagaaagccccattgtstcatcccaaaagcttcttaagctgataagcaactttggaaaagtctcaagatacaaaatcaatgtgcaaaaattgctagcattcctatacatcaacaacaggcaagcagagagccaaatcatgaattaactccccctcacaattgccacaaaaagaataaaatgcctaggaatacgtctaagaagggaagtaaaggacctcttcaaagagaactataaaccacttctcaaagaaattagagatgacatgaacaaatggagaaacatttcatgctcatgaataggaagaatcaatgtggtaaaaatggccatactacccaaagctatttatagattcattgctattcccattgatactattctcagaattagaagaaactattttaaaattcatatggaaccaaaaatcctgaatagccaagactatcctaagcaaaaagaacaaagctagaggcatcatgctacctgacttcaaactatactacaagtctaaagtaaccaaaacaggatggtactgatacaagaacaaacat

SEQ ID NO: 904143 - DNA, 657 bp, Homo sapiens
agtagaaattttacatgatcttaggatatataaaagaaaatcttaaaacacattgrtacttaattccagtaacttatgagtcaaggagacagctgtgtaaagcaaactgacagaggcaaaacccaaggaggttggaagtaaaataggaatgaaggatgggagagatgtatgaacaactccagaatcgaaacatctgaaaactcttcaatatctagagacaggactaggctcaggggaaaatgtcttaatatgtgtattatttgcaaaagaaaagtttctaatcatctcattaaaggtgttaagaaacattttaaagagtttcaagtcaggaaaggatggcatatggaatagttgccatcattaataatttgttatatcattgatactatttttatttagccttttgtctttagtagttaatattattggagttaataatatgtggaaggtttatgtactatttttgtttattaataattgaggagtttacatactacttttgtttaataataattttattgttttagaggaagctgccagcttctttttgcttaagtggatagaaaaactttccttggagaagattttctttgtctcttccctaacacttgaatgtctcttcctggctatgacgattagaataaagtaaaataggat

SEQ ID NO: 904144 - DNA, 604 bp, Homo sapiens
cagggtgagaacagactaatatagtttctaatgacttatttcaaaggcagagtgtgaacatttgagcctaataacatagaagttaccatgctgggtaaactatcccagcttctctgcctatttcttcctgcagcttacactcctaagcatttgacttcccttcagcacttcagtataactttgctgtccacaatataattcatgtacttttctaatgaagccacagataattcattgtccagccatatcccctaaaagtgacagaactatttgcagattatgaaaaacataattgaagggaagatagacatgctttacatgagtgtttcctaactgtcagcatatatcagaatctcctgaatgccttgtgaaaatacaggttgctggcagcttttctgattcatgaggtctcggtaaagcctgagggtttgcatttccagcaagttctcaggtgatattgctgctgctagtccagcatcatcgagatcccaatttaagaaccagtgcctccttattaacccatgtcagaatattgagggsagaccatctttcctgatttctcccttcaactctccattagcctcttctgaagcccgaggaaagg

SEQ ID NO: 904145 - DNA, 635 bp, Homo sapiens
tttcagaaactctaaaatacttacttgaatccctggaatggattcatccaaccctgttcggttttcttccttccagtgtgctattctatagtagaaacagtgccaggccatgggatttagacatcagaggcatttccaggtttataaaaaggcgaagactgtattaaagtatttgcttttaagtttgttggccagttcttctcactgaccctggataggtctaggctactctcagcttacctaccatgtctttgtaagatgtgtagtccatggtgcttgaatagcaccacaaagacgtggagaggtaaaagacataagatgatctcaattttgaataattctccttgaggggcaattatatatttttggaaagttcattcttatttattgggccttctttatctcagaattcaggaaggggcagagtgttttcttcccaagttactgactttcttagcatgcgaggctcaaatgacaatgattatttagaatctctgagcagctcagactcagttttttttgtaatgccagcatataggtcaaatgtgaattccttacaattttttctgaatgggaagtttarggaacgactccaatgttcctgtagtcgctctaagtcgtttaggtgtgctata

SEQ ID NO: 904146 - DNA, 635 bp, Homo sapiens
tttcagaaactctaaaatacttacttgaatccctggaatggattcatccaaccctgttcggttttcttccttccagtgtgctattctatagtagaaacagtgccaggccatgggatttagacatcagaggcatttccaggtttataaaaaggcgaagactgtattaaagtatttgcttttaagtttgttggccagttcttctcactgaccctggataggtctaggctactctcagcttacctaccatgtctttgtaagatgtgtagtccatggtgcttgaatagcaccacaaagacgtggagaggtaaaagacataagatgatctcaattttgaataattctccttgaggggcaattatatatttttggaaagttcattcttatttattgggccttctttatctcagaattcaggaaggggcagagtgttttcttcccaagttactgactttcttagcatgcgaggctcaaatgacaatgattatttagaatctctgagcagctcagactcagttttttttgtaatgccagcatataggtcaaatgtgaattccttacaattttttctgaatgggaagtttagggaacgactccaatgttcctgtagtcgctstaagtcgtttaggtgtgctata

SEQ ID NO: 904147 - DNA, 574 bp, Homo sapiens
gattcttctccagaatgaatctccatgctttaactgctgtaactttgtaaaagaatagaataagggacacaaaaagagaaagggcaaggaagttgtggttgcgaagacaaaataagaagtgagctacttgaaaatatcaagaaagtttaactcaattatttccgttcaatctggagtttattagcaattatacttgctaagtaaagtaacattttgagtattcactaaatgacaaacatttgtcactggtgattaggaagttttctcaaaatctatataaactgaacaatattattctcatgtgattaatgaagacatgaatctctgagaggttacagaactaataattagaagagttaagatttgaatccaggctgggcacagtgcctcatgcctgtaatcccagtactttgggaggccgaggcgggtggatcacctgaggtcaggagtttgagaccagcctgaccaagatggcaaaacytcatctctattaaaagtacaaacattagccaggtgatggtgggtgcctgtagtcccagctactcaggagcctgaggcaggagaatcgcttgaa

SEQ ID NO: 904148 - DNA, 570 bp, Homo sapiens
aggaactctgtgtgggggctccagccccacatttcccttatccactgtcctagcagaggttctccatgagggccccacccccacagcaaacttctgcctgggcatccaggagtttccatacatcttctgaaatctaggcggaggttcccaaaactcaattcctgacttctctgcaccctcaggctcaacaccaggtggaagctgccaagtcttggggctttcaccctctgaagccacagtctaagctgtatgttggcccctttcagccacggctggatcggctgggacacagggcaccaagtccctaggctgcacacagtatggggaacttgggcctggcccatgaaaccactttttcctcctgggcctccaggcctgtaatgggaggtgctgccatgaaggtctctgacttggcctggagacattttccccatggtcttggggattaacactaggctccttgttacttatgcaratttctggaactggcttgaatttctgcccagaaaatgggttttacttttctatcatatagtcaggcttcaaattttccaaacttttatactctac

SEQ ID NO: 904149 - DNA, 635 bp, Homo sapiens
agccattcaacatgtctctaggaagctccaaactttcccacgttttcctgtcttcttctgagccctccaamctgttgcaacctttgtctactacccaattccaaagttgttttcacattttcaggtatcttttcagcagtgccccactctactggtaccaatttagtgtattagttcgttttcacactgctgataaacacatacttgagactggggaaaaaaaagacatttaattggacttacagttccacatggctggggaggcctcagaatcatggcaggaagtgaaaggcacttcttacatggtggcagcaagagaaaatgaggaagaagcaaaagtggaaacccctgagaaacccatcagatcttgagacatattcaccctcatgagaatagcatgggaaagacccacccccatgattcaattatctccccctgggtccctcctatgacacgtggggattctgggggataccattcaagttgagatttgagtgggcacacagccaaaccatatcatcttctatgccacaggtactggaatataacttgaagagatcctggatcccaactcacattattttggggaagagaaacaagtagttgaataaacaaaataaaatccagtttatgaa

SEQ ID NO: 904150 - DNA, 655 bp, Homo sapiens
tagatgcttgagaaaatagagatgtaatcatggatacccaccaggtatttgagtcaggttcttcaatgcaaaagtcacatagaagctgctgctttaatgtttgtaacagacttccaaactaatgtctcttataatgtccctgtgtattaagatttccataaaaccattacaatttctatttattttgtctagatgtaaagcagacggcatatcatattacatatattgctaaaattcttgcagcctaatgtatacagatttgtgaattttgagtgatctgaagttcatgaatattttgaggttggtttgttttgtcttgttcaaagcctagatatcatgttttttcagtttaacatatttcttgagggaaaagaaatgtttagatttccagctagttataaaattgtcagaaagaatagaagttaaacatacagagaaacaaaggttacacatctgggaaaatagtagaaaagcctttatatagtcttggcaaatgaattcagaggttttatttttaatcacaactgtgaagaaagaaagattaccttttggggaaattaatgaatattgtgggcttagacataaaataattgttaattgctccatttattagaaatcatatgtcaaaagtkttttatcatcagtaatacaatag

SEQ ID NO: 904151 - DNA, 611 bp, Homo sapiens
gctgaagaatgttctagctctggcctcatttkgccattgggtctcggttctcctaacaaccatatgtggctcgtccctgatggcacgagcactctgcttttggaagaaatttataaaaaagagtaaacacttagagctcactgagtgcctgcctcctttcaccttctttaacaaaccatctgaagtgaccttggagctgagctgaagctcatgcagtcagggtctgtggttaagccttcaaggaagacccttgtccatggctactcagtgccaggaagcttcatcgagtgcccactgacccctcagtccccttcaggccctgcaaccaccccacttggccctcaccctgcacctcccctctccagcctcccactgctcctctctaactgagccttgccctgacccgagagagaccctgccctgtctagagccctgcccatctgtgaccacaggtcatgaactatgccctgctgggcaaccggaaggctctcgcccagctgtttgtcaacctgatggagtccaccctgcagcaggagctggacagccgccaccgctggcaaggcttggtggacacctggaaggctctcaagaaggaggccctgctgcagagt

SEQ ID NO: 904152 - DNA, 603 bp, Homo sapiens
tacactaccagatattgggacttagtttaaaactatagtaatgaaggctgtgtgtgctgctagtgcaaagatagaaactaagagaaatagagagcccaactcagacccacacatttggatgttttatgtatgatgaaagaggtgtgcagagcagtagggagaagacagtcttttcagtaagcggcccaggtcagctggttctccatatgggaaagaaatgaatcgtgactcctaactcacactataaacagaaacccattccaggtggattgtaaatttaaatgtgaaagtttaaaacaatatttacagtagataatatcagagaatattttcatgaccttgagacaggcaaggatttcttaagcaggacacaaagtgtactggacataaagacaaaaatggataaattgggacctattcaagttgtaacatcacttcattgaaagtcaccttcaagagagtaaaaacgcaagaacrgaatgggaatacatatttgccagatttatgtgaaaaagcctcatatttatgatacgtaactaactcccataaattaataagaaaaaagacaatctgccaggaaaattgggcaaaagatttgactag

SEQ ID NO: 904153 - DNA, 607 bp, Homo sapiens; identical to SEQ ID NO: 899954

SEQ ID NO: 904154 - DNA, 593 bp, Homo sapiens
ttgcacatgaatgtacatttaaaaaataataatgaagaaaaatgaaacttgaactccaagtctctgctgcgccccaagcccagcttcctgaaagcctgctccctctcagaggaactcattgagttcctacagttggtctgaagccttctttacacttgggtctaagaaatgtcccagtccttcagttttctaaatcaagctcacctgtatccccatgccttccatcataccctctttacaagggccaatttctttcttcttcttggtttttttttttttttttttttttttttggagacaagtctcactctgtcgcccaggctggagtacagtggcatgatcttggctcactgcaacctccacctcccagtttcaagtgattctcctgcctcagcctcccaagtagctgggattacaggcgtccaccaccatacctggctaatttttgtgtttttagtagagacggggtttcaccatgttggccaggctgatctcgaactcctgacctcaagtgatctgcccgcctcagcctcccaaagtgctagggttacaggcgtgagccaccrcgcccggcccacaagggccaatttcta

SEQ ID NO: 904155 - DNA, 593 bp, Homo sapiens
atttcgttattgtctagagttgcatggctgtytctgggatcagggagtttcctaaacagaatataccattgttagatggcagcataactgtggttttctgctcgtattttggtatgaaggtggatagctgtttcctgtcatttttttcccctttttctcttccttgccacttcatttcatctaaataaaaagaagcaaagttaagggtaacatgaaagaactaccaacagcaaccacttctgttaaagttctgtacttggcctatagaagtcaaggaattcaaaatttatgtaattttttattcatgtacattgtatgtaattagtatagtttttccagtgctttaatgtgaatcacatgaaaaatgtcgtcaaacattatgagcacttcaatatttgcatttcctgttctgtgtaggtaattttgttaatttgaggttagcctcacaagctttgaggggagcaggaagggatatggccaggtgggttatttttccacactgtgctcctccaagctaatgcaattttttctccctggggtgcctttcattccctttgtcatcttacagattcttacctttcctgtaaagttgc

SEQ ID NO: 904156 - DNA, 592 bp, Homo sapiens
tccataaggcaccaaatatgtttcccaatcacatatttcgtaaaatgawcatttcccttaaagtaagaatccataaatattagctgaataaataaaatccatatttaccacaacctacctgaaccacatgtctgatggaaccaatcaccactggcttatcagactctgcttcttcgtgcctttccacaatgtcttctataccccagagaccagagagttccaattctccttcttctaaggggatggagtgcccttcaaaatttggttgctcatacaaaatccaactaacaataaaacacagcaaaaccattagtcagtcttcgtgagagaggttttgattactcaaataacctggctaattgccattttatatatatatatagaatattagcagccaattatctagcaattaaaatagcttaaactctccctaacactaatattttactgggtataattaagcctctgataactcatgaactatatcaggatcttagagaactttggagttacctatatgaatgctatagagctactaatgttctaagtaattgccaagtggtagagacttatgataatatgtcagataaat

SEQ ID NO: 904157 - DNA, 645 bp, Homo sapiens
ataatgtgacattggttatgctgaaagtgtttggtgttaggtttttgttgtcatagtgacatagactatttgaatcatcctagcctcaaccccattgtatctcatgggrcctcccacaatagccctggatatttgaaaagtgtgtacaatgtactaaaagttgatgaacatgcttaacttttactcttagtaaatagagtaaaaaaaaccttgttcaacaagttcttgtctaggccgttgcatgtggtgccattttggcagagtatcagtgatttccgggtattccattctcagcaggaaatgcctactcttgggtcctattctggagccctaacattttagaatcagtagcctgtttgcaaaagccagaagtcatctgaaatataaggtacaagttatctgaaatgttgctggggctctgcagtattttagattgtctttaaagctaattatttaggaggaaaacatagtgaccaacttagtctggtgaaacagttgtacattttgatactcaccagttgtgttggttctattagtcagagcctagtcatccaccctggcagaggaagcaaaaggatgctgggtagaatgaattcccttaggtattttgtagatgatgctattaacacaggtagaattattgtg

SEQ ID NO: 904158 - DNA, 524 bp, Homo sapiens
cactacataatggtaaagggatcaattcaacaagaagagctaactatcctaaatatatatgcacccaatacaggagcacccagattcataaagcaagcccttagagacctacaatgagacttagacwcccacacaataataatgggagattttaacaccccactgtcaatattagacagatcaatgagacagaaggttaacaagggtatccaggacttgaactcagctctgcaccaagcagacctaatagacatctgtagaactctccaccccaaatcaacagaatatacactcttctcagcaccacatcacacttattccaaaattgaccacatagttggaagtaaagcactcctcagcaaacgtaaaagaaccgaaatcacaacaaactgtctctcagaccacagtgcaatcaaagtagaactcacgattaagaaactcacgcaaaaccgcacaactacatggaaactgaacaacctgctcctgaatgactactgggtaaaacgaaatgaaggcagaaataa

SEQ ID NO: 904159 - DNA, 524 bp, Homo sapiens
cactacataatggtaaagggatcaattcaacaagaagagctaactatcctaaatatatatgcacccaatacaggagcacccagattcataaagcaagcccttagagacctacaatgagacttagactcccacacaataataatgggagattttaacaccccactgtcaatattagacagatcaatgagacagaaggttaacaagggtatccaggacttgaactcagctctgcaccaagcagacctaatagacatctgtagaactctccaccccaaatcaacagaatatacactcttctcagcaccacatcacacttattccaaaattgaccacatagttggaagtaaagcactcctcagcaaacgtaaaagaaccgaaatcacaacaaactgtctctcagaccacagtgcaatcaaagtagarctcacgattaagaaactcacgcaaaaccgcacaactacatggaaactgaacaacctgctcctgaatgactactgggtaaaacgaaatgaaggcagaaataa

SEQ ID NO: 904160 - DNA, 356 bp, Homo sapiens
gaaaataaagattgcagaattaaaatacagactccacaaagcaattttaaaatcygcagcactaggccggccaaggtggctcatgcccgtaatcccagcactttgggaggctgaggcgggcggattacttgaggtcaggagtttgagatcagcctgaccaacaaggtgaaaccttgtttctactaaaaatacaaaaattagccaggcatggtggtgtgcgcctgtagtcctagctactcgggaggctgaggcaggagaatagcttgaacccaggaggcggaggttgcagtgaaccaagatggcgccactgcactccagcctggggtacaagagcaaaactccatctcaaaaaaaaa

SEQ ID NO: 904161 - DNA, 356 bp, Homo sapiens
gaaaataaagattgcagaattaaaatacagactccacaaagcaattttaaaatctgcagcactaggccggccaaggtggctcatgccygtaatcccagcactttgggaggctgaggcgggcggattacttgaggtcaggagtttgagatcagcctgaccaacaaggtgaaaccttgtttctactaaaaatacaaaaattagccaggcatggtggtgtgcgcctgtagtcctagctactcgggaggctgaggcaggagaatagcttgaacccaggaggcggaggttgcagtgaaccaagatggcgccactgcactccagcctggggtacaagagcaaaactccatctcaaaaaaaaa

SEQ ID NO: 904162 - DNA, 600 bp, Homo sapiens
tattcaatctttagaatactgttgtgagggaaacatttttatcatcctcatgttacgatgaagaaactgaggccagagagyttaagtaacttgcccaaagtcatacatgatttggatgaaattaaaattcagagaatctggcttcagagtcagtgttgttcatcatgacatttattatattataaatagttcagtagattaatctttgtgacacagggcatatgtcttctaaggtaacacagttttagtaaatatgaacatttccacagtaatgtttcgttatacttaacaaaaaaacagacaaagtaatcagtgtggtattaatgtgccacccatgggaagcaataaactgctgagaccatttttactagtgcatgactatatatgcctgattttgaataaaaatgtttttaaatctaaaaaacagtcttaatataaacatcagctgtttatataaaattattttaaagactcaaataatgtttagaccaattctcttgtctaattaatggaacagctcagaggtagaagcacgatattataagatttataaactgtgcatgatattttgcacattatcattatttgactatgaccaac

SEQ ID NO: 904163 - DNA, 565 bp, Homo sapiens
gcttggcatatgatcatgcacagcttggacagagggtccatggtggaacatagctctagaaagaagcatgagaggagtctagcataacaagaggcaaggtctggagcaaggaggaggtgctgcacatgaaaggagccagcctggatgtagactgattcgctgtaaaaaagcagtcatggataccaagcaaagaatgaattatggagctatgtggagagaaatgggctcagggcaaatttattatgctccatttccactctgctagcaggctgcacagtatctcagaggtacaggtttactcaggactgaaattttacatccagggacagtatctctaataatctaatttggtgagataagaaaatcatatcttgtaaaccgatcatccctttccaaaagcccatataaaagtttataggctgttgaggtgtctagcctagcgcaagcttctattataggcaaagcagagacaacacacttaaagatgaaattattttaataagaatgctactactcggtatgtgcagtttgttctttacaacytgaacttcataaatttttataa

SEQ ID NO: 904164 - DNA, 497 bp, Homo sapiens
tgtggcatacttgaccactatgaaatcagactgtatagccgctatgctccatctggttggctaaaagagaagagaccaaacaatccattgatacatatatatatatcatatatatatataataactctcaccwcatatatatatatatatatatatatatatatacgtcaccatatttttttagaaaaacaacaaaagacaaatttttaaaaggaagttttagccaatttatattatatatataaatatatatatacacacatatattttgtatatatatgtgtatatatatatatacacacatatatatatatggtgtgtgtgtgtgtgtgtgtgtgtttggattgttcatatgtgtcttagtctgttttccattcctataacagaatagcagtgggtaatttataaggaatttctttttgtacagttttggaggctagaaagtccaagagcacgcgtatcactatcatcttgtgaggactttcttgcttcataat

SEQ ID NO: 904165 - DNA, 497 bp, Homo sapiens
tgtggcatacttgaccactatgaaatcagactgtatagccgctatgctccatctggttggctaaaagagaagagaccaaacaatccattgatacatatatatatatcatatatatatataataactctcacctyatatatatatatatatatatatatatatatacgtcaccatatttttttagaaaaacaacaaaagacaaatttttaaaaggaagttttagccaatttatattatatatataaatatatatatacacacatatattttgtatatatatgtgtatatatatatatacacacatatatatatatggtgtgtgtgtgtgtgtgtgtgtgtttggattgttcatatgtgtcttagtctgttttccattcctataacagaatagcagtgggtaatttataaggaatttctttttgtacagttttggaggctagaaagtccaagagcacgcgtatcactatcatcttgtgaggactttcttgcttcataat

SEQ ID NO: 904166 - DNA, 532 bp, Homo sapiens
aaaaaataaatacaatcaattatagaaaaaatgtaatccttgcacatctgatttctgtactgtgattttatccaaagttgctcctaatatctgcaattttaaaaatcttagggccatgtgtgmagtggagatgattgattttttgctgctctaaaccctatattcttaacctcagacttacagtgtcaaagaagaagttacgcaaaacctaggaggaatgacatctagtgcagttgaagaaagtaaaactgcatttggatttgcctcttcccctaagatgatcctatattcttaaactctgaagagacctcccatagactttaagatatattttactttatagaaagtattatagctccaattaagcagctattttgccaaaagccgaacagactcagtaggaactcattgatgcactagctagtcatcagatatttatgtgtgctgggtcaaattaggttgtatgatactgtggccccaatctgaaaatttgagttcaagttccacatttgccactaatgagctatgtgac

SEQ ID NO: 904167 - DNA, 555 bp, Homo sapiens
  misc_feature 1, 2, 3, 4, 5, 6, 7, 8, 9, 10, 11, 12, 13, 14, 305: n = A,T,C or G
nnnnnnnnnnnnnnatactacatgctctcmcttgcaaaggtgagctcagcaatggatacacatgaacatacataatggaataatagacattagagatgtaaaggtgggaggctaggaagggggtaagggatgaaaattactcattaggtacaatgtttactttttttattattatactttaagttctagggtacatgtgcacaacgtgcaagtttgttacatatttatacacgtgccatgttggtttgctgctctcattaattcgtcatttacattaggtatttctcccaatgctatccctcccnccatccccctaccccacaacaggccctggtgtgtaatgttccctgccctgtgtccaagttttctcattgttcaattcccacttatgagtgagaacatgcagtgtttggttttctgtccttgcaatagtttgctcagaatgatgctttccagcttcatccatgtccctacaaaggacatgaactcatccttttttatggctgcatagtgttccatggtgtatatgtgtcacattttcttaatccagtctat

SEQ ID NO: 904168 - DNA, 596 bp, Homo sapiens
tatccctgtcttgtgccagttttcaaagggaatgcttccagtttttgccattcartatgatattgtctgtgggtttgtcataaatagctcttattattttgaaatatggtccatcaatacctagtttattgagagtttttaggatgaagggctgttcaattttgttgaaggccttttctgcatctattgagataatcatgtggtttttgtctttggttctgtttatgtgatgtattacctttattgatttgtgtatattgaaccaggcttgcatcccagggatgaagccaagttgatcatgatggataagctttttgatgtgctgctggattcggtttgccagtattttattgaggattttcgcattgatgttcatcagggaaattggtctaaaattctcttttttggttgtgtctctgccaggctttggtatcaggatgatgctggcctcataaaatgagttagggaggattccctctttttctattgattggaatagtttcagaaggaatggtaccagctcctttttgtacctctggtagaattcagctgtgaatccatctggtcctagacattttttggtttgtaggctctta

SEQ ID NO: 904169 - DNA, 666 bp, Homo sapiens
acattgtttattgaattagaaaaaaactactttaaatttcaaatggaatcaaagaagactccgtatagccaagacaatcctaagcaaaagaacaaagctggaggcatcacactacctgacttcaaactgtgctacagggctacagtaaccaaaacaacgtggtagtgatatcaaaacagacaacccaaacatcatggtactggtaccaaaacagatacatagaccaacgtaacagaaaagagacctcagaaataacacaacacatctacaatcatctgatcttcaacaaatctgacataaacaggcaatggggaaaggatctcctagtcaataaatggtgctaggaaaactggctagccatatgcagaaaattaatactggaacccttccttacaccttatacaaaaattaactcaagatggattaaagacttaaatgtaaaacccaaaaccatacaaaccctagaagaaaacctaggcaataccattcaggatatagacgcgggcaaagacttaatgacaaaaatgccaaaagaaattgcaacaaaagccaaaattgacaaatgggatctaattaaactaaagagcttctgcatagcaaaagaaactatcattagagtgaacaggcaaaawacagtatgggagaaaatttttgcaatctacgcat

SEQ ID NO: 904170 - DNA, 641 bp, Homo sapiens
ggggaatgaaacagatggttagttgctttcaaggtacttgttttctcaaagggaacagatagtacataaacaaccaaatatcaatcacaaagtttatgtactatgaagatgagactaagtatcctgcaaaaatggaaataatgaggagaatgagctagagacgtaaaaaacacgctcccttttctgcccgcctgtattttatagccaagctcaagtgtgttgcgtcctcaaggaaaacttccaagatgacctcagcctcctttactgagatcattttgaggcagacagggcaggaattgtcgtatccaatttacactttcaaagagagaaaatcagagcagaaaagtactatgtcctgggtggtagagtttgtatgaagaaaagtgagatgtgaagccagatctattgataagactttcctataaagtctaattaattgatcctggaaaggatcattaaaaatataattttaaacatgacacttataatgttaaattacaatgtatgcaaatgtattagtttcccgtggcccctgtaagagattaccaccaggtttaccctctcatagttctgggggccagaggtctgaaatcaaratcactggattgaaatcaaggtgttggcagagccgtgctccctcc

SEQ ID NO: 904171 - DNA, 392 bp, Homo sapiens
tgcagaactgtgtcaattaaacctttctcctttataaattgtccagtctcaggtagttctttacagcagtgtgaaaatgaactaatacaggaaattggtactgggagtgggacactgctataaaaataacctgaaaatgtggaagcagctttggaactggataacaggcagaggttggaacagtttggatggctcagaagaagacaggaagatgtgagaaagtttagaatttcctagagacttgaatggttttgaccaaaatgctggtatgagatgaacaacgaaatccaggctgmggtggtctcagatggagatgagaaacttactgggaactggaggaaagatcattcttactatgctttagccaagagactggtggcattttgcccctg

SEQ ID NO: 904172 - DNA, 609 bp, Homo sapiens
ttgggcagccctttgacaaacccaactgttgccagtaaatggggatccagaagacgtgagccccaccttctgaggccagcatcttgtctcagggttccaggccaagctgtgccctggttcgagcttgaagccaaatgacactcagcatgacagccatgggttaggttttctatatatcacaaataaaaattcaattaaacatagaggcgggtggggacggtgtttggggaaaggagtattggtgggggggaagggatctaaggttggttttcttcctaacttggcaagtgtgaacctaaaatgtttcttttaagtcggaatgaccatgtcattccaccttctgcaccccctccccaagcctggttctgattattagctgaagttcagtgcaagtcaaggcaattctggttcggcagccagggaaaaatgacccctttattcagtgaggaaaagctgagtctggtggctgaacgaccgctgggctcatggacatggggctaaggccrcatcaaaaagtattctttctccaagcccagagacccatggttcccactctgtgtgaggttcccaagtcatggaaaaccccaggaacatcccaggagcctggag

SEQ ID NO: 904173 - DNA, 605 bp, Homo sapiens
atttaacatattaagaaattataagaattaaatttaacataattcaatgacaaaaggatttttttaatattgaaggagagtttaacattcagaacaaaaaaagtatgaaataagtaggtatgtaaaattatgatgagtctatgaaaattcagcacataaactgatcagagttttgagtttgcaacaacaatgaaacactcatgggagtgttttccaacatggcccttggttgctttgctagagttggaatagcaaaggaccacaggctgagctggctggtttgaacaacagataatgtattttctcacaatttggaagctgaaagtacaagatcaaggtgccagcagggttgatgaccacctcttttttgcctcttgatgttgtcatcatcagtcctctgtgcacatgtgatcctggtgtctctctgtgggtctaaattttctcttctgataaggacaccagtcatattagattggggcctacaccagtgatcctcttgtaacatattatctctttcaagggcctatctccaaacaaagtcacattctgaagtactgaagtggaaygattcttgtcttagacatcatggtattttgggctgcagt

SEQ ID NO: 904174 - DNA, 606 bp, Homo sapiens
agcaatctacttccataagccaataagtggattatttataaatgaaaatattctcaaaatattgtcatactaagctatcatgcatagagccgtggaattttagcacttgtagtaatctatgatttattttgcaacagttagctaatgtcacataaatgctgtgtgacaaacaaccttaaaatctcagcagcatataataagcatgcgtttaactcatgaaaatgtccatcagctgggggtaggctagctaatctagtttgcacttgtctagtttgaatggggcttattcatttgtctgtggccaactagagatcaactgccctaggttaagtacagctgcttgtgactgctccacaggtctccattccccttctgcagccagcaaaggaacccagggatgtcttctcaatgccacagtagagatgaatgaaagcaatcactttctgtctgctgacatcacatctaccaacatctcattggtcaaacaagtccactgttcaaaccaagagtcaagatgraaaggaaggagggcttccctaccctcagtaagcaggccccgcaaaatcacatagcaaaagacctggttacagggaaggatgactaatt

SEQ ID NO: 904175 - DNA, 672 bp, Homo sapiens
caagcgccttacagtatctgaacttctgaactctttctagtcacttcttcgccactgttgccatttacacaaatttaaatgataccatgtttttaacctcacacaaactagtactattactgttgcctcatacaggttcaaattcacctggattgtttcatatgttggctactttatttgttccttactttctcttgtgccccaagcctcctatttagggttaccttgctctgccttaggtccatcctttaaaattttctttaatgagaatctgcaagtcaaaccttctcaatatttgtttgtctaaaagactatttgctctcattcttgggagatggcttggcagtcattttccatcagcactgtggagatgctccagtggttactctttcttctaaagtctgctcaggtgagctctccttcctttaatgataatttaaattttcttttattacattgaggtatgttccctgtatgctgattttgctgagagttttcatcataaagagatgctggattttgttgaatgctttttctgcatctattgagatgatcatgtggttcatctattaagatgatcatgtggtttttgtttttaattctgtttatgtggtgtatcacatttactgacttgcatatgttaaacygtaactgcatccccggtatgaaacc

SEQ ID NO: 904176 - DNA, 635 bp, Homo sapiens
tggtttcatttctaattgagcttatttggattttctatcttcttttcttggttaatattgataatggtctagcagtcatttttatttatcttttcaaagaaccagctttttgtttcatttatctcttttatttttttaaattaaatttcatttagttctgctctgattttggttatttcctttcttctgctgggtttgggtttggtttgttcttgcttctctagttccttgaaaggcgactttagattgtctgtttgtgctctttcagatgttttgatctaggtgtttaaggctacgaactttcctcttagcaccaccacagccaacataatactaaatggggaaaagctgacagcattccttctgagaacaggaataagacaaggattcctactctcaccacttctcttcagcatagtactggaagtcctagccagggccatcagacaagataaataaataaagggcaaccaaatgggtaaaggggaagtcaaactgttgctgtttgctgatgatatgactgtttacrtagaaaatcctgaagtctcccccagaaagctcctagaactgataaaagaattcagcaaagtttccagatacaaaattaatgtacagaaatcagtagctcttctata

SEQ ID NO: 904177 - DNA, 684 bp, Homo sapiens
gatgactattttcctttattaattcatttaacaaatgtttgttaggaaatgtatctactcagcccttagggtacaaaggtgatcgaggcaattttacaaaattcctacttgcaaacagcttacattcctatggggagctaggcaatacagcaaatgaacagatatacaaacaaaatagtgaaagagaaatgttcacatggtagcatatagacttgctgagggatgacctcttccaaaataaaaagatgtgacggtatctacccgtggcaatagaattaccatccatttataccttgcctctctctaaaagcagggacggatgagatcagttttacaggttgttttatccccattctctgtcacgatgcctgtcccttggtacataaccacatttattaaatgtctgaataaatgaataccatttatttgttattttgctatgttgtatcatttcttttaattatgttgttaattcacaccctttgaaatgcaccctgaaattcatgtaattgtcatgtagcaaagagtttatgggaagtaagttacaaaattagggaagcccatcaaaataaaatgagaacagagcagaccctttgtaatgcatytaaatatcagtggtggaacctcaaatttactgtatatgtgaagatttattttaaagaaatgtgactaatttggaattca

SEQ ID NO: 904178 - DNA, 612 bp, Homo sapiens
gggtaatgaaaacattaagattcaggaaagttcaaaacctagtattggatttattagatttagaataaattatgactattatttacagacctttttgcatttcttagtatataatttttcccagaaaaaatatggtaaaatatatttgttatttttttaaattatttttggctacatctactcacatctttaaaacaacagctatatgatttataaatgttagaaaagaactttttactttcttttacaggaaaaatataggtggaaaatttactcaagaaaatttttaaaaaggttaaaaatgcataaaaatatactcccaaagaatagatgggactaattctccaggctttctaaattaacctcacatttgctattcccacaaagtttagggctgcgaattctatcggaagtggagggggtggagagacagttggaatagtagcatgaagcattgtgtttagtcaaacatcaagctagacattaccgtgaagccatttgtggatgtgattaacatttacaatcgactttattattttatttattattaktagtagtagtttttgagacagagtctctctgtatcacccaggcaggagtgcagtggcatga

SEQ ID NO: 904179 - DNA, 717 bp, Homo sapiens
taaattaagtaatggctctcctcttagtagattttaacttttgctcttgttattctaaaggccaagaaagcagagaactcatcaaatgaggaggaarcgtcaagtgaaggcaacatgagggtgcatgctgtgggtgagtatgcatgaagcaagctgtttgtgactatatcaaggaagaaatggaatctgccactttgggcttgtccctccatcctttgtgaatgctgcacagaattttttctctccccagtcctccccaaggaaatgctcccataaattgttgacattttcttgtgcatacttgatatacaacaatgggtaaatgtgtttgcaaactggaagccctgttgagatattagtgaaagggctagagttcttccttaaatccttttgcttctgaaaagacttaattctatcttatttattctcaaatctgtaacttgctgatgaatttatatcccatacttgataaaggaccttattcctccccctatcacaaacattttgaatttcagccttatttcacttctgaccagcttgcacaacgttgcactaaggacttcagactatgaccatctcaggcatagaagagctgtctgttctttgcacatctccaatccaaactgctgcaagaggaaatctagattatcatgtaaaataatcagtaaaattatcatgtaaaatagaaggttccatctgacattaacacatcaatta

SEQ ID NO: 904180 - DNA, 632 bp, Homo sapiens
tgtgtcttgttgccctctgtgtgtccatgtgttctcatcatttagctcccacttataagtgagaatatgtggtatttggttttctgttcctgcattagtttgctgtgaataatggcctttagctccatctctgtctctgcaaaaggatacaaactccttcttttttatggccatatagtattccttggtgtatatataccatattttcaacatgaaaaaggggtggaatatcaaaatcatcatttgaaaaaagaaatccacaaaactgggtgggagtggtctgggaggagattgtgctggatgaggagatgtgtttagagcataacttactttctttctttctttgtttctttgtctctctttctctttctttcatttttttttttcagacagagtctctgcttgctctgtcacccagtttggagggcagtggcacgatcgtggataactgcagcctcgacctcccaagctgaagcagtcctaccacctcagcctgccaagtaactgggattacaggtgcacacccccattcctggctttctttgttttttctggtatagatgaggtgttgctrtgttccccagatggtctcaaactcctaggcacaagtgatcttcccgccttagcctccc

SEQ ID NO: 904181 - DNA, 647 bp, Homo sapiens
ccaatcttttcctcctcagaaagacttaagtgtaatgccaaacatcttgagggcataagacatgccaggcaagaccaagagaaacaagtagaagtagttttcaattctccatcaaaaggtaayatattaactgttcacagtatccaagaagacatggaatctacctgagtgcccatcagtgaatgaatggataaagaaaaatgtggtgaaagattattcaaccattaaaagaatggaatccttccatttgcagcaacgtagatgtaactgggggttattaccataagtgacataagccaaacacagaaagacaataagtgggagctaaaacagtcgatctcatggaagtagagagtggcagttaccataggctgaaaaggggtgggtaattaggaaaaactgcttaatgggtacaaaaatacagttggaaggaataagttctagtgtttgatagtacactagggtgactatagttaacaataatttattgtatatttcaaaatagctagaactggaatgtttccaacagaaagaaaaaatagttaaggtgatggacatttcaattacactgatttgatcattacatgttatttacatgtaccaaaacatcacctataccacaaaaacatgtacagctattttgtatc

SEQ ID NO: 904182 - DNA, 606 bp, Homo sapiens
gggtaggtacatgtaaaataggtgaagggttgggatcaattagaagaaagtgtgccaaacaggaagacaagttctcaatccagtctgaggatttaacttgtagcttggatttccatctttagactttggcytggaggtggggtttcaccaggtacctatccttatttgcctaggcatttgatatctgtaactatcattgggatgatacccactgtaagttgagaagcacctgtatataatagtttcatatgttattagaacaaaagtatttctctcacatattctcctaaatattaactatttttctaagtttttttttctcaatttattcttgaatgtagtagttttgatagttgactaccatattatgataatgtcttttgtatttttggacatatttcaaaaactgatgtttaaattcacataaatacagttttgtttgttagagttgtattcagttttagcacagtttctttccaatagatttataaaagcgaattatactgaaatataaaattatgcttcatattataatttctggtacaaaaacatctgtagcaagttacgtggtagcaaataaaaatgaaatgttcaaaatgtaaattt

SEQ ID NO: 904183 - DNA, 612 bp, Homo sapiens
acagtggaaggcaaggaggagcaagtcatgtcttacatggatgggagcaggcaaagagagagagcttgtgcaggaaactcctcttttaaaaaccatcagatctggtgaaactcattcactatcacaakaacagcataggaaagacctgccctcatgattcaattatctcctacaggtccctcccacaatacatgggaatgcaagatgagatttgggtgaggacagagccaaaccaaatcattctgcccctggcccctcccaaatctcacgccctcaaatttcaaaaccaattatcccttcccaagagtcccccaaagtcttaactcatttcagcattaatcttacagtccgacgtctcacttgacacaaggcaagtcccttctgcctatgagcctgtaaaatcaaaaacaatttagctccttctcagatacaatgagggcactgggtaaatacagccattccaaatgggagaaattggccaaaacgaaggggctacaggccccatacaagtccaaaatcccacagggctctcaaatcttaaaactccaaaatgatctcctttgattccatgtctcccatctgggtcatgctgatacaagaggtgggttccca

SEQ ID NO: 904184 - DNA, 612 bp, Homo sapiens
acagtggaaggcaaggaggagcaagtcatgtcttacatggatgggagcaggcaaagagagagagcttgtgcaggaaactcctcttttaaaaaccatcagatctggtgaaactcattcactatcacaagaacagcataggaaagacctgccctcatgattcaattatctcctacaggtccctcccacaatacatgggaatgcaagatgagatttgggtgaggacagagccaaaccaaatcattctgcccctggcccctcccaaatctcacgccctcaaatttcaaaaccaattatcccttcccaagagtcccccaaagtcttaactcatttcagcattaatcttacagtccgacgtctcacttgacacaaggcaagtcccttctgcctatgagcctgtaaaatcaaaaacaatttagctccttctcagatacaatgagggcactgggtaaatacagccattccaaatgggagaaattggccaaaacgaaggggctacaggccccatacaagtccaaaatcccacagggctctcaaatcttaaaactccaaaatgatctcctttgaytccatgtctcccatctgggtcatgctgatacaagaggtgggttccca

SEQ ID NO: 904185 - DNA, 612 bp, Homo sapiens
acagtggaaggcaaggaggagcaagtcatgtcttacatggatgggagcaggcaaagagagagagcttgtgcaggaaactcctcttttaaaaaccatcagatctggtgaaactcattcactatcacaagaacagcataggaaagacctgccctcatgattcaattatctcctacaggtccctcccacaatacatgggaatgcaagatgagatttgggtgaggacagagccaaaccaaatcattctgcccctggcccctcccaaatctcacgccctcaaatttcaaaaccaattatcccttcccaagagtcccccaaagtcttaactcatttcagcattaatcttacagtccgacgtctcacttgacacaaggcaagtcccttctgcctatgagcctgtaaaatcaaaaacaatttagctccttctcagatacaatgagggcactgggtaaatacagccattccaaatgggagaaattggccaaaacgaaggggctacaggccccatacaagtccaaaatcccacagggctctcaaatcttaaaactccaaaatgatctcctttgattccatgtctcccatctgggtcrtgctgatacaagaggtgggttccca

SEQ ID NO: 904186 - DNA, 661 bp, Homo sapiens
cagtgcacagtgaacctgcttcacaagcaccagttcctcattctacatcaccatcaccattttcactacatttccagtatgtaggacatccatcagtagacattatagtttgttttcccaatctaaagattttttacatttttaattattgtagttacatagtaggtgtatatatttatgggataagtgagatgttctgatacaggcatgcaatgtaaaataagtacatcaaggagaatggggtatccatcccctcaagcatttattctttgagttacaaacaatctaattatactgtttaagtaattttaaaatgtacaattaagtaattattgactatagtcaccctgttatactatcaaatagaggtattattcattctatcattttttgtacctgttaaccatccctacctcttccccagccccctactactttttccagcctttggtaaccagccttctactctctatgtccatgagttcaattgttttgatttttagatcccacaaataagtaagaacttgtgatgtttgtctttctctgcctgacttgtttcacataacttaatgatttctagttccattcatgttgttgcaaatgactggatttcrttctattttatggctgactagtactccattgtgtatatgtaccacat

SEQ ID NO: 904187 - DNA, 573 bp, Homo sapiens
tgggttttttcccctggttttaaaaagaatttcttttcattttcatacttaccgctaagtatgatgcctactatagggatcttctagattctctttattttgttaaaaaaattatttytattcttgattatatttgtgtttacaccttatatatactatcttttgaaattttatatgtcgatattttatgtggtccattttatgtactatgacttttaagtcctaaacttcctaaataagtttctaatgatagtagattagatatatttgcccattagtattattttttatgctttctaaattaaggcaaaagcacacagaagggtaggttcagagtgatgaataggtaaatatgactttgtttccaaatctgtcaaggaaattccacattggtatcttgtagctgtaatcaggtttattttatgagaatcacattaacttttctagcgtctcctgtgaaataaagaatctgttgtcttgagttttcaacctatttttattgctaatttaagtaaatcaattaagatcttgagaccttggtttggccttgtatacagtgggggacaattttac

SEQ ID NO: 904188 - DNA, 640 bp, Homo sapiens
tattaattcaggagaaaagtatagttttcaaactatactatatcatattgtgcaacataggtcgtctttgaattcattctatatagtcaaaatatataaaaataaaaataatgcaaacattattaygatataaccaacttggagtcatgaggagacaggatttatgcatgtgagtaatagagtggtagagaatataataatactcatcttgaagagtggaaagttaatagataacaaaaatataatgaagcagccagataaacacatgattcatagatatggaggtaaacatcaaaagtaacacctgaaagagttgccagagcttgccacttgcaccacagatgcactaccttctctcttattctatgtgccctagtgtctcctgccacagaatctgtaatcatggggttcttcctgacccttcaatccttttacacattaacatctactcaatttttagctttcactcaattgtcacttccttagaaaagacatcttaaacatttagaaactccatactatgtcaaattctcttattttgtcctcttatgacattgtaaactgttttgtaaaatgtgccgtggttccaattgtaccttacactgtgagctcagaaaccacattagttttgatatccact

SEQ ID NO: 904189 - DNA, 602 bp, Homo sapiens
ttttttgaaggttttttcatgtctctctctccttcagttctgctctgatcttagttatttcttgtgttctgccagcttytgtttgcccttgcttctctagttctttttattgtgatgttagggtgtcgattttagatctttcctgttttctcctgtgggcatttagtgctataaatttctttcttaacactgctttagctgaatcccagagattctggtacattgtgtctttgttctcattggtttcaaagaacttctttatttctgccttaattttgttatttaccctatagtcattcaggagcaggttgttcagtttccatgtagttgtgccgttttgagtgagtttcttaatcccgagttctaatttgattgcactgtggtctgagacactgtttgttaggatttccattgttttgcatttgctgaggagtgttttgcttccaattatgtggtcaattttagaataaatgtgatgtggtgctgagaagaatgcgtattctgttgatttggggtggagagttctgtagatgtctattagttctgcttgctccagagctgagttcatgtcctgaatatccttgttaattttcagtcttgtt

SEQ ID NO: 904190 - DNA, 595 bp, Homo sapiens
atataatttacaaccacacttcaaagctttatggtctataacayttatgtgttatttttatgcaataagatgataaaggattttacaaccacaagatacaagagttggaaagacctcccagatgatcttccggtatgtcaactgcggtgataatgctatagtcttttccttttttttttttttaatgataaggggaagcagataataaatttagggaaagctggaaaaataaaagttatcttagtctcactccaaactaaactgaagctccaaaaaagccattcaacttgcctcgatccagagcaagcttaatatctaggctccctttattgctcttcattttatttttaaacttctcttgacccaggtggggaagagttgctacttattgaggcgatcaccaaatcatcatcagccttctttctggtcatcttatctatcttttaaggaatataaagcctactctttacgtgatagagaagctttccttcagtttagcagtgagtagtgaagagtaggtgaatattaatagggctaaaaatattttaaatgtatagaaagaaaagaaagtcagagtaaagagttataaataata

SEQ ID NO: 904191 - DNA, 670 bp, Homo sapiens
tagaacacattgacttttgttaatttcccattagcggtatttatttcagttaatttagtgatatatgtctactcacatagaagggtaccattaggctttggatcatttccccaatccgatatgtaggcatatagtctttaatttattaaagagaatcagccctgttcaatttaccatgctttactgtgtttctagctgtcagtactttccactattcctcaatcagactagggaaaaggttgttttcttcctctatacatttggagatgttaatggccaactcctcaggactttataatttactctagaaaccatcctggtttctagagaaatacaacagtttgttaaactgtcatttctttttgcttttcctacaagaaccaatgaaatgaatcttgctttattccttggcttggagttttgaacatgattttattagattatctctctcttattttactttgttggtagaactttttatttgtcttgtttctgtcatttatttacttttactagtttttgttcatttcagcaagatttggtgaaaggaaattctatggtgaagtttaagtcccccacctccttatgtacacctgaccaagaargcaattaaaaatattatggtggctaacacctataatcctagcactttgggagaccgaggcaagca

SEQ ID NO: 904192 - DNA, 675 bp, Homo sapiens
tttaaatttgatcattaaatataagaacattgagattcagggagaggcactgatctgcttaagatcatacagaacagctgtctgtatttgactggagtttgtccacctccaaaatcttcattcatgcagtgacttcagaccgcatttgttgtaaagaataagtctgcctctttctattgagcctgtgtagctcaagagcatttgcagtttactgagcagactcattattctctgacttgatttttctctcttttttttttttttccttgagacagagtttcgctcttgttgcccaggccggagtgcaatggtgtgatctcggctcaccgcaacctcctcctcccaggttcaagcgattcttctgcctcagcctcccaattagctgggattacacgcatgcaccaccatgccctgttaattttgtatttttttaaatatactttaagttctagggtacatgtgcacaacgtgcatgtttgttatatatgtatatatgtgccatgttggtgtgctgcacccattaattcctcatttacgttaggtatttctcctaatgctatccctcccccstccctccaccccatgacaggccccagtgtatgatgttccccaccctgtgtccaagtgttcttattgttcaattcccacctatgagtgagaacatgcggtgtttgg

SEQ ID NO: 904193 - DNA, 593 bp, Homo sapiens
tattggattagggcctgccctaatgagctcatttaatcttmattacccctttaatgacttccaaatactgtcacattcttaagtactggaggttaggacttcaatatatgaattttagggggaacacaattcagcccataacactgtccttgggttccttaagacaagtctgtactgttacgtaacctgtataaagctaagccaccatgtaattcagtctcaactcagtgctgcatacaaagatatgcaaaaacaaaatagaaaaaaagaattgaaaactattaacatatttactgaaatatcttggaaaatgctgcgaagaggttccaaagttgacacattacaaaagttctttaaaattgtcctcatccactcatctcttcaaaaccctagtcatcataacatagtagctaatcccgatctttactctaagtcatatctaaccctcccttctctcgttcctgatctattatttccttattccataattaactttttgtattttccaataaaaattataaagccgggcttggatcttcttatttccacccatcagcaaccacactcatttgccccaattctatacaagaaag

SEQ ID NO: 904194 - DNA, 603 bp, Homo sapiens
tattaaacattggtaatgccttccagaaacagttttggaagtcatctgaatgacccagaataagaacagccaaagcactcagtcaggsaggctgagctaagccttcaggagctatgcatatttaagcagatttgatgatatcaaagggtaagttatgtgtaggcagttttccttgctgagtccctgtgtagagaacacagctttttctctttttccttttagatatgggattgaaggtttccattcagttcatgtgtgcactagacaacaacaaatatagttaatccaactgcaagttcttaagcacacatccaattcttattctctgaggtccaagaaacatcccttccacttaatattactcacctcaaaaatttgtgaaaagtgtttgctacgcacaaaaaaaaaaaaaaaaaaaaaaaaaaagcttagtatagtcaatgtcttcctcccatttagtagatgtgtgtcagcaaggacatttatttttagaatgtgtttactggaaaaatgcagtggcatttgaatgattgtttagggaaaaataacgtctttgggtgagccataagtgaagaaaaaaaggtcatttgagaagatttcagc

SEQ ID NO: 904195 - DNA, 647 bp, Homo sapiens
catttgtcaattttgtcttttgttgccattgctctgggtgttttagtcatcaagtctttgcccatgcctatgtcctgaggggtattgcctaggttttcttctagggtttttatggttttaggttttatatttaagtctttaatccatcttgagttaatttttgtataaggtgtaaggaaggggtctattttcagtttcctgcatatggctcaccagttttcccaataccatttattaaatagaaaattttttccccattgcttgtttttgtcatgtttttcaaagatcagatggctgtagatgtgtggcactatttctgaggcctattttctgttccattggtctatatatctgttttggtaccagtatcatgctgttttgattactgtagccttgtagtatagtttgaagtcaggtagcatgatgcctccagctttgttctttttacttatgattgtcttggctatacgggctcttttttttgtttcgtatgaaatttacagtagttttttctaattctgtgaagaaagtcaatggtggcttgatcgggataccactgaatttataaattactttgggcagtatgkccattttcacaatattgattcttcctatccatgagcatggaaagtttttccatttgtttg

SEQ ID NO: 904196 - DNA, 636 bp, Homo sapiens
cagaaatatataactaagtaaatctccaggamggaaaatgacatccggaaagtattgctaagaagtgcaaagaatgtaaatccacaaaatccaactcaaataaaaaaggagtggaaccaggaggatccattactcaatttcaagtcattacttcaatgtatacctagattttgatgtgtttggtaaacctgttataaattgtatagtcttttatgatctgtatgcacatataagtgaatgatgtttaacggattattatgtggatataataactctttacaagtagcaataattttattttatttggagaaattaacctctctgaatctcagttggcattcttgggcccacagaagaaaaatgtaatgctcatgatactttcaggattgtttctaagaacaagtttttcagaaagagattcccagaaatctttcccataggggacaaaccttagaaattaaattaaagctttaccattatgatcaaactactgatacatacagcaatatggatgaaactcagaaacataatactgttcaaaaaaagatggacccaaaaggctacaggctgaatgattccatttatttgatatttggaaaaggcgaaagcttggagactgaaatttaattaggactg

SEQ ID NO: 904197 - DNA, 440 bp, Homo sapiens
gatatacatgatatatgactattctaagctctaaaatctccatggaattatttatgacagataataatggatttagatcataatctcaaaaaacacaatcccaaaccctgtaattccaaatgttgaaataatgaattatcaaaattcattaagtctaaatccctaatgtctaaaatccccaaaagcataatcataggatagttgtatcgtggaactattaccttgttattgtctttatttagaaattaagtatggcttaaggagatgtatatggattcctaattgacaaggagtagatttgtgaccttaattttaagtgtcagcttgactagattaaggaatacccagaaaaatggtaatgcattattttggacktgtctgtgagaatgttccagaggagattagtgagtgagtccgagtgggcaaggcgaggaaaacct

SEQ ID NO: 904198 - DNA, 621 bp, Homo sapiens
ctttgttgcttttgatctttgttggtttaaagtctgttttatcagagactaggattgcaacccctgcctttttttgttttccatttgcttagaagaccttcttccatccctgtattttgagcctatrtgtgtctctgcacatgagatgggtttcctgaatagattacactgatgggtcttgactctttatccaatttgccaatctgtgtctcttaattggagcatttagcccatttacatttaatgttaatattgttttgtgtgaatttgatcctgtcattatgatgttagctggttattttgcttgttagttgatgcagtttcttcctagtctcaatggtctttacaatttggcatgttttggcagtggttggtaccattttttcctttccatgtttagtgcttcctttaggagctcttgtagggcaggcctggtggtgacaaaatgtctcagcatttgcttgtctgtaaactatttatttctccttcacttatgaagcttagtttggctggatatgaaattctgggttgaaaattcttttctttaagaatgttgaatattggcccccactctcttctggcttgtagagtttctgccaggagatcagctgttagtctgat

SEQ ID NO: 904199 - DNA, 658 bp, Homo sapiens
cattcatttcaaaagggattttgttttatatgtactgtattgggtttgggcactaaacacttgactcccatttcagaatgaattagtttgttaaatgcaggtatttaaatagaatagaaactctaacaatgaatttcttcagtaagtacttttatcttattgtataaaatattttatagtgttatccttttctttcactaatatgtgtatatatgtatgcatttcaacttctattttaagtcaaatattttttatttttattgtatttataaatttgtcacacttttaaatcactattaacaacatatttttataagtacaattataggtaatcttgcataaatgatattctattataaatgttcaaaataaaaaaattgaaaagttcgttgctgactatatgctagctgcatatgagatatgtggatttaatcatatactgaaattaatatttaacaatttatctagaacacattttgaaatatttaaaatattcattgtaggtggttgtttctccaacgacattcccacttttccatttaaatgccaaatgtgtgttctgatattgcattttcagtgtatacattttacattaataagtatctaactaataaattgctkcattattcattactatatgaatttgcaagtttcctat

SEQ ID NO: 904200 - DNA, 639 bp, Homo sapiens
acagaaatgaaaacaactcttagtttcttctctaagattttccaacttatgccttacccttctacccattactgtacatcctagcagcagacagcawgagagaaacaggttacagtccttctagtcagtcatgatcaaaactgtgcataaactaataataaaaagtagaaagaactctgagaaaccatctctttctcctgacactgttgtggatgaagagctgcagcgtgagttttagaatacctgctcttcagagaaagtattcccctgagaaccaggcattggcttcagcgtaggcacctggtttgagaatggactcagtgatggctttaagagtaaggtagaaaactagagctggaaagttgaatactagaaagaaaaatgctgggagtctttcaggttaccactaacaggacattctcaccatcactgtccctaatagcttactttgcttggtaccagttgtattttttggatgctcaggcagactgcagaaaatgtgacctaaaggatatttcatcaaaaaggggttttgggactgtataaatgttggaggtcagtcttcataagggaaatctcggggccaatagcaacatgagaataaacttgtggggaaattatttattgcctcttaggaga

SEQ ID NO: 904201 - DNA, 704 bp, Homo sapiens
aacactattttctggatattttagctcctatatgtcactggagataaaaggcaggtcgataaaattcaagcagaagttaggttgagatttctgccaatagacctayagacatagccttagtaattttttctccaaactttcaatgtttattctgtacatttaagataaaaagcaggaagaagttcatcctaaaaatgtaattaatattaaagcaagaagaaattcatgctatatgttaaatttaacttaaatcaatttgaaagaattggaaaccaaatgaaaataacacattaagaagctggactaatacaggatcccaaagtctctctaattgcttagtatattttcaaataataataaattaattacatttaaatttctgtgaacttcgtttgataattgatacagttgagtccagaaacgaatcattttgtccacctcaattgcattatatttttgttcttgatggttgtcagcagttacagctttgtgaagaaagtgcatcttgttttactttaactgtgtgtatgcagtttgtatagactgataatataattgatgtctatttcagcattgatgatggaacatcatcaaagtcatatccttttctttgtcactgtctttaaccataacactgtaagaaaaacacccctcttcttgtcttcctattatactgcatgccattaaaagtgaaagaaatgcta

SEQ ID NO: 904202 - DNA, 544 bp, Homo sapiens
caagcagagaataaaagtataacatctctttcctgtygttttcaccgcaccctccagccccccgtctctggaaagtttacaataactgtgcctcatgacatagcataaggagtgagtgctttgatctgaaaacagacacacttgggttcaaatcctgactcagacctattcgagcagtgggatcttaggaaaattatctccggaaccttaaatttgcatacatttaatatgaataaacgttattaacatatcctctatgtcatagggttgtgaaatgctttgtgtactacctaggacagagtaaaatcaagaaacattgactgttaataataatgaagactggaataagacttctgggatgtgacattaaaaaacagcaaaattcttgccagttaaatgtaaaatttaccagagatgagaagagagtgtttttctattttgttttgtttagagggacagtgcgatatagcattttagttggaaaaagctgagctatggagacaataaagacctaagtttgaatccatgctctgtctctgattaa

SEQ ID NO: 904203 - DNA, 599 bp, Homo sapiens
ttataggaaagattctatattcgtgcttggaaaataaggtttcttccattcagactgctttcctgatgaccaggtctataagaattagcaccaaattgcctcttgacataaaaagggtatcttacaaatcttcttgaataactggcagtttttccaggtacctgccagatattgaagttgtagtatttggaggtgcaataaaaaatagagaaagaagctgtaggattttctgtattgaggagggttttaaatcattatatgttaggtttaacagtgttgagatacatggaatggcaggttatatgtagaaggggccaggattctactaacatgttacattggacaatcagcatgaagattaggatcccaggatggatgattctggacacacaagattttgaactgtgccttctagattcatcatataaattgatacctggaatcagagttcaagcattaattgtatagggaggaatctccctaatgaacagagtaygaaaactctgtaactattatgtgcttctctgtgttctaccatcttagtaagggcagacccattgtagctgtgggagggaggcaggttcatggtgaaatccatc

SEQ ID NO: 904204 - DNA, 590 bp, Homo sapiens
tttccctacaatcactgtgctctccgttcctcaagtgcatgggttctctctccatgccatgaggctgttgccagaagatggaggagggctggtgatagtaattcaagactgtctttcctaccttcttcacagcatctttcagcaatataaagttaaaaccaggtacagttattgcacacataatttttgtttttttatgaagggttttttttgtgtgtaggtagttgttaaatttggtgttcctgcagggaggacgatcagtgaaagcttctattcagccaccttgctccgcctccaccaaaagcttaacattttattggaatatcctgtgtatatttggtttagggcatgtgtataaagtggcattgtgtaaaagtagaaggaggtcctgtcatccatgattactaaaataacagcattgtgaaataaagtttgggggcttgatcaatcttcaggggaccacataacagaaaaacaggaagttgatcatgtaatccatccattctaaaagtttkcaaacattagaggtttgtttaaatgcagattgcaagttttcatcttagccaactagcaaagcaaagcaaagtgaa

SEQ ID NO: 904205 - DNA, 669 bp, Homo sapiens
caacaaaatactagcaaaccaaatccaacagcacatcaaaaagataacacacctgggctgggtgtggtggctcacacctgtaatcccagcactttgggaggccaaggcaggcagatcacctgaggtcaggagttcaagaccagcctggtcaacatggtgaaaacccatctctactaaaaatacaaaaattagccaggtgtgatggtgggcgcctgtaatcccagctacttgggaggctgaggcagaagaattgcatgaaatcaggagatggaggttgcagtgagctgagatcacaccactgcactccagcctgggcgacagagtgagactccttctaaaaataataataataataataataataataataataataataataataacaaaaaccaaaaaaaaccccaccataatcaagtgggatttataaaaggggtgcaaggatggttcaatatatgtaaatcagtaaacatgatacaccatatcaacagaatgaaggacaaaaactgtatgatgaattcaatagaagtagaaaaagcatttgataaaattcarcatcccttcatgatagtctcaagaaattaggcaatgaaggaacatacctcaaattaacaaagggcatatacaacaaatccacagctaacatcatactgcatggagaaaagtgga

SEQ ID NO: 904206 - DNA, 583 bp, Homo sapiens
tattaatataatgacaccagtcatattggaataagggtccctccttctccagcatgatctcatctgaactaattccatctgcaagaccatctttccaaatatggtaacattttaaggtatttggggtcaggacttcaacgtatcattttggaagacaaaataaaaccattaacactaggcaggccaaaattttgaaaaaatcaacagtctccttctttagtgatagttttcagaggtagaggaactagattaagattgaaaagagaaaaaaataaagttttcctgtttgctaaagtaaggaagatttaagcacagtatttttatgattaacagacctttcaaaataacaaagatttcagttttacaaactaattaattgaatttttatttcattaaagttcattcttcatttcttaatactttttttagttgtcttaagcatgttacattttattagtaccataaatgccttttccatctatattttcaaagtttttctttaccytaatcccacactgcacagggatgtaaaaagggctttagactttcaagattccataggacttaaatagataaccaataa

SEQ ID NO: 904207 - DNA, 590 bp, Homo sapiens
catcctggcagttgtcttttggtgcctcagtgtaraatgaggtacaaatgtgtgcatgtgtatgcatacactcttcagacacaccacatgcttacatatctgatggggaagggaccctggaagtggagtcgaatcctggtaaggattctcaggaagagctaagtctatatccagaaagatatacagtgccaagaatccatactccaagcctcagtaagaagaagctgaagcatttttctcttggctggtaatgaggaaataacgattcttctctttatttcccctttcctctctgaggcaagtgagggtgtagaaagacaaccaaatagagaacacatagtttgatttaatttttctgagtatagcactaaaatccctaggatactgtttctgggagaacatccaaggttaggaatcctatagatacatttattatgttctagagtcagcttagaagggtagaagagaagaaattttatagctgctccaacacctctagaaaaatttaagatcgttcccaaataaggcagaagaagtggagttcactgcccttagatgctaccttataagtcagtaattaacctaagggg

SEQ ID NO: 904208 - DNA, 569 bp, Homo sapiens; identical to SEQ ID NO: 903403

SEQ ID NO: 904209 - DNA, 694 bp, Homo sapiens
ataccatagttaaggtattggtttttttctaaagcactacaacaagcttcctctaacctgtctttctgcctgctttcttgctttgcctttgatatattttcagttgtgttatcagagaacgttttcttttatagaaatgcagagtgttcaagttaacgtcaaactccttaggatgacgcagaggtgtaacgctctcacctggtcctgcccaacttatctagtctgctcatctcatttcgcaatgtctgtacctatctgtgaagaaccacgtacaacttcctcaatgtgctgtggtttcccttgatctcatgctgttgcacatgctactttcttggttaatttctacctgtcatccgagactcagtccaggtgctaccacttttcagaagccagagttacctgcctttcctatatataaccacagcacattttgcaattattataactgctggtttactccattggcttataagttatttgaagagagaatcttaatattattcacctttgtatttccaagacctaacatatggtagatgataaataaattatccgtagaggagataaacaaagtaacataaagaaagtaagtagaggagactggtctgtaatataaacatcaacgctgtcctggaaagtaaaccatagacagaaatggaataaagatgytaacaactgactgaagtcctatgag

SEQ ID NO: 904210 - DNA, 476 bp, Homo sapiens
agctgtatacttcatttattatgattattattattgcttttttcttttgtgagacagaatcttgctctgtggctcccagactggagtacagtggcatgatctgggctcactgcaaccttcacctcctgagttcaagcgagtcttgtgcctcaaacgcctgagtagctgggattacagatatgcaccaccatgacgggctaattatttttgtatttttagtagagatggagtttcgccatgttgggcagactggtctcaaactcctggcctcatgtgatccgcccgctgtggcctcccaaagtgctgagattacaggcatcagccaccgctcctggcctcatctatatatttcccatctttgataataaggtaattgcagaaaggaaacaaacaaatgaaacgtaatgtggaaataactgatataattarttttctgaatgtctgaagcctggaagcctgtaaatataatcctatac

SEQ ID NO: 904211 - DNA, 688 bp, Homo sapiens
gagttggccctggttgtggagaaggaactggtgtggagaagccttctaggactgcttagatactmccaaagaaggatttctcacctgtctttctgaagggtataaacttggctgccagtattgggcacctgaaagcaaaacgaatgtaaaatgttttactcttccatatgtaagcctttcctttaatttcttcaccttctaaccagttttatactgtaggccaggggagagtggtgttcaggtacttaagatgtgtggcataaagaaaggtttaacatgaatctaaagagttttgaccaatatttccttttctcatcccaatattatcctcgcttctagagatatctaatttggtaatgtcctgagcctttgggaaattctgcaatgtaaattgggttgtttcttggcttagaacttagtttccttggtattatttagtcattaagtagatttgtccgtctgctttctagtttccaaaattttgttgttattttacctctaccatcctgccaccacctgtggattaagcatttttaaatatcccattactgttattttacatttcaggagagagaacaggtaaacatataagttcaatctgtcatctttaaccagaggctaactctctgaaattaagaatcacaatatgattaaaagcatacttcagaatcagacacagcttacacgg

SEQ ID NO: 904212 - DNA, 699 bp, Homo sapiens
tacttaacctctctgagcctcagttttctgatcagtaaaatggaatcatagtagccacctcactgatgtcctctgagaactgaattttaagcacttagtgggtgctgtttgaattctctttaggcttgtggctccaggctttcctactggtctttctcagttcctacctggctatatgggttgttctctgtttgcccctccagatccattgtcttagacttttctgccctgccctgtaccattagaggctgaaagctatgaacagcattactcagaggctccttcgtcctctctctggctttcagttgggttcaaccaataaggagagacagtaggagattagacagtgagaaaagagaggttgagatattcctatccccagcttcttcctcctgtgacagtgcctgggtttgtcccatgaagttcctgcacgaagcactgttccatatcactataattcacttccctgtctccgcctccttgggccagggccatcactgtttgccactgttgcttgttcctggctggcttccttgactgtgcctccatcttcatcaaaagccccttcattaagttctctttgaggtgtgccagctgttcctgcctgaaccccgactgatgtgggtgttcgcatatacygtttgctatgcctgaaacctttatacctcacaccactccccagcccttttacccccaatt

SEQ ID NO: 904213 - DNA, 576 bp, Homo sapiens
ttactctcctcattgtcctttgaggtagtgtcaagttagtggattatctctgttttcaaatgggcaaatatgggcacgcaagataaagttaattaagcaagagcacatactgaatcgtaagatgcttggaactagactttggaattcttcacctttgactccctttaaaaatttaatgattatttacatattgatcaacaaaaacaattttattgagagttcgttaggaataagatgggctgctgctgttaggtgtttctttccttaaaggcttgagggaacactatttcctttttgagaagggtcactttgtatgtttttgtttgtttgtttgtttgttttttgagatggagtttcgctctcattgcccaggctggagtggaatggtgcaatcttggctgactgcaacctccgcctcccaggttcaaatgattctcctgcctcagcctcactagtagttgggattacaggcatccgccaaccaygcctggctaattttttgtatttttagtagagatgggattttaccacgttggttaggctagtctcaaactcctgacctcaggcgatccacca

SEQ ID NO: 904214 - DNA, 591 bp, Homo sapiens
acctggtggaaagtgattggattatggggaccgtttcctccatgctgttcttttgatagtgagtggattttcatgagatctgatggttttatgaatggtagctttttctgtattgacacacacttgatctcttacctgctgccatgtaagacatgcctgcttcccattctgtcatgattgtaagtatcctgaggcctccccagccatgtggaattgtgagtcaattaaacctcttttctttgtaaattacccagtcttaggaagttccttatagcagtgtgagaatggactaatacagctcactacctgggtgatgggatccatacccctaacctcagcatcacgcaatatttccatacagtaacctgcacatgaaacccttgtatctaaaataaaagttgaaattcattttaaaaggttatggtctataaaactccatttatgtaactttttagaaatgaaaaacttatagaaattataataaactactgtcrgggatttgtcaggggataaagaggtagtcagagggtaacgggtgtggttataaaagagcaacaggaaaaagaatccctgtggggttggaacttgttc

SEQ ID NO: 904215 - DNA, 692 bp, Homo sapiens
attttttcacattaattttgtgtcctgagactttgctgaagttgcttatcagcttaaggagtttttgggctgagatgrtggggttttctaaatgtaggatcatgtcatctgcaaacagagacaacttgacttcctctcttcctattggaatatgcttgatttctttctcttacctgattgccttggccaggacttccaatactatgttgaatagaaatggtgagagagggcatcttttcttgtgccagttttcaaaggaatgctttcagcttttgctcattaagtatgatattgactgtgcatttgtgataaatagctcttattattttgagatatattccatcaatacctagtttattgagagtttttaacatgaagggtgttgaatgttatcaaaggccttttctgcatcttttgagataatcatgtggtttttgtcattggttctgtgatggattacatttactgatttccgtatgttgaaccagccttgcatcccagggatgaagccaacttgatcatggtggatttgttttttgttgtgctgctgaattcagtttgctggtattttgttgagtttttttacgtcgatgttcatcagggacattagcctgaaattttctttttttgttgtctctctgctaggttttggtatcaggatgatgctggcctcataaaatgagttagggagg

SEQ ID NO: 904216 - DNA, 624 bp, Homo sapiens
aaatggttttgctcattgagaaggcagaatggcactgcaggagacccttcccggctccacaggtactaccccagaaaggatgcgtgacgtgtcttgatctaagtcaacacagaagcgagcaacttctttcagttcacatgagggctgcaacctgactcatcaatttactgaatctttacattactaagataaagttacaaaagagcaattttatcttcatttcaattcatcatgatatagttttaaaaagattcttaggacagagtactaggaataaatggagactaactggcatacagtccaatctaacattttaggcacaaaccttaatttgttgggcagggttaggcataatatatccttccaagtgcagtggaaaagcagtcttggcatgtttggatatgttgatttgcatatacggattttgtttgttaccaaagctacgtatttgaatacagcagtcagacatgagttcccttcagggaaaatgcaccttagtattttaactttgatattttacatgatagcaattcccactcccttttccttttgatatttactagcctccytagcctccaacatctacagccacatttaactggaggaactcactcctcccaggta

SEQ ID NO: 904217 - DNA, 660 bp, Homo sapiens
acacataacccactgtaacatttagttgtcttagattttggtattcactttagcacgactcattatcagttccctggtatgaggagctgggatcctgcctaacacttatcattacatattaaatcagcacaataaaaatgacagaacaaagcattggctttaaaggcaacaaattcttttaaggctacactaaatccttgtctatctatatagtattaagttatagtactgctactgtaattaaatgctatatgaggaaatgtaacaagatactatgtggccaaagtaaaatgctaacctaaatagcatcgttaaaacataacacatgaaataaaattggaaatcacttttagaacactgctcatgttacaagatgtcagaatcatgcataatgcaagagtggaactgcttacagagtttacacaagagaatttaaacttgcttccatggacatgaggaactgctctttgaagcatggggtctgatgagattctgcctggctctaacgatattccaagggaatgttctcgttctatctgatgcatatttatttatagggtgctgaatgaaggagcattcatactacatggcagattgcaccttcaccatatttttcattaatcayctgttcttcagcatcttcaccattgctttattatt

SEQ ID NO: 904218 - DNA, 591 bp, Homo sapiens
agaaagaaaagcctagagccagatggcttcaatggtgaattctaccaaacatttaaagaatgattagtaacaatccttcasaaactcttccaaaaaagtgaaaaggatggcatacttctcaattcattgtcaaaggccagtattacccaaataccaaagccagacgaggatatcacaagggaagaaaagtataaaccaatgtaatatctattatgaatatagacaaaaaataatcaacagaataccaacaaaccaaatcaagcatcatattatacattctgaaggttatctaaggaaggcaaggttcatttaatatacaaatattaattaatgcaaacactatattaacaggataaaggacaaaaagcacaatattatatcaacagaagcagaaaaagcatttgacaaaatctaacgtcatttatgacaaaaaaattagaaattaggaatagaatggtgcttcctaaactagagtaagggcatctacaaaaaaacgatgtataatatcatatttaattgtgaaagactcaatgcattttctccaaattcaggaataaaacgatatctgctctcacaacttctatttaatat

SEQ ID NO: 904219 - DNA, 602 bp, Homo sapiens
agaaaacattaaaaatgtggccaaggcagctaattaggatcatttggttacagcctataaccattgttttgaaagtaagcctttcaaaggtaccgaaagtaaaagtatttgaacaagtgagaagtgtgacgcttaatgaagagaaacccaaagagacaaatctgaagagactctggatgagggtcctccaaaatacataaaacctagctgggtgcggcggctcatgcctgtaatcccagcactttgggaggctaaggcaggtggatcaatcacctgagatcaggagttcaagaccagcctggccaatatggtgaaaccccgtctccactaaaaatataaacattagccaggcattgtggcaggtgcctgtaggcccagctactcagaaggctgaggcaggagaatcgcttgaacccggtgggcagaggttgcagtgagctgagattgcaccattgcattccagcctgggcaacaaaatgagactccatcttaaaaaaaaaaaaaaaaagtatccactgtcctgaaaaagaaataataaacaaataaattaaaagggggcagsggctggacaccagtggctcacccctgtaatcccagtactt

SEQ ID NO: 904220 - DNA, 587 bp, Homo sapiens
agcaggccagcccatctcccatgggtaccaccgtcccccsactcatcaccagacagggaatccccagctttgatgacagcataaaccctccatccttagttgagtatactgagtgattgctggcctgcatctttcttgggggagccccctggaaaaaaacaaaagacccttgaccacaaccactactaaggtcccttcctctgctgcctccatgttggggaaggatcatgaacactgagatcaccctggagctgcagtgggcagcccaggagtgctaagctgtgatgtacagccaacactcaagggcaagaggaattcacacattcagaccattgagagggaatacaatttcaactgtgaggaaacacaggaaacacaactgaggaagggtctaccaactgaccagtgtacctaagtgccacctaatggatcacaccccaaagcttcaacaccaaaaatggcttgctaacatattcccatctaaaaccaaaaatgagaagtcagcttcaaatagaccctgcacaaagcctcgtccctgtgaaaagactcagaaaagaaatctactgactacaagagattcagtgtac

SEQ ID NO: 904221 - DNA, 645 bp, Homo sapiens
caaccaaataggaaaagaggaagtcaaaaattatccctgtttgcaaatgacataattttatatctggaaaactcagtagtcttggcccaaaagctccttcagctaaaaaatttcagcaaagatacaggatacaaaattaatgtacaaaaatcactagcatttctgtacaccaccaacagccaatccaagagcaaaattaggaaggaagtcccattcacaaacgccacaaaaagaataaaatacctaggaatacagctaacccgggcggagggcgggggcgggtgaaagatctctacaatgagaattacaaaacactgctgaaacaaagacacaaagaaatgcaaaaacatcacatgtttatggataggaagtatcaatatcattaaaatggccttactgcccaaagcaatctagagatgaaatgctattcccatcaatgacattcttgacagaactagaaaaacctattgtaaaattcacatggaaccaaaaaaaagagccctaatgggcaataataaggcaattctaagcaaaaggaacaaagctggagtcatcacactatccagctttatactacagggttacagtraccaaaagagcatggtactggtacaaaaacaaacgcatagatcaatggaaaggata

SEQ ID NO: 904222 - DNA, 603 bp, Homo sapiens
tttatggccttaatcactcgtaagcaaattcagtcatgaggcaatgcccttggtagtgagttagacttagtaatattggcagtgcatggtggaygaaaacttttcatacatggcttcttccttcacaaaggaagttttctatagctttttacttgggattttttttttttcagctcaacaaaaggatggagatctggcttttgaaaataaacccttggaaggagccatagagagatgccaactagcttaggcctgttttctcatccacaaagaaatgaatttatttgcttttccttcatgctgaacaatacatgtgtggaaatagatcccaggttcatgagaaatggaaattgaattggattattaatcagcgttctgagctatgcctgggaatgttctgaatgtactatattgagcacaaatacacacaaaaaaatacaaaagaattagtttgtaaatacaggtgtgggtggcagtttcatgtcagtgggccaagattggtctgatgaaatgtttcactaaagtgattatcacaaaacagaatgatttttacagtgaaaaaagttttagacaaaaccctatgtgaataatattaacttgaga

SEQ ID NO: 904223 - DNA, 575 bp, Homo sapiens
tgtgtgtgtgtgtatgttttttttaatgttattattttctttatttggctaacatgtccttctcagggagtatgacmcccgcccccgccatcaccctaaaaagtgaaaccaatcctgactttcatcagggaataagggatccatcagcatatactgtcagagaaaatatatttgaactcccctcccactgtcactcttggctacacttaacagcaaaaagtttacctggctcacaataaacagaactaaaaagacttctggatgtggaagttaaagaggaaatctaatgagtttctgatcttggaaactggaaatagctttgcatttaattaaaaagttgagcctgtaatttaaaccagatcataaatccttagtggctagagaagcagagaaaggaagaaatagctttgatttgacagaattgagctcagaaaagccacagaattagaaacttctaagagttacctctgaatttgaatgactctggtatctagctatgacatgaaccaccatcttgcatatcaaaagtttatacccatcaaaaattaatcacactattgaatagccttttttta

SEQ ID NO: 904224 - DNA, 575 bp, Homo sapiens
tgtgtgtgtgtgtatgttttttttaatgttattattttctttatttggctaacatgtccttctcagggagtatgacccccgcccccgccatcaccctaaaaagtgaaaccaatcctgactttcatcagggaataagggatccatcagcatatactgtcagagaaaatatatttgaactcccctcccactgtcactcttggctacacttaacagcaaaaagtttacctggctcacaataaacagaactaaaaagacttctggatgtggaagttaaagaggaaatctaatgagtttctgatcttggaaactggaaatagctttgcatttaattaaaaagttgagcctgtaatttaaaccagatcataaatccttagtggctagagaagcagagaaaggaagaaatagctttgatttgacagaattgagctcagaaaagccacagaattagaaacttctaagagttacctctgaatttgaatgactctggtatctagctatgayatgaaccaccatcttgcatatcaaaagtttatacccatcaaaaattaatcacactattgaatagccttttttta

SEQ ID NO: 904225 - DNA, 582 bp, Homo sapiens
atgaaatgggtttgcttctgaccttctagatgccagtacttctgtccttcaaaatgacatataactggtcagtttttacttatagacrttacccaaagtaaagtactattttttattattatttttaacttgagcctggtttaatttaatacatgacaatgaacttgccatgtttggttctaaacaactgggctgatttttattatggtattttgaaattgcacttgcatgtattttaatcaagagatttgtcatacaagcataataatgcttctcttctatcatttcacagatctaaaaatgaatggtagggtgagtgtctgaaaactggtttaataaaaaaaagtctcactgaaaattatggaggacttttaagtagtcttaattagtattttcatttttaatattaacttttccactcttcagtacgtaaattctagtcaatgtgctgaaagcctagtaaaaatctgaaggtcctatttgaagtcaggcctacagcatgtcaaggactgactatccatgtctcaatgttcaatgcttcccctgtggtagaagtagaagtattcattgcaataattctat

SEQ ID NO: 904226 - DNA, 639 bp, Homo sapiens
aagcataataatgcttctcttctatcatttcacagatctaaaaatgaatggtagggtgagtgtctgaaaactggtttaataaaaaaaagtctcactgaaaattatggaggacttttaagtagtcttaattagtattttcatttttaatattaacttttccactcttcagtacgtaaattctagtcaatgtgctgaaagcctagtaaaaatctgaaggtcctatttgaagtcaggcctacagcatgtcaaggactgactatccatgtctcaatgttcaatgcttcccctgtggtagaagtagaagtattcattgcaataattctataaacacttaccaagcacttatgaagaagcagactcttgatttcgaagatgacctggtctccagaaccttacagttcaaaagagctgccacttattaagggcttactctgtgccaacctaattgctaagcactttacatgaatcactcatttaaacctcaaaactaccctagaaaagggattagaattgttaaataayttgagagaaatcacacatcttagaagtggtagaattggattcatgccaaggtctctgtgactcaaaagtgtgtgtcctattaattaccctttacagaaacccatacaggaaagatag

SEQ ID NO: 904227 - DNA, 555 bp, Homo sapiens
cgtccctttgacaaagtcccatcattgtgtttgtgttgggtgcttcctaaccttctggcactacgtgatgctctgaagtcatcttgtatattttctgmccctgcaatcagccaactctccatttatatttggcttttgtgtctgtacttgcattttgtactcacattacatacgagcacatctaatgtttcgtgaattgacgttgaacaaaataatgagagcacaccgtgcagctctgactcagaatttgagccattgtcgagttttcccctcttctttaactttatttaacttgtcggtttgagccaaatccctgggagaaataaacagatttctcagagggccagactttttcaaacaagagtttggactaagcagacttacctatagcaaaaagagtgacattagaaaaacctgccaaaagaatgattaatttaacagggtagagataattgtcaatagaagaaaatgatctttaaataattgttaacagagagagaaacagtagtctcaaaatgtgcatttaaactcttaactaaatttgatacacttgaa

SEQ ID NO: 904228 - DNA, 482 bp, Homo sapiens
gtctctacaaaaaataaaaaatttgacatgcctctagtcctagctgttcaggaggctgaggtgggaggattgcttgaggccaggaaatcgaagctgcagtgaaccttgtttgagccactgcactccagcctgggtgacagagaaagaccttatttaaaaaataaataaataaataaataaataaataaaagaaaaataaaagagtttctgttgttattacttttatagttaccagtataagtttaaattttataattctatttactattttataacatcctataacatctgttggctgccaactatgaaaggtgaacaattgatacacttacactagaacaattgaagcwcttacactatctcttactgcccttttccaccacagcttcaggttgtggttattaaatttcattttctgtggcagtgtttaagattttaaatttagtacttatatccatattctatgattaattaatgttaat

SEQ ID NO: 904229 - DNA, 631 bp, Homo sapiens
agtttctttatggttgatatggaataaaaatcattttgtatctatcattaacatttgacatattattattttcatactggctcagaacactcccttggcaaagaggcgttaagttattaaaaaaaaaaaaatctggaacatttaaagccaaaagaaccctgactgaaaggaaatctgctctctctgttaagtgctaactctcctttaagcattttttagtatgccaagcacaccatctgtgctcaattacttgttgttttgtaacctcaacatctgtttatgagaaaatatgtgcttgcatacattaaagacttactttccatacaagaatttgaaagttttttatgttaatccacatgtaatttattcttcatttttctttgtgttctcatctgaataatgaaagctaaagtattagaacatctgaaaagcaaagactaacaaacccatgtaacacaacatgaatggaaaatacaaatataaacttatataatcttcaktaattttattgtatatagacttaaattttatgcaagtagtctggaaatatcagagatcttttactacaaaattttatccccaactctgttgtatccataactcaataaaattacttatatgaatgtaagag

SEQ ID NO: 904230 - DNA, 518 bp, Homo sapiens
atgactataactaattgggaacatagtgggacatttagtgattccagagctctaatgccatttgaagttcaacatggccttttgagagactgtcaaatgatattttttcagacattaatggtgaggaaaaaatgataagaacagaggaatcagatggccttgttagaatcctggcttagctactaattagtagtaccatctagggaaagttacttaaaccctctgtgacccagctttctaatatgtaaaatgggaatgttaataatgcgtcttcataggttgtgatgattaaataaagtaccatgtgcagagctcagacctgtcttcaacacacagtgagttttagcaattttgacaatagaaaactcataaagacttaatcaccayaacctaatactgtcacatatatgagaagctgtttcacatctaaactatagagaaatattttcagtgatgatacaggtaaaatgttgcttgaaacttattgatgagaagacattgagaataatggcaacatc

SEQ ID NO: 904231 - DNA, 635 bp, Homo sapiens
atgtagaaagctgaaattggatcccttccttacaccttatacaaaaattaattcaaaatggattaaggacttaagtgttagacctaaagccataaaaaccctagaagaaaacctaggcaataccrttcaggacacaggcatgggcaaggacttcatgactaaaaaaccaaaagaaatggcaacaaaagccaaaattgacaaatgggatctaattaaactaaatagtttctgcatggcaaaacaaactaccatcagagtgaacaggcagcctacagaatgggagacaatttttgcaatctacccatctgacaaaggcctaatatccagaatctacaaggaacttaaacaaatttacaagaaaaaaacaaccccatcaaaaagtgggcaaaggatattaacagacacttctcaaaaaagacatttatgcagccaacagatacatgaaaagatgctcatcatcactgatcatgagagaaatgcaaattaaaaccacaatgagataccatctcatgccagttagaatgctgatcattaaaaagtcaggaaacaacagatattggagaggatgtggagaaataggaacgcttttacaccgtcagtgggagtgtaaattagttcaaccattgtggaagtca

SEQ ID NO: 904232 - DNA, 636 bp, Homo sapiens
tttttggtagagacagggtttcaccatattagccaggctgctcttgaacttctgaccttgtgatctgcccgcctcaggctcccaaagtgctgggattacaggcgtgaggcgctgcgcctamccatatttctttatagtaatgcaaatggcctaacacacttatgtaagtgaaatcatgcagcatttgtcgttcttgactgggttatttcctttagtgtgatgtcttccaggcacatccacattgtcgcatataatgaagttttaataactgttctaagacttagctgaagtcaaatggaatgcttctggtacttccctcatagcttatctcctggccttgactatggccatttcctattcccaccctgctctccaaggtggtattctagccatccttcaaggtcctgtgcgaataccatctcctctaggaaggcttcctttggtttcaaggcagagttcaatcgtaccccatctgaaaaccaatgacactttggagtacctcatgatagcccttcacaaacccctttaatgtgactgtgtgtgtatcgtctctctacagtgagaataaaagctccaaagccaggaactatatcttcctcacttcctcattctccacgggaccttgcgtttaataat

SEQ ID NO: 904233 - DNA, 552 bp, Homo sapiens
ttactgaatttatgtatcagattgaaaagcmtttttttcttttttctttttgagacaaggtcttactctgttgcccaggctggagtgcagtagcatgatctctcggctcactgcaacctctgcctcctgggttcaagtgattctcctgtctcagcttccctagtagctggaattacagcctcttgccactgcgcctggctaatttttgtattcttagtagagacagggttttaccatgttggctaggctggtcttgaactcctgacctcagatgatccacctgcctccacctccccaagtgctgggattacaggcttgagccactgcacctggccctaaaagctttttagatgagtatttagggtttcccagctatacaattatatcattggtaaaaagtgacaatttgacttcctctttaccaatgttgtttattttttgctttactctgattgctctggccaagacttccattactatgttgaatagaagcggtgagagtgggcattattgtcttgttccagttctcagaaaaaatcctttcaacttttt

SEQ ID NO: 904234 - DNA, 593 bp, Homo sapiens
accaggaaaaaactaaagggtggctgagaatacatcatcccataaaaattaaaaaaacaaaaaaaaaaaaaacaaaaaacaaacttgaccccaaaacackttcacaagatctctgtgcctaggggagacaaaagaaaaagaggcacagagatttttttacaatacagtgtcagggaattagttttggtttattttcatgggcgatatttacaaacagaaaacaaatctttttaaatgtcccacccaatggtttgtaaaaaaataattaaaatacagtatcaaaaatgtaccctaaaggacaaacagataataatgtgaattagagagggaaagttggcatttgggataatcagaagaaactggaaatttagtattttactgcaagccagagttaggctggaggaatgggggttgaggggtagacttgagaccccgtttgagaaacatgaaaaaaaaatgcagaagatcagtctcctgtggagtgtgaaaatagttaagtgacaggcaattcgaggtacgtggctgcgatgcctggattcctactttaaaaaaaaatgtaactcaaatgtatttttttgtaaattactacatta

SEQ ID NO: 904235 - DNA, 609 bp, Homo sapiens
aaattattcccgggggagaagaatataatgataaggtatcaggctctttattcaaagaactaatcagattttagaaagacacaacaatgcactgtagggtttctraacaggctataatgacctgttccccacaatggttaaggaagtatatgtttagcagagaatgagttttccgggtttttgagggagggctcagagaaggaggtgggaaaccccattgtgcagcagcaggagagataccaggcctatagtaagaatattctctttcgaaaaattgaacgataatcctaatagttgcaatgtattaattcttcagtctctttctaggaaaaaaaatgaagttattgtgaaagagatctgcctcagagaggctaccttgcaagacaggttgattatggctaatgaattacacatggcttattgcatttcacaaagaccaaaccacataataatattctcatgagatcacgtcagaatcagccgcatcctgggctcctgcctattgtggtcagaaaacccgatagagacatgcaggttttcctatctaatattactcttagtatttaaggagtgctaaaacgtaggtgaattgagctttctgaagaaata

SEQ ID NO: 904236 - DNA, 595 bp, Homo sapiens
cttctatcagcagtcaagctgcacaccaaagatattcttaaaarccatgtaatttcaatgtacttaacacatagaaaatgttctaagatggagatagatgggagttaaggagaaatgcaatatatggtttatgtcttgagaaactttggcttgctaggtcacaaggtacacagaaccaggtataaaatggctaaaacctaaatattaatgtgaacatttaatacatatcatacaaataaatactagcatttcttcattactacttcattcattcaacaagcctttaccttgtgtttactgcttacaggcactatggaaggcagtggcagtggacagccacgatatggccttgtgaggggttcagttgagtgacgacatgatggtgaatactcaataaatatgtgctgaatttataagctcaaaatagcatgtgctggagatacccacagcatgtaaagaggaatagaagagtgtcactactcctgactggaagtcctggtgttagaggaaggggtatagatttgtggactaacagaaaagcaagtctcactgctgctggagttgagtcttgaagaaacaaaagcagaggaaaaca

SEQ ID NO: 904237 - DNA, 629 bp, Homo sapiens
cctggcgtcatttagatgttaaataaacttttcttggacagaactgaattgttaatgctttcaatgttgctatatagatcrtgcaggttggttcttttgactaaggattacaatggaaaccatttggcctctatgtgtacatgcacaattacagttgtccctggagattatttacttttgatagtatgacctgaaaatatcaacatagagtcatgcatgtgatccctgcaactcaggaggaagaggtgggaggatcacttgaggccaggagttggaggccagcctggtcaacggagtgagaccccatctctcttgaaaacaaaaaaggaaaagaaaaaaaaaaagaataaagcatcttagatgcataggctactgattgttatagtacgttaagtttgagattgaacaattgtgaaagagtcgactgatagaagtcattatataattatgtcaaagtcaatgttttttgaaactagtttacaaatgacacaacaacattttacaatttaaatgaagttcaagttgagatatctggaaatgtaattgacagcatttttttctttatttgaaagcacagtgatcaataatgttttgggaaataaattacagacatgaaactgagtgcataa

SEQ ID NO: 904238 - DNA, 645 bp, Homo sapiens
tacatcttaacacatactgctaaaagacaaaaacaagatacaaaatcatctctagataatgatgtagactgtttaaaaataaaatagaaaattggaaataaatcaaatactaacatttgttatctgttagtgataagactgttgttaatatatgtggacatgcttattagacatacaagtggtgatgaaaaatagttattccaactcttctgtttagaatttttttgctttttttgttattcctctgtggaatatttccagaagtcaaataaagttgagggtcattcatgaataaaaggagctggttcattattgaggggctcttaccaagacacttaactttttgttttgttttgttttttaagacagggtctcactctgttgtccaggctggggtgcagtggcacaatctcggctcacggcaacctccgcctcccaggttcaatgattctcatgcctcagcctcccaagtagctgggattacagacaggcaccaccacacccagctaatttttgtattctccgcagagatgagattttgccatgttagccaggtcagtctcgagctcctgacctcaaattatctscctgtctcagcctcccaaagtgctgggattacaggcatgaaccacgatgctcagcccc

SEQ ID NO: 904239 - DNA, 615 bp, Homo sapiens
acattgcaaacaatggttttcattttctgcccccaccaccaaactgtcagctacttgaaaataatggctatattttactttacttgacagagcaatggcttcatacagtgcttcakaaatgcttgttgctcaaataaatccatttgaaaaattaacctccttgctctgtagttttacctcacatgatctgacatacttgtcatctgcagttcaatgtcaacccaggagtaattttacaagaaagattgtgatagtgttgaccctcgacgcttatattagtttttcaacaataatctaaatgctggtagagaaagaaggctaatacacaaaacagtaacatgagctacggaagtgagccaggactttaacaagaaaacataactgaattagtcttcaaaatgacattggtaacttaaagaaatcatttatctcagaataaagaacttaagcaaatgtacacatgagctatttaggcccatattagagctatttctctatcaatgaaaaatacacccagaaaagcttactatgaagcacaattctcagtatgtaaatctattatcttgcattaaaaataccacacaaatagcctaccgcccagcaattcctttgagg

SEQ ID NO: 904240 - DNA, 638 bp, Homo sapiens
acaattttgtccagtgtgtgctatttggctggctgaattattcagttatgttcatatctttttgactgatctactttatacttcctaatattttaatcaaaaattaatttttgttacttaagccattttaactatctgtactatagaacaatctattatatataatgaataataaagatatttgcaaagtgtctgggtgtggtgcctcacacctgcaatcctagcattttgggaggccaaggagggtggatcacttgaggtcaggagttcgagaccagcctggctaacatggtgaaaccccgtcactactaaaaatacaaaaacattagccgggtgcggtggcacatgcctgtagtcccagctacttgggaggttgaggcaggagaatcacttaaacctgggaggtggaggttgcagtgagctgagatcgtgccactgcactccagcctgggcaacagaccaagactccatctcaaaaaaaaaaaaacaaaaaacaaaaaacaaaaacgatatttgaggtgagatatttgcaatccctggctcattctcctaaataatctgaaacgttaatttttctttcagtttgtgatagcaaaacacttaaataraaaaaatgttagtttagtaatattcatttc

SEQ ID NO: 904241 - DNA, 594 bp, Homo sapiens
tgagctctgagaacagacagactgcctcctcaagtgggtccctgacccccatgtagcctaactgggaggtacctcccagtagtggccaacagacacttcatataggtgggtgcccyttagggacaaagcttctggaggaagtgagaggtgacagtgtgctggcagcccttgcagccctcgctcactctcggtgcctcctcggcctcagtgtccactctggccgtgcttgaggagcccttcagcctgctgctgcactgtgggagcccttctctgggctggccaaggtcagagccagctccctcggcttgcagggaggtgtggagggagaggcatgggtgggaaccagggctgtgtactgcacttgctggccagctagagttccgggtgggtgtgggcttggcgggccccacacttggagtggccagctggccctgctggccccaggcagtgaggggcttagcacccaggccagcagctgcagagggtgcgccaggtcccccagcagggcactgcacttgatttctcgctgggccttagctgcctccctgtggggcagggctcgggacctgcagctccccatgcctgagtctcccc

SEQ ID NO: 904242 - DNA, 574 bp, Homo sapiens
gtcttcagtgataagaactgaactcagtctggagaaaattcgaggttgaggatcaaagggaagaaggctcttggtgagttttagcatgtagaagagagccagcgaggagggtggccactgtgagagctgaaaaatgaagttatcaggcagcatttgagacaggcttatagtttgagttaacctcccgaataaatgccagaggagaacgctacattcgttttcagaactgaatgagtatttcattgaaatgtaccagtcaattctttgtgcaattctttgtcatttattagaaatttgaagagagaaagcgttagtaacatttttcagatgctctgtgtgggttatttgaatggctttgtagataaaaatagatctgggccgggcatggtggctcatgcctgtaaccccagcactttggtaggccaaggcgggagaccacctgagcccaggagtttgagaccagcctgggcaayatggtgccccgtctctattaaaaaaaaaaaaaaaatctgattcaacttccttatgattctttattagatttttgcctgtgtgtaattaaaatgaaaattgc

SEQ ID NO: 904243 - DNA, 577 bp, Homo sapiens
ggaaggcatagctcattattaaagatctggaaatatactgataaaatataattgattctcattttaaagtttcaygttttattttctcattcattaggagtaacttcttacacagcttctgtttttgcagatgcataacataaataggtttcaatttcctagtttctctctttttaaatgtgggcgacagaagatgtgaatttaattccttctggtccctcattctgtccagggtttccattcatgtggttgttcataagcattataggcacacttggcttttgggcataaatttattccctactcaacaatagaaatgatttttctctgaactgggactgtggaatcgatggctctggttaaatgatgtctttgtctgagtctcactttttaatgtttacctcagttgcttttccattaactctaagttgcagggcacctttgttcaagggcacttttgtagaggtaaacaaagttggctggagggcacacagacagaagtgatatcaaagagagtcacatgtctggtgctccagctgctgcagcattcaggaggcaaattccaagaatgggtcaa

SEQ ID NO: 904244 - DNA, 617 bp, Homo sapiens
taatcatgtattataagaaaaatgcattttatgaaagcactttaaacaaatgatttgtacagagagttaaaaatgaaattatttatttaaaaaatgataatratagagctgttggcaaaataaacagggtctaaataataccagaaagagtaaaatcaatcattatccattgaatacctaaaaactgtgggagactaacagagtgaagttgctcaagaagttaacatctcagggaaccaaaacaaaggcatgtacacttcttcatcacagtgagtcaagtgatatcttgagacaacatgagaggtaacacagagtagtgtacggctaactggccagtgccgggccaactgttcaaggaaagcagatattgctgagagtgaagatgaccagggagagctctctaggatgagatctgagacttgataccacttgctcttcacagtcacctgtgtgaaaaagcactagcacaagccggtctaagccaggataaggccctgctgggaagagtgagttaggggttactgagtatgttgagtttatcatgaatgcaactcttgactggacctgggacattaaagggcaatgaagcacttgaaaattctgatgacttctgttgt

SEQ ID NO: 904245 - DNA, 654 bp, Homo sapiens
gaatttcatttcctacctgtccacaaaagctgagagttcatagactgtgacctccctatatgagtacataaacatttacttaatactttgtgaaaattgtagagtaggtcatcatacaaatataaaatcatttatttagtccgttttctgctaaaggaaattgagaagttactttttcctatttttaaaattataaatagtattataataaacattttgtttatatattcttggacatttataaaaatatgtctatggagtaaatttcttagaagtggaatttcttgctcatatagatttctgcatttttgatattgagagattgccaaataaatatttttaagaaatttcaactctttctccaaccaataacctttacattgtttttctgcttacaataatagttgaattaaaaatattaatgcatcacatattaaaaagaaatacaatactttggttcttatattccataacaataattctaaacccatgtagaagtgtcaggaaacttgttggtaaaaatcttgaatgaattcaaaattgtatttgaagatttgtgaaaatttgagaattccttagggastagtcaaatatgaatagggccctgattcttgttaggacaaggaagaacggagtgtaagccattctattgcc

SEQ ID NO: 904246 - DNA, 529 bp, Homo sapiens
ttgtttaaaaaaaattaattttcttcttaatttcttcagtaactcatttagaagcatgttgtttaatttgcatgtatttgcactgtttccaaaattcctattgttcttgattcctaggtttattgcatcatagccagagaaaatgcttgatattgtttcaattttttttaatgacttatgacttgtttgtggcctaatatatggtctattcttgagaacaatcaatgtgctgaggaaaagaatatgtattctgcagccattggatgaaaagttctgtaaatatctattaggtccacttggtctacagtgcaatttaagtctgatgtttctttgttgattttctgtctggaagatctgtccgatgctgaaagtgacgtgctgcagtctcaagttattactgaattgaggtctctctctttagctctaataatacttgctttatatatttgggtgctccaatgctgggtgcgtatatatttaaaattatcatattctcttgctaaaytgacctctgtatcattatatggtg

SEQ ID NO: 904247 - DNA, 670 bp, Homo sapiens
caagttgtattttttttataaaatcagctttattaagtgatcatttatttacaattcctcaaattttccataaatttcaatatgctatgaccagtayagacatagtcaataatcaccaccatatcaatacatagaatggttccatcattccagtgtctcacaagatctcagtgatttttatgtggttttttggcttctctattaagtaatttaagcttcctttatgtataagtacttaatatataaggtaaaataaaagttgtaaggtagtacccactcagctaaaaattacttcctctatttctcttctacttaggtattttaagcttcagtgtggtggatattgaaaatacagtgttaaaattatttaaatgaaactactgcaatggatttaaaaagtttctgccataaaggaggaggtcatctaccttcataatatacatctggattctaatctccaagcatcattggaaaacatagttatggaaaaaataaaaatcttggagtacattttgccatttaactgattcttccagaggttcacacttgagaggagaaaatattgactgtcaatatctagcatattataaaagttgctgtggccagatggtgaaggaagccgccttttagttaaattttaggctgtgatttattaacatttaacccaaat

SEQ ID NO: 904248 - DNA, 591 bp, Homo sapiens
aaattgaatacatactcagtgactttgagagaattccagggaattggtcagtccctgtttcacttgtaaatacatagcaatcaagcctaccaaatctatgattgattggggtgtctgaaagagatggagggaatggaatcaacctgaaaaacatatttcaggagttcatccctgaaaacttccccaacctagctagaggggccaacattcaaattcaggaaatgcagagaaccccagtaagatactccacaaaaagatcttccccaagacatcatcatcagattctccaaagttgaaatgtaagaaaaaatgctaaaggcaactagagtgaaaggcccggtcacctaaaaagggaagcacagacttacagtggacctctcactggtaaccctacaagccagaagagattgaggaccaatattcaacattcttaaacaaaaagaattccaacccagaattttatatctgactaaactaagcttcataagcaaaagagaaataagatcattttcagacaakcaaatgctaagggaatttgtgaccattagaccttccttgcaacagttcctaaaggaagcactaaatatggaa

SEQ ID NO: 904249 - DNA, 614 bp, Homo sapiens
aaaagaaaaaaatatgggcattgcataaggataaagtgttaaattaaacaagaagatctaactatcctaagtatatatgcaccmaacacaggaacacccagattcataaagcaagtttatggagaccttcaaacagacttagactcccacacaatagtagtgggagactttaataccccatgacaatattagacagatcattgagacaggaaattaacaaagatattcaagatctaactcagcactaaatcaaatggccctgatagatatctacaggactgtcctacttgaaaccatacaattacatggtaattgaatgacctgctcctgaatgacttttgggtaaataataaaattaaggcagaaatcaagaagttttttgaactaatgagaacaaagatacaacataccagaatctttgggacacagctaaggcagtgttaagagggaaatttatagcactaaatcccacatcaaaaagttagaaagagctcacgttaacaatctaacctcacaactacaggaactagagaactgagagcagaaaaacctgaaagctagcagaagacaagaaataaccaaaattagagctgaactgaaggagattgagacat

SEQ ID NO: 904250 - DNA, 603 bp, Homo sapiens
tgtgcagtgacttcatggtaaaaccattttaatctacattttgtgtatttagtcaacaaaacaaagatttcccaaataggttgtagatatcaacctattttagtagaaaaatgagatgaagatgaacaagaagcaagatgtttctgactgttggttattaaagccagatacaggttcatcttcataaagtctgcaataaagggtgagcctaaagtgaaaggcagcagccactggttgtcactgttgtaccacaaaacagcaattgcaggtctattctttcaaaaggctgccttttgagaacagtttgaaatgatgtatttgactatttggtttatcattaaaactgagcacacaaacctgcaaggctccacggattgcagtctagtagtagacattttgatgtgggagtttgacagaaaaatagttctatatgaattacattgaaatatgaaataaagatttcattatctacttaaacaaataytctgtttttaaatggtcatgtgagatacatgctacatctgttaattaaagcacacattcgttctgatgtttaaactaaatagtattatggtaatgcctagtgtatataattgatcactt

SEQ ID NO: 904251 - DNA, 392 bp, Homo sapiens
tcttgctgtgtgtatatttgtttatacccagracacacatgagaatgttctaaagacaaaaaagacgttggaatgcctttcctaaaattcagtatttgcactaatatcactgcatgcactaaaataagatctatcctatggaaagttctttactgcaaatggctactgtgaaaacagtgaacatttgtattcccttagctacccagtagatcgactttctatcttgggaagataagtatgcaccatcctttacccagggctgccaagatgtggccatgtgtccctgtgtctgccaatcagataccccactcaggacttgagaaagtggcacaaaaatacaaagacagacaaatcgcttgagaaaggggcagccaagatcccaaagtgctaga

SEQ ID NO: 904252 - DNA, 651 bp, Homo sapiens
agaaaggaatataaaagtgaaccggcaataaataattccaaaatgttataaacctatgaagaaacaaataataargatgtgttttgagatggaacctagtgtaaatcatggagtgagagaaaatgtttcacaagaggtgaagtgtaagttgatatctaaagcaaatggtaaaaaataattgaatgtaagctgatattttatatctgagcaaaaggcaggtaaggtgaaaagtgttctaggaacaggggtctgtgcaaaggccctgtgataggagagagctggccattcccagaaactgaaagaaggattttgagaacaggagaaatattttaaaaggaaggcagaagtttataatttgggctatagaaaaaaaaatgcccctagatttagccaaagtaccttgaacagtcattgcagaattttaggaaggattctaacaagacctgatattcaagctcctttgattgttgtatctactgaagggaaaagacttaacagggaattgactagacagattgtgttgagagtgaacatactgagactagttgacaggctctactattttatcttccacataagagatcagaattgtttggctacattataaatatttttgaagatagaactcagaggactcaatcactaataatt

SEQ ID NO: 904253 - DNA, 682 bp, Homo sapiens
ggtggcatgcttgtagtcccagctactcaggaggctgaggtgggaggatcactcgagtccargagttccagactgcagtgagccatgatcgcaccactgcactcctgggtgacagagtgagaccctgtctcaaaaaaaggtggatgggggcacttggcatgagtggcaggcaggagagagaatgaggaggtgtggagtccccataacttgcttcaatgtcttaccccttagatggtctgtctggcaccatcttgggtaaagctgggctataaattgaccattgtcaatctcatggtaggagagaatccctgagggtgcacggtttggtccaacatttggtccttagaatttctaagcaaacatatagttagataagcttgccgtgcaggaactgcctggtggagagaaggtaacagttacaattgcattcttaaagagcgaagtaagaggtgaacacacaaggaaaaacagaaaaggtaaagataacttttaggaaaatggggctctcagttacaatagctggttagacacttccaaattagtttctggaaaaaaaaaagatggttagacagttctaaattagtttttgagaataagattgacatttaatatgtatgctaattgatgtcagacatttcataaatatataccaatatggcctccaataataatgtccaaataa

SEQ ID NO: 904254 - DNA, 540 bp, Homo sapiens
atccaagagggcaaaatggtacccgcaacttcacttatgacaagcttcggaagtcacactctgtctttttacaatatcctagtcagccctattcaatgtgagaggttttgacrtatgagaagatggggattgttgagaccatcttggaggctggctaccacaataaatttattgtgaaataaattagaaggcatatcacaattttgagggtctttaagttggtaaatgacaaataaataaatacgtgcaacttagcagaaatatggtattttgctatttaagagcaaactggtaatcatgagataaacttttgatggaccttgaaatgcactaactcataggcttaatagcaacaattctttgttctatgtaattaacacactggctcaaaaaacaagtatctatttctggcagggagaataaagcagaaaacaatcacactatagttttctctggaatgtatcagcaaatatgtacccttctgtacacttagctggtgaacatccaagaagctatttgactttctcaagagatggtaga

SEQ ID NO: 904255 - DNA, 374 bp, Homo sapiens
tatagggacaggagagagagaaggggacagaaaattatttgaagatattcaaattttgaacattttaaaattatgttgaaaacagcagcccattgattcaagactttcagtaaataccaaacaagataagtataaaacacatacacacccctaagcacctcatagtaaaactgagaaaaatgtaaagtcaaaggtaaagaaagaaaatcctaacagtcacagaaaaaggcaattcatacatcagagaacatgctacaaatgrtgactgacttttcatcagaaacaataactagaggacttttttaagttctgagagagacagagactatacatacaatactctagtccacaaagcattttttaaagatggtggt

SEQ ID NO: 904256 - DNA, 612 bp, Homo sapiens
ctgaatgtctaaaatgtctagtacatagcaagcaatamaaaaagatagctattattaaaatacctcaatagattaaacacttaagtcgttttgtcagtcaataaatatttcttgaatactttattagttttctattattgctttaaaaaatcaccaaaaaacttactactttaaaacagcataaatttcttatagttctggaagtcagaaatccaaagtgagtcttgctgggaaaaaattaagatgtcaacagggctgcattccttctggaagttctatctggttccttgcttttccagcttctaaatactatacttgatttgtaatccccagccagcaatcacatatttggacctctgcttctgccatcaatcttcttctctgactctgacacttctgcttccatcttatctttgtgattacattgagcctactggataatcccagatgatctccctatctcaagatccttaacttaatcatgcctgcaaactcccttttgctatgtgagataatatacttatagatgctcatggttcttcagagaaacagaaccaataggatatatatgggggtatgggggtgttagagggggagaagagagaagaaaga

SEQ ID NO: 904257 - DNA, 505 bp, Homo sapiens
gttcaaatcatttatatgtttcagtaggtaaccattctaaggcattaatttatartgcatatgtgtatatgcattatatatacatatatatgcagtatatataatgcatatgtgtgtgtgtgtgtgtatatatatcccattttaaaatttctgtagtagaaggaaaattcagattatgtgggactggattaaataatctcatttaatttttagataattaaacccttttttgaattgattggtctaacctccagaaatattatttgcccagaacagagcaggccacaggaattccaggaaaattatcttctgatccatcttctcagatattcctcataatctagaagaacagttcccaaatatggtgtctactctctgatgtatctcagtgagcaaagagatgtgtcataagtaatctgaagctaataaccattaaagaactgatgtacttcaaatgatgtgctttataaataactctgagaaaattcaaggttacctctatgaa

SEQ ID NO: 904258 - DNA, 585 bp, Homo sapiens
taccacactgtcttgattactcttcctttgtagtagttttaaaactgagaagtgtgaaccctccaactttgttagttttcaacgttgttttggctattctgggccttgtcaatgttaacagattttagagtcatcttgtcaatttatggaaaaaaagccagctgacttttaaaaaggattagatagaatctgtggatcaagttggggattattgtcatttaacaatactaagtctgctgatccatgaacatgggtttctttacatttatttagatcttctttaatttttatccataatagcttatgcttttcagtgtataagcattgtatttcttttactaaatttgttgctttattcttttgatgcttttgtaaatggaatcattttctaatttcatttttggtttgttaatcgctactgtatagaatcgcaactgattttgtatgttgatcttgtatttgtgcaattgctgaawctgtttattagctaaagtagttttttagtagatttctttatatttcatatatgcaggatcatgtcatctgcaaatagaaatagtttcacttctttctttctatgacttt

SEQ ID NO: 904259 - DNA, 654 bp, Homo sapiens
caacaaacacatcattcaccatgaactgcattaagactcctgaagcagaaatactggaggtgctcaagtatcacaatgtcagtaatttcacacaaatatactcaaatgatgtgctcctcaccattcattttccaaactaccgtgggttgtgtttggcaagcttataggcaagatatttagatggttattttcatcttttcctctctgaccgagttatgatagtaaaaagccctgttgataatctccttggctacaacttcttcttttgtgttggctcttaaatatctcaaaagttaaaaaattggggtgggaggaagaaatggctggaaaagtgaaacatggagccttaataagaactcagatttttaaactgttagaaaacagtttgatgataaagaattcaggaaaatgcaggacaaaaaaacaaaacaaaaaaaaaaacaagaaatacagacttcaagtttctaattagagtttaaaaccagcctcaaaacttgcgacataagctcagtcaggtacctkaccattttgctataacccctccatcttaacctctaaactctctaaactggggagtagttccgtatataaaagtgtttggtgggatgagcttgggatttgtagagaactccaggtttgaatccagtcaagaga

SEQ ID NO: 904260 - DNA, 545 bp, Homo sapiens
gttccagaccagcctgggcaacatggcgaaaccccgtctctactaaaagtacaaaaattatctgggcctggtgtcatgcatctgtagtcccagctacactaggggctgaggaaggaagatcgtttgaacccaggaggttgaggctgcagtgagctgtgattccgccactgcacttcagtctgggtgacaaagtgagaccctgtctcaaagaaaaaaaaaaaaaaagaagaaaaaggcaatggaattggggaagggggcagacagggtgctgtgctctgagttgctttttggagctcacgatacttacagtgctttggtggaggtaaagttaaaaaaaaacaaaaacagccgttactaatttaaaatgtgccgttcccctcatcccaccccctggaaccagaggagaggaattattgaatatgtgacatcggaggagaaagattactgtgcatattaagcaaggagaagagtgattgctgaatacatgatrtaaaaggagatagtcaccacaaattaaacacaaaaaattcagtggaaaataatta

SEQ ID NO: 904261 - DNA, 394 bp, Homo sapiens
gtccaccataatcaagttggcttcacccctggaatgcaaggctggttcaatatatgttaatcaataaatgtaataaatagaactaaagacaaaaccacatgattacctcaatagatgcagaagaaacggccttcaataaaattcaatatcctttcatgttaaaaaaaaactgtcaataaactaggtattgctggaacttacctcaaaataataagagctatttatgactaacccatagttaatatgttaatgaatcagccaaagctggaagcagtcaacttgaaaaccagcaaagacaaggatgccctctcrcagcactcctattcaacatagtattggaagccctggcaagggcaatgaggcaagagaaagaaataaaacatatttgaatagg

SEQ ID NO: 904262 - DNA, 613 bp, Homo sapiens
tgagaaactgaagtgcagggtgrccaggtaaagttggcgaagtcacatggctaacaagtggagaatctgagattgaagttcaagtttgtctgattccagcggcagcatgcttactacactatcttacaccaacttttttgtgccaagaaatgttatagtccagaggaaataaacacagggtgaggtaacatgacaataggataaactcggatttatgctaaggaagagcttcttgagcgtttggaagacactagaaatcgaagatagatacatcttcctggagttgttgtcagcaggaataaggcagaatgacagctagaaatctgtcccaacctcatctcctctgtgaatctgtcccctggccagggcaatttccagcgagctttctcctgtttgaatgcagccccaagaacatatcccagttcccactgtaaatcctgagttgaaaatggcatcgggaggcacatgccagcaccctcctgcaaatgccagctagtctttccttggcatcccaagtacatcatccactggcttctgctccatcatttctcagcaatgtagaatatataattttattatttaataaataaatgtaatgtatttatttcgcttc

SEQ ID NO: 904263 - DNA, 555 bp, Homo sapiens
aggttttggtatcaggatgatgctggcctcataaaatgagttagagaggactccctccttttcaattgtttggaatagcttcagaaggaatggtaccagctcctctttctacctctggtagaatccggccgtgaatccatctggtcctgggctttttctggttggtagtctattaattactgcctcagtttcagaacttgttcttggtctattaagggaattgacttctgcctggtttagtcctgggaggctctatgtgtccagaaatttatccatttcttctagatttttcagtttatttgtgcagagctgtttatagtgttatctgataatagtctatatttctgtggggtcagtggtgatatatcctttatcattttttattgattcttgtctcttttcttcgttatttgtctatctagtgaactatttattttgttaaattttgccaaaaatatrgttcctgggttcgtcagtcttttggagggtttttgtgactctatctccttcaattctgctctgattttagttatttcttgtcttctgctagctttt

SEQ ID NO: 904264 - DNA, 640 bp, Homo sapiens
gggtttcatattcctaaatcctgcaggattcagaacgttatacttaagcccataataacagatrtcaaaaagtagctagctgactcattttagataaaacctaaggctaaaaagagtcagagaaaatggaccatgtgccctgctttccagctgaggtggggtgagagagagagaaagagatggcagaaactctaaataggtttggaagctgtaagagacaacctgagagaacccaagcaaatggccagtctcacactcataagagtacgtacatgcacagcacggtttaggagcaggagaagataaatgtctgagttagatatctaagcaatgggtctgtgacacacttagtgttcctagaacttcagggcagtgcaagagtactgtgctaacctgaatgctcaagaaaaacaccacagcatctgaaagagtatgagggctaagaggcctgtggttaagtgtgtagaagcagaccaaagattaaattccaagtgaaatttaaatcatctcaattatttatgtagataaaccaaatattgattaaagagaaaatgcttatctcagtatacttcagcttgagtaaaaggcaatgactaatgaccatataactacttctctacccaatgccttagcaatcaaa

SEQ ID NO: 904265 - DNA, 676 bp, Homo sapiens
atgcttggcattcagtagaaattatgagacataaacaagcaagggggggaaaagtcccatcgttaagagataaagcaatcaacacagacagcttagagatgctgggattatcacaargggacttaaaaataactaggattcctatgttgaaggtgctaatagaaaaggttgactgcatgaatgaatagatggaaatggactatttcagtcaagggaaatgggattagcattattctttgaatagttatagatcatttcttgtggctggaggcggggccttcattctatcagcacaaactgcctcaattatcagagaaaaatatgagggttcggctaggaaggaaggacgagggaatgactattaggtaggcaaccagcagcagtattgtgagggtacacatagagcatggaaatcattgctctttacaggatacttttcgaagacctaaggaaaactctgttcttatcttaccttaaccagctaggagtatgtatgtgtcatggttagggtaacctaagaaaggctggccacaaggacatcaaagccacatcactgatttccctggaccaagtcagatttcatcatacaatagatggacaggacaggcctctatagactccaggaagaaacagagcaaggaagaaaaactcaaaaagaaaattaaatcaagtagaa

SEQ ID NO: 904266 - DNA, 618 bp, Homo sapiens
ccgatcacatacatagttaaggacttatatccaaaatatacaaagagctgttaaaattcaacaataagagcctgagcaacatagtaagactccatctctggcgggggggraaaaaacctagccaactagccagggatgtgatgtctgtagtcctagctactcaggaggctgaggtgggagaatcacctgagcccaggagttcaaggctgtagtaggctgtgatcatgcaactgcactccaacctgagtgacagagtgagaccctgattctaaaaagaaaaacaaaaatcaacaataagaagacccagtgtcttgatcctgccttttcagagtctacgactcacttgtcagggactcctgcaaaactggtgatatcatccccaattttttagttttaagcttagggaaattgtgtaatttgtctgatatttcacggccagtttcagatcctgtctttctaacttactggctaagaacttccctaagtttaaaatgaaaaaactgcaaacgacatcaccagttttgaaggactgttatgatagatgagtaaattacatttgaagcaccctagttttgaggcagcaatcacagagcaaacgctcaatataatgtgaaagaa

SEQ ID NO: 904267 - DNA, 652 bp, Homo sapiens
aattttaaaaatctaaataaataatatagcccctgccttcaaagatctagaaataaacattccctagaccaggatacaatgttaaggatagctcaccagaaaaacagaaagaccctgttcttggcagagccaccataccagccctagaatgtaaacctccagacaacacatggaaaaataaaactagaaaataaaatagtagaaaagtaaaactactaattgatttgagtcatttttggagggtttttgttattcatagctgaatacaatttctaacacatatggatcactaattaatatggaccccaaaagagggtatcttccctccttcatttctgggcagaagaaaatgcagaggaaagatgctatgatgaaaacatgataagaagctgagaaacagtatggaagttcatcaaaataggtctacaacataactcagaaattccactactggatataaatctaaaggaaatgaatgaaaccattatatcaaaaatacgtctgcactcccatgtttattgmgttattcacaatggccaagacatggaaacaagctaagtgtccaacaatgaatgagttgattaagaacatgtggcatatatacactggagtactatttaaccttaactaaaaaggaaatcttgtcatttgc

SEQ ID NO: 904268 - DNA, 666 bp, Homo sapiens
cttgttgtccatgggttcaagtcacatgaatctcaccacctttctcagcaaaagcaagtgtatttttctccacctgactcccatgtctattcctaattgcttctaatttttaggaggaaagattatgattgactaccaaccttcagacaccaggttggggaactgtctctgtgtagcactgtgttgtgatactgtttaatgtttgttggttggtgctttagagatcttctttggggactacaaatccctttgcaaatagcactataggtacaagatcaattgaaataataataataataaaaaaacagaactaaacagaacacaaaaaccatattgggtgaacggaaactcatatctacattaaaccacctttgcagtgtgctgatggacgaaagtgacatttacacagaaatgccctgaaggagaaagaaacaagagttgaaacaaaagcaccacaaacaatgtggcacataaacctgaaaacaggaagagtgacctttccaaaggttagaaatgtactgttcagcctctaaaattcatatcatttttggtatcaaaatttcctcaagctccaagttggtgttttcctcaacatggttgarttgaaaactgttgtagcttaaacttcaggtcttcaagtgaaaccagcataaagtctgggccagg

SEQ ID NO: 904269 - DNA, 346 bp, Homo sapiens
acacttgggtttcttgcaaattacattctagtcttcaaggtggacacgtgggtgaaaggcttcatacagatgttccacttgtgaatgtcacagaaggatatgagaacacttacataggacagagcmtggaattctgtttttcagtgccaatgactgcttattggtctcctaatttctcctctatacttacttagtctagactgcctttacttctaaattaatgtcattaccccatatctgatctttctgccgtatcaacatttcttcaatatacacatcattatttttcatattttgctccttattgactgtctcttcaaatatttttagtattgctcattgtttg

SEQ ID NO: 904270 - DNA, 531 bp, Homo sapiens
ttttgaaagatcactggagcggaagaggagagtgaatgagaggggctcaggccagaggcagggaggtgagttgggagaaaaatgaaaggaaccaagaggaagatgaggatgcaacacggccacctttatgactcactgctctggcagcatggaatacttactcttgaagtggaaggtggaaggaaccacggctcatgggcggtggcgagcctgaaatatttgaggcttttggaagacagagaagcagctcttccccctatctggagttgacatctttgagcaaaacaaagtcgaaaaatatgtgttgaattattaacaccatttgctttggcctgtcgggcttagccgtgtcactcatcaagtttctcacaggagaccagaagacttcttaggaaaaaacattggcctggaatgaagaataatacaccattagagcagcatgatactagtaagattaattaggttggtgaatatgtacactgtaaaccagcatacaratattagatgctactatttttttccatatgttaa

SEQ ID NO: 904271 - DNA, 606 bp, Homo sapiens
ggggatattcaagtgatcctgctattttcggcttcactttttcacatgtttaggagccgactgaatattggttgatgtaaactggtcttgactgagtggtctgggcctgttgccctcatctctcttcctcctcctggggccagtgggttggcctgagcttattcctcacacgtttggccaaagcaactgtcatgggcaagtgtagagtcagaataggaagaactgaagaattacttggcgaaaggcatggttatggggaggagatgaagaatggaagctatttttgtaacatatccccttcatccttagatcttcgtggtgtggctttctaacacacaggtctttatttatgttcctatatgccacgagtacaatactttctttccccatagcttgtttccaaatattattaaccattgaagtacccctagcatgcattgataccaacattcttcctatctcccctcacttctatagaatattacttggtacagtttgtatgatgcaatgaaccacttctaattcaygtctaatttcctgcccaggcttttctggaaggtgcatgattctagatcaagctgagggtgtatacctctggggcaaaag

SEQ ID NO: 904272 - DNA, 680 bp, Homo sapiens
ccagaactaccaaatcaaagtctgtactttaacaaggtcccacatgggattcctttgccccttaagtgttgagaagtcctggtctcaactgaaatgaatattttacttmtttacagaattgcacttccattattcaccatagtttatattttaatgaaatattttccttagtatctatgaagcacctgcatagctatctggagctgctggtctttttctacataattctttctgttttaaaggttttttttttaaagataacaaagttgtgtcaaaaatgtttcatctagctgggcacggcagctcacacctgtagtcccagcactttgggaggctgaggcaggcagatcacttgaggtcaggagctcaagaccagcttggccaacatggtgaaaccccatctctactaaaaatacaaaagttagccgggcatggtggcaggcacctgtaatcccagctattcaggaggctgaaggagaataattgcttgaacttcggaggtggagtttgcagtgagccaagatcaccccactgcactccagcctgggagacaaagtgagactccgtctcaagagaaaaaaaaaggagaaaagcttcatcttaatttgattttcagagttcacacacactttttagtgactgtagtaaaaagcccccaaagtgctatgatttcagtatat

SEQ ID NO: 904273 - DNA, 611 bp, Homo sapiens
tcatcttagatgtgcaaaatgacaaaaatacctacaacataatgaagccaaaaattagtatacttactgtaayagagcttgatttcgttctgtttcatcttgagactgctaggaaaaaaaaaagttttttccaactgataagtgttaattcaatgcaacaagctaaaaaaattaacatttaaagtaatttttgtgttattctttcttagcttctttttatggtggtaaaatacacataaaatttactatctatttactatctgtacatttttaagtgtacagttctctggcattaagtatactcacactgttgtacaaccaagaccatcatgaacttccagaactttttcattttcccaaagtgaaactccatgctcattaaacactaactccccactcccctctccacaacccatggcagccaccattctgctttctgtctttattgatttactactctagaaacatcatataagagatacaaaattttaatcattctgtgactagtttatttcacttagtattcaaggtttatctatgttgtggcatgtatctgcattttcttccattttaagactgaataatattctactgtatgtatgtaccacatt

SEQ ID NO: 904274 - DNA, 566 bp, Homo sapiens
ggcaggtctttttgttctattcaggtcttcaactsattagatgaggcctacccacatgatggagggcagtctgctttactcaggtccactgactttaatgttaatttcattcaaaaacactcacagaatatccagaataatgtttgaccaactatctgaacattctgtgacccagccaagttgacacataaaatgaaccatcatgcccccctaattttgacatacccatgtctccattatctctccaggcatatcactaaactctccacacaaaccaaaatctattcatgtaaagttttaaaactgcttgccatatagcatacatgtaaagaactagaaaaggtattttataagacccaacaaaaatgaggagtatgaaatatttttaaagattgatgcctacattttaaaaaattaatatgacatacatcaaatcaaagatcttctatttcttcattgtttgttcttatttaaaatagctcatcatttctaaaatagtattctttaaagttgaaatatcaatattggtatctgtgaatctgggaagaatttatttagaaacctgt

SEQ ID NO: 904275 - DNA, 605 bp, Homo sapiens
gatatttggtgttaaatgttttgctttttatcagagatcatttatttgatacactttcctaagtatgatattaagtagaccttcacattaacttttgggaaatgctgtcagtttctgctactaaaatgtatgtatctttccttccattccttatctctggttagctaacttacttatgccaaggtgctaacagaatcatcccttacttttccccatgacatttactttaaaaaaaaattgagatctttctaactttttgatgtgggtgttcagtgctataaatctctttcttaacactccttagctgtgcccagagattctggtatgttgtgtctttgctctcattaatttcaaagaatgtcttgatttctgccttaatttcattatttacccaaaagtcattcaggagaaagttgtttaatttctgtgtaatattatggtttttgagcaattttcttggccttgacttctatttttattgagctgtggtccaagagtgtgggtggtatgatttcagttttttgagtttgatgaaaattgtttcatgtccgattgcagggtaaattttagartatgtgccatgtggcaatgaaaagaatgtatat

SEQ ID NO: 904276 - DNA, 579 bp, Homo sapiens
gccagcatgctctagacatgaatctgtggcactgggtggctgggctgtttgcctggactcaccctaagtcaacagaggctgtatttccatcaccatttccggrcaagcttgtgcttctggcatcatctccatgtgccctgggggcaaatttagctgagttttgaatgtgtgaatgccccattatatctgagtgtctgaaaatctctctcttcacaaacatgcactgaacaaacagaatctgttctcaataggaaacaactgtgccactggagttggcaggaggaagttggaaagaaagcaagtcacagctctgctgcctaccaagctgcctcttccagcttcctgttgaaggcccctttggttctctctccacaaaccagagggaaaatgctgggtattcgcattcacaacttcaattgtttcaaattaaactcccccaggagccgaattacctgagctaatgtatctcattattgtgcctcagtgcaatctaagaggtttcagataagatttcctgaagatagccattattccttcatctgttcaaaaataaggcacttgcaaaattgcaatcatgtt

SEQ ID NO: 904277 - DNA, 647 bp, Homo sapiens
tcactcctgtctcatgggcttttccttcatttgcccaaagatagctgttactttaacagtgatatgaaatctctcagcttctctggcactttgtggtcagtaaattttgtctaaaaatgtagctttgccaacattcattttgctgaaaaatgaaataaaacgagttttcaggataaacgttttctgtgcccattaccttgttgtttggtttcacactggtaaaactttgtttgtccctgttgctatcatctttgccaactttctctccacatagcaatctgcaataataacttccccaggagtgagcttagtcctcagtctctgagccaaggaaatcctggaagtaggttggggcttccttcccactgactggtaaacaggatctgaaatgggtctgctgccttcacgcctgatatcctgggcaggtaggcagccccagggtgtacctaggaacaatgccacacacttgcattgacatctgtctgtgtattctgtcttcccattaatttatawctggaaaataattcaacatcctttcattttaatctcaaatctgtgaagtcaccatgtcaaaatgtcagaccgttcgggagacattgactgcgttaatactgtccttcacactactgatacactacatgcacagc

SEQ ID NO: 904278 - DNA, 583 bp, Homo sapiens
agtcactgactaataaagaattatagatgactctttttggccttttccatttcatacataaaatagtttcagatgaattacttttgttctgaagaaatatagttctaagtaatcaaaactgagaatgaagaaactgactcagttattacagtgaccatctagggaggttgtctttgaatgtgcttctgacattattattggatagattaagacattttaggcagaaaataatatctgaaattgattatggaataaattgagtaatgtaagcaatgtgattttcagtgtctatgtatattatgaaaaaaatctgctggaacattggttgctttctcttttgatcaatttaatatttcaaaaataatacattctagctttagtttttgctggtgtgtcagaaggtcaaacagtaatatccattccaactaacattagatttgaaattatatayatatttaaattatttaaatgcatgtttatatatatatcatctattacatatattattagaccaatttagttacattctgtaaagtttcagagttaaagttcacatgtagaaagaatgaaacaattagattag

SEQ ID NO: 904279 - DNA, 659 bp, Homo sapiens
ataaaatcaaaccatcattattctggactgattatccaattagagaatgaaataggccakccctgtcttccttcttcttccatcaaatgccattcttgtagccatttcactgacaacatgaggggccaacagaagaaataaacaggcataaatttcaaacccaggaaatttatgtgagcaaagggaaagaatccagatatataaaatgaattaatcatcaataagtcaccacatccctattacatggtaagttcttttctgggagctgttagggccagaaagggactgtaagacacagtccctgctttaaagaagtacaaacaatcaccaaaaataaaagcaaaactgaaaaacagcaaataaataatcatttatcagaaccaactatggactatggatagtttaaaagtgctgagagcatagcccacatggcagaagtgcataaataatgcaaaaccttacattggctgacaatttaaacttcccttcatgatcattcttctgtcagaaccgctgagagagataaagaagataataataacaaaagaacttcaagtttctggtgattctaagtaggttctagtttcaggagtattccaacacactatgttaccttagacaagtcatgttctctctttgtgattaggtttctcatcaaa

SEQ ID NO: 904280 - DNA, 659 bp, Homo sapiens
ataaaatcaaaccatcattattctggactgattatccaattagagaatgaaataggccagccctgtcttccttcttcttccatcaaatgccrttcttgtagccatttcactgacaacatgaggggccaacagaagaaataaacaggcataaatttcaaacccaggaaatttatgtgagcaaagggaaagaatccagatatataaaatgaattaatcatcaataagtcaccacatccctattacatggtaagttcttttctgggagctgttagggccagaaagggactgtaagacacagtccctgctttaaagaagtacaaacaatcaccaaaaataaaagcaaaactgaaaaacagcaaataaataatcatttatcagaaccaactatggactatggatagtttaaaagtgctgagagcatagcccacatggcagaagtgcataaataatgcaaaaccttacattggctgacaatttaaacttcccttcatgatcattcttctgtcagaaccgctgagagagataaagaagataataataacaaaagaacttcaagtttctggtgattctaagtaggttctagtttcaggagtattccaacacactatgttaccttagacaagtcatgttctctctttgtgattaggtttctcatcaaa

SEQ ID NO: 904281 - DNA, 552 bp, Homo sapiens
tgattactaaactctaaatgatggttacagtgatattagtagtgygttagggagctcttgccatatgcagaacatttaatcattgttgctaaaacagtccatgtttagctctgaaatctgattatttttatgacatcagtattatcacagatccctaggtttaggaatttgctttctaaatgaaactgtatgaccacacatctgaaagctacaagcaaaagatgcaaggttaacccctggtgggcattctccacagtctgaaatgtgaaccttgccaggttaagtagggctccttgggaagaaagagtgaggcacgccaggagcagggctgtgtgctctgcatagcaaaggttatatatctctgtgtggagatagtcatagccttcctggtcaagcccagggatctgggccaaacacgaagctaccagcggttagaatgatttgaaccattcagattctagcctgcttcctaagctttgagggagattatgatcttatcatcaacacctgatccaactaaagtcaatcattctcatgttgcctatacaattc

SEQ ID NO: 904282 - DNA, 681 bp, Homo sapiens
gatgctaaagagttgttagggtttttatactactttccggtatgctccaattcatttcaacatggaatacatatatttgtggctattggatcacatctcttcaactgagcagagctataattagaagcctgctgccatcaaaaggattaatagtcctgttgatacaaacccataactgatgacttcccagtaaagccagttaaacaaccagctggcatgggatcataatcgatcagtactgcagagtaacaaaaactgttttctatttacattagagtcatttcaaggtctaagaaaaatgttttaagattaaaaaaggggggcccattttgatgttatcatcattactattgatggatgattgaccacaaactgacccatcaaaggtgaccacatcttagaagataactattccatgatgtctgggataaagtgaagaggctttattctgtttggtaaaactaaaaactacacaacttattgaacacacatgccccgtccagtgtaaacatgagaagaatcgatattagaaagataaactcttaggtacacagctctgataagataagtaaaatggcagcatgaagaaaaccaaaagaatacaaagctttcagcttggatcccrtcaggttcagggcagtcttggggtgttgtcccaagttcaggagaaaatgttctata

SEQ ID NO: 904283 - DNA, 627 bp, Homo sapiens
atactatgcagccataaaaaatgaatgagttcatgtcctttgccagggacatggatgaagctggaaaccagcatccttacaaactaacacaggaacagaaaaccaaacagcgcatattctcactcataagtaggagttgaacaatgagaacacatggacatagggaggggaacattacaaaatggggcctgttgtggggtgggaggaaaggggatggagagcattaggacaaatacctaatgtatgtggggctaaaacctagatgatgggttgataggtgcagcaaaccaccatggcacatctatactatgtaacaaacctgcacattcagcacgtgtatcctagaacttaaataaaaaaatataaatcattctaccaaagaacacattcatttttcatatgttcattgcagcactattcacaatagcaaagacacagaatcaacctagtgcccaacaatggtagactggataaagaaaatgtatgcacatacatcatggacaactacacagccataactgaaggaaatcatgtcctttgcagcatcatggatgtagctccaggccattatcctaagtgaattacacaggaatrgaaagctaactaccacatattctcacttataaa

SEQ ID NO: 904284 - DNA, 711 bp, Homo sapiens
ttgtatcttcattgcctctcttggtgaatgcatgaaggaaggaaggcagggatgatgaattgacttgtcccaawtcacagacctagagttgcaaagataggactgagaactacagttcgatacctttttactactttgcagctgttaagtactacacaacacactcaaatctttgcagctgttaaataccacacaacacatccaaatcatagatcaggattagccattatttagttactctttggtgattcacaagtcatataatcttacagtgccttaagctttaactttttgtaggccagttatcaccctgtagctaagggaaatgccagttgaaaaaacgttaaattctggaagagtgagacttatcttgcagtaaacctcaatacattgcttttgcaggagatgctatttaatccaacaaggtaaaattattttatacagacattttgcctaagcataggaatgaaaaagatgttatcaaggtatctatactgcttattttggtggtaaaccttacccccagtatgaaatattgtgtactgttatgttgagcacttcaaatctttttttattttttattctcagcatttgaatgaaaatcctagatagctaaaggatttttttctcacaggtgaagaagaagcacattatcagcagcagaaatggtttctgggaatttattatcagtcatctttgttttaatcagtg

SEQ ID NO: 904285 - DNA, 610 bp, Homo sapiens
tgaatcttcaaaagaacactatcatttagttactattatgctttctcactttgacagataaagaagcttcagtaaacagaggttaagcaatttccccaaggccataaagctgatgagtggcacacagyatggatgcaaattcaggtaatcttactcgaggtaccacaaattacacttcttgcagcataaattatcatattttatcctcacaacaatcctataatgatagattttttagtgttttcttggacgaccgtagtcataatttcataagaatgttttttgtactccaagcttatcaggtgagcctttgataatcctattctttgccagaaggctcttatgcttacagctgcttagaggtaaatgtcatgaccaagctggccaatcaaattctgtttagggataactgggaatcagggacacttgtatttaaggacaagtcaaaacctgagagctttggctgaaagctctcacaggaatagaaaaagcagagaaaacaggtctggaacaagaaagaatgagagatgttaacagaaaagctgagatgagagaaagaatcctatgtgttttcaatggatttattggtgctcattataatttttgagag

SEQ ID NO: 904286 - DNA, 567 bp, Homo sapiens
tggtatttggcattggtgaacatttcttggccatggttagttaggtactttctcagtccaatggatacatttctgcttgggcacttttctttcttagataatttacccttcctaagaggatggccattctacctagccctggaacatgcagttctgcacgcagttggtcacacaaagtagcaacacggcagctatgactatgacagacgaatgatcataaagtggtaccaactatgtgaataatctattgagcaatcaagctgtttgtgctttacggatactatgttgcatgcaactaaacacttctctctttgcactgtttgctgggaagcatagctctaaactatgtctcggctctaaaaagcaaactggatctcccagaaaagagtgtggtattggtctcattctcttttcctatcttccctccctgcctctgcacaacatgcctcaatttctcaattgagaaaaaaattttctcaatatttttctgagggtactgatctttcytcctcctgcctccatctttctaaaaacaaaagacacacaaaaatatgtgatgggcatgtt

SEQ ID NO: 904287 - DNA, 551 bp, Homo sapiens
aaaagttgagaaaaatatatttaatgaaataatagcagagaacttcccaagtcttgggagagatatggacatccaggtccaggaagttcaaagaagaaagattcaacccaaaaggttctctctgaggcacactagagtcagattgtctaaagtcaaagacagagaaagaattttaaaagtagcaagagaaaagcatcaagtcacatataaagaaatgcctattagactaatagcagattcctcaacagaaaccttacaggccaggagagaatgggatgatatatttgaaatgctagaagaaaaaaagtgccagccaggaatatcacacccagcaaaactatccttcagaaatgaagaagaaataaaatcttttgcagataagcaaaaactaagggaattcatcaccactagatcaattagtcttacaagaaatgctcaagggagtctgacatctggaagtaaaaccactatcatgaaaactataaaactcactggcagagccaatacacaaaggagaaaraaaaaggaatcaaaccttatcactacagaaa

SEQ ID NO: 904288 - DNA, 586 bp, Homo sapiens
atttctcaggcctaaccccaggtctcctgaatccagatcctagctgtcccagtggtgaagttgtatggtaaagactgagagctgctgcttcatggcctcccccacgcatagcacacagcattctccctgtaaatattgaatgaacgaacaaatggttatttttgctatagcacagcgcaaccacatgcccccatcatgagcaccgaggccagccagcagaagtgccccagagtaagcagtcataaaagccagttccctaacagtgcagaggggcccatagtccctgacaggaggcttggcccctcacggtgaggaagcctccccagcctcactccacgtccactgtattcacttccctcactgagcttattttgcttcctaggattttggccctttgtgggggacctcttttagcctcttgaatattgttaatttgatcaagtttgtgtttgtatcccttggtgaaaatatgccaaagtttttggtttgcttttattttattaatgtccctgtctcgctgtgcacgtcgtagatggtgtctgtttataacagaasttcctagaatgagaggcagacacaggtccaa

SEQ ID NO: 904289 - DNA, 595 bp, Homo sapiens
gttacgtgtattttgctagacggaaaatgttaattcagttccccatgcagcccattaggcaacatcttgaaaaattgagaatcttttgtctatggttccataaaacagaaaaggtggcttttgtaaagtggcttgaaccccacagctatggcacatcaagcagggtcatcaaaagttgctccattcttctggaagctgcagagaaaaggaacctggaaacctggtatgccagcaaaaaaaaaagcatatgaaattcttaccagccaagtttctggtctctttctctctctctctttctctgtgtgtgtatgtaaatggtagacatcactatttgtcttctctgcatgagtctgattgatagaaaaaaggatttgtgaaactagtcttaggctgtagcaaatctggtgtgctttgtgctaagaatttgtctttctgtgtcattctgtaataggtatcacagratacaatgatggtttagggcccctataaggctgcttttaaagccagcctagcaggctggtcagttacaaactttgctgtgggaccctgacaccaatactggatgaaatttctctatcttgtgttgtgtccttaa

SEQ ID NO: 904290 - DNA, 758 bp, Homo sapiens
tgttgaaaaaaacatactgaaggatcacactaacaacatgtccatcattcctcccaattctaagattcttggcatatgctatggtctgaatgtttgtgtctgcctccctccccacattcatatgttgaagtcctaacccccaaggtgattatattaggaggtggagtttggggcagctgattaggacatgaaggtggatttagtgtactcataaaagagaccccagggtctcttttccccttccaccataggaggatacagcgagaaggcaccatctacgaaccaggaaataggacctcgacagacaccgaatctgccagcaccttaatcttggacttcccgacctcaagaactgtaggaaataaatttctgttgtttataagccacccagtttatgatattttgttatagcagccgaagcagactaagacagcatatgtagaaataatcactttgattcatacagtaggaaagtcagaaacaaggaggttcctgaagattaaaacagataattattatgcctccctttgatataatgaattacttacatcaaaccctctgacttttgcaaacaagacctgaaggtaatcctcactggtgccctggtgtaattccactgatgtcagtaatactctctwtgtagctatgcaaacattgcatcaagaagtcttccagcagaccttcataaaagacaggcacagttgaaaacctcaaataagtttccaggcatgtattgttttctgtgttgtaagtcagta

SEQ ID NO: 904291 - DNA, 513 bp, Homo sapiens
tctgtgggcaaactcaagacatcaaaacctaaatcatggaatgaatagatggatcccagaggattttaagagcagtgaaactactctgcatgatactacaagggtggacacatgttattataaacatamccaaatccatagcatgtacaaaatcaagactgaaccctaacataaaccataaaccttgggtgatggtgatgtgtcagtgtaagttcatggatcgtaacaaatgcactagtctggtggggtatgttgagggaaggtgaggcatgtgcagaaactagagatatacgggaaaattccatatcttatgctcaatattgctatgaacctaaaactgctctagaaaatcaaatccattgaaaaaaaaaacactaaatcaccatcttccccaataaatactaaaaccactcaccaggcttcttagccagaagcctaggagccactctcaattgatatcattctttccactaataatgtttctaccaataacactggtaggaatgttattaa

SEQ ID NO: 904292 - DNA, 650 bp, Homo sapiens
gtgagtggttgaaaacagatgttttgcagaaaagtggaggagagtggagggaagcmtacgggggctgggtagagggaggtgaggctgggaagggcagtggttgggagtaccatggagtggaaaaacagctcacttcagaattgtactaatattctttcctatctaaaaaatttgaggagcagagaatttgaatatctcatttggtatagcccaaagatttggtcaaaatgaataaatacatgaatacaaaaataaaagctactctagaaaacctggaaagtcctaaatcatgagatgctaaatcatgagctgtggttccatatcgagatatttggcacattgttctccagagccagggtttcccagacactgatcttcagaatcctgctgcagaatcatctggagtgtttgttaaatatgcagaatcccaggacccacccagacctttcaatgctgaatttctagggtgggtacgagactgtgtgttttcaagcagcttcttaagtgactcatgcacactccactctgagaatcactgtaggacaagattaaggagttcctactgatcaagcagagatttccaataggcattgttgcccttattgcctgtcccttttagtacaggaataatgaaggattttccccagagt

SEQ ID NO: 904293 - DNA, 671 bp, Homo sapiens
aaccccattaaaatgaaagtctgccactcaaccaatcagctctgttgaaagttttggatgctaaagttccatgctgacttcaatggatgacagataatttaaaggcaatgcatataattaacaggattaacatctgaaactgtgtttatcagttagttgaaacattaattgcattgatttgaagtaaaaatctgacaccgtaagacattcacaaggtagtaattttggattctgtgtcaaggtaatattattctaaacatcccaaatggaaggttgtctctctagagcaagtatggaggaaccaaaaaggaaaaaagaaaaatatatagagctgatatcaaaaataattttgtcaaccacattaacaattgaaacatgaaaatacacaaagatatgttcctatcaaattgtcaaagtggtgtttatgaaacaaactcaatattagcaattataatagaatcagacatttttctttttttttggtgtgaagatggttattaccattatgaaaacaactagaaacacttaattatacagttacttatactgctatttgtttttatcataaaattatttttaaaacttgacttaataattaastggtaatttatctgaaggaaataatcttatattcacaacatgtattatgtataaagatgctaatcatagca

SEQ ID NO: 904294 - DNA, 647 bp, Homo sapiens
gtcactatctacgtaactggcaaaaggttaactcttttatcattcatcaatttaataaaattctgtaagaaaaagaaaactcaacaggaaacaggcaaagatgtaaataggcaaatcagaaaaaaatatatagatgacagatatacatgtggataaatttgtaaactaggcaatataaacttaaaaattagattctcatttttagccatcacgtaatgtcctgagccagcaaagagcattggaaaaaaatatttttatatgtttactggagtttacactggaacaatcttaagtgaggaggacaatttggctggatttataaaaatgcaaccaccttttggcccaggaattctactaatcataatctgtcttctataaatgtacctgtgcacagaaatatacatacaatgatgttcacaacagtttgtagtggccaaatgtctatggaccactttaataggtatagtatatccatcccatgaaatgaaacccagccatcaaaaagaataggagacatttaggcatactgatctggaaagagatccaagacatattgtaaacagwgaaaaaaaaatcacagaaaaatacattttgatcccatttgtgtggaaaaaatggtttgtgaatgtatatacataaatggctcc

SEQ ID NO: 904295 - DNA, 592 bp, Homo sapiens
acaggaattgttaacactgtggatgcatagtcatgaataacagttggaatgawcaacaagctaaccaaaatgcttaaaaaaatggggaagtgggggaatcagaagtccataggggctttgataagtccttctaatccataaaaccatggtcgtacattctcagaaaaaagctcagaaaggccctaagctctcaccttggggctcacacaagcaggaagtgaaggcccagtcagagttctcaattgcctggctgaatgatgatggcatattccaacattcacatagagccccttgccagagattaggagactcattggttctaggcattgaagaaaatctctgttcaattactggctaatcattatcctaactgaatacagatttcagtgaccacacatgaaaaggaacacagacttacagaatttattaaataaacaaaaacaacagcaataaaccctggggaatttgctggagaagaggaagattctgatttccagagttctcacattattgaaaatgccaaattttaacaaaaacttatgagacacttgaagaaacaagaaatttggcctatgcatattttttataaagc

SEQ ID NO: 904296 - DNA, 675 bp, Homo sapiens
ctgttttgtatgccacaaacaaccaaacttctttgtaattgctgattatagagaaattatatcaaacwttttaccatggctattgtaagtctctgtcatccacaattttgatttttctgaaaaagtacatgacatcagattaatggaaaagactctgaggactcttaagtagaggtttctgatagttttatgatcaatggaatcaataaaaattttccagaacgctggtaaagaaactcattgatacataaaactgttaatcaagataaaataaaatgaaacctaattacatgagattgaatgactgatgaagataatgtttttgtgacttttatttgaaatatcatggattctttatttaaatattttgtgtccagatcttagaaagttttatttcttaaactatctatagtttatagcagtttggtaaagtgtacttttgtaaataaatgtagaaacatttactttttctcactacttgatacctccaaaatttaaaaagtattaatgaccatttgtctttttattgcaatgtggttatttaagtttaatgacaatttgtgctctcttcataatatgctgcaatcgaaaacgttgattatattaccaagatttttgctgaaataccatatttgaaaatgtgcatagaatgcttgggttcaagggctccaagcc

SEQ ID NO: 904297 - DNA, 589 bp, Homo sapiens
caggttgccttccttatcactacctacaaaaattaactgcagatggattaaagacttaaatgtaaaacccaaaactataaaaaaagaaaaaaaaaaaaaccctgggagacagccttgacaataccattctggacataggaatgggcaatgatttcccatgacgaagatgccaaaagcagttgcaacaaaaacaaaaattgacaaaaggaatctaattaaactaaagagcttctgtgcagcaaaagaaactatcaacagagtaaacaggcaacctacagaatgagagaccatttttgcaaactatgcatctgacacaggtctaatatccagcatctgtaagaaactcaaacacatttacaaacaaaacaaccccattaaaaagtgagtggacatcaacagtcacttttcaaaagaagacatacatgcagccaacaggcatatgaaaaaaagctcaacatcacttatcattaaagaaatgcaaatcaaaaccacaatgagatagcatmtaagaccagtcagaatggtgattattaaaaagtcaaaaaataacaggtgctggtgaagttatggaaaaaaaggaacacataca

SEQ ID NO: 904298 - DNA, 637 bp, Homo sapiens
gggagtgatggcgcatggctgtaatcccagctactcgggaggctgaggcagtagaattacttgaacctgggaggcagaggtgagccaagattacgccactgcactccagcctgggtgacagagcaagactccatctcaaaaaaaaaaaaaaaaattagaatgatcctatcttttgcatcctaaagattagcttttcatgtaaaaggtctttctgctgtagataataaaaccattgttcttgcagaacttagagttaggaagaaaaacattaccaaatctaaattatagcacactgctgtggttgctgatttcttttactctttcaacaaacattcagagtgggcccattatgtgttctttacagtgcttggtgcagtagaccaagtgaatagtcactgtcaactgggactgttatgaattctttatagaagaaatgtaaatccatgtaaggccctctagacaacagggcaaaaacatcccaaatgatttgaaagagcacagaaaaagtcacacgtgtacatatatacagggaataagttttagaattacatgattataatgagcacagtaygttagagaacataaaattaatgatttaagtaatgccaaggtcttgtgccacctgttaaaaaaattt

SEQ ID NO: 904299 - DNA, 704 bp, Homo sapiens
aggttgattccatgtctttgccattgtgaatagtgctgcaataaacatacacgtgtgtgtrtctttatgatagattgatttctattcctttgagtatatacccagtaataggactgctggattgaatagtagttctgtttttagtctttgaggaattgccacactgtcttccacaatggttgaactaatttacactcccaccaacagcatgtaagcatttctttttctccacaacctcaccagcaagttactttttgactttttaataatagccattctgactggtgtgagatggtatctcattgcagttttcgtttgcatttctccactgatcagtgaggttgagcttttttcatatgattgttggccacatgtatgtcttcttttgaaaagtgtctgttcatgtacttttcccactttttaatggggttgtgggatttttcctataaatttgtttaagttccttatagatgcttgatattagacctttgtcagatgcatagtttgcaaatgttttctcctattttataggttgtctgtttactctgtcgatggtttcttttgctgtgcagaaactcttcagtttcattaaatcccatttgtcaacttttgcttttatcgtgattgcttttggcattttcatcatgaaatcttggcctattcctatgtccagaatggtattgcctacattgtcttccaggttt

SEQ ID NO: 904300 - DNA, 581 bp, Homo sapiens
tagattgctctaattacctacatctttttggctggagcagtttcaacttttctcaattcctacttatatctttctaatgaaataacaagaatacagcagctgaaaaatcatgtcttttaataaccccatctcataattttttatttcttaattcagtatgtttggtatcaaaaactatttctaagttgttcttttcccattgtgatttctctcctagttttatgtgtgtgtgtgtgtgtgtgtgtgtgtgtgtgtgtaagaaaaagtcatagctttgatatcatagtacaaaaggaagtggaaatcttcacaaagcaattcagcatctgtggctatgcaggggaaatactatagataattgaagatattatctagatagcttgcaatcaaaatgtatgttcacctgaaattgctttgcacttaatggcactattctggcacttatgctactgaacatctatgttccagttctcttcttatagtcatgaaaatgttrtaagtagagccacaagttgaatttcatacgtcctagccagctcatttcttagccattatagctggactgtgaaaatatgctggtg

SEQ ID NO: 904301 - DNA, 588 bp, Homo sapiens
aaaaatgtcagtggtggtgttatgcatagaagtatagattattttcattttcttcctatcttttatttttcctatatattctataattatcataaattactttaaaattcttacaaatatgatttacggtaaatatacagataaaagaaactaaaacaaaagactaatggtgattttcctctgtatggtaaaatgataattttatttattaataattttttgtgtatttaaaaatttaaagcaactaaaaaggtttataagactgaaataaactgtcctttaactacgttttgacagccctcaagttgcaaataaaattgccttctgttcccccctgctcttccctacataattttgctacctgaaattatgttcttagcaactactcatgatacacgcttgcagtcacactaaatttgggatcccagtcatttgtctaacacacacagacacacagaaacaaaagaaaaccagttatttattttagggtccacatttttggaatatggaccaaaaatatggacgctaaaataaacaaatggtttgctttcataacattgytaaacatccccagagtcactgaagcag

SEQ ID NO: 904302 - DNA, 656 bp, Homo sapiens
gctgtacattggtaatagagtattgaattagacaacgagcttccttgcccttctgcattgtaggtattgaaattataagtgcaagaaygttcatgaaggagattttcagggtgctatagtatcattaaatagaaccgaagtagtgatggagagggaaggtttgcatgaagaaacagcattaaactgaatatgaagtagatacatggggcttgggcactagaaattgcaaaagatgaaggttatgataagcacaaagaaattccagtggaggtactagcccttggcttcaagagtagaaacagaaggataaagagacctgtatggttgaatcttaggaaggaagagaaagcaaggtaacagtagagcgtcatgacaacacacagataattaggggccggatcatgtaggaattaggtgataaaggtttaggttttatttaaattgtaatggaaatttattgaagatttatatataaaaaactaaaaatgtaaaaatttaccttataaatatttttcagaattttggagaacaatctgaaatgatcacaacaatccaaaaaaagaatggttgtgatttgggctagtgtgatggaactgtgaataaagacaagtggacaaatatgacccaaattttggagaaataaacagtggtactta

SEQ ID NO: 904303 - DNA, 608 bp, Homo sapiens
gaacatttcatccaataactgcagaatataccttcttctcatctgcagatgaaatatcctccaggatagaccataccttaggctacaaaacaaatctcaacaaatttttaaaaaatcaaaatcatatcaagtattttcttgaacagcaatggaataaaactagaaatcaatactgagaagaactttgcaaactgtaaaaatacatggaaattaaacaatatgttcctgagtgaacattgaatcaataaagaaattaaaacagaaatgaaatttttttaaacaaatgaaaatcaaaacacagcacactgaaacttacaggatacagtgaaagcagtgttaagaggaaagtttataggaataaacaaccccatcaaaaaagcaaagagatttcaaataaaaaatctgacaatgtatctcaagaacaagaaatgcaaaaacaaaacaaaccaaaaccaaaactagtagaaggaaagaaataataaaatcagagcagaactaaatgatataaagtgcattagtctgttctcacattgataataaagacataccctaractgggtaatttataaagtaaaaagatttaatggactcacagttctacacagctg

SEQ ID NO: 904304 - DNA, 583 bp, Homo sapiens
gtccaaagccttgtagccagttgaggcagkgttgggctgagaactcatgcctgtgatgttcaatccaatcctatcccatgtgctaagctgttctctcagtcctagagaactatagcctccctcattgtcttctctgagatccattcaatattgtaaaaggtccatttctgttgaaagagagagtgtcaatatcagagcaggaataatgaatcctaccccaaagttcttaggcacagaaatacaattctcacgcatagacataaacgcaacgttaatgtgatagtttgtcttcagtacagcatatataatgctttctctaataaatttcactaatattaactggatgcgtggaagcaagaaccaaatcatacaaaagaatggtgagtcctaactatgaaaacagtagaagttctttacctaagatacccataattatggctttcaattgttttctgtttacttaaaatcattacataagcaaagcatcacacttttgcaatttgctcttgattcttgcctactactaggagcttaatttgctactttagagagagaaactttgcataaacagggtctcttcctc

SEQ ID NO: 904305 - DNA, 626 bp, Homo sapiens
ttgcacgacttgaattagaaggaaaagatattgaattattccaggcttttaaaaaaatctgttgtcataatattgataccagaaaagcagaccccaagccaaaacattggtgasaaatctagatgctgcataaccacagggctcaaattaccaggaagagagaacaattataatcatacatgcaacaataacacagccttaaaatatacgaatgatcagccgggtgctgtggctcacgcctataatcccagcactttgggaggccgaggtgggcggatcacgaggtcaggagatctaaaccagcctggctaacatggtaaaaccccgtctctactaaaaataccaaaaaataaaaaataataaattagctgggcgtggtggcaggcacctgtaatcccagctactcgggaggctgaggcaggagaattgcttgaacccgggaggcaaagcttgcagtgagctgagatggcaccactgcattccagcctgggcaacagagcaagactcttctcaaaaagaaaaaagaaaatatgtatatacacacacacacacacacacacatacacatatgtctatacacacacacccccgacaatggtcagcaccataaggagaattaggtaagt

SEQ ID NO: 904306 - DNA, 674 bp, Homo sapiens
tctccatctcctgagcttgtgatccacccayctgagtctcccaaagtgctgggatcacaagcgtgagccaccgcacccagaagccatttttctttttaaataaccacccccaccatcttctcctggcacacttactcaatgtaatttgagagagacagagatacatatatatatatatataatattccattatatatcaatatataaagtttatattgtattaaatatatttataaatttatatatttaataatatatttttatttacttcatatgtttatttaaatatataattgaagtattaatgtactttagaatatgtttatatgcgtttaaatgtatacacatatacattatatatttaacatgcaaatgtatataaaatgtgtataaatatatgtatttcatagtaccttgaataagagcacactgaagatacgtatatatattttatcttgtgttggtactgggcagaggaaagcatgcagacaggaattaatccccccttagaataacctccaggcgaaggttatcagaacttgcttttccttgggcgatattttgtgttcttgccccagattttccaaatcactagttatcaagtcagcttagtggcctatttgaactatcaagtgatatttttatttaattacccagtttttatcaaaatttct

SEQ ID NO: 904307 - DNA, 644 bp, Homo sapiens
ttattaccagctgtgtgtgtgtgtgtattgaccatgctctttcactagctcattatcttcagtactgcatagtggttaagagttctggttctgggatcttggaacttgacttttgggtttgaattttagcatcaccacttagtagctttgtggtcttagccaatttatttgacctctcggtgcctaaaatttaccaactgtccaatagggagagttttagcacctagtttaaaaggttctcatgaagattaaacacgttatcatatgctaatttaggcaaagcacctagcacacagtaataaactttagtaacttttaaactcagtaaattttaacaatttttattaaattctaaaccagtaagaaaaatatacatacaatgctatattattcctcacatgatctaagagacccaatatttgaaattaggaaatataatttgccaaaagtaaagctatcattatgaacagtaagttatttacatctgaaaaggattggttagaatcttattgtttactaacaaaatttcaactatatcttttatttttaggttgtgggagacagaaaggacgcatattaatatgttaaagacaattmcccctaggcagaggaatcggggtatggggaaagtaaggacttttgct

SEQ ID NO: 904308 - DNA, 660 bp, Homo sapiens
atgtggtctcaggctgtttgcctgtggatttcatttctgccttttagtttttacttcttctttctttggaggmagaaattgggcataaaacaatatgaagggtggtctcctcccttactaggaagagagaaataccatgtgagaatgaaatacgtatttgtgttattggatttgacatcggggttggaccaagcatcttctatgaacatctataagcacgttctccttatcaaaaggtactttgcttggtgctttaaaagataaatgactatgtagcttaggagatttcttcataattgaaaaccacagcagctgttatttgaacatacctgagccccttctggaccactgtaggagaaggaggaagagaggtgaaagtgatttctgctgctgagggcatgtatgatgacaatgggtatttgtcctaactttgacactacaaagtgactggagctttaggcaagtagttactccaattgtcttttcagactctttctttttgaggtatttgacctctttgcggcatcagcctgctgctatttcacatgcacctagaagggactttaaaacatgcacagaattgaacaaagcagtaaccattcgaaaagtgtcccttaacaatatgtcaaatactattatttttgaaaggtaaataaatcc

SEQ ID NO: 904309 - DNA, 597 bp, Homo sapiens
gccgctgggttcaactcatctctgatcctgagaaccagcatagggctttgaaatgtccgtgcccatgaatgggtggagaataaaagtatgtttgcatcccactagagtagccccttaaagtcactgtcytttagggtgagttgactcccgtcaacaaccaatccaaggcagcaggactggaccctgtctgtgcagccttgccaggagggttgagcagcttctctctctgtccccagcatggcatctccagtttctcctactggcaccaatacacacagcgtgaggactttgcggttgtggtgcagcctttcttccaaaacacactcaccccactgaacgaggtgagctgcaggtattttagggaggctcacgtatgggggccttatcacagacgatggatgtatttccttctctaagtgggctttttttttttttaaccatctctctccaagaggattcctgagggtggctttttccacattacctcctttttgtgggggctgggctgtgattggaactcagatgtactttgaaaggaaatcaatagtgactaagctcccaggcctggccctgatgttttctggattgggatagaat

SEQ ID NO: 904310 - DNA, 677 bp, Homo sapiens
atacatttctgaattatttcaaagtgttctcttgaagtttattaaactcctttaaaacagctattctgagttttttgcctgagaggtcmtacatctccatcactttagggttggtctctggtgacttatttggtccatttggtgaggtgatatttccccaaatgttcttagtgcttgtgggtgtatggtaatgtctctgtattgaaggattcagtatttattccagtctttacagtctggatttctttgtgcccatctttcttcaaaagaccttctacaaattctaagtacactgttgtgttccctgcgtcaatggctcctgcagccatctcagcactggtggttattctaagcccaggttttccatgagtctcatgaggtctctgatgttggcatggctctccagcacagatgtacgtgggaaagactcaagaaaagtacccatactgtatgggaaagctggccaaggaaagctggccaaggactcaagcctgggagactgtcatggttgcccagataggcacacctcccagcaggtttctgcacaggtaggataggttccttactgcagcaagtggagctagagctgagactggacccctcaggatctgctgtggatggtggctggtaagcctgtcttgctggctcaaatgggtacacacctcccaccaggtcac

SEQ ID NO: 904311 - DNA, 590 bp, Homo sapiens
agattgtaaataaattgagattcccatctcacatattgcctagtgcttggtttagcctgttttcagatgcgaatagcacattttccttccgtctcatctcataagraaagcaatatgtttaaaacaaaggatgcactgattgccgcagtttcttcctctgagtctgttactctagttcactgaatttactaccaagcccttctaccatattttacagcaaattctccaaaaggctctgggatgagtcagtttttttgtgtgatgtagttacttttgcaaattatattatagcagggattggtttcaaaaggtatttgaactgagttccatttatttcattatctgattgggatgccaaacagagtcagcacagatacacctaagtgtgggcatggctgttgggggtacaatcttgtttaagtaacagggcttggtcaaatatgcaatgatctaccttgtaataatcaggaacacacagttgttataatgcaagagagacgtgaagatttaagcagcttagtcttacttactctgacaatgagtgaatgaatggcttctagaagagtggaatccttcacaggggatgagag

SEQ ID NO: 904312 - DNA, 590 bp, Homo sapiens
agattgtaaataaattgagattcccatctcacatattgcctagtgcttggtttagcctgttttcagatgcgaatagcacattttccttccgtctcatctcataaggaaagcaatatgtttaaaacaaaggatgcactgattgccgcagtttcttcctctgagtctgttactctagttcactgaatttactaccaagcccttctaccatattttacagcaaattctccaaaaggctctgggatgagtcagtttttttgtgtgatgtagttacttttgcaaattatattatagcagggattggtttcaaaaggtatttgaactgagttccatttatttcattatctgattgggatgccaaacagagtcagcacagatacacctaagtgtgggcatggctgttgggggtacaatcttgtttaagtaacagggcttggtcaaatatgcaatgatctaccttgtaataatcaggaacacacakttgttataatgcaagagagacgtgaagatttaagcagcttagtcttacttactctgacaatgagtgaatgaatggcttctagaagagtggaatccttcacaggggatgagag

SEQ ID NO: 904313 - DNA, 590 bp, Homo sapiens
agattgtaaataaattgagattcccatctcacatattgcctagtgcttggtttagcctgttttcagatgcgaatagcacattttccttccgtctcatctcataaggaaagcaatatgtttaaaacaaaggatgcactgattgccgcagtttcttcctctgagtctgttactctagttcactgaatttactaccaagcccttctaccatattttacagcaaattctccaaaaggctctgggatgagtcagtttttttgtgtgatgtagttacttttgcaaattatattatagcagggattggtttcaaaaggtatttgaactgagttccatttatttcattatctgattgggatgccaaacagagtcagcacagatacacctaagtgtgggcatggctgttgggggtacaatcttgtttaagtaacagggcttggtcaaatatgcaatgatctaccttgtaataatcaggaacacacagttgttataatgcaagagagaygtgaagatttaagcagcttagtcttacttactctgacaatgagtgaatgaatggcttctagaagagtggaatccttcacaggggatgagag

SEQ ID NO: 904314 - DNA, 643 bp, Homo sapiens
tgcagaaccgtgaaggaattaaagctgttttctttatatgttacctagtctcaggtatttctctatagtcatccaagaatggactaatacagaaaattgctaccaggggtgaggcattgctataaagatacctgaaaatatggatcccagtttggaactgtgtaaagggtagaggttgaaagaatgtggtgggctcagaagatagaaagatgagggaaaatttggaacttcctacagacttggtaaattgtgacaaaaatgctgatgctgagatggacaatgaagtctaggctgaggaggtctcagaagaaaatggggaacttattgggaactggaataaaggtcacttttgttatctattagcaaagaacttgggggcattatgcctctgccctagggatctgtggaaattttgacttgagagtcatgacttaggatatctggcagaaaaaatgacttaggatatctggtagaagaaacaacctatgctcatatatgtgagcaaagaaatgacataaaactggaacttatatttagaaggtaarcaaagcataaaagtttggaaaacttgcagcctgaccatgtggtgaggaattcaatcaggctgcagaaatttgcataagtaaagaagaaccgatagcca

SEQ ID NO: 904315 - DNA, 632 bp, Homo sapiens
ggagtgagggaaaaaagagtgtgtgagtgtgagtgtgtgcatgtgtgtgtgtgccagatgatttgtcctttaattccagtttcgcgaaggtttgagaacttgacccactaatacacagacgtgcagatgtgacatataatattcactcctagagaagaggaattagataatttgctcataatatacaattttttagtactttgccacagttttattataagaaaagagactctgttcatgctttcataaaaagtaaagaagtacaatttgccttaaacttccagtctactgaaatcatttcctcaaaagccacttatgaccatctatggtttttttctcagcctccaatctcattgacctccctaatgcctttggcatcagtgcccatagcttctttgaaattttctacttctaatttctgtgttgcagcactagcccacaatccccttacttctcagatctcttttacctcctcctattccacacctttaaacatccaaattaatctactcagccttattctatctatgtactcttcctcccagcaatctcctacaactttaagtgtcattatcaatgggaaaactcctaaaccaagaactccagccctmacctttcttctgagtttcagg

SEQ ID NO: 904316 - DNA, 645 bp, Homo sapiens
cctgatctctttttctatttattttacagatttacagcccacatttattgtgtgctcactgtgtaacgtgttctgtgttaagtgcttgatactcatgcatttgcaaaaactctctgaggtgggtaattattttacagaataccattttataagcatccttaaatgcttttgattgtagcagtaagtaaatagatgaatacacaagttaatctctaacgctcatctatctaattcttatatagagagtagtcaaactatacatagtatacacaatgagatgagatattacttaattctttatcagtctggtttgcataggggactggtacatgacatgttcatgagtggatccatcggatagctgaacatagcacattctgcttaaccttctgaataacacgagaacaaatctatcacatgccccttcagtttttaggagagtaatggaggagagggatttcttgacacaaaatggaaagggaaatacccaaattaattcagatgaagtagagatgtcataaacattaggtaactctaggaaatacaagctcccagatttttcaaaaggcactcacaaaatgaatactaaatagcataaaatgmtaacatcaccaggaagatggctctaggtctcagtacaagaag

SEQ ID NO: 904317 - DNA, 642 bp, Homo sapiens
tatatttttaaaaacaccctgtacgcaaattttcatagagacaaaaaatagaatggtagttgtcaarggcttggggggagaagagagtgggagttattgtttaatgggttcggagtttcagtttgggaagatgaaaaagttctggcaataagatggtggtgatggttgcacaacaatgtaaacatcttaggccactaaaattttcacttaaaattattcaaatggtaaattttatgttatgcttatttttctacagcttaaaaaatgatttaagaaactgacagaagacaaaatttaaaatcttactactctaaaactgtcaaagaaattgaatttcttatcaaacccctctataaacacacacatctctctagaacgagatgatttcactggtgaattctatcaaacatttaaggaagacttaatgcaaatcccacataaaccctttcagaaaatagagaaagaagaaacactttccaactcataagaccagaataattttgataacaaaaccaaaccaaaatattatcaaagaataaaatacaattataaatcaacatctctcataataattgatatggaaaaaaaccctcaacatgatataggtaaatcaaatccagcaacatataaaatgggtagtat

SEQ ID NO: 904318 - DNA, 518 bp, Homo sapiens
tacagaatgggagaaaatttttgcaatctacccatctgccaaagggctaatatccagaatctacaaagaactcaaataaatttacaagaaaaaaatcaaacaaccccatcaaaaagtgggcaaaggatatgaacagacacttctcaaaagaagatatttatgcagccaacagacacatgaaaaaatgctcatcatcactggtcatcagagagatgcaaatcaaaaccacaatgagataccatctcacaccagtttgaatggtgatcattaaaacatcaggaaacaacaggtgctggagaggatgtagagaaataggaatgttttacgctgttagtgagagtgtaaactagttcaaccattgtggaagtcagtgtggctattcctcagggatctagaactagaaataccatttgacccagccatcccattactgggtgtatatacccaaggaatatawatcatgctactataaagacacatgcacatgtatgtttattgtggcactattcacatagcaa

SEQ ID NO: 904319 - DNA, 626 bp, Homo sapiens
  misc_feature 615, 619: n = A,T,C or G
tgtagttctagccccttgtttatgataatacattttcctcttttaattcattatctcattttgacaaagtgcctctttcagtggcrtccttggaaagggtgtaaggaaggctaaaggagtattttgaatatccacaaatgtctccaatctgctcttacaactatttctattaggccaactacagaattctaggttcaaaacagattgtaattaattgctccattgtcttctctagtttctagtatggcttctggagacactcagtaccattatgatatggctttttaatcaattctctagacatttaatttcaatctgaaagtgcatgctctctgttcttcaaaaattgttaaaagtatttgataagtgtcccccttccattttctcagttctctctggaacttaatttttcagatgctaggcctcctaaatttatttcctaatttcattttttttcttttactctccatctctttgctcatttttctactcttggaaaaatatctcagttttatttctaattatttcatgttttggttgctcaaagccaatttcctctagtttgttgatacagtgaactttcttttgcaggtactgtgcaagattagttggccnaggnccctttg

SEQ ID NO: 904320 - DNA, 642 bp, Homo sapiens
aaaaaagcacatatcaaaagtactcaggtcaatgaattttccaaagtgagcacacctatgtagccagcaccccaaatccctccttatagccccttttaccacccctaccactgaaatgtaaccactatccygagaccagcaccataggtttgttttgcctttttctgaactttatatagatggaaatatacagttcatactcaatacatgctgcatagattctttgattcaatattacatctgtgggatatattcatgttgttgtttgtattggtgttttgttcttttttcattgtcagatttcatggtatcactacatcacagtgtattttatttaaatggacatcagggttatttccactatgccactattcttttaacaaactatttttctgcaggaatctgttagaagtggcttctgatgtttgcaactaagaatcctgcctgatccacatttgttttaattctaaatttgtattgggttacctaggttttgtattgattaagaaatcaagtgaaaatttcggggtttttgtagaaattcttctttttaaactacgcttttgaagacatagacatatttttcatgagctatttgccaacgaagatctgcttactctgtttcaacagtgaagcctaatg

SEQ ID NO: 904321 - DNA, 620 bp, Homo sapiens
ttgagtacttgtgacgggggctgtgtagcccacaaagtcataaatatttacgtcttggccctttgcagaaaaaatttgctgacctctgacctagagcagtcttcctttttcatgacactgaaytgttgatgtgtctgggccagttgtccgtcaaaatgccccatcttgtggatttttggctgtttcttgcagtattttagcgtattctttttattgaatatttttgctcattctgctacaaaaatctcaatacctttcttatagactaaaaggacagtttgaatggaatgaatataggcaattctctggtcttgccaatttttttttttttagtttttctctgagatttctttaactggtgttaggtcttttcaatttattaataacaacaaaagttttagtatgaaaatgccttgggagaaagtgtaatggaggagatagcatgaataaatggcttgattttaaagcaggggatgatgggggatggagaagatagagcaatgttggaaagtcaatcatactaagatgtgaatgactgataaaacccaactctataagcaatagaagccagcagcctacaggatgattttggtttcctgaaagagtagaaagaagaacaa

SEQ ID NO: 904322 - DNA, 579 bp, Homo sapiens
ctatggttgccctgacagtgtatctaatacgtgtgattagtcatattcttcactcctcaacaaaattacatcagtttttcacagtagtcaatgaaccttatatcaacacctcaacaaccttttttataaaaatcttataatttggttctaaaatgatatacagaaatgccccaaggcaagagtagctaagacacttttgaagaacaaatttggataacttattagacttcttataaaacagtggtaattaaggcaatgtggtgttacacgagtaatcatgtagatcaatggtaaaagagaatctgaaaactgataattacctgtagacacttgaattatgacaaagttggcattctagaacaatgggaggaaactcaccttttcagtaatgcctctggctcagttatccaaatgggtaaaacaaagaaaaaacaaatttactgcataccattcacaaaatttactctgcctaaacctataatagaggacaatgtatagcagtaagtatagatcagkcaaaaagaaagcctgaaaatacctaagcaacagtctcaataggttagaataaaaaaacgctgt

SEQ ID NO: 904323 - DNA, 593 bp, Homo sapiens
tctttgatgtctaggcatttaagagttaggcattcattgtagtcctctcagtctgggcctgtttgtacccgcccttcttggaaggctttccagatattcaaaagaasttgggttttattccaaaagcaatggcaacaaaagccaaaactgagaaatgggatctaattaaactaaagagtttctgcgcagaaaaagaaactaccatcagagtgaacaggcaacctacagaatgggagaaaatttttactatctacccatctgacaaagggctaatacccagaatctacaaagaacttaaacaaatttacaagaaaacatcaaacaaccccatcaaaaagtgggcaaaagttatgaacagacacttctcaaaagaagacatttatgcagccaacagacacataaaaaaaatgctcatcatcactggtcatcagagaaatgcaaatcaaaaccacaatgagataccacctcacaccagttagaatggcgatcattaaaaagtcaggaaacaacaggtgctggagaggatgtggagaaatagaaacgcttttacactgttggtgggaccgtaaactagttcagacattgtggaagac

SEQ ID NO: 904324 - DNA, 294 bp, Homo sapiens
ttgttgaaaacttctttctctcttgaattatcttggtgtatttgttgaaaaccaattgaatgtaaatttaagggtttatttctggactctcaatttaattccatttatccacatgtctatccatatgccagtactacactatcttgattactataggtttgtagttaagttttttttaaaattgggstgtaattttttacactagctatgataacatttatttgatctaaaaagttttacatgttaataatagtataaacttgtaaaatatgaaaaatagcaaacaatgaatat

SEQ ID NO: 904325 - DNA, 529 bp, Homo sapiens
actcacaaatgacaaagggagttttttatttgcaacttatagtcctcaattctgtttgtaagaggagacagtttacttttktatatgatacagagtttttattgagctgaagttggattaccttgtgttatttctcctttttttttttttttttttttttttgagacagagtcttgctcggtcaccaggctggagtgcagtggcgcgatcttggctcactgcaacctctgcctcccaggttcaagtgattttcctacctcagcctcctgagtagctgggactacaagcatgtgccaccacgcccaactaatttttgtatttttagtagagacagggtttcaccatgttggccaggctggtctcgaactcctgaccttatgatccacccacctggaacttctcaagtgctgggattacaagcatgagccactgcgcccagcctatttctactttcaattacctcctatataccgttacataatttctattatactcataatcaaagctagttagagattggcatttataa

SEQ ID NO: 904326 - DNA, 529 bp, Homo sapiens
actcacaaatgacaaagggagttttttatttgcaacttatagtcctcaattctgtttgtaagaggagacagtttacttttttatatgatacagagtttttattgagctgaagttggattaccttgtgttatttctcctttttttttttttttttttttttttgagacagagtcttgctcggtcaccaggctggagtgcagtggcgcgatcttggctcactgcaacctctgcctcccaggttcaagtgattttcctacctcagcctcctgagtagctgggactacaagcatgtgccaccacgcccaactaatttttgtatttttagtagagacagggtttcaccatgttggccaggctggtctcgaactcctgaccttatgatccacccacctggaactyctcaagtgctgggattacaagcatgagccactgcgcccagcctatttctactttcaattacctcctatataccgttacataatttctattatactcataatcaaagctagttagagattggcatttataa

SEQ ID NO: 904327 - DNA, 630 bp, Homo sapiens
  misc_feature 1, 2, 3, 4, 5, 6, 7, 8, 9, 10, 11, 12, 13, 14, 15, 16, 17,18, 19, 20, 21, 22, 23, 24, 25, 26, 27, 28, 29, 30, 31,32, 33, 34, 35, 36, 37, 38: n = A,T,C or G
nnnnnnnnnnnnnnnnnnnnnnnnnnnnnnnnnnnnnnaatttagaaatcttctcgactatctgtcatctggattcaaaaactgagtttayagtttgctctaaccattagcttttgtttttctttgttttcatagaaatgactcatttaaatacctgattgatcagaccatatagacgtctaagtctaatggaagccgacctgccacactaactcctgacatgaaacacaactattaactgtctagctgaactggcctatccccaggaataaaagacaagttcagtaacttgtaggacaatccaatacccagtttctggactgtaaaactttttggggaagtttcagggaatggtggggtttaaaacacactaaccccaaaatatggcaccttggatttgagaaaacagcagaagcatgttctctctgactttcttcagccattctcccttgcagctggccataaaagaattctctgactttcccctaaagtagatcataagaccctcattatagacaagttctccctatacccagaggaaaggaacaaagacatagggatgcagagaagaatctgaagaaacaggccttgctaagttcctctccatttactgccattagatcaaaccca

SEQ ID NO: 904328 - DNA, 497 bp, Homo sapiens
tctgtaacaacttatagacttttccctcattgtagggactctgagatcatgcaagaaaagcagaaggcagctaatgagaagaagtctatgcagacaagagaaaagtgatgactggctatttggaaaacctgggtgctactgccaactgggtgtatcataagctctaagatcaagattttgtagagtggacagtcattacatatgttataacttatcctttaaaaactattttaaactttatcctttcagctttacttagtgcgatgttttagaagcagtcttcaaagaataaaacactaaccatgcatgtgacatattggtgaacattatttttattattgaacattcatatataatttattaggtaatatgatcagataataggatctcttatataataaagaatctttgtcatcagctttgttaacatagtttttttttcctcacagtttctaaggataaggataaartagatctttgaagtaaacttaaatata

SEQ ID NO: 904329 - DNA, 377 bp, Homo sapiens
ccaattaaatgagggagaaaactgtaatagatgaagaggtgagagctaagtaacagsaaatctaacccaggattgtaacaggaaaatgaaatacctgaaatgcttaaatgacagcttttcaactgttcaagaaagcaactgattcaacttggaactcgaaatgtaacaagcaagcaacattcctacaatttgcagccaaagggaattacagcttttataattctgaatcctgtaggaccaaaaacactcctaaaaagaattaagtattcattatcaatctgttctctgtttttgactatgttttgactgagagcttcttattagcagcccacactctctcttctcaattgtatcagtttgttaaagtaggtgtcagc

SEQ ID NO: 904330 - DNA, 377 bp, Homo sapiens
ccaattaaatgagggagaaaactgtaatagatgaagaggtgagagctaagtaacaggaaatctaacccaggattgtaacaggaaaatgaaatacctgaaatgcttaaatgacascttttcaactgttcaagaaagcaactgattcaacttggaactcgaaatgtaacaagcaagcaacattcctacaatttgcagccaaagggaattacagcttttataattctgaatcctgtaggaccaaaaacactcctaaaaagaattaagtattcattatcaatctgttctctgtttttgactatgttttgactgagagcttcttattagcagcccacactctctcttctcaattgtatcagtttgttaaagtaggtgtcagc

SEQ ID NO: 904331 - DNA, 683 bp, Homo sapiens
tattccttgccatggtacattcatctttgtatcatgagcacttttctygggcagcacatgttactcttaaatgtttactgaatgactgaatatagtggatgacagaaatgactaacagttgtaaatgtaagtagagtttcatggtttatttagcctatggtggagctgaaattatatctctaggtttttgaacaatgatgcttagtaaagattgtcaacaaataataatagagatattggaatatgtttacaatcatctataattatattgttatagagaatgtatctgtagacatatttaataaatggtgcctaatgagttttgttttataaactcattcagtaagacttgaaatattatttacattttatctctgccttttatttctgtaactaaaaagaaaacttcctctttaagtacctaccaaagtatttttacattcaacttggacaagagtttagtactatttcttttactgaaatattctatctcctgattttctagttgaaaagataattgcatcatttctaattctgatatccaatttaaggtttaaagctaagcaatgtaaatttggtttaattcttatctagtttatatctgtattatttagaggatatttctgcttgggtaatttgtgaagaggttaatgcatttctgtcttgaaaaatgtatatgtgtt

SEQ ID NO: 904332 - DNA, 706 bp, Homo sapiens
tgggcctaggggtggaaagggaggcataagtgccaaaatatatgatgttaaaactcagaaagatcaggaataagtcctgaagtgaagtgtgaagtggcaaggcatccagtttagggcatacagaataccagagaggggaaacctgatttatgaggtgcccgctacaggaatggctgggcctgggctggctggcttaaatttgcaagagaatgaggtaacttagcctcaccagattcttgggaggggtggggtatggtggatgggaaggaagacacacaaaaaaataaaatcagatttctggcttcattatgttcataatctagttggaaatataagattaatctatgtaaaacacctggaaagatgctttgctagttttcctcattgccgttgttttgttgtttcaaatatttgcattcctgggaagttaaaagttaacttacaatacagacaagaattaacaaaaagatgagttgaaaatacaaaacagcatgcaattgagggtgaaatgagagatatagtaaaaagataagtggtataatttgagaggggataaagtacaaaatgaactgtgtttatgaagacttcttggaaacagatatacacaatggtcattataaactgggatgttctrttatcttagttatgacccagagctaacagaaagcagtggctctgcatcacacatagactgcagaatgagccc

SEQ ID NO: 904333 - DNA, 550 bp, Homo sapiens
tatctcttttgtgagggctgatcttacaacttaacacgggtttctgaagtgaattgtattagtaaattatatatatatatatakagagagagagagagagagagactataaagcatgaaatcaaagtgaacttcagctactcagttatgtagaaagacaaaaaacattatcatataaggatatgttattcatatatcttagcatcaacaaaaatccatacttgggggtagttatcacataaaaataaatttaaatttattttttaaagtttacaaacttataataattactattttattcttcaagaatacatgaagccgggcacagtggctcacacctgtaatcccagcactttggaaggccgaggcgggcagatcacctgaggtcaggagttcaagaccagcctgggcaacatggagaaaccccgtctctactaaaaatacaaaaattagctgggtgtgatggcacgagcctgtaatcccagctacctgggaggctgaggcatgaaaatctcttgaacctgggaggggagatcgcgccactgccctcc

SEQ ID NO: 904334 - DNA, 670 bp, Homo sapiens
tataatgctttgggagcgaaggtgatatgagaagagacagaaaaataatggctaatgtaagtgaatttgtgaaaacagctaccactgtgggtgactgaagcttaactttgttgagaaaattctttaagtcagtttagaatatacatctcagaattactccctgccacaggggagagctactggggtatgtatacaactattatcatcagtcattggttgaaagttgcttcctggtttccctggaaaccagggagtattgccctgctaagaagcattgccctgctacttccagtctaatttgaatgaccaagcgtgatactgaaaccagataaatcttaagtcaaagagaccacatgtttgctgccataagttactgcagtatgcactgaagtactacattaaagaaatacctgctacaaagcaatgtataaagagagaaaggtacatctatgtttaaaagatgtatcattgcaatccttatttcatgttacagctgtcattataaagaattagtatgtgatagttttaagctatatatgaaaaaatttaatggtctacaattgtttaaaataaaaagyaatctttagtattagatattcatttacttataatttaattttactttttatatgaattctctgaactttgtatagattttgggtagcttaat

SEQ ID NO: 904335 - DNA, 646 bp, Homo sapiens
aattcatcacaaagagattatcacctaggcacatagtcatcaggttatttaaagtcattraactggagaaacaagaacccagcgtaagaaaagaaataaccaagatcagagcagaactaaatgaaattgaaacaaaaaatacaaaagataaataaaacaaaaagctgattctttgaaaagataaatgaaattgatagaccattggcaaaattaaccaagaaaagaagagagaaaatccaaataagttcaattagaaatgaaatgggagatattgcaactgataccacagaaatacaaaagattatttaaggttactatgaacaaggtgtacatagtatgcacatcgactagaaaacctagaggagatggataagctcccagaaatatacaaccctcccagattaaaccaggaagatatagaaactctgaacagaccaataacaaacagcaaggttgaaatggtaatgaaaaattgccaataaaaaaaagtccaggaccagatacattcacagctgaattctctcagacattcaaagaaaaattggtaccaatcctattgacactactccaaaagatagagaaagagggaatcctccctaaatcattctgtgaaaccagtaacaccctaataccaaaaccagggaag

SEQ ID NO: 904336 - DNA, 627 bp, Homo sapiens
ctttgctgcatctgttgacataatcatgtggtttttgtcattgtttctgtttatgtgatggattacatttattgatttgtgtatattgaaccagccttgcatcccagggatgaagctgacttgattatggtgrataagcttttcaatgtgctgctggattgggtttgccagtattttattgaggattttcacatcaatgtttatcacagatattgttctaaaattctctttttttgttgtgtctctgccaagctttggtatcaggatgatgctggcctcatacaatgagttagggaggcttccctctttttctattgattggaatagtttcagaaggaatggtatcatctcctctttgtacctctggtagaattctgctgtgaatccatctggtcctggactttttttggttgataggctgttaattattgcctcaatttcagatcctgttattggtctattcagagattcaacttcttcctggtttagtcttgggagggtgtatgtgtccaggaattcatccatttcttctatatttctagtttatttgcttagaggcatttataatattctctgatggtagtttatatttctgtgggataggtggtgatatccccttaatcattt

SEQ ID NO: 904337 - DNA, 590 bp, Homo sapiens
cagtcaatctgctcaagagatcgtcaagccagaaagacagtcaccacagttagtccacaagtggaaaaatttacagcaccatgtcatatgtagttcatcctaaattcacctggcaattggcaaggccatcggtgtaagcttattggttatattcaatgacaaaataaacttttcacatcttcataacaggaggttaattctgcaacatgaagccaagtgcctgctgaaggtaggctcccactctcctacagaaatggctgaatagggtgttatctttttggctatttatattttaaagcaatggctctttaactcctttagcactgggctagagcaccctgcttgccctctcctgatggccatgtcctctcttgacgcctactatctgccattgacacacagcccacaacacaaagctcatagctggcagctcacatcttacatgaaccccaattgccacagcagcactccagtgtcacatcagacaatgaagcctgagctgcaggaggagagcctgcaggcctcctgggtgaaaytgcaccttcacgataatgggaatgggagcagtgtttcagcctcagcttctattt

SEQ ID NO: 904338 - DNA, 590 bp, Homo sapiens
aaccaaggtctgtgctgactctgggtggtttcagaattcaaatgttaracagtgagttggtgttgaagaattgtttggtgttaacaaacaatttggtgccagaaaaaatatcatggaggcctggcctggaataaaactctgggcgtgtgggaaggagaggctctgctttcctgtacacaggccgtcacactgctcattgttctgtgattccagatctcctcttagggtgagagaggactgaaaacttagagaaaaggagttctgatgacagaccccatttttccacagctgccaccacaggattcccacccactcacagtcatgcccactggacattgacatgtgcacagcccttccaggactaggcaccaccctcaaaaatttaaccatggcatttttgatcctagtgttttttgccaaaatcccacaaaattgtctacaaatttttggcatatccctacccccagacactgaatctgcagcagcaacctcttttctccaccaacttggggttctgggccacctgttcataatctcacctgcctgcatggacccagaaataagtagcacaagccagtcctgcctacact

SEQ ID NO: 904339 - DNA, 647 bp, Homo sapiens
accatgcacagctgtgaggcagtcatgttctgggcagctaccactacccaaaagaatcaggctgatgttaagcaaggcaatttggtgtggaaaaatgaaactactaacaaaagcatgatgcaaaagaaaatgatataggccaaaagagccagcagtaactatgagaactgaaattcctcctggagtccttggagatactggaatttccatgcacctgggaaggggtataccatcttctatttggatgacagaagaagggattgactttaatagatatgtggattgtcttcttggaagatctttcaagatctttcaaaggatccgtatctcaaaaataagattcaagtgaaaaccagaaaaaaaatcaccatggttgttggcttcctgagtgattagatgtccttttgtatttggaacctgtagacttgatctttgagtctcaaaccagaaaagaccttgagtgttgggacagaaacagaggatgctcctccctgcccatgggacacaatctcggttgtgtgagtggctttgaaggattcctgaaccrtggaagacaaacacctcacaggagctgaatgctggaccacagcagggatggtgagaaaaacctggcatttgtaaccctgaagagtgcagacaaagacttc

SEQ ID NO: 904340 - DNA, 576 bp, Homo sapiens
caacatttttggtcatttgtgaagaaatacaaagtccttgaataacaattagttaacagaaacctcagtgtagcccagtaagcttgtcagctccactctccctctgttctaatctctgccctgccccgctcaggctggtattagtcaggcatgcagctgcacagagcaggggttgcggtgggcggctgttttctttctaacatctcgcctcttcactcaccattttttctaacctgctctagggtcaggcttagaggagagggatagaataggacagtgagactccagcgtgtgtgtgcgtgtgtgtgtatgtacctacatgttgtgccaactacgtgtgtctgtgtgtgtgtgtgtacatgttatgccaactatctccctgtccccatctggccccagaaactcctcctttgaccctgggctggctattgatgaccactcccaccttcatgggggtcctgttacctctccaagtggtccttttgggcacagttgttttcaacaaccttaggttggttccctcstgcaggagccctatccaagctccaggacacacacagtgttgtctggagtcag

SEQ ID NO: 904341 - DNA, 590 bp, Homo sapiens
gctacagaaatgttattgaggacaatgtctatatagtattatgccccatctgaagcatgctgagtgagaaatttctttttagagttaagggctggaaagttttgctgctccagaaacattgcagtgtttcatccttgttggaataaaaacaataacaataacaaaaactagctgggggactggcatgactccttttcactttggctcctaggaaatgtagaatcaaagtcttgccgttagtggctagaaaggttgacatgatgattagtccttggatttgggaatatatatataaaacccccaaatcactgaatactctcagatctaccaattgctgatatgctcatgatccacaaaggactgttgctctatcactgactagaaataagaagcaaaacagtaaatcatggatttcaggacgatcatttgtaaatcactattggaatgatcattaagcattcaacaaacayttgtggagactctgtgccatgtatcattctggatgttctgtacatacatcaggaacacaacaaagatgctggctttagtatgtacctttagtatgtaccttctggctgggtcttttgagt

SEQ ID NO: 904342 - DNA, 637 bp, Homo sapiens
catttcgatctggtatcacttccctccagccgaagcacttcccttagaaatattttacagctggtctggtgacaacarattctcgcagtgttttttcatctgagaatgttagggtgactaactgttctggtttgcctagttttagcaccaaaagtcatgcatcctgggaaacctctcagtcctgggtaaaacaggatgattggtcctacaaggtatctttattttacctttattcctaacggatattttcactggttgtcaatttctgggataacaattctattcttgcaggctttcaaaaatgttcctctctctctggtctccatggtttctgaggagaaacatagagaaacattgtacagtcattccaattgttattctcgtacaagtaacatgatgtttttccctggctgttttcaagattttctttctttatctttagatttcaattctttgattacactgtatctggaagctatttcattgtgtttgtgctgtttgaaattcagtgaactttgtgaacctgtagatttatgtcttctaccaagtttgagacattttaagttactctttaaatatctttttctgtatcacacactttctccttttcttctgagactcccataatacaaaatta

SEQ ID NO: 904343 - DNA, 596 bp, Homo sapiens
atatggcaggaagccctctcacgtttgaaaagaaaatctttcccaccatgttggctctcagtcacaatctgcacacaggagggtcttgggtgttggtgggcattgtttgttggtctaattccctatggtttgcagctccctaacagtgacggatccctaagcatgacacccaatgtcagagttcttgaatagaacaaaaattaggaggttgagcttgacagttcatgcatgcacacattcattttttcatcaaatatttattgagtgtcaactctctgccaagcacatggtacctagcatcacagtgctaaatgtggaaacaaaagtgaaagaatgatacttcataatgggcttagccttttacatcagggttgatcagaatgtgtgaaccagaatcacctccaaggtctgttaaaaataaagatgaattagactcaccttagacagattgactcaaaatctctggagggaacccaggaaccttcattctaacaagaacccccaggtggttcttagcacttcaaagttggggagcctctgcttccatcrgaaagcatcaagcaacaatggccataatagaaatgctactatcaatg

SEQ ID NO: 904344 - DNA, 628 bp, Homo sapiens
aaaattctagaaaattcctcatgtttctcagagatcccatctaaattgagcccattgcctgcagcaaggaacttgataaytataagtgacttttcctctttttcttgtttttgctttgtcttagaccattttctattgctataacagaataactgagactgggtaatttatttaaaataaaaattttttttttagctcacaattctggagactgggaacaagcaactgcatctgatgggggcctcatgctgctttacagcatggtggaagagcagaaggcaggaacagggcatgcacaagacagaaaagggggggccagattctcaagatagctaacccattcctgcaagaaagacattaatccctcttaattacttaatcacttcttaaagattccaccttctaacactgctgcaataacaatcaaatttcaacatgaattttggaaaagtaaaaccatattcaaaccgtagctctccctccctgactccatttttacttgcttgggatcatctaccaaataaactgtttcaggctctattttggggggtgctccaactcagacgcttaccaaaaattggatggatatccattgaaactagtcctggactactcaaaaggtacaaag

SEQ ID NO: 904345 - DNA, 617 bp, Homo sapiens
tccacaaagccgccattatcatcctggcccgttctcaatgagctgttgggcacacctcccagacggggtggtggccgggcagaggggctcctcacttcccagtaggggcggccgggcagaggcgcccctcacctcccggacggggcggctggccaggcgggggggcccaattttcattttagtatcttcctattgacaggagaccggtagtgaagttgatgacatctcctttcctggtttttatcccacaggtggctggctagcatttgctcttccatctccgtctcgttttaacactggtttgcagtctgctcacactctctgtattcatccatgtcagtgtgtttttcctaggagcatgtgcaggctaaaggaattatgtctctacaagaaccagacttcattgcgctctgcgatgggctacagtgatcacctcttttggtgacagggctggtgcagcgcagctctctggtctttattgccctccttcttgtcttaataggaatagactcaggtacaagaacttcttgggccaagtgacaacaggagggttcccaagaattaggttgggaagaggacatccactttakaagatgcccaataagaataaccagttg

SEQ ID NO: 904346 - DNA, 611 bp, Homo sapiens
caagactgggagttagagctatctttccagtagcccctgcatggaatagtcacaggtacccacctgcttacatgaacatccaaaggaaaaacaattaaaaaatttgtatcagctctgaggttacccagatatacaaatggaagttgtagctgtcagtgctattaatgtgaagagttcatgatcaagagtgtaaaatactctctagttttacggtaacctgaagcctggaaacacaggcaaatgaatatccataataaatgggttattagtgttacattacaataagttatatagtcaaaagcattgtacaatgtcttcaatatgttcctcctttttagcaattcatagcttaatgctttgtacgaaattgcaatgagtgtggtgcattaatgcagaatttccatcagtccctatatatacatctggaatacaatgcctcaggaatttatgtctctaattttcactaaataaacctgtgcctttagcataccccagaataagtaagtgaaagggttcagatctaayaagcatgcagcccacttcacaagactgtgtggttcaacccaatttacgaaattatcctccacccaggccctcaccactctggtgta

SEQ ID NO: 904347 - DNA, 600 bp, Homo sapiens
atgaggaaggggtctcctaggatcgtctgatccactctgtctccactcagcactgaccaaacagatgagaagcatcactgtattgcctgggctgacttagtctcaagctgtccctagcctgagatatgttccaaacaggcttagagcatgttctgaagctgggggaggccattacctcaaaactaggggctaacatcaccatgaccacagatgataattgtcgaatgtaaatattttagtgtttctttggtgaaaaggttcagtacgcctagtatattctggcaaaggcaggccagaccttataaactgaaatcttgcaatgcaaagtcctattaaagttcttgaaaccagttgggcacagtggttcatgcctataatccctacactgggaggctgaggtgggaggattgctttaggccaggagtccaagaccagcctgggcaacaaagtgagactctgtctcaaaaaacaaacaaatgacaacaaaataaatcttgacccctgcagcatcagaaagaccagcttctgactttattggcatcatgttgtgctggcccarggaccacgcaggttcttggatcaggaatgtagttctgattg

SEQ ID NO: 904348 - DNA, 579 bp, Homo sapiens
taaatatgaattcatttaatcttcacaatcctcctatgaaatccattctttttcaggtaaggaaactgagacacagatatgttaggtaagtaaccccaaggttacacagctagtaagtggtaggaccggcagtggaacccacatagatagtctggctcctagtctgtgcttttgatcactccactctgaagcttcattgtctaacaaattagtgcaaacttctcaccagactttgcatttctctgcagtatggccccaactaaccttttccaggattatctcatatcaccatgacattacaccatctattcagtatccattcatccaaaaaaaaaaaaaaaaaaacaaaaaacctaacgaacaccttgtgaagccacagcctaatgaaaagacagacattaagaaagaattggcagctcaattggccaaggcaagatgggtgaaagtcagagtgggggttatggtcctggagtttgcaagaagaatggmaggacaagaaaaataaatatgaacctcctgtaccaactagagtggagaagaagaaaacaaagggaccagatgctgccagcaaactgccac

SEQ ID NO: 904349 - DNA, 670 bp, Homo sapiens
ctgagagactgttagttagggtttcagtccttttgcatttgctgaggagtgttttacttccaattrtgtgattgattttagggtaagtgccacgtggcactgagaagaatttacattctgttgttttgaggtggagagttctgtagatatctatgaggtccacttgatccagagctgagtttaagtcctgaatatccctgttaattttctgtctcaatgatctgtctaatattgagagtggggtgttaaagtcccccactattcttgtgtgggggtctaagtctctttgtaggcctctaggaacttgttttttgaatctgggttctcccgtattgagtgcatatacatttaggatagttagctcttcttgttgaattgatccctttaccattatgtaatgcctttgtcttttttgatctttgttggtttaaagtctgttttgtgagaaactagtcactgagtcactgacttcactctgttgtgcccctgcagatcatggtgactactggggcattaattcttccccaggagcacatgactctttcagctctaggagaaaaactgggggtggaaatggtcatctgtctggacagagctttataactttaaaatactgaggtgtatggcatatgggcctgctttcatactgctgaatctgatcaagcatcaa

SEQ ID NO: 904350 - DNA, 649 bp, Homo sapiens
taggatgtccttaaaaagtggcagagcaaactagaggccaggagtgtataagcaatggccctgagagataaggattrtgggtctagccccagcatacagatgtccagattggcagcaaactgcagtaagctggtgctaatacagggctatttttgtctgtctgggctaacttgaagaggatgttttttccttctagcctcattctccttatctacgtaaagatggacttgtactgcaccaccatcagctctgagattctatttcagaaatctattgctgccccaaaatttgatggctgacaacaagaatctacttatttaggtctttttggttttatctcaacagtgttttatggatatctgtgtagagatttgtacatatatagattcattggtagatttatcccaactatatgtttttgatattactgtaaatggtatgctttttaaattttatttttaaattatttgttaaatatatttatttacatatgtatatagaaatattgatttatatataccagcaacaaatcatcagctctgagattctgtttcaggactctattgctgcccccaaatttaattgatttttatagattgaatttgtatctagtaacttcaccaaactcacttactaataatattttata

SEQ ID NO: 904351 - DNA, 596 bp, Homo sapiens
gcaaagggtgtccaagacatctgcactgaaaactgcaaacatagctgatagaaattaaagaaatgctacatatatgaaaagaaattaagactcaatattcttaagccaactaatattcttaaagtccccaaatttatctacagaatcaatgcaatcccaaataaaattccagcatgtttttaaatagaaattgacaaagttttcctaaaactttcatgaaaatgcaaaggatctagagcaaacaaaacttttttttttttttaagaagaaagttggagggcttaccctatagtttgctattcatgataatagaactaaacagagaccagaaatagaactatacatatataaccagttgatttataacaaaagtgccaaggcaattcaacgagacacatcttttcaacaaaaggcactagatttgactgaatggaaataaataattaatccttgctgaacatcatggataaaaattagctcaaaaacaatcrtaaatgtaggcaagatggtggaatagaaagccccaccgatcgtcccccctgcaaggagaccaaattaacagctatttacacagaaaaaatgccttcgtaagaccc

SEQ ID NO: 904352 - DNA, 563 bp, Homo sapiens
catacaagcatttgatttgctattaggtgttaaatgaggagggagagtgtcagaagcctcaggtggagatcaggacatttggtttccaatcttacctctgccttggccacaccaccagctctcgaagcctcaacctccttggccatggtaaagcatgagtaagttgtctgagggccctatccacagtgaattctgtttaggaatgactttgggtcaatatattttatttattttatttttattttttgaggtggagtctcgctgtcacccaggctagactgtggtgatgcgatcttggctcactgcagcctggacatcctgggctcaaaggatcctcctgccccaacctcccaggtagatgggactactggtgtgtaccaccagacctggataatttttgtattttttttttgtagagacagggtctccctttgttgcctaggctggtcttgaactcctgggttcaagcaatcctcccyccacagcctcacaaagtcttgggattacaggtgcgagctacagcacctggcagacttttggtcagtttgttgatcttttcaaag

SEQ ID NO: 904353 - DNA, 643 bp, Homo sapiens
taaatttttgttgactgataccttggtttaggcttagtcaaaggagaccattcaaaacatgaggaaagccacatcttaaaagctaggagcttcccaaaccttggctcacttcagagtctaacatgaaagccgttatttaagttgtgcttctgaagtgggctgaaggccaaggcagtggcttacacatcacaggactgctgcaggccaataaatgctctgctagcgatgctcattgcttgaaagaggtttcccctgtgtggctttatcaaaggccacaggccggcagccggacacgcagaactgttcctgtgtggatacagaggctctctgtcaggctgccccttgcaggaaccacagggttggttttcatcctctctgtagggaggaggatggaggaggaggtggggagaaggacacctgtggggtttatccagatcccagaagtagcaggcaagacatgcaatcacatctagggatacagaagcctcagactggtggctttggttgcagtgtctccatctactttttttctttttttaaataattcagatggggccttgctatgttgcccaggctggtcacaaactcctaggctcaagcaatcctccctcyttagtctcccaaagtgctgggattacaggca

SEQ ID NO: 904354 - DNA, 552 bp, Homo sapiens
agccgaggcaggcggatcacgaggtcaggagatcgagactatcctggctaacacggtgaaaccccgtctctactaaaaatacaaaaaattagccgcgcgtggtggcgggcgcctgtagtcccaactactcgggaggctgaggcagtcttgaaccccggaggcggaggttgcagtgagccgagatcgcgccactgcactccagcctgggcgacagagggagactctgtctcaaaaaaaaaaaaaaagaagaagaagaagaagaagaaagaagaaagaagaagaaagagaggcagggcgctgcgcacctcgccgggcgtgcggggacgttgtagtctcttaacggctcccggctctctggtcgcctggctgcaggactacaattccagcaggcaccgggctcagtgggaggggcagggtggtgtggacctggcaaagcagtgctgcccgctcaccccctgctgccctgtctccatggggagtgagtttggagagaratataagggataaatctgggcttttgcccaaatctggcaggtcctacctccggctgag

SEQ ID NO: 904355 - DNA, 716 bp, Homo sapiens
ttctgctttagtgtcttgttgacctccccttttctaagggcacacaaatcccagtcagttctttcatgtactaccaccacctctgcaagcccctccctccgcaaaacatccctctcacttcctgaccatcacagaagtgaaggtctaacttatattgtcaaatactagctagaatgtgctgtaatctatttctggaagccagaaccctgtgctggcacacttctttttctctcttggtgtgcccatcttttcccttgatgtgcctcacagggaggactatgcacagaggaggttttcagttagtatttgtttggtgaatggatcatgactctatggcgggtagtctggaaggggtcagaagcacagccctagagacacacttaacagtttgagttctaatagctggccgcctccctgggtctctatttcctcatttgaatcctgaggataataattacatctacatctctgtgtaaaagagttgttgtgatgaatgaatgagatgtcacaagaaaaaaaaattaggatgctggtagctagtgctcaataattgttagatcttctgacttctgctcctactgctatcatgctgagtgtgtttctacataaactaacaacaaacaaagggtaaaaattaaagtataactttagattcttgacttgtcaaactggagacctattggkgtaataagtctagcacaggcagaagagaaaat

SEQ ID NO: 904356 - DNA, 598 bp, Homo sapiens
tgctctcctaggagactttagccttaggggaactgacagacctaaacagagcaggacaggccaatttgatctcaatgtgccctctctgccaccccctactccatctggtggaatctcccarggccctggcctggctgaacccacttgcaatgcagccttggatgaccaactgggtgcctcctggaagccacatcatagtcttttcactggttgactatgcctgaccatcagagagctccagcagagtggcccttgatgactctcaccagtccacctgaaccctcccaccactgcatcccctatgccactttgccatgcacttgtcatagccctcccaaacccctccgcacattgcttagccagcttgcaggtgcaggggaccttcccttccttctccagctgaggccatccaccacaatcaagtaggctttatctctgggttacaaggttggttcaacgtatgcaaatcaatgtaccccaccatgccactgctgccaatgtgagtgtacccccaaccaactgcatagccattgccattttgaacatgtatatggaggccagtggccccacccttcattgtgtaccaccacctctgctg

SEQ ID NO: 904357 - DNA, 652 bp, Homo sapiens
cctgatgaattcaggtccaagagargtcagatgacttgtcctgtgtatatccacccgaggtgagagagtgtgtgaagtcagccgaataacatttctataagggaactcattcccattgattcattttaagagtctacctagaacatacccaattagctgtggtgaaaaacaaatccttatgttccataacttaccattttagtgaaggaagctacttaatacaaccaccttaaattaaactttcatttcaactaagaattgaatggccaacaccgtggatattccttgtttatgggttagatacagtttaaagtttaactttacagcatatatttttattttcacattcattgctcattaactactagaatatctaatctaaaatcaaatggtaacctataatttataatttccagggatgtctctttggtgccgttaaaaatggctttatgttagcaaactgatgggacaagcagctcaatcattttcacgctgtattttctaacttgcgtgcatttcctactatttgcagttatttcaaagtataatacaaaacctaagagacaaattgtatgcaaatatgtgatgtcgctaaaacacaattttataccagcacacataagggtgataactattaacattttttattcag

SEQ ID NO: 904358 - DNA, 539 bp, Homo sapiens
ttcctacggatactggacaaccagtgccaggtaatagatcgtagatatttatgaccttggaggatatgaagaaagatgaattaacaagtcaacccaaagctgcctttcgtcattcatccacgtggaaaaacatttctcaaatagtcataatgtgattatgaaacacaatggtaacttttattgggtgctgttaaaatgtataaataagtgttctcatttggtagtgttcttttagaaaataaagcaattcattcatgtcacatttaaagaaagtcataaatggaaactcaataaattagttaaaaaatgcaaattttcatgcagttcttcagttctgttctctccaaaaatagcaacggtgcttcttccccctggagaagtctgaattagtcagcagcactgaacatcatcattgttattattattaattattgttcattattacatagycactgtgtgctgtcttgggtgtttgaaaggtctagtgaaggccacatagggttgataattgttcctaagaaaagcagatacagcaagga

SEQ ID NO: 904359 - DNA, 583 bp, Homo sapiens
acaattttgtaaatccttctaaggcagatgaacttcctaagaagttagaattattgaagcttttcaaagaggagattgatgtcatcagaactgcttttagaaagataactctgccagaactgtgggaaatgaattggagcagggaaacgccaaagaaagtagttgatattgggcacctataaaaatttaattattacttaatgcatattactttgcagatgaataaggtagaagtattgacctttagtggacaatgagtatgacattcagagcacagattttatcaaaatgtgaaatcaccacatgcaaaatttgatgattagatgtgttctctgcagagcagtaaattttggttctggacattatgagaaattctcaagcaaattagcctgagggagtttcccacagaggatgtattatatctacagtgattatgctaccatttattgtaascaaatacattttttacctttgaagacagtttacttccctctttaatttttttaactctatcataccactttccaataggactttgtatgcaatgtagtgttctaaatgtaccgttaaatgtggtagcaac

SEQ ID NO: 904360 - DNA, 623 bp, Homo sapiens
aatactgcctgagtttttccaactcaggaaggaggctagtgaaatatcacagccctcagccaggtggcctgttactgagtaaaccctgatgggaaatggtggcaggggactacttctgttacacagggtagctgatatgcaaacataagtcactgtattgccatataaagatttagttcataaccgtgtgatactatagttactttgagagaagagaactaaaaaaactcaagctgtagtccagtgaaattgttcatttttggtaaaagagattctggcagtttgagactccatccctggttgattgttgaagcttccagagaatgagtccagtgactcctcatctcctgtactatgattgggcactgagtcacactcccaaccccaccctggccctctatggcactccccaactggcgttcctgcaagctttccaaaccagggtacagtcatacttcccacaaacctgctaagggcttcctgggacagcggaygcttgaggagtgcttggtcaaggcctaggtttaagtcgtggttttgcctcaagtgagggataactctcagcagtcttgctcataagtctttttgaagaaccaactttttttttttttaacttttaagtt

SEQ ID NO: 904361 - DNA, 607 bp, Homo sapiens
caaaatcaaacttacgtttttagaactgtctttcctgacacctggcttttcaaatatttcagagggcccctgaaacatccagaaaaaagaagtaaacargattatgtgatatgtgtaggtacatgggattgccaaaatgatcttcagtcttcttcagattatacttttgtgaataatactaacatatgttccaaaactgtatgggatttctaaaattctaatgtctgaatatatgctatgaatcataattaaggttgctatgttaagttattgtaaaccacggagataaccaaacttctttgtcaattgtgtttctaactgtaaccaccctggatattttgctgttcacagacaattgtcctgttttctttcttttcaaaagatggtttataataagctataaaactgtaacaggtgctctcaaatacaggcttctgataactttggaaattgtaacattggaataaaggaaaacgcacaggactcatgaagagctgaaatgttcacgaatatcaagcaaaacaaaagttaactaaatggactgaactcagaaagctgaagcaaactttttgacttttggttgtaatattgctgatccttgtttggt

SEQ ID NO: 904362 - DNA, 606 bp, Homo sapiens
accaaattccaatccgactctagtatagcatcacataacagatagcaggccctgaaagaaataaaaatattttaccccaaaatatatttctttgagatactcttaaattgccctgccaagggagaaatttatattctgtagagaatctctttccctttccaggtctttttctgatcctaaagaaattagctgagagtctagcacatttttaaaggtctgaatagaaaacatttgccatctattgcctctaagagtggccacctgtgagacttcatctacataataagaaccttggtctctacaagcccttattctagcctggatacttctttctattgattccaggtctttagataaaaacttaattctttcaagcaattgccaataagaaaatcactccctcacccattttgaattttcccacctttcaggaccaaacaaatgtgtacattacatatattgattgatgccttatgtctccctaaaacatataaaatcaagctgtaacccatccaccttgggcrtatgttctcaggacctcctgatgctgtgtcacaggtcatggtcctcacatttggatcagaataaatctcttcagatatttca

SEQ ID NO: 904363 - DNA, 648 bp, Homo sapiens
atggttgtatatgtacacatatgctcacatgtaycaaatataactatataatattttatagctgccaagataagactaacaggttaataaaaatatttttaataagggtccctctttaattgaaaataaagaaaaaagtagtaactttcatttttacataagtatggtatgctaactttttcaaagaatggttcattctctcagctaatgtagttatacaccgtctggtcagaatgttatagaactcattactataggtaaagtaaatcagtcttttcatttttcacttgtgcatgcctgtatgcttcataatgtttataagctgcagaggtaatgcatcccttggtgttaacatgatttgttattaggtgagcatgtacaacaaataaagttgcatttctaaaagtaatcttggaagaaaatattgagcctttaattaattccattagggctttgtacttttttataattgaacagaaaaatttgaatataatgagtattttaaggcttatctgggttcaaactttagaagattatttaaaaattcagaataaaacccttgacagaattcattactgaattagatgcaaaggtagatttgaatgcactttagttttaaagggttgctatttctagtgccgtatattt

SEQ ID NO: 904364 - DNA, 509 bp, Homo sapiens
ttttataatgtaggcatttatcattataaatttctctcctagaactgcttttgccacatcccatgtgttttgacatgttgtgttttattttgttttgtctcaagatwcttaaaaattggttttattgattgattgattcattggttgttcagaagcatgttaatttccatgtacttgtgaattttctaaaattcttcttgatgttgatttctagttttataacactgtagttagaaaagatacatgatatgactttagtctctttaaattgttaagacttgttttgtggtctaatatatgatctatatgtgatctggagaatgttctgtgtgggcttgagaagaatgtctattcagatgcagttagatggaatgttctatatatgtctgttagatccatttttgctaaagtgtaattcaagttcaatgtctccttactgattttctgtctgtataatctattcatttttgagactggagtattgaagtacgctaccattattttattgt

SEQ ID NO: 904365 - DNA, 584 bp, Homo sapiens
tgtatttacaataaaatattattcaaccataaaaaagaaagaaatcctgccatttgcaacaacatggataaagctggaggacattatgctaagtgatataactcaggcacagacagctgaataccatcgaacgatcccacttctgtgtatatatccaaaggaaatgaagtcagtatctcaaaaataattccacgtgatctcacttataagtggaatctaaaaaagtcaaacttctaaaagcagaaagcaaaatggtggttgtcagtggctcaggatggggggaatgggaagatactgatcaaaggatgaaaactgtcagttataagatgagtaagttctggagatcttatgtacagcatagtgactatagttaataattccatattgtttgaaatttactaagagtatacatcttaattgttcacactacacacatacacaaacagggawaaatgtagaaactctgtgtggcaattaacgtgtcaatctgattgtggtaattatttcacaaagtatacacatagcaaagtagcacgtgtacactttgaatatatataacttttatttgtcaattatacctcaat

SEQ ID NO: 904366 - DNA, 670 bp, Homo sapiens
ttgtcatcccctaggcgaaggagagaaactgtctaggttaaacggtaaattcagacctgaccacggtaaaggctgatgtttttctgcccttctgtgagggactaatagagttcagagaaggggtgaggttggggagcgagagtgttagaattagagttccatggcttcagtgggcaatatctaagccatggtgctttctagaggaaatcagggaatcacatggtgcttcatggttctatatttctatcagtcgtgcatcattaattagttagccagcctggggcttctctttttactttttcaatgatttctctgtctggatgggttcatcatttctgcatactctgtagtgtcttctaaatgtcagtcatttgcacatgccatgtagcaaattcttactcttttacagtctcatgatctctgtattggatagtctttgtgtagggaaagctctaaggatgtagaagacctgtcatatttttctgagtcttttatagatacagatgttgatactgaagttaggtcactggaactgcccaaaatacattaaaccataggcttctatacagggaacatttttttaaactttttattgacatagtacacatttagattaagtstacaaatcctaaatgtataccttgattaatttttaataaagtgaaccaac

SEQ ID NO: 904367 - DNA, 572 bp, Homo sapiens
ttctgtagaatcccaagaggcataaaagaggatgagtaactgggtcctgtgccaagttcccaacccctaagccttcccaacatggagaaactacaccagtgtttaaaagtttctaggttggaggaacaaacttgagcatcaagggcagatgatttgttaacacagtcctgtgcagagggctccttcagaaggcatcccctgtgacccaaacacagtgagcaccttctactttctggccttatgccatcaatgcatccagctgcaatctatcctcaaacctggaatccatctcttgacttcccagccagaccaccttccatcccttcactgtgtcccaccctgcccagaatgcatgctgttctcccagagtctcatggaaataaggccttgcactgaaataggctgtgggaaacaaaaggataagcaggtctggaccagtctgtaatggtagcaggtgaaaacaacttayggaaaaacacatgaattcattaggaaataaggtgacagatccccagctgctgaagaactagaatgtctattacactcatacaattgatgttttattttaatac

SEQ ID NO: 904368 - DNA, 625 bp, Homo sapiens
ttaaaagaaaataactactgagaggataaagataccttgtgacaaagccttctggatataagactcccagttatgagctgtgcagatagatagatatgtatttttaaagtttattttcatttatttatttctttttttgagactcactcagggtcttactctgtcacccaggctggagtgtagtggtgccatcaaggcttactgcagccttgaccttctgggctcaggtgatcttcacacctcagcctcccaggtagctggcactacaggcatgcaccaccatacctggctagctttttgtctttttgtatttttttagagacagggttttgccatattgcccaggctggtctcaaactcctgggctcaagccatgaacacaccttggccttccaaaatcctgggaatatagatgtgagccacggtgcctggtcagtatatattaaaaaattatttttcagagcaatgcttatgttttgtgtagctaattgctataagtccataactaaaaccaagattatagtagctcwatgcatagaagttaaagataagtcagttttgtaacctggcctttggctttctgtttgttgactttttactgaaaaaaatttaaggggtaatgaat

SEQ ID NO: 904369 - DNA, 626 bp, Homo sapiens
aaggagcagactacactttacagtttcttgcaaattcaaaggttacttaagttggagacaatsagtcttatggtggaaggcattttgtcaacagacggcaagtatacaatttaaaaataattttttctacgttttcttatatttttttcctagatgtttctgttggcaataacatgtgcatttgtatccaaaacactgtctggatcttatatgaattccatgctcacacaaatagagagacaattcaacatcccaacatctctagttggattcattaatggaagctttgagattggtaatgaattatttttgcatttcttctttttgtattttgtcttatctgtggagctagtctgaattttattctccttatttgctgttttaggtcatttaatctgaccgagttataagttttctaaaactaactgattagctaagcttagaatatgcttggaaataattcatttaaatattacctcatattaacacctaaatattgccacatatcctaccattgttctttttattctaatagtttcttagttatgtagcatgagtagcagagtatttacagtatttatatttaaatatcatttgataaccctaagggatactaagggttccat

SEQ ID NO: 904370 - DNA, 626 bp, Homo sapiens
aaggagcagactacactttacagtttcttgcaaattcaaaggttacttaagttggagacaatcagtcttatggtggaaggcattttgtcaacagacggcaagtatacaatttaaaaataattttttctacgttttcttatatttttttcctagatgtttctgttggcaataacatgtgcatttgtatccaaaacactgtctggatcttatatgaattccatgctcacacaaatagagagacaattcaacatcccaacatctctagttggattcattaatggaagctttgagattggtaatgaattatttttgcatttcttctttttgtattttgtcttatctgtggagctagtctgaattttattctccttatttgctgttttaggtcatttaatctgaccgagttataagttttctaaaactaactgattagctaagcttagaatatgcttggaaataattcatttaaatattacctcatattaacacctamatattgccacatatcctaccattgttctttttattctaatagtttcttagttatgtagcatgagtagcagagtatttacagtatttatatttaaatatcatttgataaccctaagggatactaagggttccat

SEQ ID NO: 904371 - DNA, 629 bp, Homo sapiens
aaaagaaatctcaaagggaatgggatatgtatgaagtcttccttcagtttgaggcaaagcagtacatrcagcatgctgacccatacttttttttctttctttcttttctcttttttttttttttttttttttttttggggggggagtcttgctctgttgcccaggttggagtgcagtggcatgatcttggctcactgcgacctctacctcccaggttcaaacaattctcctacctcagcctcccgagtagctgggattgcaggcttgcctcaccatgcctggctatttttgtgtttttagtagagatggagtttcatcacattggccaggctggtctcgaactcctgacgtcagctgatccatccaccttagcttcccaatgtgctgggattacaggcgtgagccactgctcccggcctgacccatgcttttcctcggactcaatttaccctctggaaaatgggactaataacagtctaccctgttatatttttctgcagataacaagagaaaatagatgtacactttaaaacacaaaattgtaaactataaaacactttataaatgagagttaattatttcctgtctgttcatatacagaatgtcagagaaaatataaacactttagg

SEQ ID NO: 904372 - DNA, 532 bp, Homo sapiens
atcttgcaaattcatcctacattatgccaaatctatagctgttgattctcaccttcaatctgccacctttggtaagtattcaggaatatagatcaagtcatttaaattggcttagctcaggctctgctcatggaccaggctcagccagacagcacattgttttatttggtctgtgttaatgccccacagctagtgagatggttttcatctgtcatctctctgttgacagacacactctccccttgctgggcttcttgctacctgaacctcaaatgttcccccaaagtcttttacaagacttccccagaaagtgatgaatgctgcaaaaagggaaaacccaagtcagtgaggaggggaaattggcaagaatttagagttagaatgagtgactggaaaagagaactctggaagtaaacaggggtgaagcataggcaggtaaaagagaaaaccaaagagatggtgcaaacrtacctagattctgctattccagtgagcaatggagaggcctaatgatgttaacagggaaggagct

SEQ ID NO: 904373 - DNA, 675 bp, Homo sapiens
aactgcatcaattaatgggcagaataaccagataacatcataatgataggatcaaattcacacataacaatattaaccttaaatgtaaatgggctaaatgccccaattaaaagtcacagactggcaaattggataaagagtcaagacccatcagtgtgctgtattcaggagacacatctcatgtgcagagatgcacataggctcaaaataaaggcatggagtaagatctaccaagcaaatggaaagaaaaaaaaaagcaggagttgcagtcctagtctctgataaaacagaatttaagtcaacaaagatcaaaagagacaaagaaggccataatggtaaagggatcaattcaacaagaagagctaaatatcctaaatatatatgcacacaatacaggagcacccagattcataaagcaagtccttagagacctacgaagtgacttagactcccacacaataatagtgggagactttacctgcccactgtcaatatcagacagatcaatgagacagaaagttaacaaggatatccaggacttgaactcagctgtggaccaagcaaacctaatagacatctacggaactctccaccccaaatcaatagaatatactttcttttcagagccacatcrcacttattataaaactgaccacaaaattggtagtaaaacac

SEQ ID NO: 904374 - DNA, 591 bp, Homo sapiens
gtgagaatattccaatgaagataatcctctattaagaaacaaataaattctcaattctttggaaatggtggaaatagttagctattataactgtttatgagagcagagaaatgactgaatcttagcttgtaagaaatttctccatgtacttatcaagccattaattttcttaataaattagaaatttccttttacaattaataaaaactggctttagttaccaaggtttcttttaagaaaggtaaattttggtgcttcatatttgaaatcaatttcaacaaaaaaaagacaagtttttttcacaacagttctctctaaggcaccctgatattggcatcagaaagaatgaggtcatgtgcttttaataaacccaaaagctatcaaatgtagaaaattatttggttatttcctttactggatacagaaccttatatgtattagtcatttaattatgagttcagaaatgaatttgtgatgctaggagaacaatattcattaataattagggaaatgagcaatgcagaaagttttytaataggcccaacccttctatttcctgcacagtaaatatttgtgaaggaaatatgctgt

SEQ ID NO: 904375 - DNA, 697 bp, Homo sapiens
caaaggcaatacaatgaggaaaagatagtcttttcaacaaatggcactggaacaacttaatatccrtaagcaaaatcaaaaatctagacacagatcttacatcttcccccaaatttagctgaaaatggatcatagacctaaatgtaacacacaaaattataaaatttctagaatataggagaaaagctagataaccttgggcatggcaatgactttttaaatacaacaccgccaatggcatgatccatgaaaaaagtaattgataagctggacctcattcaaattaaaaacttctgtgtaatgcacagtcaagagaattagaagacaagccacagactggggaaaaacatctgtgaaagacatatctgataaagtactgttaccaaaatatacgaagaactcttaaagcaacaataagaaaaggaataacccagttaaaaaattgacaaaagatctgaacacacacctcaccaaagaagatgtacagatggctaataagcatatgtaaaaattgctcaacatcatatgtcattaggaaatagcaaattaaaactgataccactacctacctattcaaatgcttaaatacaaaacactgacaataccaaacaatgacaaggatggggatcaataagaattctcatttattcttggagggaaagcaaaatgaaatagccactttttagaagacaggttg

SEQ ID NO: 904376 - DNA, 600 bp, Homo sapiens
tttgcccatttttgagtcgggttttttttkttgttgttgttgaggttttttgagctgatttttgataaggctgttgcagtactaagcgatataagatgctgtggatggtagactgtcacctaccttgactaacagctcattgttgagtgacttttgtgataaaaggtgtacctattgtcagattgcaaatgatgtggaaagtaaaaataggacacagattagtgtcaaggaccacggtactgtggctggagtcagctgattgaactggaatagcagtaccagaccctggaaaagtgtcatcagcagtgagaccccactgatagcctgaagaaggttgtctgatgcaaccaatctgccagtagcatgtgatgtggttcctctcaccatgagacaaatgagtccttttccaggactcataagtctaggatgaggtggcagcctctgcatcaggaacatagagtcttttactttgtatccactctatgatgatagatatgttgctgtgtctggtatgatgatggatccagcagcagtggtagcagtcttaaccgtgcagcttgatcagtggcttgattataattggtctcatcagacaatgga

SEQ ID NO: 904377 - DNA, 631 bp, Homo sapiens
ctgttctggagacttctctcatcatgcaaaagagctaaagtccttgggcagggaagcaggtctgtggtcacagctggggttgtagaacagcctcccagcccacactggagtaaccaaactgtctggagtcctggaaacttaggttctcatttcgttcatttttagaccttctgcccaaagtcatgtttggccatagatggtgcctcttgatctgtctctgcgtgactgtggctcagctgagagcctgtgtgcttcaaaaccaaaaaggcatctataatggtatcatttattagacttgcaccttagtaatttttttttttttttttttttgagacggagtctcgcactgtcacccaggctggagtcctgtggctcaatctctgctcactgcaagctctgcctcccaggttcaagccattctcctgccttagcctcccgagtagctgggactacaggtgcctgccaccacacctggctaattttttgtatttttagtagagacagggtttcaccacattagccaggatggtctcgatcttctgacctcgtgatccacccgccttggsctcccaaagtgctaggattacaggcgtgagccaccatgcctggccgcaccttggtaatttttaag

SEQ ID NO: 904378 - DNA, 584 bp, Homo sapiens
ggacaggcttcgtgactgacaccactcagtaggtaagctgctggcttgtgcaacagctgcagcctccatgggagcttgcatctcctccaaatagcagtgagttgctatcatgaaacctggatgtgacaactgcaagtaacacagctgccagatcattgactctttgtcagccagaactggaagagaacatttttggctactgaagtgttcctgatgtccttgagaagtgatggctcaagcggaactctgtcttggcttatgtgaacatctgtcaaatctcttcatgctttgttcctatcagtaacacttttcatcattctcaaacaattgtctttttttaacttgaggccacaccaagatacaaagagaggcagagatatgtccccatggctctggttccctgccattcactaaagtacccctggcttggtggaactgcagtcagttcaacagctttctctccaactctttctctctcttttttctttttttaaatcattgttcttctttgcttggtttttcatgcagcaagaggaatytctttaaaattcgcaatttgggccaggcacgctagctcatgcttg

SEQ ID NO: 904379 - DNA, 644 bp, Homo sapiens; identical to SEQ ID NO: 901979

SEQ ID NO: 904380 - DNA, 639 bp, Homo sapiens
atctactggcaagactggtgtatattccactgtatggctctgttacagcaaagcaaaaaaaaaaaaaaaaaaaatatatatatatatatatatatatatatagaaggcttgactcccatgactcccagccttaaggagcttagaatctaataggaggaaagttcatttctcacaacacaatccaggagcaagcagctggagaaaggtgaggttaaagggggctaggattggggtagggaggtaacgtttcagccttttgttggaacgcatccataaagaaagaagaccagagtgttggagagaagagaagagagatgccttaaaaatgcagtgaggtcacgcctgtaatcccagcactttgggaggccgaggagggtggatcacaaggtcaggagatcgagaccatcttggctaacacggtgaatccccgtctctactaaaaatacaaaaaattaaccgggcgcggtggcgggcgcctgtagtcccagctactcgggaggctgaggcaggagaatggcgtgaacctgggaggcggagcttgcactgagccaagattgtgcccctgcaatccggcctggggtaaaaaacggractccgtttcaaaaaaaaaaaaaaaaaaaaaagcagtgaggacacttt

SEQ ID NO: 904381 - DNA, 546 bp, Homo sapiens
tatctccgcctcccgggttcacgccattctcctgcctcagcctcctgagtagctgggactaccggcacccgccaccacgcccagctaatttttcaygtttttagtagagacggggtttcaccgtgttagccaggatggtcttgatctgaccttgcgattcgcccacctcggcctcccaaagtgctgggattacaggtgtgagccactgcgtccgaccctccttgagcttttcttcaattttatttccatcacctagcccagtacttgcccatagtagacactcagtacacatttttaaatgaatgagtgagtgaaatgaattaatcttttgtattaggttggtgcaaaggtaattccggttattgccgttaacaatgatggcaaacacacacacacacaattacttttgcactaatctaatattcagaaaatactcaccaacttcatttatctgtgtatttatggtttattttggaagtggcttagtggaaaggttaaaagcataggttttggaaacaaaagctttgggttcaaatttcagatttg

SEQ ID NO: 904382 - DNA, 600 bp, Homo sapiens
gaaaagaggtttgactagaacccttgtaggaaaagaaagcgggaacataatctcaatatagaaataatctaaagcaaggawcttttgttttggcttgggcaatttgagaggatataatacatgctgggtcagggctatattcagaagtgaccattaataatgctgacgtgacccttgaaagccaactacacttctctagcaactgtattcccaacaagggatatggggagaaagtcattgcccccattttatgggtttaaaaactgacacctctagaaaggcagtagataagacagccacttggtgacagagccaccctgaagcctgtgagggtcactgcaaccccctcccctccaatccctccctgggtaggtcagctcacatttcagctccggcccatccacttccactttgtttcgaagtctcggctgcccgcttgggttcttggtggccccaaggaactcatagagcaagttcttctcggctggacatgtaggtttcttgggcggcagggtcagtgatgcggtgcccactgcgtcacagcaaccctcctcaccacaggcgtccttctggctctggggccactggctgagaaagagg

SEQ ID NO: 904383 - DNA, 614 bp, Homo sapiens
caagccacatgactgtattattaacaccaaataaggagacaaatagatggattaattaaataaatgggattgactgggtacagtggtccacacctgtaatcctagcaytttgagaggccaagacaggaggatcacttgagcttaggagctcaagaccagcctgagaaacatagtgagatctcatcttttttttttttttttttttttttcaaaaagggtaaataaatgggactaataatgcctttctcatgggggagaacaaatgagataacagaagtgaaaagacttttacactaagtgacaaccagatgtgaagggttatgactagtaattatggggctttttagtaaaagcaaactttgctctgggtttatggaacaaactgtaagaaaggacataaatttcaggctgttcattagccaagttctcctctttgagatgaagtaggtttccttggccacaggtgaagccatcttgtactgcaatggaaatttccatcttggcatccacaaatgagagcttcccttcccccacacatactggctctcctgagcccaacacattgcatccaggccgtcagttggagaactcttctggaaaacatgattaaggct

SEQ ID NO: 904384 - DNA, 518 bp, Homo sapiens
tgtattaatggcgacatcatgttccatgttttcatgaactgtgatttatcagagaagcccttgcaacggtgatctaggttgtgtcatcgcttctgcgtaacagcaaggcaargctgcggatttatcgccgttctacccaggtttcctgttgattacggcagggtttgaggtgcggtccctggtgtttcatcatgacaagtggaggtttgcaggagaacttcataaccatctgcagaaaaggtgaagtcacatcttgagaccagctctagatatgttaccgatgggctaatggttttgatgtaaaataagtaaaaacattaaagggctagaagaagccagaggaaaagtcatttagagggttgtagtgtgaaagtctttctaactgcaacacaaaatcctgaagctacaaattaatagattatattaatagattataaattaacctaaataatgatattgacaaatacctaagataagaattctccatggaaatgcccatcatggaaaacaacaagtgg

SEQ ID NO: 904385 - DNA, 593 bp, Homo sapiens
ctgatgttggtcttctcctgytgaacttattttctttgttatgacggaattagcaagaattaaagggagggggtgttgaagatcattagcacctacttgtaactttcttcctgacataattctaagattgaaaagtatcagccagaccactacggagaaaaaaagtgttatttgctacaacattgcgtgtgaagacaaatacctcatgatttcatctgttgcagaaatctcaaaagtttatcacagcaaatgagaaagccattctggtctttatttataaactccaacgggtttatctctccttcctgaacattaaaatctgaaaggcagtttgcctcttaaccaagcatctgtctctgggagtcatcagcagaagtctgcacaggggaaaaaggcggtctcgccttcgtcagtgcatgggccccgtccagccactgtcagtgatggcgtcctctgtgtcaaatagctatgcccaatttaaaagaaaacaacagcaacaggcttctgttgtcttcaagtagctgcaaaaatcccttagggaaaacgaaaaacatcttatccagttcggcaatcaagaggatcagcgtgttgta

SEQ ID NO: 904386 - DNA, 657 bp, Homo sapiens
ggaattttaaatataaatttacataagttacatgtattcagccataaaaactacagactacacaaaataaaaaatggattaatctggaaaacattgcattaatcaaaggaagctagacacaaaatagtacataccatatgatctcatttatatgaggtgctaaaacaggcaaaatgaaattcaaacagcgcttacctctgattggttatagagatttactagaaggagacagacaaggccaggcatggtggctcacgcctataatcccagcagtttgggtggccaagatgggtggatcacttgagcccaagagtccgagaccagcctgggcagcacagtgaaacctcatctctacaaaaaaacagaaaaattagtcaggtgtggtggtgcaagcctgtaatcccagcttcttgggaggctaaggcaggaggatcaattgagttcaggagatagaggctgtagtgagctgtgattgcacaactgcacactccagcatgcgtgacagagtgagatcttgtccggaaaaaaaaaaagrgagagagagagatattctgcaatgatggaatgttcaatatcttgattttggtgttggttaattaggtgtttacatttgtcaaaactcatctaattttacatctaaaatctgtacactttatt

SEQ ID NO: 904387 - DNA, 544 bp, Homo sapiens
actaatttctaggtttattacattgtggtcagatgagatgtttgatattatttccatttttgaatgttttaagacttgttttgtgacttaacatatgctctattcttgagaatgacccacagactgaggaaaagaatgtgtattctgcagctcttggataaaacgttctgtaaatatctattagatccatttgatctatagtgcagattaagtctgatatttctttgttgtttttctgtctggtagatctgttcagtgctgaaagtggagaattaaagtctccagctcttactgtaggggggcctatctctctctagctgtaataatattttctttaaatatcctggtgctccagtgctgggtgtgtgtgtatgtgtgtgtgcatatatatatatatatatatatatatatatatatatatatatatatatatatatatatgcgccaccgtgcccagccaacaatttaatatatatatataatatatattgggactcactattcagtgtcattatagataagwaaaaactcactcctgtcattt

SEQ ID NO: 904388 - DNA, 632 bp, Homo sapiens
catgtttctcttttttttcatattttcttattcctttttagggtttcaattctttcacgtcttacttagtttaagcatacttctgttatattctgcttcagactgtcgtcatrttatctcaagttttaggttgtaattctgctgtttttactcactctcactgtggtgaatgccttccttgtatggtttgtaatttttgccatgagctctcttctttagcctgtttccttctattcaaattccttctggcctgcatgtgagagtgtccctccagagtgtttggtttcagtcaggagcttggggtattattggcctagggattaatgtaacaactttatattaatttctcaacctgggattgaaggtttaacctacttgagtagactaaattcaagctctaaacctatttgaggcacagatctgtggtattagattatcgggggtaactctttgctttgatttcttcacccagaaccctggcagaaacaaataaatgtatctgttgtctttcttggctagggatcaaatttatttcgtagtgcactcttagattaaaagtgcaatactttcagggcatcagctttatgtggcacacttgggtctgctcagctgctataacaaaataccatgaa

SEQ ID NO: 904389 - DNA, 653 bp, Homo sapiens
ctagtacactgttggtaagattgtaaattggcattgccattatggaaaataatattgaagttcctcaaattattaaaactagagctacatattatctaacagtcccttttctggacatatatatctaaaggaaataaaattagtatctcaaagagatatctgtctctggcctgggaggcagaggttgcagtgagccaagatcacaccactgcactccagcctaggtgacagagtgagactctgtctcaaaataaaacaaagcaaaaaatctcctccacaatattattccaaacccaaatgatttcataggtgaattgtgttctaccaaatattaaaataattgcttaaaaatcaacattatgttaacaaaagcatgatccataaaagaacaaatttgtaaactgtaattagtcaaaattaaaatggtttgctttcttaaagacactgttaagaaaatgaaaatgacaggtcatagactgagagaaaatattaataaattatataccccataaagcattttatccagaacatacgaagaactttcaaaatcaattatgagaaaataacccaactcaaaaacaatatataagactaacagatttaagcagacatttcatcagagaggatactcatrtggcaaataagcaactaaa

SEQ ID NO: 904390 - DNA, 480 bp, Homo sapiens
cacactcctccagaccccagaattgtagattcactgacaacttgcaccatgrgcctgggaaagctgcggacactcgacatcagcccatgaaaacagccaggaggtgggttataccctgcaaagccacaggggcagaactacccaaggctgtgggagcccacctcttgcatcagcatgaccttgatgtgaaacatggagtcaaaggagatcattttggagctttaaaatttaactaccttgctggattttgggcttgcacagggcctgtaacccctttgttttggacaattactcccatttggaacagctgtattttctcaactatctgtacccccattgtatctaggaagtaactagcttgatttggattttacagggtcataagcagaagagacttgccttgtttcagatgagactttggacagcagacatttgggttaatgctgaaatgagttaagactttgggggactgttgggaag

SEQ ID NO: 904391 - DNA, 602 bp, Homo sapiens
aatttttatattttgtgggctttctcttttgtgaaatccctattaatgccttttsccaattttctgttggtttgctatttttaaaattaattcataggagctccttattcaaaaataattcatatgagcacttagttgatatgatattaaccttttgtaggttttaggtactgcaaataacttcttctaatttatagtttatcttttcacttttttacttttattttttaatttctatttttttttttttttgagacagagtcttactctgttattcaggctggagtgcagtggctcactgcaacctccacctcccgggttcagacgattcttgtgcctcagcttcccaagtagctgagattacaggtgtctgccactaatgcctggctaatttcttgtatttttagtagagatgaggttccaccatgttggccagcctggtttcaaactcctgacctcaggtgatctactgttgggattacaggtttgagacaccatgcccagactatctttccaattttgatgtaaaaagttcttaattttgtgatagtcaaaatgtctaatcttttttaattgttaagtggctttttgtgtctcattca

SEQ ID NO: 904392 - DNA, 648 bp, Homo sapiens
tattcaatgaatgtccacctgtctgcttccctattttagaaatagtagattgactcacaaacactgagttgcccaaagacttgctcccggaagtgctggcattgaaatttgaacccaggtgtagagaaagtcccatgctcttctcactaaattgcactaattctagctgctgcagggttgcgtctttctaaggacataattcctagttataccagctacatcccagagaacttggataagcagctctggagcagaggtggaatatgtagccctttgacccggccatataccaccaaaatataaacatcaatgcagaaattaatgccatctcctctttctgactctacaaatatttattagcaagggataagatttccgaaagatctgaagagagtcaagaaacttttttccccccttttctttagaggcaagatctcaccacgttttctgggccagtctcgaactcctggccttgttaccatggcaaatcccacaggtctgcagcaacctcaattctcrtttcctcagaagaaataatttgactgaggggcagaaggcagaaggagatactgaggcaagttttagagcagaagtgaaagtttattaaaaaacttcagagcaggaatgaaagggaggaaaacatacttg

SEQ ID NO: 904393 - DNA, 640 bp, Homo sapiens
cttctcacatttaccctcctacccccaggacctcacaccatggccaggcacaatcaatgcttaatgcattaytgttgactatctgaatgaattaataaatttagacatagcatcagttataatctgtaatagcatttggcctgctatatgtccaaaacttagtttttggtcttttttttttttttttttttttttttgtcgggtcagggaggaatatactactctggagtagaaaagatgttgatgagaatagaaaaccaaaacacgatcacaacaggcaaatgagtgagaaatggaagtgccaaggggttagtcaagttttgagcttttaattaacatttagaaaaatcaatagtccataaaaattgaaatgatgtgtggggaaaatttgttaccattatattttgggattaatagaaataaatgatttcaaaaaaattccatgatggtggggcccatcataatcattttagctgattttttcaatttaagaaaaattaaaagcagataatatgtataattacttagaagagtcagttaaattttacatgtaaaacacttagcacaatacaatgtacatagtagggattcaataactcacaacaacaaaaaataccttttgttattataacagttttta

SEQ ID NO: 904394 - DNA, 591 bp, Homo sapiens
cattcttccattcatacacgatctctrtagtaaacacagtacttcccaggtagagtaccatcctggccggttgaggtataaaaagatagccattcacttctctctcaaatacaaaagtttaaaaagttttccctctgcatgtccattgttgtttgtctctactgataagtgtctatactacttcagtatctcacagtatcttcatgttttaggttactgtttcacctcttttctttcatgcttcagctttcaagcaaaatgactttggtggcacaccaccaacctattagggtgtaccttatttctctgtctctaggggaatctcctgaacacagaatataaggtgaagcctgtgtgctttcagccctatttttcctcaagggctgacttgtttggatgcctgggctttctttgtcaccaatcttaggtacagagtgagttgctggaactgcagctcctcagagatcaggaatgcttctggtggtcagacactagtcaattgctgaagttcaggtcaaaattaaacttagacataggcaaaagatcatttttaagtaatgataccttttcagcaatctattaaatataagt

SEQ ID NO: 904395 - DNA, 548 bp, Homo sapiens
cttaggctggagtgcaatggaatgatcatggctcactgcagcctcaaactcctgggttcaagtgatcctctcacctcagcctgccaactagctgggaccacaggtgtgcaccatcatgcccagttaatttatttttgtagagatggggcctcactctgttgcccaggccagtcttgaactcttgagctcaagtgatcctcctgccttggcctccccaaatgctgggattacaggcatgcaccaccatgccccgctagggcctcaccttttaatacagttacaatgacaatcaaatttcaacatgagttttgaatgaggatattcaaagcacaggattctacccctggcccccaaaacatgtcattctcacatacaaaatatattcattcactcccaatagttccaaaagtcctaacttgttccagcatcaactcaaaagtccaaagttcagagtctcatctaaataagatataggtgagactmaaggcacaattccttttgaggcaaattccctccagctgtaaattcaaaacaggtatctacttcca

SEQ ID NO: 904396 - DNA, 548 bp, Homo sapiens
cttaggctggagtgcaatggaatgatcatggctcactgcagcctcaaactcctgggttcaagtgatcctctcacctcagcctgccaactagctgggaccacaggtgtgcaccatcatgcccagttaatttatttttgtagagatggggcctcactctgttgcccaggccagtcttgaactcttgagctcaagtgatcctcctgccttggcctccccaaatgctgggattacaggcatgcaccaccatgccccgctagggcctcaccttttaatacagttacaatgacaatcaaatttcaacatgagttttgaatgaggatattcaaagcacaggattctacccctggcccccaaaacatgtcattctcacatacaaaatatattcattcactcccaatagttccaaaagtcctaacttgttccagcatcaactcaaaagtccaaagttcagagtctcatctaaataagatataggtgagactcraggcacaattccttttgaggcaaattccctccagctgtaaattcaaaacaggtatctacttcca

SEQ ID NO: 904397 - DNA, 592 bp, Homo sapiens
ataatattaaatatatgaatgtgcttagctcaggtcttgacagagtaaatactgagtgaatgtggatgtaatgaatctgcttctacaggggttgtcattggggcttccgtgaggaggagcaagaggatggggttataaggataaggaagtagcacaattaattcttactctcgctcacatcataggccaggctgtgtttgctcagttctttaatttcagcactaccactctttgaggatttttacccagagatgggtaaaaattattatgggtaacattattattatcataataatcttattaatgaaactgtctttgtctcacttttctggaacaatgcaattttgcaacctctgacaatctaaggcagctatatatactgcccacatagtgaccctcacctcctgcttccacaaagtgaataaattgaaataccctcattctgtttccaggcttctacaaacttgcacatttatacgacctgaaaatatttctgaccacctaaacatctgtagtttgtgtaattactcagattytaaacacttccacctagctttactgcagattttacattgccattcacttgctgcac

SEQ ID NO: 904398 - DNA, 681 bp, Homo sapiens; identical to SEQ ID NO: 903524

SEQ ID NO: 904399 - DNA, 740 bp, Homo sapiens
tataaaaattattataaaaatgtgttctttattgagaaagaaaaaataattttgtctaatttgtaggttacttaaaggttgtttcaaaatatggacttaggaaggaraaagaaacaagattaaaaaggaacaagtaactaggagagaaaaatatgaagaaggttatggatatgaagatgcatttttggtaaggaaggttaaaaagaaaagagaataattttgtatgagaaagaatctcatatgataaagttttgtcctaatgtaaaatgactggttatttaagaaagaggaaatacaggacaaagcagaaagtccaagcgtgttttcaatggtctgcctatgtcatgataaggttcgtgaaaagagaatttatgaaaacaattttgtgtgtgattaagttggctataattctaaagaaattatttctaagttttctaaagattaagctttgacattgaaaatatgctagaacaaaactaaaaaaatgtggtcccctgtattataacaaggtttttgtaaagtattcattttcttttaataaaattgcaaaagatttttattttaaaattctaaaatccatttctttttgaaacttccttttatcaagataatttctgtgttgtccttacttggttttggtttctttaaaaggattaagggttttacatccatgtaactttctttattgcttttgaagtcttttgattaccactctggttaaatgaataagtattaattaa

SEQ ID NO: 904400 - DNA, 667 bp, Homo sapiens
caagatgagatttgggtgaggacacagccaaaccatatcactgccagacctattaactccaaagtattggatttatgtagtgatttctacttctgcccattctctgttttgtaaagaaaagaaagtacactagtctgttattgcctgattttgtcaccaacttgttcaaaattccaaagcttctggtcatactctctagttattgacagaaagaaagcctcctgtttcttaccatcagattcaattcatagcttttgacagatggcccccaacatgaaattggccaaatagtgatatttgaaaatatatttacaaataagatctacttgcatctttacaacaacctaaaaggtgggcgagataactattgttccccccatttgacagatggggaaactaaggcacacttaaggatcttttttctttgcacatcacatatggaaagttataggagaagacaagactaacaacccaaactcttaataaacattcataatcctctataaaaccttcaaagccagatgtacttcaaagttcaaaaaatgttttattattttagaaagacaatgtggtttatattctatatacaacaaaatacccyagtaggatccagggaagaatcccattctcaaatatactaatgtttatacagcaaattatataaata

SEQ ID NO: 904401 - DNA, 589 bp, Homo sapiens
gctagagatagttatgaagaaactagacaaggcccttgctttcttggagctgagcttccattggtgggagacaaccacaaaccaatgaacaaatgaacacacaggaaaatattggatggtgataggtgttgggagcataaaatagaatggagaaaatatgtatgtgtgtgggctactccagattggagttgagtctcttcaaagctgtgacatctgagtgttgaaccacaagaaggaaccagccatgtgaagatcttggggaagagcatttcaggacaacaaaacagctactgccaagggcctgtcacaggagccacatggtgtgctggaagcacagctcggaggctgggcagaaggaatttagccaatataatttattatacaagccaaaattattagcaacaaaatgaaatatttattttgcagtttaagtatatatagccatgaacatttagatttcagaatttgtgccatgatttcatgactagattcagtaattatttaagattcacattggagaaaatcagtgttctgaagactatgmcgtatatcccgctttgaagttttggatttttcttgaataggatag

SEQ ID NO: 904402 - DNA, 451 bp, Homo sapiens
agaattctatcactgacaatagggttatgtctaggaaatctacgataataaggaaatgtccacattcatattagaatctgtgcctgacaggaattagaaactgaataatctaacttcctcatggcccagaatacaatgctttctaattgttttttgacagcagttctgacttttgtactattttattttatgtttggagccctcaagtcagacccaggtgttcaactaaagctaaagtgaagaacagtaattactttaaaatgtccacaactttttgaaaaactgatattaagggcagccaagcattcataaatattgcatttgggttggagaagaaattcacttttatcaaaagctcaaaaagtaataattgtcaataattaactagactatattttakagattaaaaggtaacataaaacttttctcatataaaattaaacataatgaa

SEQ ID NO: 904403 - DNA, 629 bp, Homo sapiens
gctgacagtttctttatcctgaagtccattagcaccttcttgaattcttacctggctctaaatagaatctgcagagaggatggccctgggatcgttctttcccctgtgctttgttttccctatatgagccatcttaggttaggctccttggatgcagagcctgaggaaggtatttggacacatgtggctgatggagggagtgctttttagacaaacaaacaaaaactaccaggtttgtaagaaaataaaaactgcaaggagtgaagcaggatgaagaaagcaaaaacaaaacaaaacaatgggaatgtagtctcaggtaaagtcttgccttgctctaatcctctgggatctcagaagcacaaattccactgcagatttgcaccccttaagggaaagaggccaggattttgtgctgttattactctatcattgtctatggagtactccaggaagggctgcaaaacttccctccagctactgagggaaattctgtggaggggggcactaggagcccctgacagtcaacactcacmgtggctggcagggcaccctaacaaggtccattctgtgagtcagttggcttttaaaaatataaattaaatcctgtcactcctctgtttaagcctttt

SEQ ID NO: 904404 - DNA, 664 bp, Homo sapiens
cagtcaccctattcaaactctcatctccccctcttctgggcttcaggcatttctacatacaaactggcagatgaaatactctggtgccttctctcctatctgtggcagcagagcccttggtttctgagaccaccctaaagccacctgtgtcaggtgcctggtgaatgagtgtttctcctacttacaactgtaggacagtcaatcattacacatcagccaaccactgactctcctgcccttggttattccatggcacaaccttgtctgtgtaggaagggtgagtaagcatcaatgtttcagaagtgatgggctctgcacagacagttcctcctccttttcctagttgttatgccgtgctgagaaattcatgctgctttcctctttgggaccagcacctactgcccaagaactacaggcaccaggtgcagggctaggtagggctaaagggaggcaggtttgactcactcatgctcctcctctcagcccatctttgaggaaacaccgtcactggtgctttcaaaggcacagttctaaggctctgagttttcattctacttcgtarctttcccatggtgcctgccactcagtttacctctaacttaaaaccagaagtttgagataaactagaaaggtaggttcaagggcatcagttacaataagtcct

SEQ ID NO: 904405 - DNA, 660 bp, Homo sapiens
cctgcatctgcatctggatcagtttccctgtagagaggcctgagacttgcttctgtcggttacaaactgcttggtctccactgacatggccttgagtcatttccagaccttcacactcaccatcyttatagacactttttgttttaattacatggaggtattcccagttaaattacttttttttctgtgaaaatcgccttaatttttgacatctccttgtatgaaaaaatggcatcataaggcaaaagttgcggaaatgtaaagaaggcagggtgtattggctgtatcatatttttgttgttattgttgctgtttgtttttccctgcccagctgcctaatcgctagcccagtgaacaccgtggtaggaagacagagcgatccaactgcaggctgcgggagaactgacaagacctgggactgtcaatctcaggggaggccctgctgcgttatcccatgagaagggctgctgactatgccactgtgccaaacctggactttatctcttacatcgatttgatttggtttctctcagtcctcaagtcagatttgtatctgaattgatcactgagcctttgacaagtgtcatctgctgtatatattgcaattcatgacatttaagggcctgttgacctagcaattcggctcccatgcaggaaaca

SEQ ID NO: 904406 - DNA, 604 bp, Homo sapiens
catcagggattctggagaattttgaatgctcacattcacctcgcttggaggcttcatcaggtyaggacatttgaggtggaaaaggtatggaaatttaccaagaagcatcgttggaaagacttgggactagagaacaggatctagagacagcactgaggcaggaatatgaagagcaggagacagtgacaacacttagctggccacaggtcactgggcaggagtttattaaaatgagactgctactagtgagacaaccgcagcatgatcctgggtgacagaacgcattcactcacacgctgtgagaggcgggatgacagggcaccctctgcaatcacagatgcaagattcttggttttaaacatttgctgtattcaacatcttttgtttggtgtccatttactcctcctaaactctcttgctggcttctagtactatttcttcttgctctgtaccaaaggggtctactttgtatcaacagggctgcagagtagggatagagaggatattatgtcaggtagactccaggaagcaatttcacaacaggagaaaaggttcaataaccctggatcaggatgcttcaaagcaggcaaggcaaaaatgtcta

SEQ ID NO: 904407 - DNA, 658 bp, Homo sapiens
atttggttctgagtaaccagcagatctattttgcctcccttcctatgtttagtaggaaagaaaactgttataaaataccgtagttttttttatttattgtcatgaaaagaaacatttwgaatcagatggatccagtgcaaatgctggctttattgcagaaagtttcattggacagtaataatctgtcaaatgcaattaatgacatctttctcatagagttatggagagggtgaggctgcaagaaaacttgcataaagaaccgagcatggtgcctacttggaacagcatgcatgctcctcccatccatcttcattttcttttgggtaaatccccaccttccctagattttcttttgtcccctttaaaaatattttgaaatgatacctggatctttggagttcgaactaatattctcaagataacttttactttaaaaaaattaaggaaaagaaaaagttatagcagtagccatgaagtgcctcgctttactgcatgagaagaagggaatataggcaacaggcataagtagtctaataaattccaggtcttcatcttttatcaggagcaacttagtcacaatgaaatgctttcaccatagactccatgccttctgctgtcattagccatatggaacagcaatattatgccttcactttgg

SEQ ID NO: 904408 - DNA, 658 bp, Homo sapiens
atttggttctgagtaaccagcagatctattttgcctcccttcctatgtttagtaggaaagaaaactgttataaaataccgtagttttttttatttattgtcatgaaaagaaacatttakaatcagatggatccagtgcaaatgctggctttattgcagaaagtttcattggacagtaataatctgtcaaatgcaattaatgacatctttctcatagagttatggagagggtgaggctgcaagaaaacttgcataaagaaccgagcatggtgcctacttggaacagcatgcatgctcctcccatccatcttcattttcttttgggtaaatccccaccttccctagattttcttttgtcccctttaaaaatattttgaaatgatacctggatctttggagttcgaactaatattctcaagataacttttactttaaaaaaattaaggaaaagaaaaagttatagcagtagccatgaagtgcctcgctttactgcatgagaagaagggaatataggcaacaggcataagtagtctaataaattccaggtcttcatcttttatcaggagcaacttagtcacaatgaaatgctttcaccatagactccatgccttctgctgtcattagccatatggaacagcaatattatgccttcactttgg

SEQ ID NO: 904409 - DNA, 579 bp, Homo sapiens
gaaaaactgagaaagtgaagcctgggatatatgggggaaagcctgacaactatgttagtgaacatgaatgtgatcaacactcagaattcttttcatggaactcactgttcactgtckgtaacttttggacatcaatgtcatcaagacattaaggtaatgttcctggaatgatattttgtttatagtttactactgtcccattgaaactaaatgcaaaacaaaatcttgcttgatatgtatttgaaataggaaataataggaaggtagtcacttcctaccttcctaggaagatagcaatgatgataaaataggacttcctatgaacctagcagcttttataactcatattcattatcttatttgacctcacaataacctatgcataatgcaagagtgaatcagagaggttcaggaactttccaagaaaaagagaaccagtaatgatcaaagctaggacaaggacccagattctgtctccacattcctttcataaaactacaaaaaaacctctgtgatacaaacttaatcatgaaatttaagtcctgccaggattgtcctttttgggaacaaaaaagacca

SEQ ID NO: 904410 - DNA, 619 bp, Homo sapiens
ggatcatggggtaagtttccccctatactgttgtcatgatggtgagggagttctcaaaagagctgacggttttaaaaatgtttggaagttgcccctttacatttatctctgccactgtgtaaggcattcrttgtttctgcttcatcttttgccataactgtaactttcctgaggcttccacagtcataaagaactgtgagtcaattaaacctctttcttccataaattatctggtctctgttatttctttatagcattgtgaaaacagactaatacagagaactggtaccactagagtggagtactgctataaagataacctgaaaatatggaagcaactttggaactgaataataagcagaagttggaacagtttacagggctcagaagaagacaggaggaatatgttgggaactggaataaaggtgactcttgttacgctgtagcaaagagtctggcagtattttgcccctgccctagagctatgtggaactttaaatttgagacagatgatttggggtatctaatggaacaaatttttaagcagcaaagcattcaagaggtgacctggattattctgaaaatgttcagttttatgcatccatgaagagatgatggg

SEQ ID NO: 904411 - DNA, 643 bp, Homo sapiens
cacaagttctgagactgtacaaagcagcagggccctgggcctggcccacgtttttccctgctaggcttctgggtctgtggtctgtgttgggaggggctgccatgaagccctctgacatgccatagagacattttccccattgccttggtgattaacatttggctcctggttacttatgcaaatttctgtagctggcttgaatttctcctcagaaaatgagtttttcctttctatcatattgtcaggcagcaaagtttccaaacttttatgctctgctttgcttttaaacataagttccaattccaaaccatttctttatgaatgcatacaactgaatgctttaatgagcacccaagtcacttcttgaatactttgctgcttagaaatttcttctgccacatactgtaaattatgtctcacaagttctaagttccactaatctctagagcaggaaaaaaatgccactagtctctaaagcatagcaggagttaccattattccagttcccaacaagttcctcatcttcatctaagactacctcagcctggacttcattgyccatatcaccactatcagagttttggtcaatgccattcaacaagtctctaggaagttcccaacttttccacatcttcctgtcttc

SEQ ID NO: 904412 - DNA, 610 bp, Homo sapiens
aagtttttagaattttcactccttgttaaatcaaggtaagaaaacagactacatcccaccacccctcttcccatgtgggtcacatggaagctgcctcaagttgtcattaaggatgctagagttggaccacctgggcctgaattctgattccaccatttgctagccacatagctctgggcaagataagtaaattctctgggcctcagtttccccatgtgaaaaactggattgataataatatccatttcatagggcttttgtgagaacaaaatgaaataacaataaagtctttagaatagtgtctggacataggcagtacttaataacagtactaactgccatagtttggcaaaaaaaaaaaagacacttaagattggaatttgtgtctgatccacattaaattcctcttttccccacttcatcaagtagctttcctgaaaattgaacctttaggtattcaggtattcacactatcttaaattttctgtcgttctttccttccctccatccttcctatctcttttttttttctttccctccttcccaaacacatggaatggataggtactcttctatgtacataytgagttagtttcattttcagaaacat

SEQ ID NO: 904413 - DNA, 610 bp, Homo sapiens
agtggtcaagagcacaagatggaattagacagccttgaattcaaagcctggttctctcacgaatctcaagtacttaccctctaaactgtagtttcctcacccaataaatgaaagtggtcacagcacctactgctatgtaggttgtaagatgtaaaagacacattctaaagtatttgggataacatctgcaacttattagatattaaatgtaaagaatttagtggtaatattgtcacgtattttttactccaacctaaactatgaggtagcttggaaaacaaatttatctacatattacagataagaaaacacaaatattacacttgcacaacactttgcaagtatataggcagcctttacatctggttgttcttagttactatccaaaggacccatgtggtaaattgtactattcccattttagggatgttgacaacaggtgaagtgacaaagctagttagtaaccattgagatgtaaactccgtaaagacaagagctttgagtgtttgggtatcatcattaggtagaacactgcctgacaygtagtaagcagtaagaaatatttagtgagtgaaaaaaccaaagtaataaaattatcctcaaacaatat

SEQ ID NO: 904414 - DNA, 638 bp, Homo sapiens
gcactccttcagtaagccctgaatttgcgtacttyttgtgccttggagatggttataaggggctttttgtcccaaagaataacttttggtctcagcatgctttgcctacggtatgccagagctaatccagatttctttcaggaaaaaaatttaatagataatcaataaagataatttttcacaggcaagaaaaaatggctctattcatgaccaaataataaccactccacttttgcatgacactttaacaccataaaaacactttggcagatattgttttctcattttgcttttaccaaacctcaacaactggatcaatatggcgccatctactcaacagataaggaaactgagtcacaggaatggtaaacagtttgatcatgttcacacagctgatgaatggtagagccatgtatagaaaccaggtctccactcaaggagagaaagagagaagtctcagaagcaaaacataagacatcaaagaagcaaagttgacgcttacatggacatttgaaggtagccccaggcagggatgctgggaggtctagtgaggcctcagcatatagatatacatacttgtattttaatggtctggttgctttacacacacacacacacacacacacacacacacactt

SEQ ID NO: 904415 - DNA, 581 bp, Homo sapiens
tcattttataaggagtttccccttttgcttggctctcattctctcttacctggtgccatataagatgcccctttgcttttcctttataaatgaccartaccaatttactgtattattctgttctcatgctgctaataaagacatacccaagattgggtaatttataaaggaaaggtgtttaaagaattcacagttccacatggctggggagacctcacaatcatgacagaagatgaaggaaaagcaaaggggcatcttacatggtaccaagtaaatgtggaagcgagtttggaactggataacaggcagaggttggaacattttggagggcttggaagaagacaggaaaatgtgggaaagttttaaacttcgtagccacttgctaaatggctttgaccaaaatgatatggacaatgaaatctaggctgagatggtctcacctgcagataaggaatttgttgggaattgaagtaaatgtgactcttgctctgtttaagcaaagaaactggtggcattttgcccctaccctagagatgtgtggaactttgaacttgagaaagatgacttagggtatctgatgg

SEQ ID NO: 904416 - DNA, 581 bp, Homo sapiens
tcattttataaggagtttccccttttgcttggctctcattctctcttacctggtgccatataagatgcccctttgcttttcctttataaatgaccaataccaatttactgtattattctgttctcatgctgctaataaagacatacccaagattgggtaatttataaaggaaaggtgtttaaagaattcacagttccacatggctggggagacctcacaatcatgacagaagatgaaggaaaagcaaaggggcatcttacatggtaccaagtaaatgtggaagcgagtttggaactggataacaggcagaggttggaacattttggagggcttggaagaagacaggaaaatgtgggaaagttttaaacttcgtagccacttgctaaatggctttgaccaaaatgatatggacaatgaaatctaggctgagatggtctcacctgcagataaggaatttgttgggaattgaagtaaatgtgactcttgctctgtttaagcaaagaractggtggcattttgcccctaccctagagatgtgtggaactttgaacttgagaaagatgacttagggtatctgatgg

SEQ ID NO: 904417 - DNA, 678 bp, Homo sapiens
gtgagtcaaggaatggattctcccctgaagccaccaggaggaacaaaccctgctgacaccttattgccccttaaaatgtattttggacttctgatctccagaaatagaggaaaataagtttgtgttgctttaagtcactcagtttgtggtaattggttacagcagcaatagaaatgaatgctgacaagaatccagaattctaacccaggtttactcaaacctgaagtctgatttattttcaactgcttaacactgcctgtggtttgattaaaaaccctggaattgggtacaaaaagattcataccttgtcccaatttgaatattcctgagatttagaactgaatattagattagttcactgaattgttggtccgattaaatcattacaatcatctcacttactaagagtgatagttataaaccattgactcaaaagaatcaaagaaattcaccatttaaatgtagctaaattaaagtcagttattttgactcagataatgccataaaactttggaactttgggctaaaatatacagatattgaaccaaaagtgttttgatgcttttcacctatattcagacagccattaattttrtacacctaagcttattctcatcaagaatcttacagacttgcatattgacttttctctgctaacacactcataacaatgtagaa

SEQ ID NO: 904418 - DNA, 670 bp, Homo sapiens
tgcagtgagctgagatagcgccactgcactccagcctgggtgacagagcgagacaaaaacaaacaaacgaacaaacagaaacaaaggaaggcattacataatggcaaagtgctcaattcaacaagaggtaactatcctaaatatatatgcaccctacataggagcactgagattaataaagtaagttcttagagacttatgaagagacatagataaccacataatagtaggagacttcaacattccatagacagtattaatattagacaaatcattgaggcagaaaactcacaaagatattcaggaacctgaactcaacttttgaccaaatggatctgtagtacatctacagaacagtacaccccaaaataacagaatatacattcttctcacctgcacatgccacgtgtgctaaaacgaaccacacaatcagacatagagcaatcctcaaaatattcaaaaaacccaaaatcatagcaaccacactcttgggaaacagcacaataaaaatcgaaatcactactaaaaaatggcacaaaactacagagttacacagaaattttaagacttgctcctgatggacttttgrttaaataatgaaattacagcagaaagcaagaattgaaactattgagaacaaagatacaacataccagaatctgtgggacac

SEQ ID NO: 904419 - DNA, 637 bp, Homo sapiens
tacccttccctaattgttttttaacacagtattgtccatctttsagtggtgtctttgttttaggcttttttgcatactcacaagccagtcaacagacattccttcattctgagcccataaaagccctggacccagccacagtgggagacaaactacctgacttctggtggggaccaccctcttttcccctctccactgagagctgtttcattgctcaaaaaactcttttctgccctcttcgccctccagttgtcagcatgatttcattcttctttgatatgggacaagaatttcagaccctgccaaacacaggtaggaagcaggcagtagcactgtagcctgctgccctacatcatgggaagtagaagtgggaagtagcagtggggctaggccagcccaagagctgcaggccagagtggagcaatgggactgacagagctgttaacaaacccatttgggttgccagtggtgggactagaagagctgttagcacactgtaacatgccctctggagcttcagggtcacgggcattcctatttgggtatcaccacattcccctcgtctggatgctggagtccaccgagggagtcacttgcaacatgcttggtccagcccaagcctcatacagagcccact

SEQ ID NO: 904420 - DNA, 618 bp, Homo sapiens
aataatcagctcctactgaaatgacacagtgtccayatagctactgttgaaacactgaaattataatttatcttataattaataggaaagaagaacaatctgttgctcctcaagtgaattattgagacaactggggaaaatgtgctaaaaaatactgtgtaggagaattcttaaaatggagactgctcagctgtaaaaaatgctatgtgaaagacttccatatattgggccattaattattttggtttctgtagatttcagaaaagatctttgttttcctccagggagcagtggcgctaaataggtaatgctctctacaggctgctctttcatgaatcttcagctttctggccatcaaagaagtccttcccccaaccctgccccctcccttctctgtcagatccgcctactcttttttggaatgtgtgcctcatggaagaatttaaaggtttctcagcaaatgacatagaatatttcagagatgtcattttggtcctactaaacctctagacttggacttgggtgtgtgtactagtttcttatctgctgtgcaatcttgggaagtatttaaaattctgagttttattttctggagatgtagatggtcataagagatac

SEQ ID NO: 904421 - DNA, 643 bp, Homo sapiens
gtttcagaggaagcagattttgctgagtgtgcaatggtgaacagaatgctcatttatgaactgtaagctgggagaaaaggtggaatatcggaggtatatggaggttagagttatggaaattataaaagaatgaaaactaacttgcaattctggagcttttcaggtgactgacataaatgggagcaaaggacataatgagattaattcttatggattgaaggcagtcagtattggtgagacggtgagtgtcaatattggggtaagtatgtctggactacttggcaaccccttgccatggagggaaattggaaaagtagtaactcattcaagcacctgtggcccttttattgaccactattgataggtttgaggtgattggagaaagctgagtctttctctatgcacaattcacccactcaaactcctccctcaatgcagcaatgtaggcccagagggacgtgatggtggacttagtaccatgggctcactcttactccctcatgggggagatggtattttactctgaaagcatargtttctcctttgacacttcttggtgggggaaagcagatcagagaaagtgggtgttggagcatttttggatcccttatgatctctgtcattggcatccatgaggtctggg

SEQ ID NO: 904422 - DNA, 647 bp, Homo sapiens
agtgctgttttgtaacttgctttcttcacttaatatttggttatcctgggtactttacaatactattgcaaacatattaattcacttattcattcattcagcaaatgttaggttttcaactgggtaccagacaatatgctaattgttcaaaaaacaaaagtgaaggccgggcacagtggctcactcctgtaatcctagcactttgggaggccgaggcagatggatcacctggggtcaggaattcgagaccagcctggccaacatggtgaaaccccaactctactaaaaatacaaacattggccagcacgatggcacacacctgtaatcttagctacttgggaggctgaggcaggagaattgcttgaattagggaggcgaaggttgcagtgagctgagatggtgacactgcactccagcctaggcaatagagcaacaagactccatctcaaacaaacaaacaaacaaacaaacaaaaaaacccaaaaacaaacaaacaaaaagtgaataagacatatgatgtttcttatttattagtacttaatgatataagtattatattaaaaatataactattaaatggaaatgtaaagacagcataattyaaaactcacagaaataagaccattgaggttcaaaattcttaaag

SEQ ID NO: 904423 - DNA, 594 bp, Homo sapiens
catgaatgtaccaaggtcgctttacctattctcatattgaaggacaccttggttgcttctaacttatggcaattatcaataaggctgctataaacacctctttgtaggctgttgtgtagacatgctttccacttgatacttatttcagtaaataccaaggactacaaatgcttgattgtatggtaagcctatctttaaatttgtaagaaactattagaatattttccaaagtggctgcactattttgcattctcactggcagtaaataagagttcttgtcgctccacattcttgccagtatttggtatatttttgtgtttggaattttagtccttttaacaagtatacagtgacatagcttattgtttaatttacaattccctaatgacgggatgtggagcatttttccacatgctcatttgttgtctctatatcttcttcagtgaggcatctgttcagatatcatcctcattttatcattgggttatttttctaattattgagttttagatgttctttgcatacttttgaatatcagttctttattggatatatcatttyaatgtcttctggtctctgatgagaaatcagttg

SEQ ID NO: 904424 - DNA, 603 bp, Homo sapiens
attaccttatttaaaatataaatggttttatttgtgaatttggatttatgttttatctattttctttactcaattttgtaggctttatgaaattatgggctttaccattttgttgatctctcttttctccacaattagaaaaaaaactggcacataatagatagtattattgagtaaattaatgagcagattgatattaattatcacgtttctaaaagacaaaactctaaagcataaataatagattagaaaactaaggattaataactttctccagattaaatagaattaagtatataaaaagttattttagctcctagcccagggcttttctgaatgcagcacattaatattttaagaatctgaccacatattatttaatttaataaataattatttttgtataaggtgagagatgaggatccagtttcattctcctacctgtggcttcaattatccaagcaccatttgttgaatagggtgtccttctccactttatgtttttstttggactcaaatctaagagctgaaactataaaaattctagaaccaaacatcggaaaaacgcttttagacattggcttaggcaaagatttaatgacc

SEQ ID NO: 904425 - DNA, 564 bp, Homo sapiens
cttttttttttttgagaccgagtttcactcttgatgcccaggctggaatgcaatggcgccatctygactcactgcaaactctgcctcttaggttcaagcggttctcctgactcagcctctcgagtaactgggattacaggtgcccaccaccatgcccggctgattttttgtatttttagtagaaacggggtttcaccatgttggccaggctggttgcaaactcctaatctcaggtgatacacccacctccgcctcccaaagtgctgggattacaggcgtgagccacagcacctggcctctcatgtttatatgttaagattaatttttttaaaaaaatttcttcagaaaagcaaccttatttttcaaaattagagttcacagtcatccctgaatcaacagctgtggaatggaaaatattcaggagctgttttaattagtcttgtatcacctgccgcatttctaggtgctgttagcatctctcaaaacagataagttgtggttatgcacataaaaatcagtgtagcttccaaatgagagaagttatctacaatatcctcttcaaga

SEQ ID NO: 904426 - DNA, 640 bp, Homo sapiens
aaatacatctgattctttttcagtattttgctttatgccacattgagtgaatgcagcattcacaatgcataaagtggtcttctcactccagccttgtcatctaaacagaaattacagtgtcatcacctgctctctgaactctcattttagttgcaatagactggaacaaatgattgagagatgtaagtgtgtgtgtgtaattgaggggcctagtgtcagggttgataattaaacacatttcttagggttagatgaatttatggagtcagagagtgtcagtgaaagagaatttatttctatagacaaagttggcgattccccactactgaaattcctctttgtctaaaaacaacttcacagatctagacaaataaactagtctggtgggcaatgacagtcttatttttctttctccagctggtcctccaaagaagtagacataattctggaagagagtatgattccttatctctttcttctattgtttcaataacacggtcagtcagcacacgacgtatcgtaggaggatggcaggatagttaactttgctacttgagctcaggttgggtgttattaggtgtataattaggaaaatrcatgagtatgagttcattgctctgtatatgtgataattagatac

SEQ ID NO: 904427 - DNA, 522 bp, Homo sapiens
cagctgttcacagatgcaacttgacagcacttcacatcaaatgcagtacatacctgttgctttttactctagccttctctgcctctaccaaataggacttctgcagactattgagactactcagtcatactgacacatacacaaatccgaaagagcagaagagttaacacccaggggaatactggtaggatgggagctagtggataaatactcctctgaaatgttccttagacggacaaatctgaggcgcattttacacagtagccagcaagtccccagtaggattgagcctgaatgacccacagggaaccagctcaccaagacagctttagcttgacttttctttctttccgtttttttttttctttttttaacttctctactttttgagatctttttctgaataatccagtttcataaaagctttagtctcagattctgctttgggggtgaggcataagcaagmtgagacattttcctaccttatactactttggcattgtgcttaaatctccacctcgc

SEQ ID NO: 904428 - DNA, 620 bp, Homo sapiens
tattttcagaaatgctcatttatgaaacagataactaggaaaaggtacccattccataactgtgatatagagcaaagctaaaggattaatgtaaagattaaaccaatgaccttggctgttaaagtagaaaaaagagctcaccagccacagctagagagcctgatggtgtggatttatatgaacagcccacatcacccattttcacttagaaaataaagtactacttctcagttataggacttttaggagtcattgcctatcatttgagtaggtagagtcactactataaactgggcacattcaaatagagtataaggttttcataagttttataagtttctgaagttactatagttgttgttcaaggtaaggggattgcactattattatttgcattatttagttgtgtactcattagcttaggattaattacatttaaccatatgacctgggttttaaaatacctccaggccacaaaatcacttctacaaataagttactgttatcctccytctaaaggcaaatacaaaagcaagtatcccagcattcacaaattgcctttgcaatgcaaactttttattatttttcattgctttgtggaaaaacggagtcctgtagat

SEQ ID NO: 904429 - DNA, 402 bp, Homo sapiens
gcagagcttataaaacagttccatcacctagatgagcagtgcagagataagtcacaatgcccccacaggcagatccaagacaagagtccgtcaccagggtgatcagcgcaaawatatgtcacaacacccccttaggcagagcctagacaaaagccccatcacctggatgatcactgcagagttatgtcacaaagtacctttaggcagatcctagacaagagttacatcacttggatgatcagtgcagggatatgtcacaatgccactgtaggcagagcctagacaagagttacatgacctaggtgatcagtgcagagatacatcacaatgtccctgaaggcagagccttgacaagtggtacatcacctgggtgatcattgcagggatatgtcacaaagcacc

SEQ ID NO: 904430 - DNA, 615 bp, Homo sapiens
atgcccccataggcaaatccaagacaatagtccatcacgtgggtgatcaggrcagacatgtgtgacaatgcccccagtaagcaaagcctagagaagggacacatcacctgggtgatcagtgcagagatatttcacaatgcccctgctggcagagcgtaaacaagagttacatcacgtagatcatcagtgcagagatatgtcacaaggccccctatacgcagagcctggacaagtgttacatcacctcagtgatcaatgcagtgatatgtcactataccccgtaggcagagcatagtcaagcgttacatcacctgggtgatcagtgcagagatatgtcacaaagcccccatacacagagcctagaaaagagtcccaacacctgggtcatcagtgcagaaatatgtcacaatgcccccataggcagatccaacacaagagttacatcacctgggtgatcagtgtagagatatgtcacaatggccccataggcagaaccttgacaaaagtcccatcacctgggtgatcagtgcagagatatgtcacaaagcccctgtaggcagagcctagagaagagttacataactttgttgatcagttcagagatatgtcatggtg

SEQ ID NO: 904431 - DNA, 279 bp, Homo sapiens
aagtcttgtctaggctctgtctatgggggcattgtgtcaaatatctgcactgatcacccaggtgatgtacctcttttctaggctctgtctacagggatttttgtgacatatcactgcactgatcacctaggtgatataagctttgtatgggctttgcctacagaaggctttgtgacatatctatgcactgatctctgaggtgatgcaactcttgtctaggcactgcctacaggggatattggtacatawctctgcactgatcacccaggtgatggactc

SEQ ID NO: 904432 - DNA, 623 bp, Homo sapiens
aaggagaaggttcagaggcttgtcatttaggcaycccaacttctataccttaccaaggtgccaggcccagagggaagggggtagccagggcagctccccgacccgcacctgccttttcacccctctcctatttcacaagcatttaccatgcatcaacagatatgttcctcacagcacctttatcagcagggactgcccttttcatgctacaaacaggcccagagaggttgtcacttatacaaggttgcacagcatggtagagacacaggaaggactagagcccaggacttctaaccctagctccttctgcttccctcacatcatcagctccagacaacctgagattggagaggacagaaagtcaggatttcaacacctcgtactctgaaaactcagtggtggttctcaccctgtcagtggggcaggtggcctcacaccccaccacaggctaaacagggtgcatgggggacgtagccccactggccattctacacattcatgccaacagctaccaggcaccagcctcaccattgatttttggacagctggtctgtgccaagtgccattctagatgcgagtcccgactttggggtgcttgcattctgggaagggagatggtcagc

SEQ ID NO: 904433 - DNA, 623 bp, Homo sapiens
aaggagaaggttcagaggcttgtcatttaggcaccccaacttctataccttaccaaggtgccaggcccagagggaagggggtagccagggcagctccccgacccgcacctgccttttcacccctctcctatttcacaagcatttaccatgcatcaacagatatgttcctcacagcacctttatcagcagggactgcccttttcatgctacaaacaggcccagagaggttgtcacttatacaaggttgcacagcatggtagagacacaggaaggactagagcccaggacttctaaccctagctccttctgcttccctcacatcatcagctccagacaacctgagattggagaggacagaaagtcaggatttcaacacctcgtactctgaaaactcagtggtggttctcaccctgtcagtggggcaggtggcctcacaccccaccacaggctaaacagggtgcatgggggacgtagccccactggccattctacacattcatgccaacagctaccaggcaccagcctcaccattgatttttggacagctggtctgtgccaagtgccattctagatgcgagtcccgactttggggygcttgcattctgggaagggagatggtcagc

SEQ ID NO: 904434 - DNA, 531 bp, Homo sapiens
actcaacccataaataactcatgcagttttactgggccaaactgctcaaccctctctccaacccagtgtctttgtttagattcctattgttgcwattataaattaccacaaatttaattgcttgtaacaacacacaaaaaaagctatcctacagttctctatgtcagagttgagcaagatctcacagggctaaaatcaaggtattggctgggctgtgttttcttctagaggctttaggagagaatctgtgtatttctgttcccagcttcaagaggccacctgcattctttggatcatggcaccctctttcatcttcaaagccaagcccacaatggcaagtggaacccttttaacacttctaatttctcctgcctgtcttcccttatccgagtcatcctatctctgatggcagccaagaaactttctcagattttaaggacatgtatgattagattaggccctactggataatccaggataatcccctgtctcaaggtccttagccttaatcatatctgcaaggtccctttt

SEQ ID NO: 904435 - DNA, 680 bp, Homo sapiens
aaccacaatgagataccatctcatgccagttagaatggtgatcattaaaaagtcaggaaacaacagatgctggagaggatgtggagaaatagggatgcttttacactgttggtgggagtgtaaattagttcaaccattgtggaagacagtgtggcaattccccaaggatctagaactagaaataccatttgacccaggaatcccattactgggtatataaccaaaggattataaatcatcctactatagagacacatgcacacatatactgcagcactattcagaatagcaaagactcagaaacaacccaaatgtccatcaataatagactaggtaaagaaaatgtggcacatatacaccatgaaatactatgcagccataaaaaaggatgagttcatttcttttgcagagacgtggatgaagctggaaaccatcattctcagcaaactatcacaagaatagaaaatcaaacagctcatgttctcactcataagtgggagttgaacaatgagaatacatggacataatgagaagaacatcacacactggggcctgtcaggctgtcrggggctagggaagggataacatcaggagatatacctaatgtaagtgactggttgctaggtgcagtgagccagcatggcacatatatacctatgtaacaaaactgcacgttctgc

SEQ ID NO: 904436 - DNA, 591 bp, Homo sapiens
acatcaaagaccaaaggtagataaaaccacaagatggagagaaaccagaacagaaaagtggaaaattccaaaaaccagagcrtctcttctcctccaaaggatcacagctcctcaccagcaagggaacaaaactggatggagaatgagtttgatgaattgacagaagtaggcttcagaaggtcagtaataacaaactcctccgagctaaaggagcatgctctaacccatcacaaggaagctaaaaaccttgaaaaaaggttagacaaatggctaactagaataaccagtgtagagaagaccttaaatgacctgatggagctgaaatacacagcatgagaactttgtgacgcatgcacaagcttcagtagccgatttgatcaagtggaagaaagcatatcagtgattgaaaatcaaattaatgaaataaagcaagaagacaagatcagagaaaaaagagtgaaaagaaacaaacaaagcctccaagaaatatgggactatgtgaaaagaccaaatatacatttgattggtgtacctgaaagtgacggggggaatggaaccaagttggaaaacactcttcagaatattatgcag

SEQ ID NO: 904437 - DNA, 629 bp, Homo sapiens
tagcacatattctaaaattgaccacgtaattggaagtaaaacactcctcagcaaatgcaaaagaatggcagtcataactaatagtctctcagaccacagtgcaaacaaattaaaactcaggattaagaaactcactcaaaaccacacaactacgtggaaatttaacaatctgctcctgaatgactactgggtaaataacaaaattaaggcaaaaataaataagttatttgaaaccaatgagaacaaagacaaaacgtaccagaatctctgggacacagctaaagcagtattaagagggacatttatagcactgaatgaccacaaaagaaagctagaaagacctaaaattgacacactaacatcacaattaaaagaactagagaagcaatagcaaacaaattcaaaagctagcagaagacaagaaataactaagatcagagaagaactgaaggatatagagacatgaaaaacccttccaaaaaaaaaaaaatcaatgactccaggaagtgctttttttttgaaaagattaacaaaatagatggaccactagccagactaataaagaataaaagagaaaagaatcaaatagacataataaaagrtgataaagaggttatcaccaccaatcc

SEQ ID NO: 904438 - DNA, 560 bp, Homo sapiens
gaatggagggaagaaagatctatttacaagactccgtggctatttagtagccagaactcaaacctacrgagacctgtgatgaacagcctcactactacagctctgaagcaatgaatatatttctgtatcataacaactacagaggaaaccatagacgaaaatccagaacctctgccaacgaaagacagcatgcaacacccaagtcaagtgatcagagatgtttttgtacgttatctgagaccagaaatccaaaaggagaagtcaaatctaaacagctgagtggttaaaaaaaaaaaaataagttcaccactctctacttctgccgtgaagcataacctgcatttactgattcagcaagcacatttcaagtgcttgctttatgctgggttctgctagagactgcggataaagcagtaaacaaggccaacgagctccgtgtcatcatggagctgacagcttagagggcgagacaggcacaatacagaggtaccaaaagagaaaacttggcctttctaagggggtgatgtttcatgcaagacctgaagcagaaaaaggtgcca

SEQ ID NO: 904439 - DNA, 560 bp, Homo sapiens
cacagaaccaccagacccaaattgttcaaaagaaatagttacttggtatcagcctgagacagatgagattgagcagtgttttttaggtaaagaaaagatctgaagacaaaggcagtcaagtgttttagaacccaaatgatgccacaaacttgccacttgcaaagaagtaggagggcagaacgtggggcacaaggaaatcccctaaaagagaaaacctgatatcaaatgagtctctgtgatggtcctgaagagaaaacgaagtcacaaataaaatggcagccttggaagcaaagggcagacagaggtccctcctcagcctaaggacccagtcttgccttgtttaatatggataagcaactccttacatttctagaatcaaaccttgccagccctgctctgtgcttttcttttcagctttattgaactgctttttgctcccagaacatgtacstttgtttatctctaggtatttaccactcttgagcctggaacactggcactttcttcccctgccctttgattgagtccacaacttcctgtgtttcagtttaggtatcact

SEQ ID NO: 904440 - DNA, 680 bp, Homo sapiens
ctataaagacttacttttctataaagacttttatttctgtttgtctcttacatcaaattgaaagttctgtgtggagaagaactctgtcttacacatctttgtgattacctgagtctagtctggtacattatatttggcagcattcagtacgtattacattgaatctggaagatcacacagagagggggattctgaggggtggcaacaaccacttttgtagcagacgctgttggtgtccaacccatgtccccttggccaccccagagtttggctgtagtcacatgctgtgtagacagacaacctcctgcttctctctgcctgagggcattcttcagccatagaaatgagcttggaagcggctgggtatggtggctcacacctgtaatcccagcactttgggaggccgaggcaggcggatcacaaggtcaggagttcaagaccagcctggccaatatagtgaaaccccatctctactaaaaacacaacaaattagctgggtgtggtggcgggcacctgttatcccagctactcaggaggctgaggcagaagaatcacttgaacccaggaggcagaggttgcagtgagccgagatcgcaccattgcactccaacgtgggcracagtgcaagactccatctcaaaaaaaaaaaaagacaaaaggaaaaaagaaaaaagaaatga

SEQ ID NO: 904441 - DNA, 611 bp, Homo sapiens
tctaacatgggtggcaagagcaaagctccacctccaaaaaaaaaaaaaaatcaaagcccagcaacacattatatatttttcatcatagaaaaaatttgggctgggcacagtggctcacacctrtaatcccggcactttgggtggctgaggtgggtggatcacctgaggttaggagtttgagaccagcctggctaacatggtgaaagctcgtttctactaaaaatacaaaaaatcagccaggcttagtggcaagtgcctgtaactcagctactcgggaggctgaggcaggagaattacttgaacccgggaggctgaggttgcagtgaaccaagatcctactattgcactccagcttgggcaacaagagtgaaactccgtctcaaaaaaaaaaaaaaaaaaaaaagccgaacaacacattatatatttttcatcatagaaaaaattggaaaacttttaaaagaaaaaaaactttagagaaataaaattaaatttaacagagtttaagtgagcaatgaataatttgcaaatcaggcagactgtggatccacagtaggctcagtgagactccagcacagccacatggtagaaaaatatttatggacagacaaagc

SEQ ID NO: 904442 - DNA, 622 bp, Homo sapiens
cgtgggattcaaaaaaattaatcatatatttcatttgttaaaaattttcacttacctttttctttcccagagtgagtttacaagttttctcaggtgtagcttttaatggctgggtgatttcaaacagaatttcaagcttagctttcagaatgctaccaagaaaaagaagaggaaaaatgtctattccatttttgccgtagaaaatgaatacgtttccacaagaaaatgtggtagataattggtgagttacatagattcatgaaaacatcagttcctttttttggcagggtaaatttttgacagcgaatatctctgttcaaattctgttatcttgatttctgagttttatgctaaattttatgagatgaaacttggtattgcctggaagtgtttccatatgactaaatgtttgctgcatgatttttaatggaattaatagaataatacatttattttctgatagaaatacttttgcttttcttattaaggtataaaatgtaagcaccttaaaattttcttcccttataggaatactgtrtttgagtaatttttttggatttttcaaacaacttagtttcaaaaaccaagtgagcaactctaacatggaaattaaagcttgagc

SEQ ID NO: 904443 - DNA, 558 bp, Homo sapiens
cagaaccaccagacccaaattgttcaaaagaaatagttacttggtatcagcctgagacagatgagattgagcagtgttttttaggtaaagaaaagatctgaagacaaaggcagtcaagtgttttagaacccaaatgatgccacaaacttgccacttgcaaagaagtaggagggcagaacgtggggcacaaggaaatcccctaaaagagaaaacctgatatcaaatgagtctctgtgatggtcctgaagagaaaacgaagtcacaaataaaatggcagccttggaagcaaagggcagacagaggtccctcctcagcctaaggacccagtcttgccttgtttaatatggataagcaactccttacatttctagaatcaaaccttgccagccctgctctgtgcttttcttttcagctttattgaactgctttttgctcccagaacatgtacstttgtttatctctaggtatttaccactcttgagcctggaacactggcactttcttcccctgccctttgattgagtccacaacttcctgtgtttcagtttaggtatcact

SEQ ID NO: 904444 - DNA, 590 bp, Homo sapiens
gccagttgtttggagttttctcmtcacctccatccacagatatgttttctgagacttgcctttattgattctttccaaagtggtcaacttagaaacagcaatgtttctttaatgctcttatttcattcgttggcataatatttaattaagttatgtaatgacagtactaaatacacctgccataaatgatttagacagcaaatgcaatggtctcttggtcagtaaacaactcacatggtgagagtggaagtttttggggttgctgaaggatacctctatgggacataatgcatttgtctgcaaggaacagaatctttaactgaaacaagttttaagctttgctttcaaaaaactctcagtgcatagtaaaaaaaacgcattttaaattgtcccttagcacatatgcaagagtataaactgaagcaaattttcacaagcagcacttacctttactttatgtgatgctacctaatatttttgtctattctttcctattttaattctattagaaatgctaatcatgacccactaatataatctcatgtctcattaatggagtgcaacccacagtgtgaaaaacaccggcttaa

SEQ ID NO: 904445 - DNA, 579 bp, Homo sapiens
ttgctccgttttcttctggggacgccatactctgtaatgaagtaggtttcaataaactatctcttctyactatacttggtgacttaccttgagttctttcctacctgagatccaggaacccttttttggggtctggatcagattcctcttctgatcttctggtgaccacgacaaaggtaccttagaatgagaccctatgccaaggaaatccagtctaggcggcaccaattcactagtaactggggtctaccctagcatcctatcaagattaatattaccaaggcccagtggaattcctgggataagagatttgggttagagttctggcccaacagggtaagagtccctggggtataatatttgggatagagtcacggcccaatagggttagagtcccttgggtatattacagggcaaagatgcctgcctaagatttgagttagagttccaggccatggtattagagtccctggggtaggagattcaggttagagtcctggcccaacaagggtagagtcccttgtgtttaataaaaatagaagcagctttggaagatgatttccagtatatgctttgggt

SEQ ID NO: 904446 - DNA, 650 bp, Homo sapiens
tcatatttatctagacttctcttgacatcagaatgactttcaactttttcggctgtctcattatttacctttaacttctcatatattttactaaaattccaagcatgttccaccagtattttgaccaaatacagaatatatatatatgtgcaatattgtgaaaatatgtaaactagacatccaaattttgctcataatcattagaaaacagtatttttctaacctacttaaagttgaactcatttttatccaagtatgtaacatgcttttggctgcttggaatatttcttttaactatttactgccttacatttgggattatatttaccccatataatttgttttgaccaatgggttgtgggtcaaagtgacaatgcctcacttccaagatgaatcttaagagatatcatgagtttcagctcacttttatgctctggccctgctccataaatgcaatggtctcaggtcgagggcctttcctttatcttaagctatggaaagagatgatatgttgagtcaaatcaagcctagttcaggtaagcscagtggagaccagaggagctagaggaggcttagttgaacaaaagcactcatatgaaaagagcaagaaacaaatatttgatgatgtcaatattgaagtggtgagactg

SEQ ID NO: 904447 - DNA, 528 bp, Homo sapiens
  misc_feature 523, 524, 525, 526, 527, 528: n = A,T,C or G
ggtttaacattagcattaacaaaaactggtcttgcaaaagctgcctctacatgattcctatatgtaaggccctaacaattaaaatactaaaatccaaagttacaaaacacaaaagaaaataagtcaccataaacaagagttaagaaacagcataggcctgttgcggtggctcatgcctgtaatcccagaattttgggaggctgaggtgggcagattatgaggtcaagagatggagaccgtcctggccaacatggtgaagccctgtctctactaaaaatagaaaaattagctgggcgtggtggcgggcacctataatcccagctactctggaggctgaggcaggagaattgctttaaccaggcaggcagaggttacagtgagccgagatcgcaccactgcaccccagcctggtgacagagcgagactctgtctcaaaaaaaaaaaaagaaaraaagaaagaaagaaacagcataatgaagatttggaaccccaactaactcagatattggaattccaagtaaannnnnn

SEQ ID NO: 904448 - DNA, 616 bp, Homo sapiens
ttctttgtctcacaaataatggtgtttacagctaagttctgggcctttgagatgtaacttttttaccttatttcatcgaacagttatccccttgcaagtgcaaatttagggtagcctggctagcaattgctcagtataataaaacatagccaaaaagtgatagtctgaatgtaattatatatatctaaatgtatatatgtctgcatatgatatatatatgctaatatacaatgttaaaatgttctgtcagagaaataggaaactaactcaaatacattttggtccctgtgatttgagacaatacttgataaataaaactagtcttaaaattgctagtaaaaaaaaattcctgtaaaataaaaacaggaatgtcttcagaattagcattacttataataaaagcagatatttttacctagatttactagtcaaacaagtttgttatctcctagatatacaaggccataaagctataaatctaaccacagcagaatatacagtgaaaatcaattawtttttttgcttctgtaatatcttaaactcgtctgatttgttgaaaactaacttaagataatgactaactctgtttttcctaagaaattcaaacataattgtt

SEQ ID NO: 904449 - DNA, 629 bp, Homo sapiens
ttttgcaattgtgaattgtgttgctataaacatgcgtgtgcaagtatctttttcgaataatgacttcttttctactgggtagatacccagtagtgggattgctggatcaaataaactagtttacattcccaccagcagtgtagaggtgttccctgatcgctgcatccatgccaacatctactgttttttatttttttgattgtagccattcttgcaggagtaaggtggtatcgcattgtggctttgatttgcatttgcctgatcattggtgatgttgagcattttttcatgtgtttgttggccatttgtatatcttcttttgagaattgtctattcatgtccttagcccactttttgatgggattgtttgtttttttcttactgatttgtttgagttcactgtagattctggatgttagtccttttcagatatatagattgtgaagattttctcccactctgtgggttgtctgtttactctgctgactgttccttttgccatgcaaaagctgtttagtttaattaggtcacagctatttatctttgttgttattgcattwgcttttgggtttttggtcacgaaatccttgcctaagccaatgtctagaagggtttttgtctagacattg

SEQ ID NO: 904450 - DNA, 637 bp, Homo sapiens
ctatcttgggaggtgtgggagggatcagagaaggctttcttttgcaagttatatctgggctgggtcttcattcattcatttttttttttcatgtaaccattcattcaacaaattctcatagcattttccaatgtgccagggactataggacaaggaatgcagctgtcttgaaattccgtaaaaacagacaagcctctgcttttatggaacttataatctagtgggagaaagacaataagcaggccaatacataaacaaacaagaaaaaatatctgatactggcacacactatgcaaagaactaaaacagtatgatgcaaaagagaggtggttactttaggatgggtcacaagaacagcatctctagaggagaagaggcgttctggtttctggaattttcagccataaagacacatgcacatgtatgtttgttgcagcactattcacaatagcaaagacttggaaccaacccaaatgcccatcaatgacagactggataaagaaaaygtggcacatctacaccatggaatactatgcagccataaaaaagatggagttcatgtcctttgcaggacatgaatgaagctggaaaccatcatctcagcaaactaacacaggaacagaaaaccaaacaccgt

SEQ ID NO: 904451 - DNA, 708 bp, Homo sapiens
aaagctgaaggagtggactttgagggttaacaaagaagagaagcagaacataattcaattcaattcaacatactttgttgatcacccaatctggtatgtgccagaaaagtgagcaaagttgaatgagatrtgttctccacaggcgagatctcctgtaagggaaggagaaagggacatatgcagatttgcattcttggagcagatctgttcggttccagactagagatgcagaaagggcacagagaaggagagatttatcctgacttgaagatgaggggacgtctcatggaagaggaggcagttaagctagacctgaggatgctaagtgcctcacataagtagggaaagaaagcataagtccagtctgggaaaatggtgagtgagatgaaatcccacagataagaaaggtgctgtgtgtgtgtgtgtgtgtgtgtgtgtgtgtgtgtgtgtgtgatggggtgggggcggggggatgacaacatgcctacagaatacagggggatgtgaaagaacaatttaccttccagaataaacttccttctttagcactatgcacatattatcttggcctctaatgagactgcaatcctgcgggcaagttgtggttctcatgggatagaagaagtgaggatgggagagggtaccgaggaggggctctgggactttgagaatttggcagtttggggctagtgggcaaggagatttttc

SEQ ID NO: 904452 - DNA, 624 bp, Homo sapiens
ctctctctttcatataaatatatatatttcacaataattacttgaataaatcctaggtacctctcctaaagagttttgaaaaataaacacatagatatgaagaaagatggcccaatataaaccaacagtggtcctactatccctgtcctctatgggcttgctgagcaataccccaaggtaactttcaagctgactttgatgtgaatgcccaggttcacgtataggagtaacatagaccactaagaggggtttcttgacaatccacagtatctctctcccccttacaaaagatagtttttaacatcaagaggacagttgttgactctcatttgaattattaaaccaaataagtggctgttaaaggagcaaagatctgaataataatcagttatcatttgcagagataattcaaatgatagctaattattgggcaggcactctacataaattatttcttttcattcctatgagatgggtactttatgaggaaagagagaggttcagagaaggcatgtcagttttcyaagatcacacagctcattgttgactgagccttgacatgaaactacagctatgtttaaaaccagtgctatttctagtgtactatcctgcttccttgtaatt

SEQ ID NO: 904453 - DNA, 518 bp, Homo sapiens
ggccacatgatatgttatgaaggaattttatttacatcaaacttcccacaatagcctgtttattgaattatccctgaaataaaaccaataaacctgtctttggaaaccagtgaccactgacccacttacatgttatggatggtttcttttctgattgccagttagtgtgattggggtaaggaggaggtaactagtgtgactttcttcagggctccccttatactctatgtgtcttctctccctagctgtctaaagttctcttcaccttgaagagcctcccatatttaacagtttatgatggatgaccagcccacattagggcactgttcaaatttcagatactcaggaaggccaatcctcagagtgtttctgatcaaaacattctttcttatctgttctgcttttttaaaattgcttttacttttcttcctttttttgttattcctaccaggttttgttgttattttttttcttcartgatgtctaattgcaggttaccatttcatctgctactttat

SEQ ID NO: 904454 - DNA, 698 bp, Homo sapiens
ttattgcttgtctccccattataacgtatgcttctgggagtcaggagctctttcttataccagygattttatcacaagacctaaaagagtgcttggcacatgaaagatgtctatatatgatgaatcagtgaatgagtgatgaatgaataaatattggtcctcttaaatcccaaagtcctctgtttactatttatgcacagctattagtctgtagtacaacactgttaagagacaaaatatgcatatggggcaaagcaatatttgtaactctaaggtactcaaccttgtagatgaagataagtgaggaagaaccagttattagagtatcaatggcattggtcatttggttataagcgtaagtgaatttccccttgaatttaccctgtgagttgctatttaatggtgttggacagttacagataagtttggtagaacttttctctttgtttccttaagggttttgcctttgggtaaccaccttaatttcttcagtccctgtcttccatggataaagtcttagcagagctattaaagatcctaatgtcaacttctcttaagattatattgtccattaatgggtgttctgagagatgttattttgagatcaagtgctaaagatttacaatacacactttaactgggagaatatgcttgtttcactaggacagatatgtttctctatggtatccccagcactt

SEQ ID NO: 904455 - DNA, 634 bp, Homo sapiens
gacagtttgaattcctctgttcctatttcaatgcctttatctttttactttccctgattgccctgaccaggacttccaatgctatattgaatagaagtggtgagagagggcatccttttcttgcgctggttttcatgagggatacttccagcttttgcccacttagtgtgatgttggtcatggtttgtcatagatggctcttatcattttgaggtatgttccttcaatacctagtttattgagagttttaacatgaagaggtattgaattttattgaaagtcttttctgcatctattgagagaatcatgtggtttttgtctttagttctgtttatgtaatgagacaaatttattgatttgcatatgttgaatgaagcttgcacaccagagaaaaagtctacttggttgtagtggataagctttttgatgtgctgctgaattaggtttgctagtatattgctggggattttcacatcaatagtcatcatagacattggcttgacattttcttttttcattgtgtctctgctacattttggtatcaggaagatgctggcctcattgaacgagttagggaggagaccttcytcattaattctttggaatagtttcagtaggaatggtaccagctctt

SEQ ID NO: 904456 - DNA, 604 bp, Homo sapiens
tttatccagtctgtcactgatgggcatttgkgtttgttccacatctttgctattgtgaatagtgctgcaataaacatacgtgtgcaggtgtctttataatagaattatttataatcctttgggtatataacccgtaatgggattgctggatcaaatggtatttctggttctagatccttgaccaactgccacactgtcttccacaatggttgatcttcccatttctccacatcctcttcagcatctgttgtttcctgactttttaatgatcaccattctaactggcatgagatggtatctcattgtggttttgatttgaatttctctaatgaccagtcatgatgagctttttttcatgtttcttgaccacataaatgtcttcttttgagaagtgtctgtttatatcatttgcccactttttgatggggttgcttattttttttcttgtaaatttgtttaaattctttgtagattctggatattagccctttgtcagatggatagattgcaaaaattttctcccattctgtaggttgcctgttgactctgatgatactttattttgctccccagaagctccttagtttaattagatcccatttgt

SEQ ID NO: 904457 - DNA, 604 bp, Homo sapiens
tttatccagtctgtcactgatgggcatttgtgtttgttccacatctttgctattgtgaatagtgctgcaataaacatacgtgtgcaggtgtctttataatagaatkatttataatcctttgggtatataacccgtaatgggattgctggatcaaatggtatttctggttctagatccttgaccaactgccacactgtcttccacaatggttgatcttcccatttctccacatcctcttcagcatctgttgtttcctgactttttaatgatcaccattctaactggcatgagatggtatctcattgtggttttgatttgaatttctctaatgaccagtcatgatgagctttttttcatgtttcttgaccacataaatgtcttcttttgagaagtgtctgtttatatcatttgcccactttttgatggggttgcttattttttttcttgtaaatttgtttaaattctttgtagattctggatattagccctttgtcagatggatagattgcaaaaattttctcccattctgtaggttgcctgttgactctgatgatactttattttgctccccagaagctccttagtttaattagatcccatttgt

SEQ ID NO: 904458 - DNA, 606 bp, Homo sapiens
cttaaagtttacttatatctgtcctactaatttcttttggaatctgagctgaggccgggcgcagtggctcaagccttaatcccagcactttgagagactgaggcaggcagatcacgaggtcaggwtatcaagaccatcctgaacaacatattgaaaccccatctctgctaaaatacaaaaaattagctgggcgttgtggtgtgcgcctgtagtcccagctactcaggaggctgaggcaggggaatcatgtgaacccagaaggtggagactgcagtgagccaagatcaagccactgcactccagcctggtgacggagtgagactccatctccaaaaaaaaaaaaaaaaaaaaaaaaagtaatttgagctggttctatgttggcttttatcgcatgggaggatgtgaatcgttagcgggaatattatttatatatcatatccattattggcctctgatatatgagatattaaatatattttctgtgtctccaactagctataattattttcaacagcagtcatttaaaattgaatattccttcatactttcactataacagattatgcttgtgcttatattttcactgaaagcttggaattttaacct

SEQ ID NO: 904459 - DNA, 572 bp, Homo sapiens
ttccatttagtggtaggactaaaagccagactgtatgggatggaggcttggttggaggtgaggacaactctttytaaaagatgctcaaaagaagagccgagaaacactcaagtatctggagagttatatgtaatcaagggagcatttttttttaaagatggatgtttgtacactgaaaggcatgatacaatgctgaaattgtagcaaaaagagaatagtccaaggggcaaaatcaatatattttttaattgatctaataaatttcgctaggatttttaaaatcacatccctaagtgagggccaatgataccagagcaagaacaaatattaagggtgtagagcttattgataatgaaagtgatggagtccagattcctcattctctgttcatcaggcttaaatcaagaataggttttagaaaactgttagaattcatagtttatgtgttttttaaacaattctcttgaatgaacctttattccttacaaaggtgtgtggggctactacaagtagtcataggccccagtgagaaatgttttgttaacacccctttggggaggctgagccactta

SEQ ID NO: 904460 - DNA, 622 bp, Homo sapiens
ccttaacaaccactgacaagttttctgtcttacatttttttacttttccataatgtcatataaatagaatcatataaaatgtaagtttttgagactaggttctttyacttagcacactgagaatcagggacattgggcaatgtctggagaccttgttagttaacttgtcagggaagagtgttactgtcatctagtggataaagtccaaggatgcaacaaaataacctacagtgcacaggatgccctacaagtcattcggcccaaaaaagtcaagagccctgctgttgagaaatcttaatttagcacaatgtacttgagattcattcatattgttgtatgcttcaatagttaattttattgctgagtagcattccattgtgtggatgtacgacaatttatttacccatttatccctgtaaaacatctggattgtttccaagtgtgaacaactataaataatgctgctgtaaacctgcatgcacaggttttgaatgacatgtttcctttctctaggatacatacccagaagtgtgatgtgtggctcacatgagtgtatgttagcttttcagaaaccatgaaatggtttccagagcggctatagtacgtctgcatctccatcagc

SEQ ID NO: 904461 - DNA, 606 bp, Homo sapiens
cctcaatgctctctgaaatatccctttacatattctacaaaaagygttttcaaacttctgaatgaaaaactttcatctctgaaagatgaatgcacaccttacaatgcagttcctcacataacctctttctcatttttattgttgggtaattcacttttctgccattgaccccaatgagctacaaaatgtccattcacaaaagggacaaaaacagtgttccaaacagctgaaatcaaagaaaggtttgaatctttgagttgaatgcacacatcacagaatcacagagcagtttctcacaaagcctccgtctagtttttatctgaagatgtttcctttttcaccataggcctcaatgcacatagaaatatccttttgcagattctacaaaaactgagttcccaaatgcagattctacaaaaaccgagctcccaaactgctgaatgaacagaaaagtttaactctgtgagatgaatgcacacctcacaaagtggtttctcttatagcgtcattctagttttagactgggatatttgcttttttgccattggcctcagtgagctccaaaatgtccattcacagaatggacaaaaacagtgcttccaaact

SEQ ID NO: 904462 - DNA, 618 bp, Homo sapiens
tcttcagataaaaactagaaagaagctttctgagaaaccactttgtgatgtatgatttcatctcacagagttaaactttcttttgattcagcagtttggaaacaatgtttttctagaatyggcgaaaggacattggggagctcattgaggcctaaagtgaaaaagaaaatatcttcagataaaaactacaaagaagctttctgagaaactgctttgtgatgtgtacattcacttcagagatttaaacatttcttatgattcagcagtttggaaacactgtttttgtactttctgtgaatggacattttagagctcattgaggccaatggtgaaaaagtgaatatcccaagataaaaattagaaggaagctatctgggaaatcgctttgtgatgtgtgcattcacctggcagagttaaacctttcttttgatacaggatttggtaaacactgtttgtgtggattctgcaaaaggacatttgggagtgcattgaggcctgtggtgaaaaagaaaatatcttcagataaaaactagaaagaaggtttctgagaatctgcttcatgatgtgtgcgttcacctcacagagttaaacttttcatttgattcagcagtttggaga

SEQ ID NO: 904463 - DNA, 607 bp, Homo sapiens
gcttctttctggttttcacctgggaatattcagtttctctttataatcctcaataggctaccaaatatttctttgcagattctagaaagaaaatgtttccaacctgctgaatcaaagaaaggtttaactctgagagatgaatccacatatcacaaagcagtttcacagatatattatttacagttttcatttgggaatatttggttattccccttaggcctcaatgagctcttaaatgtccctttgcagattttccaaaaagagtgtttccaacctgctgaatcaagagacacatttaactctgtgagatgaatccacacatcacaaagcactttcacagatactctttccagtttttatgtggggatattctgttttcccccaaaggtgtcaatgggctttcaaatgtcctttcacagattctccaaagagagtgtttccaatttgctgattcaaaagaaaacattaattctgcaagatgaatccacacaycacaaaccagcttcacagactgtttctttctagttttaatcttgagatattccgtttttcttcatatgcttctatgggctcccaaatgtccattggcagtctccaaaaagaatgt

SEQ ID NO: 904464 - DNA, 659 bp, Homo sapiens
tttatctggggatatacaatttttaagaataggcctgaatgggttcccaaatttcccttcacagattctacaaaatgaatgtttccagtgtgctgaaccacaaaaaagtgttaattttgtgagatgaatccacacatcacaaaacagtttcacagatggcttctttctagtttttaactggggatattcagttttaacccacacacttaaaagagctcccaaatgtccctttgcagattctccaaaagtgtgtttccaacctactgaatcaaaataaaaggtttcactctgtgaaaggaatccacacatctcaaagcagtttcacagatagtttctttctagtttttatctttgaatatttggttttgccctttaggcatccatgcactcccaaatatttattagaagattctccaaaaagagtctctccaacctgctgattcaacagaattgttcaactctgtgagatgaatccacatatcacaaagcactttcacagataacttcattttagttttcatctggggatattccatttttccccataggcctctctgggctccyaaatgtccatttgaagattttgccaaaaagagtgtttccaacctgctgaatcaaaagaaaaatgtaactctgtgagatgaatccacacatcacaa

SEQ ID NO: 904465 - DNA, 551 bp, Homo sapiens
accaaaagagatgttctaacctgtagaatcaaaagaaagttttacctctgtgagatgaatccacacatcacaaagcaatttcacagataacttcattctagtttttatctggagatattcagtttttctcattaggcctcaatgggcacgaaaaagtccccaggcagattctccagaaggaaaacttccaacctgctgaattaaaaaaaaagagtttaactctgtcagacgaatccgcatatcacaaagccatttcacaaatagctcctttctattttttatctgaatttattgtttttccccataggcctcaatgggttattaattgtcctttagcagtttctccaaaacagtgtttccaacctgctgaatcacaaagaaggtttcactctgtgagatgaatccacacatcacaaagcattttatggatagattctttctagtttttatcttggggtatttcatttttccccataggcctcaatgctttccaaaatgttccattgcatattctccaaaaastgtgtttccagcctgctgaatgaaaagaa

SEQ ID NO: 904466 - DNA, 551 bp, Homo sapiens
accaaaagagatgttctaacctgtagaatcaaaagaaagttttacctctgtgagatgaatccacacatcacaaagcaatttcacagataacttcattctagtttttatctggagatattcagtttttctcattaggcctcaatgggcacgaaaaagtccccaggcagattctccagaaggaaaacttccaacctgctgaattaaaaaaaaagagtttaactctgtcagacgaatccgcatatcacaaagccatttcacaaatagctcctttctattttttatctgaatttattgtttttccccataggcctcaatgggttattaattgtcctttagcagtttctccaaaacagtgtttccaacctgctgaatcacaaagaaggtttcactctgtgagatgaatccacacatcacaaagcattttatggatagattctttctagtttttatcttggggtatttcatttttccccataggcctcaatgctttccaaaatgttccattgcatattctccaaaaacygtgtttccagcctgctgaatgaaaagaa

SEQ ID NO: 904467 - DNA, 601 bp, Homo sapiens
taacactgtaagatgcatccacmcatcacaaagaaatttcacagataatttctttctagtttttatctgggtatactttgttttgtcccatagacctcaatgggttgccaattgtccattcacaaattttccaaaaagtgtttccaacctgctgaaccaaaagaaaggcttaactctgtgaaatgaatccacacgtcgcatcagtttcacacatagcttctttcaattttctaccttaggatattctatttttccacataggcctcaatgggctcccaaatattttttcacagattctctaaaaggagtgttttcaactagctgagtcaaaagtaacgtttaactctgtgagatgaatgcatgcaacacaaaacagtttcacagatagtttctttgtagattttatctggggatattcgggtttttttccataggccaaaatgggctcccaaatgtcccttcgtagatactccaaaaagtgtttccaacctgctgattcaaaagcatggtttagctatctgagctaaatccacacatcacaaaatagtttcacagctagcttctttggagtgtttatcaggatatattcgttttttttgcc

SEQ ID NO: 904468 - DNA, 473 bp, Homo sapiens
ctcaggggctctactcagtccttacttctctattttcccaagmgaaagagagaacagaagatcagagaggaagattttgtttcctgaggcctgcttctgaggcctaaagtgccccaacattataacaaatggctataacaatggttatgggagttatcagctagcaaccatgggcaaaaccaacatatacatacatacacacacacacacacatatgcacacacacaaatatatatatatatatatatatatatatatatatataaaatataaaatcataatatcacacccaataagtgggcaaacatttttaaaggatgatattaacactggaaggatttgaagaaattagcattctcagtcagtggctttataaattgtaactttgctctttgggaaggtaatttggcaatatgtttcaagagataattaaaatattcatattatcttgatcagaaagtctccccaacccc

SEQ ID NO: 904469 - DNA, 580 bp, Homo sapiens
ttacttgggaagggtctttttgcctacttgctcatgcctgaggtatacatcccctccctcagtaattccaactctctaacatggagtagatggggttgtgggaagaagtgacactgactacttaacttcgattttaccaactgtttaattaacactcaagttcatgattttagaaaactaatgactcccacccaccccacttccaagataattttgacaccatctcccagggactgagaatttcttaaacagagatggttgagtttccaccaataattcatttatctcaccagcgttgaacataagatttatggtagtactcttgtcatcagaagaacatgcctctggtttggattttctgtctgttctacctctcaggaatccaaaggcattggtagacaaacagagccaacagagtcagaatgatggaaactgataccaggaaaacctggaagggttcttctagaattacgtgttggtcaaagacagtcatattaaataactataawttgctaggcactagtctaagccatgcaggtaatacagaaatgtttatgacaggactgtgatatcaatagtt

SEQ ID NO: 904470 - DNA, 642 bp, Homo sapiens
gtaatcccagaattttggaagccggaggtaggtggattgcttgagctcgtgagttagagaccagccatggggcaacatggtgaaaccccatttctacaaaaacacaaaaattagccaggcatggtggtcatgcctgcatgcagtcccagctactcgggaggctgaggtgagaggatggcttgggcctgggaggcagaggctgcagtgagctgagacgtcggccactgcactgctttcttatatactctttctaaacgtatctttctcaaagccccttcctttttttgtttcctattaatccaagtttcagaagattccattttcctgccttaattttttgtgtaaattattagtcagaagtcctacagattcaagcttccttctatttctcatgccataaccttaataaaaatcttcataaggtgatacttaaacctctagcaacaagaacaatggctattctttgtgtcctcaacttctctctccaatacataccatgctcactgctaaaattaagatggctaaacaccgtcctcactgaggcattctccagacacctttattgcacaatccctaattttctcctttacctggaatatraaaactaagcactttaacccaatatccaaaggtctccctgta

SEQ ID NO: 904471 - DNA, 602 bp, Homo sapiens
ttgcccatttttttttttttttttttgcagattatatgttcacttgctactgagttgcttgtgttccttacataaagaataaaccccttatcagatgtatggtttacaaatattttctcccattttataggttgtctcatcactctgttgattgtctccttggctgttctctttccaatttggatgcctttagttctttttcttgcctaatttctctggctaggactttcagtagtatgttaaacagaagtggcaaaagtgaaaatctttttctatcttgtttctgatcttagaggaaaaactttcaactttacctcatcaagtatgatgttagctgtgggactgtcatatatgacctttactgcattgaggtacattccttctacacccaatttattaaaatttttatcacgatagtgtattcagtgttgtcaaatgctttcttttccatctgttgagacaataaaatagttttatcattcatttggttaatgtgkcatatcagatttataggtttgcaaaagttgagccatccttacatgcccaagataaatgtcacttgatcatggtgaatgattcttttaccggttgttgaattcagt

SEQ ID NO: 904472 - DNA, 649 bp, Homo sapiens
ggccaatttcttggggtctatggggcccaggcaaatctgaaatccagtggggcagtcaaaccttaaagttcctaaatgatcacctttgactctatgtctcacatccaggtcacactgatgcaaaaggtgcattcccatgggcttgggcagctctgcctctgtaggtatgccatgtatagcttacctcctggctgctttcatgggctgccattgtgtgtctgcagcatttccaggtgcatggtgcaagtttttggtggatctacaattctggggtctggagaatggtggccctttactcacagctccactaggcagtgccccagtggggactccgtgtggaggctccaaccacacatatctctcccacactaccctagcagaggttctccatgagggcccctcccatgcagcaaacttctgcctgtacatccaggtgtttccatacatcctctgaaatctaggtggaggttcccaaacctcaattcttgacttctgtgtacctgcaggctcaacattacatggaaccttccaaggcttggggtttgcaccctctgaagccattgcccaagcagtaccttggccccttttagccatggctggagctgttgaracacagggcaccaagtccctaggctgcacacagcagcga

SEQ ID NO: 904473 - DNA, 680 bp, Homo sapiens
ggcctcctaacactatctaacctttaggtaaggagattttctagaatttgtaatgtgctggtttctttcaagcaaactcaagtgaaagggtgaattactgagcttttcttctttaagaagacaatatgcagacctgatctttatgattttatctttacttatttcctatataagtttttaaaaaatcaagaaatgttccagccagctgttctcagaattttctcagtgtgtgactttgaaacatgttggcaggagaagaaggtgtgaatattcaaatgaattttcctagaaaggatataaaatctacttaaatgtttaaaaaatctatttaattcaactttttttcccagtgggaaagtacaaatacattggatgagagcaaatcctcattgtaataactacttatgggggattcagaaatattcatactttttttatttgtatagtaaatatttctcttctaagtataggccttaccatatagacactggggatgaggttgggggaaatacagatagagactaggtttacgagcagcttatagtttagcagggaagacatacattaaacaaataatgacaaataatagcatatattataacttaaatgactaattattggtttcttgtggtcataaggagagaaacacattgmttagagagtgtggaatattgggattt

SEQ ID NO: 904474 - DNA, 552 bp, Homo sapiens
aaaagaaatcctaaggatactcaaattgttgtttrggtgaagatggatgatgccttccttgaatcatcagctaccaccgacagagtgaagtgagatggaatagtgggcacaatctcattcatcctactctatgtagcctaatgggtccagaatttattatcactattttacactggaaaaaagatgagattatgaggggtcagggaggctttgagtttttgctctaacttcaccactaattaagaatgtgatcttgggtaagccactttaacctctgtaaatgtcaaatttcttatcagtaaaatgtgactatacaagacaataaatttgaaaatactttgcaaaattgaaagtaccatggaaataattcttcaatcccaaaaggttatgaacattattaaaatttgccacatggaagagcacacaccacagagacataactgtgatcataaacagatttacaaaagtggtgtttcattatggagggccatagggctgataaagacaaatgcatcaccaagctatgtccgagctcattcagatttttacagg

SEQ ID NO: 904475 - DNA, 557 bp, Homo sapiens
atcaggttacctaaagtcaagacaaaggaaagaatcttaagagttgtgaggcaaaagcatcaggtaacctgcaaaggaaaacttaacagattagcagcagatttctcagcagaaaccctatgagctagaagggattggggacctattttttagcctccttaaacaaaacaattatcagccaagaattttgtatccagcaaaactgagcttcataaatgaaggaaagatacagtcttttccaaacaaacaaatgccgagagaatctgccactaccaagacagcactacaagaactgctaaaaggagctctaaatcttgaagcaaatccttgaaatacaccaaaacagaacctccttggagcataaatctcacaggacctatataacaataacacaatgaaaaaagccaaggtattcaggcaacaaatgcacaatgaatagaakagtaactcacatctcagcactaacattcaatgtaaatgtcctaaatgctccacttaaaagatacagaacagtagaatgaataagaattcaccagccaagtttctgtgtcttcagg

SEQ ID NO: 904476 - DNA, 590 bp, Homo sapiens
aaaagttgatttttgacaaagtgggaatacacagaataggccaaagtctgctgcaagcataaaacttcagcaatattaggtgatggcctacttcaagtaatattacagataaaattagtgcctgggaatttctttttaatggactctgatctgttacacatagcttttagtcatttcaggctcatcttcaggagtatgtgagaagcaactgacttatctgctagaaaataagtattttcctcttcttgctggtttctagatgtgaaatctaatagtaaagggagtaccaagaagggtttctgcactattgtggatttttctgtattgaaatgtcatatgactttagatttggaagctgtgttggcaggctgaagtcagccagctggggccctcccacataagagcagaagacattccttaggcagcatataagataattgggatgcttttgcattttttggctttgtagtgacatgttgaccatggctrtgtaataggtttaaatccagaggccataaaatccctgatatatattgaagtttgataaatatgtaaatttagggctatttacataaatcattattaccaac

SEQ ID NO: 904477 - DNA, 658 bp, Homo sapiens
ctaataatacttcatatgtatatatagtcaatcatcrtcattcaaagattccatatttgtgaattcgcctacttgctaaaatttatttgtaatcccaaaaataaacattcatagtgttttcacagtcatctgtggatatgaacagaacaacaaaaaattggatttacccaatgtgcatattcccagttgaggtcaaacaaagtgatacccagctgtcttgttttagctgtcatactataaacaagtgtcctttttgtggtctgtttattgccatgttgtcctggtccacctagtgttgctataaaggaatacctgaggctgggtaacttataaagaaaagagatttatttggatcatgtttctcaggctgtacaggaagcattgcaccagcatctgcttccagtgagggcttcaggctgcttccactcatggcagaaggccgaagggagccagcatgtgcagagatcacatggtgagagaggaagcaagagagggaaaaggtgctaggttctttttaacaaccagctcttgcaggaaccaatagagcaagaactcactcattaccacaaagatggtaccaagccattcatgagggatccatccccataatccaaatacctcccatgaggccccatctgcaatattggggatcctattt

SEQ ID NO: 904478 - DNA, 640 bp, Homo sapiens
tggtggctccaagactacattgcattagccatgacccttagtagcaaattaggttcctgagctstatttcttgctacacatgaagctgggaccatctgtaaggatctcacaagagcgtccatgaatgctcttgctagaataagtagtgtaagcagctagattttgcatgattgtgtctgttggcagaggctgcccattgtgaacctgagttggagggaaccgtgaatgagtagtttttagcttcttagcctctagcatctgtaaggcatactacaaagggaggaaataaagaggcatgagtccatctgccacatctaccacatctgttgtttgtgtttgcctggcaccacatcatcctgtttcttatggaaacagaacttttttttttttttttcctgtaagggaataatgcagtcaacggtatacactgactcagatctaccagttagactaatctgtcccctagacactgtaatttgtttatagatgtgccattgatccattttggttctggaagactcgtccccaaggctcctctgccaaagctatgaaaagagacttgttcttactaccaagaatcctaaacatgcaggatatgaatgtgggctgctgttggtggtttcccaccatgaatcgaggg

SEQ ID NO: 904479 - DNA, 596 bp, Homo sapiens
gtggttaggaaagaaggaaacagtaattggaatcattttcctagtattatttaacaacacagttatcttaaaagagtgatcacatggtgtttggtattgagctacaatttaattgtaactttgaaacaacaacaagaagaaaatcaatattttagccttctctgagtatgtgcctgaaggctcctatttgagctaagggtctaggagttaaaacttcatggttaaagcttccaattatttagaggatggagtattgtttttctgcacagtatctattctatatcagttaggataattcaggtttttgccgctgtaaccaacaacccccaaatcttggtggtgcataacaagaaggacttatttcttgcttagatgcatgaccatagcggtttgtctgagggctgttctcatgtggtctctcagagactgcggttgagggagatttcctcttgatatatgtttccttgatttctctgcaacagtgggtgggaacatagagaatcacaaattggcctacaaagcttcttctagaaatgatactagyttatatctcataggccaaagcaagtcacttgtctacatctaaattcaaagaa

SEQ ID NO: 904480 - DNA, 611 bp, Homo sapiens
atttgagatagtcacgaaatctagaactagacagtatctmttttattggctgcagaatgtgtcaagactagtgaaaatgtcatctatctctccaacccatctatttgacagtcctccctatagccaccccctctaggaggaattttatgatttagattttccacttatccctgggaaattataccttagctgaccttaactcactccattgtcttctaaaaatataaatcaggccaaagcagtttgttaacaaatatgtactgagtattattttccaggcttgatgctgggcactcagcgtcaaacaaaagcaataaaacttcagccttcctgaagttcagaatctgccaggaaagacagacattggataattgagttaaattgtggtaacagctatggagtgtatgtggtgcccttgagtgtctgtaattggaggacttaatcttgatagaagaaaaaagggaggcaagaaggaagagctctttccaaggaggaagcaagacctgagcaaaggcctcatggccaagggtgtgtgttttattccaggcatggagggaaggcccatgagactaaagatctaccatagccatggggagaaatagaagcaagaa

SEQ ID NO: 904481 - DNA, 611 bp, Homo sapiens
atttgagatagtcacgaaatctagaactagacagtatctcttttattggctgcagaatgtgtcaagactagtgaaaatgtcatctatctctccaacccatctatttgacagtcctccctatarccaccccctctaggaggaattttatgatttagattttccacttatccctgggaaattataccttagctgaccttaactcactccattgtcttctaaaaatataaatcaggccaaagcagtttgttaacaaatatgtactgagtattattttccaggcttgatgctgggcactcagcgtcaaacaaaagcaataaaacttcagccttcctgaagttcagaatctgccaggaaagacagacattggataattgagttaaattgtggtaacagctatggagtgtatgtggtgcccttgagtgtctgtaattggaggacttaatcttgatagaagaaaaaagggaggcaagaaggaagagctctttccaaggaggaagcaagacctgagcaaaggcctcatggccaagggtgtgtgttttattccaggcatggagggaaggcccatgagactaaagatctaccatagccatggggagaaatagaagcaagaa

SEQ ID NO: 904482 - DNA, 655 bp, Homo sapiens
atagtagttctgttttaagtttggtgggaaatctccaaactgctttccccagtggctgaactaatttacatttctatcaacagtgtataaacattcacttttctttccagcctctccagcatgcgttgttttttgactttttcataatggccattcttagtagtgtgagatggtatctcattgtggttttgatttgcatttctctgatgattaataatgtggagcagaattgaacaatgagaacacttggacacaggaaggggaacatcacacaccagggcctgttgtggggtggggggatgggggagggatagcattaggagatatacctaatgtaaatcacgagttaatgggtgtagcacaccaacatggcacatgtgtacatatgtaacaaacctgcatgttgtgcacatgtaccctaaaacttaaagtataataaaaaaatgtgaagcattttttcatgtttgttggccacttgtatgtcctcttttgagaagtgtatgttcatgtcttttgcccatttttcaaacagggyaatttgttttttgtttgttcagctattgaagttccctatagattccatattagaccttggtcagatgtgtagcttgtgaatattttctcccattctgtaggttgtctatttattgattat

SEQ ID NO: 904483 - DNA, 620 bp, Homo sapiens
tttttttttttttcactgtctgtctctttttcatataaaactaattttaacctaaagtaatttagaaaataaaaagcaggaatccaaaagggaaatcttattagatttgtctgcaaatgatgattttaattaattatttgggacttaaacacagcaaaggtctagattttgaccagaacttagctttgtttcaagcaggtaaattctgagggcaccttcagcctttccaggactgcttgtctctgcccttatggattgctacatttttccttctgaagagctttctagtttaatggtgacttgaggtgtttggagctagaagtctgaacttctgaaaagattgaaagtgcctggaaaccatctgagaggcaatccagtcaaggtggcctcccttctctatgtgctcaggacaaatgcttttctcttggccccgaatcttcccgggaatctcaatttcaaatcaaacagcacaagctcagggaagaatatgtattctaggacactaagaatccagtccttacctttccttttgttctgtttccttatttcttctgcattccctttttccttccttctcscaaccttcaatatttcttcttttttcttccttgtctgacttt

SEQ ID NO: 904484 - DNA, 637 bp, Homo sapiens
gtgtcatccattcaacatttcctttatgcccarttggtgttagatgttgtccttggaattatgaaaatgagattggattaaacggtttttcttcgtgagtagttcacattctaatgaaggagatatacatgtactaattaaaacataataataaaaacacctagctaaaatcaggggttctataaaagaagagtagaatgggaagaatggatacttgcgggcaactagcagtctctgatacagtttgcatattaatgcatgcactcaacaaatgtttattaagtgtctgctgtgcattatccctgcctaggtagtgatctgtctgtctattgtttatatagagaagtctgggatttaaacatgtaaagtatataagaatggttacctctagggatggatacactcaggtatagtacaaatgttttatagaatgcatgttttatccctgttatttaaacaattggtttaaaaatggtagcagcaaacaaattagaacattgaatctgaaaagataaactcaatcttttcagactcaatgaaatagaaaaaaagaccatatagaaagtccacacagccaagaaatcgtagaccatgtgtagaatcagggctgtgaaggaaagcagctttaattgtttgc

SEQ ID NO: 904485 - DNA, 669 bp, Homo sapiens
tacttttttgttttctctgtgaaacggtgtgtccctctgttgctgacacatggctcactgcagtctcaaattcctgggctcaagcaagcctcccacctcagcaccctgagtagcttggactataggcatgtaccaccacacctggctaattatgtattcactaacatatctaacatatattaatatatattagtatagtacatattgtaataatagtaatcattggtatatttattatacatattatatttacatgtgtgtgtatataaataaatatacatagagagaatatactcctccaaaatgtgcctactaaattttgctgacattctacaaactgccaaaggagcaattcttaaaacactgaaaataacaatgagatcttttaattgagttcaaataggctttgagagaattatttcagtctagtatggtcaaacccaactacttgtacctatgatggtgattttgttttgtttttaatgtttctgccccttacataaacttcctaaaaacacatttaacctataacattattttagtctttaagctcttctttgtagaacccacagggttcttctgaaggatacagaagcaatcttacctaaggcctagaagcagttctgaaggagggagatacstaaccacaggagcctagttcaccttgaa

SEQ ID NO: 904486 - DNA, 630 bp, Homo sapiens
cttggcctcccaaagtgtgggattacaggcgtgagccaccttgcccggctgtrttatcagttctttagtctataatgttgcccatttaggctctacagatatattaaaaatattcgttgatgaaataaaaaccaggaggtaataagaaagcctgtaatgtaaaggtttcccatttcttgtgaaagtagctgtggactttacccacagttattgctgcatcacattctgtttgatataatttttatttcatctacagttgtgccataatcaccaaattcccaaagtaaaaatatgttaggtttatatcattatttaaagatactttaaattttattttcctaaattaaattttcaacttgaaatattcttttgtaacagaaggaagaaagtgccattgtattttcactttgggccactattttaaaatattgggcaaacaaagtaacaataaaaattaaagctgagaaactatggcaaagacaaagtaagacaaagaacactgacttagattctgagataaaaagccagtttttgtttgtttgttttatttgagttctggtatacatgtgctgaacatgtggatttgttacataggtacacatttgtcatggtggtttgctgaacctatca

SEQ ID NO: 904487 - DNA, 665 bp, Homo sapiens
gtgaaaaagaacagtagctatcatcaggtagtcctgtctgttaaataaaaggaacactgcttctaagttctagtgagtgtttgctgattttttgataatgcctagcttttcatattttgctcttactttgtttcttctgtttaaaaaaaaaaaaaaagtcaacggtctatgttcccaaggctactctttagccaaacggtgtctccctgtatacgggttctgctaccatttgcagagtgtcaagaaagccctcatttccataggccatcagaaaatatgacccttacttctatttgtatacataggtaaatatttctaaattgttccttccaactctgtacttgcaaattaatatttcagagaagaattataaatgaaagcaatgtgctgtcttcttcccttgcatgagctgtactcctgacatttcagaggaatggtaggattgcaggaagaagagaaaatagggcagacaatggaaaatcatgtcatccatgaatttatcatttcacacatttgcattggtgacagccatctttctatcacattgggtacctgcctagtatacttacttatacttattactttatgtaggaagaccaaggtgaaagaattgtttgtatggycctcaactttacaaagagaaatgaatggttaatgagaatcta

SEQ ID NO: 904488 - DNA, 634 bp, Homo sapiens
aaacatatgcattaaagaaaaaaattgaatatgctaaagcaattgagttatagttgtgagtttgaaacattttattttaatttttaaaaytttctgaactatatatttctttctttctttttttttttttttgacagtatcactctgtcacccaggctggagtacagtggcactatcttagctcactgcaacttctacctcctgggttcaagggattttcgtacctcagcctcccaagtagctgggattacaggtacatgccaccacacctggctaatttttcgtatttctgtagagatgaggttttgccatgttggccaggctggtcttgaactcctggcctcaagcggtctgccggcctcagcctcccaaagtgctgggattacaggtgtgagccacgacacctagcctgaactatatattatttctactgaataaaaatgaaaataattccagttgatccttaagaaaaccaaatacctcctagtgtttttagtttttttaaaaaatcaaggatttttcaaagtatgaagattttttattactgaggataatacaaaattggtgctatacatttagaaaacgaagcttaaaagcatttctcaaaactattttggaagaaggcagtatcaaa

SEQ ID NO: 904489 - DNA, 648 bp, Homo sapiens
ggggaagctagttccatgctagcggttctaaaatgggatactttttaaatagaaacgggggggaagatttgctgaaagagtcagaagacccaggagaagcccatgagtgtacacccttccttttctgggccccacaacacggttcacatcaccctccacccctttgctaatgttcctctctccctgaacttcttcagcacacaattcaggtctccccttggactctgggttctccccaaagcagattgtgttagtcagggttctccagagaagcagaagcagaaagatttaaagaggtaagacagaggagatttatttatggtgagagctagttcacgtgattgttgagtccgagaagtcctacaatctgccaccagcaaggtggagactcagaaaagccagtccaagaccaaaggcctgagaaccaggagggccactcgttcttgggtctgaaggcccaagaactaggagattggatgtctgagggcaggagcagatggatgtcccagttccagaagagagagggaatttacccttcctccaccttcttgttctattccagccctcaacaaattggatgaggcccacccacaytggtgagggcagatcttcttgactcagtacaccgattcaaatgcttatctcctc

SEQ ID NO: 904490 - DNA, 596 bp, Homo sapiens
tatttttagttttatttctcactattctattatgaaycctttctttttccattctttctcttgtcttattctttgcttcttttctatagtctacaattccttctgtagccatcacatctcttttttgaatggggtgaagtataactgaatacattttttaaagctgtaaatgttcttgtagagtgtagggttatgacaacttttctctaaagtatggaaggaaaggaagtcataggctttcttgtacaacttgtctatttcctttagaaggaaattagatacattgaataggcatggaggctgaaatatattctagtactggcttggtagataaaatatattctagcatggatattgcataatagaagcaataacaaaatctacaataaagtcaaatgttgagcttgatcatgtgcctcatctgctggcatatttgtgaatattcgagagttaaatgattgattgattgatcatttatttccaaatccccattcctcacttccattgcctcctcccactcttcccttacagcaaccatgctaagatattatatatatataataaatataatatacaatatcctatatatatctgtt

SEQ ID NO: 904491 - DNA, 633 bp, Homo sapiens
atggtagtgacagctgtctctggctcttgctaaaaaaagatggtagcaagctatacaagggaaccacaaaaccacttatgagaaggagcaacattttcctccaggagccaggagttagcaggaagaccctgataaaagaggaagtggggagcagctgtgagtgcatctcccatggaaatttccactggaaatttcatcatctcactagctctacctgagttgcatacataatacacacttccgattatttaaagaaaaatgtgtttaccttacatgctcagtaaatatttctggaagaaacaagcaaactgaaattccctacaagtcattattatgaaattaaaagcttttgaactagaaagatttggattccagtctcaactacttatgtaacacctgaacctagacaaggcatttaacctctccccaaccttccatgttctcatctgtgaggtgggaataatgatgcccatttcactgcatcatttgaggattaaataggataatgcagataatggacataatgtacagggtacttaacaagtactcaacagatactagttcctttcctttgacccataagatctctcatrcaatggcatatggctctcagtcccacaattcaaaaacact

SEQ ID NO: 904492 - DNA, 644 bp, Homo sapiens
tggggcttgcactttctgaagcaatggcccaagctctaccttgaccccttttagtcacagctggagctggagcggccatgatgcaagatgccaagtcccraggctgcacaaagcaactggggcctggctgcttctaatagcatacactcatatgcatgaagagattatctgaaactggcacttaaattttaaagggaagcagagcataaaagtttgaaaaatttaaagccttcctatgtagttgaaaagaaaactccattttctgggggagaaattaatgcctgctgcagaaatttgcataagaggagccaaatgttaatagccaagacaacgggaaaaatgcctccaagtcatttcagagatctttgcagcagcctctcccatcataggcctgggtctaaaagggaaaaaatgtgttttttttgtatagccaagcctcatcttgaatgctttgctgcttagaaatttcttccactagataccctaaatcatctctctcaagttcaaagttccacagatctctagagtgaggcgcaatgccaccaatctccttctttgctcaagtatagtgggagtgatctttattccttttcccaaaaagctcctcatctccacctgagacctccttagcctggacttcactg

SEQ ID NO: 904493 - DNA, 710 bp, Homo sapiens
ggtttttctagatatagaatcatggcatctgcaaacagggatagttcgacttcctctcttcctatttggatgcmcttaatttctttctcttgcctgattgctctggccagaacttccaagactatgttgaataggagtggtgagagagggcatacttgtcttgtgtcagttttcaagggaaatgcttccagtttttgcccattcagtatgatgttggctgtgagtttgtcataaatgactcattattttgaggtatgttccttcaatacctagtttattgagaatttttaacatgaaggatgttgaattatatcaaaagccttttctgcatctattgagattatcatttttttgtctttagttttgtttatgtaatgaatatatttattgatttgcatatattgaaccaaccttgcaccccaggcataaagcctagttgatcgtggtagataaggtttttgatgtgctgctagattcgatttgccagtattttgttgaggattctttcactgatgttcatgaaggatattggcctgaagtttcttcttgttgttgtgtctttgccaggttttagtgttaggatgatgctgttcccatagagtgggttacagaggagtctctcctcctcaatttttggaatattttcagtaggaatggtaccagccagctcttctttgtatatctggtagaatttggctgtgaatctgttc

SEQ ID NO: 904494 - DNA, 639 bp, Homo sapiens
ataccatttgacccagccatcccattactgggtatatacccaaaggattataaatcatgctagtataaagacatatgcacatatatgttaattgtggcactattcacaatagcaaagacttggaaccaatccaaatgtccaacaatgatagactggattaagaaaatgtggcacatatacaccatggaatactatgcaggcataaaaaaatgatgagttcatgtcctttgtagggacatagatgaagctggaaaccatcattctcagcaaactatcgcaaggacaaaaaaccaaacaccgcatgttctcactcataggtgggaattgaacaatgagaacacatggacacaggaaggggaacatcacacaccagggcctgttgtggggttgggggagaggggagggatagcattaggagatatacctaatattaaatgacgagtcgatgggtacagcacaccaacatggcacatgtatacttttttaactaacctgcacattgtgcacatgtaccctaaaacttaaagtataataaatttwaaaaaaagttaaaagaaaaacaatatgaattcttgcaatccatgaacacaggatatctttccatttatttgtgtcctgtttactttctttaataagtgt

SEQ ID NO: 904495 - DNA, 599 bp, Homo sapiens
agtgccacgaacaagtaaaagttaatatagaaaaagtgcttgtttcatttcatgctgtccataatgaacactagacattttctctttctcttgaaaggttcttctctacgtctctactccttcttggctccacttgaagttacctcctccactttccaccattcttattctaaactcccccatctctctctaccatgatttgctttaatttcctcatagtttttaccactatatgaaatcatgtcatctctacatttgcttacttgtttagcttgtatcttctccagcagaatgtgagctctgtgaggttaagtcttctcctccttgtctacctctgcaatcccaatgcctgttagagtgcctggaaaatagtgggtgagcaattacatatgtgttgagtgaataagtgaaactaagacttttgtcttagcaagttacactctataatagcagtgtcattcttcctggtttccaagctatcaattttaattattttatatctcccaagaccaccattagttctcaacattctgtattctctgttcctttgtcatttctttatatcctcrtataaattattcttatgacttctttgccag

SEQ ID NO: 904496 - DNA, 650 bp, Homo sapiens
ttttgaaatataatgcatatgttaattaaattttaaaatctcgcaaaaaaattaaaattttaactaacaccaccaatttaagattgtgtgggcaagccaaaatattattataggtttaatagaaggaagatactattcaattctgatactgtccttggtctgtttctgtatttgacttcaataattctcatataggaaagttctgtttaataaggctatataaaatgttactggtaccttcacagttttctgcttatgattatcaaagaaaaagctctgccaatatgcaatttttcaatgtcaattttattaaagaatgttttgataattctgtaaatgctttataatcccacagcaatatgtgtccgttgcagcattattaaaatctgtatttatatcactatttacttattgctttgaattaagaacatgaaaaattttatctcgaaactttatcatatatatatcatacaataaataagtcataatgtattaactatatattatgactaacaacctgctgtaactttagacatacaaaaatacctcttaatgagtgtaaaatgttaamtcttcttttgagttcagtatacctgtaccacagtgagtcctaggacatttgaatcaattctctcaagccatttgtctat

SEQ ID NO: 904497 - DNA, 410 bp, Homo sapiens
ccacagtcagatcttttagctgcaatccttaagaccactgttccctttcctgctgatgccactgcatatcaggtgacactagggaggcctgggacatttggaggatctgggtaagggccagttgagttgggtttagtgggattgtttatgtgggtctcactgtacacctctgtgtatagtgatgaacttggacaagaaataaaggaaggttatttatatgctcccccaccgacctcaccccagtcccagcagcaaagaacacaggacctagaatctaaggggggccctgatgttgttcakggttgggggcagagggggatctctggagatgtgagtcctgactccatgtgaggagtggctaggagccactgggcagagggctggggaggggggcaggggtcttccagaaa

SEQ ID NO: 904498 - DNA, 633 bp, Homo sapiens
acgcaccccccaccccggccacacacacactttgactaacacatcttattcaatctaattactcggtgattttttcaatatttcacattaaagacaaaggttatactggtccttattaacaagtatttttaagcagcttttatataccaagcagtgagctggttatcaaatgggaaggactattctattagtccaggagttaattcaattatcataaagtgaagatgagttcatgtgtataatatccctagaatactacaatttacagaagtctttttttcacatgtttacattcttctgtttttctattagtatttccagaagctcatctacctaatgttactttacctaaagttactttacttctcatattctagcactccatgtttaccaggatctgatagatagccctctgaacaaaagtagagcttttagctccgtaaactttttagagaaactttcttatacccgcaagttaacaggtctgagagccataggagtaaactgatgtttgatttctcactttctcttttgactttgtcattcagtccatcacaatcctgtcactctgcctttgggacattgttgaggtccactcattattcacactgmcacagtctttatctagaatac

SEQ ID NO: 904499 - DNA, 571 bp, Homo sapiens
tagaaataaaaatttttagactccacttcagacctattgaattaraaattctggaggtggggcccagcaacctgggttttagcaagcccccaacataagtctgacacacagtgaggttaaaaaaccgctccccccacaaaaaatacagaaaagaaaatcattcccatagatgcttacaggtcaaaactccatccctgtggcttgttgtaatttcaaacacctcgtttgtaatgattaagggccaccagctggtctccatcactgtcaaaccatcatgaatcctactggatcaggaaactcagttccattatggcataacctacagtcatctccttcctacagaggacagcaaccacagagctatttaacaatgctgttatccccctcaccaatgcatattatagtgctttcatcaaaacagcatcctctggccttcctagggagtacggttaggagttggctgatccattctagcatttccgtttccccaagcctgtgaattccttcctctagagtaggtcaggtaatctcaaacatttctaccttattgactataggtcatcattgagtt

SEQ ID NO: 904500 - DNA, 646 bp, Homo sapiens
taatgttggaacagatagaccaacttcagtggtctgagagagtatggagctcactcccaaaggaatccttactatgtgtcccagatgacatacacagcattgactggcacccacgctcagagcagtcttctccaaaagataaaggacacatccaaattgaagtccttcgatctttgagaataattaaataactaactaaaggaaaatgttttgataaaatgcttgccacagtacctccctaaatatctataaagacagaagattctgattataaaacacttctgacaaagtgatagtaaatattctcatgtatttctgaaaaaaaaagaaagcactgatatccttctcttgacttcagtgtttcaggcccttgatccctgacaagttgaagtccctgggacttccaagtagatggttagatgtagccttagacagtaatattggtacaaatgaattctagatttatctcacttaacgatatctatagtatgtttacatactgttaagtattttctatgtggaaatggtaagattgtcattgaaactgttcattgctaatctgtaaggtagacaattacatattcttctattaaaaaaawttgaatctactattaatactggaaaataagaattgttataaactaat

SEQ ID NO: 904501 - DNA, 614 bp, Homo sapiens
aggcatgcattcatttactttacatacattgtccagttaaatttcccaacaatcctattttatagatgaaatgaaaaaagaatggggacgtgaagttacttgcccaagtctctctcagatgccaaacaaagcccctgttcctgccaaacagactcctttgaactttttaacttcaatattaatcctttgaagcaaaataaataaaaaagggcaatacccaagtgggatgcatataaatcgcttaattagtagacatttattccacaaatatttgttaggtgccaattatttgccagactacatcacaagagggtaaaatcagtgtcacagcagacagctacaaatggtgctttttgcactttgcccatacccttgccacaggaaccctcacgcctgggtcttgctgtgtttgtgagctagtccttccagctgccaagggctcagagatgttgcttcttttgctgtttcatcttctgggttatcaagcttgctgctcaggccactgtgcccttgacctttttaggctctagaagttacctcaagggggaatgtttagttcacccaaaatytaagccgtttagaaagccatgtggacgtgtgctctgaatgcccaa

SEQ ID NO: 904502 - DNA, 597 bp, Homo sapiens
ctgcctcccaggctgctgcacctggtgctcttctttgctttgaccttgcttctctttgaccttgaaatgccagtggtcattgcagagtttcaaaggcagctccagggattggaggattttcccaacagcttgtttctgtgcttggccagaggaaatggagaaggatagaggagaaaagagtgtgtgtgagtgagtgtgtgtgtgcgtttctgtgtgtgtgtgagagagagagagagagagagagagtatgaaaatgaatgaatctacttcctgttgcttaaaaaaagtcctggctggactttgattagaattaacaacccccagctgctctgcctcccgcgttgctttagcatttttccttctggacacacacgtctgcattactttctgggaaaacatatgactttaaaataggaatgcagtggcaccaagctcatctctcctgcgttggttccctggcagagcggcccgygtgcagccccgtcgcccctcctccgtgctcctgttccccatctacacgattccatgtttctgcgatgagaccatggtcctgtgttctttcccgggggggacgcactgaaggcagcagtaggagtg

SEQ ID NO: 904503 - DNA, 610 bp, Homo sapiens
atatacgtactatatatatgtaagcatgtagaatatatacacagaataaagaatartaatgaaataatagctataagcacaccacctgaaataagaaaggaaacattacaagcatcccagagcctcctaaatgcccccctgatcttatcccatgccctctggccagaaataatagttatgtgttaatcatataattgcttttctgtatactctgcatgtgtatctgttaataaataaaatactgtataatttttgcctacttcaatcaatattatctctgagatttatccatgttgttatatgtagctgtagctcattcattttcactactttatagtattctattgtgtgctataccataatatattcgttctgttgatgggcatatgagttcttttcagtttttaattttaacaatgctaccatggatactattgtgtatgtttcctggcatgtatgctcatatagagtacatacctggaagtaaataactgagtcactgtgcatgcatatatttcactttattaggtaatgctaattttttctgaaatactagtacagagtgccacagcagagtgtaagcatttcagttccttctagtcatcaatca

SEQ ID NO: 904504 - DNA, 626 bp, Homo sapiens
tcctttttatggctgcatagtgttccatggtgtacttgtaccacattttctttatccagtccatcactgatgcgcacttgggttgattccatgtttttgctattgtgaatagtgctgcaatgaatakacatgtgcatgtgtctttataatagaatgatttctattcctttgggtatatacacaataatgagattgctgggtcgaatggtatttattctgtctttaggtctttgaggaatcaccacactgtcttccacaatggctaaactaatttacgctcacaccaacagtgtataagtgttcctttttctcataacctagcaagcatctgtgatgttttgactttttactaatagccattctgactggtgtgagatggtgtttcattgtggttttgatttgcatttctctaatgatcagtgatattgagctttcttaaatgattgctggccacatgtatgtcttcttttgaaagttgtccatttcttaaaaaaaaaaaaaaaaatcctacttttcctgtcaccgatccctcacattacagtttccatggctttgcttatttaatccttctctactggctgctgaccatcaccagctgccaagagtctcttgccttttttgaacac

SEQ ID NO: 904505 - DNA, 587 bp, Homo sapiens
gtaattctgctttaagacttggatgagaaggctctttgcaagcaggaagcacccatgcccatacctcgaaggcccccttctgctttgaaggttctttggtgtatatcacaccccctccttcaaagagaattcccccagtgagccagttggcagggatgtatacaaaaggaaggacattatatttcctgttttagtatgaagggaaattaaaaatttaaaaaaaaaaaaccgtgggcaaatccactgaaatgtcaccacagcctgcacaaacatctaaaacctttggataaagaacttctctttgatacacggggtggggctgagggcagggaccccttttccatttgacaagaaaaaccttcttcacctttgtcaaacgtgaacagcagtcaaatagcatatttacaatagagaaaaggcatttttctgaatgttagaaatctgtggtgtatcaagtcctgactttatagatcttgagagttagactttgttttttccccccagggtgaaaataaattgagcaaaaagaagcattgtgaggaattggggcawaaagcttctaatttgcattggttttgatccactgg

SEQ ID NO: 904506 - DNA, 584 bp, Homo sapiens
tagcaaagacttggaaccaacccagatgtccatcaatgatagactggattaagaaaatgtggcacatatacaccatggaatactatgctgccataaaaaaggatgagtccatgtcctttgtagggacatggatgaagctggaatccatcactctgagcaaactattgcaaggacagaaaaccaaacaccgcatgttctcactcataggtgggaactgaacaatgagaacacttggacacagggtggggaacatcacacaccagggcctgtcgtggggtggtgggaggggggagggatagcattaggagatatacctaatgtaaatgacaagttaacaggtgcagcacaccaacatggcacagtatacatatgtaacaaacctgcacattgtgcacatgtaccctagaacttaaagtataattaaaaatatatatacctcttttggttagattgagggtcattagtttacttgatattttacccaggctccccaacttctmaatactaataaaaatgttttattataggaaatttaagcatatagaaaagtagagagactagaagaataaacccttatccatcat

SEQ ID NO: 904507 - DNA, 599 bp, Homo sapiens
tttcttaatttcagtttttgaatcatttattgctggtgtatagaactatagatttttggatattgatcttatgtcctgaaatcttgaacttgtttgtaacttttgataattttcctgtggatgccttagaattttctgtatataaaatcaagttagcttgagcaacatagtgagactccatctcttaaaaaaaatttaaaaagttagccaggcatagttgtcagtgcctgtagttccagctacttgggaggctgaggcagaaggatcacttgagcccaggagtttgaagctgcagtgagctatgatcgtgccagtgtactccagcctggaggacagaatacctcacctcctaaaaaaagaatcaggtcatctgtgaatagagatagtttcacttcttcctttctaatctgaagggttaccccccaccccccaacgccttattgccccagctagactctccagtataataaataaaaatggctagagcacacatcttgcccttgttcctgatcttaggagaaagaaattaatcttttgttatgaagtatgatgttaggtgtgtgtttttcatagatrccctttataaggttgaagaagtt

SEQ ID NO: 904508 - DNA, 583 bp, Homo sapiens
caaaatctgagagttactcagtgcattgcygacatagatgcattttccaccagttcttgcaagtaattatgaccatgtgaccaactattaaccaatgaataaaagtatccccaatatgggcagcttcttggaagtgtccccaacatgaagaggtagccctttctttttccctttttctttactgttgtctggaataaagaaatagtgcctggagctgttcttgtcatcatggacagtaaggtggcattctaagcatgaagaggtaagacaggaggatcctggtgccagataattatggcaccatgcatcctggaccagacactttgtttacctaaataagaaagtctggtctattgcaatacaatcgccatgtttaggaaatttgaggttatttgtcacatgcagatgaacctaatcataataaaaattgtcactaaaaaatcccgtcacttctagattgggccacactttactcatttctgagagatgacacagttttaatttaaagagttccaaagaggtagaaatcacaaatacacactaaacaagtatttaatcattgtcaagtatcctttcttccagg

SEQ ID NO: 904509 - DNA, 587 bp, Homo sapiens
aatttcatagcttaaaggcacacaattcaactatctagatgtaacagtgaaatacagtttctgaactgctttgactagtagacaagatatatttcttaattccacttttattttacttatttaatcttcagkctatacaacagtaaggaacaaacaatgacattctcatctcaaggcacaagcatttatattatcattcccagtggggatgttgcagaagcaagttttaggtcaacaagatttaatttgtttttacttcttttgaaatcaaatcatagggttttttaaaaataaaatgagaagtatacggaaataaatcatatataaagttataggttagacattgagctcaaatgttaaataagacagaatgagaaaatcaattctcccccaagattaagaaaggtgagaaaaatgtaccagcactaggaggatggtagggacaggcttcctcctgcttggttttatgtatttaacaaacctgtcttggctactatgtgctagacattgatctatgcactttagaatattaattcacctttatagaaaccaatgaagaggtttagatattactattttatccattt

SEQ ID NO: 904510 - DNA, 659 bp, Homo sapiens
aagtgttctttattttaattatatcaatgtcaatatccagactgtgataatttactgtagtttacaagatgttatccttggaggaaactgggtaaaatgtacatgagatatctctgtaacatttcttaaaagtgtccgtgaatcaacaattatatcaaaataaaaagtataatttaatacagcatcttaacattttcaacaaaactaagtgtcaaagtatccccataaacctcaaatacaaattggtgaggacaaaccactagtagttgcacgttattaatttttcctgttatggattatgcctttggtgtcaagtctaaaagctttttgcttaaccctagatcctgaagattttctcctgagagttttgtgactttatgttttacatattagactttgatccatttttatttcttcctttgaaatctgcacgccttttttttttctcgcccattacattatctagaacttccaacgccatgttgaataagcatggcgagagtggacatcattgctttgttcccgatctttgggggaaaaatttcagtctttcaccgctgtgttagctgtgagatttttttgcagatgctctttatcaarttgaggcagttcctctctatttgcattttctgagcattttatcatgaatggccattgaa

SEQ ID NO: 904511 - DNA, 626 bp, Homo sapiens
tgtccctatatatgtatatatgttaacctttctcytctctttgagtggacctcatttcgttgacacttaaatgagaaaatatctgccatttaaataaacactttgttttaaacatggcttttcaagatcataagaaatatactttaatcttgtgcaaaaaagacattatccaccatttgaatctctgtgcccatatgtttctatgtttagattatgtgtttttacatctcacattaaaagtgtaactactggccatttacttattgctgagaactcacagacactgatattttaaatatttaaacaagtaaaaatgcttattcagaaagaaaatttttaattcaaactagaagacttcaccttcaagtaggtcctggcctctaaccagcggaaatcacgctatcgtgttaatcacttccccgctatccgggttgccttatttttcaacatatgcctgtctttaattttcccgccacaacaattaggaacattatgtgtggtttagcaaaaagcctagaagtgatttctttgtggctagagaggcacaggagcagagtgtgctggctcttccagcataaacgcgtttccttggcgctccttccattcacgcatacttttagctgcca

SEQ ID NO: 904512 - DNA, 666 bp, Homo sapiens
gcatggggaggagttggactagaagatctttgatataaatctatttcatattgcttcaacatattttaaaacctgcttcacaggaaagtagttttataaccaaaattacagtctctgactaactacttttgtagacttgcattgcagtacctgaactgcacctccatatttatatactacacaatattcccagaacccagctggtattgatagacaaaagaagacagtcagttgtcaagtgctcacttcagaaaaacatcctacaacaattctactaatcagtgttctgtcagtaatgcactttcaatcagcaatgcattttcaaaatgtatttataatttcctaacccatagaataaagcataagttactcatgaaaacaatcattagaactttcaaaaccagtttttaaaaatagtctgtaagtgcatatgcaagagctgcacttgcttgtcaataccaagtgggcagtctggttgaggagataaaggaggattggaaacacagttgtggcttccttccagtattgtgtgagagggacttcatctccacctgtctttgtgtcattaactgtttagccaaaattaataaaagtatagaatcagggatatttggaggaacaatttcataggtcaaatatraatttactaggaggctaaattatgtc

SEQ ID NO: 904513 - DNA, 569 bp, Homo sapiens
aagagacacaaacattcagacgatagcaaccctattctgagctattataaacaataggtacttctttaccaagtscatgtttaatcccactccatgccttccaccttttagataaaaattgtatggataacttattatagaaaccctctacagagagcaccctatctagagcaaaacaatgattccttgattcttcactctaatcctctaatttcaaacccaattctataacaagcccttcctaatgggcttgacaccccatggtttctgatcatgtgaaatctctgttgttgcatcagctactgataaacagaagtctgttcaactacagaagtgtccttaagaccttggctggccagcactggcaatagtaacattctaaaaagaggttaggcattgtccctacagtctgttacttctacaaatgccatgaggagctactaccatttattgagagcctataaaatgtaatgagtttgaaaaagtgcttaagaattgttacatttaacatgtaagtcataacatcataggaaattgttttcagtgctttgtatatcataacacattta

SEQ ID NO: 904514 - DNA, 579 bp, Homo sapiens
actagatttttttttcagcttgtttccacatttttggaacagtggttgtatctatctgaaagttatacaaattaaaaaaacaagaatgcatataaaatacttagcaatgtgccaggcacttattaagtcactgaataaatgtttgttgtttattagattactatcaccaccattctcctattcttacttaatattaagactcactgtaaatactttagagtttagctcaggaaaattctttctagggacaaaattattttattaagtagtctcctggtattttgggctttattgctaaaattgaataatttaaactgttgcgaatagcacaaaaaagggagaagtcatatggaaagaagagaactaaggatggaagtaaaacacaatagttgcatatgaaatgttagggagagaagaagagcagagaggaagcaagcacttctcaaagtgaacatacaactaagaacaagaatcagaatcccccagatacagaaataaagtcaacgttcaatttcagtgttagccaggggctcttgttgttgkttacttgttttagggaaaaatacttcgagtctttct

SEQ ID NO: 904515 - DNA, 563 bp, Homo sapiens
aagataagaaaactaaattaactatgttattaattacgttatttacctgtaattataatttttccactagtagaaacatcactgaaacaatttcctaagtgttttttccctagttttctacgtgctatgtaggaatattgagcagttcgtagacccacgtttcaaccaatttcaagattttaaatttctgaatagctggcatatatttgctttaagccctgtcacaatttccattatttttaaactttttgttttggaattttaaaatcatatataaaagtgtagtttggcatactataacttccctttgtatatctagctctaacagatatcaatatttttccagtcttgtttaatctgactcattcttcacttttaaaattatctgggtattttgttaaatatttcacaaaacagaaaaactacattgtgatagttaatcttatgtctcaatttgactgggccatgggatgctgatayctggctaaacattgtttatgggtgtgtctatgatggtgattcagaaagagattggcatttgaattggtagactgagtaaggca

SEQ ID NO: 904516 - DNA, 604 bp, Homo sapiens
gtttaagattaagcactgaaggactgaagataatattaaggaaatgaatttgcttattactatgttattagaatgtaactttgaaaaagccatgtgaatgatattatcctcagttttacttatctgagtaaatattaatatatgagtaatgctctgaagactaagtaatataatatctaaaactttctagcataaagaatgaccaataatacctctgtgataaggtttagttttcttcccatattcactgtcacatgtattggaatagaagacagttcctttcagtgactcttcttcaaagaaataagaatatccatatctacatatataattttatacatctaaaacaataaactgcttattgaaataactgtaaactctccttttcctcctttttaatagaattgcagagtagctcttgtggaaatcctggtgttccacccaaaggtgtattatatggcacaagattcgacgtcggggacaagatccgctacagctgtgtaactggatacatccttgatggccaccctcagctcacctgcatrgccaattcagttaatacagcttcgtgggattttcctgttcctatctgtagaggtaaaat

SEQ ID NO: 904517 - DNA, 506 bp, Homo sapiens
atgcaaaagcccgtctctactaaaaatacaaaaattagccaggcgtggtggcacatgcctgtaatcccagctacttggaggctgaggcaggagaatcacttgaacccacgaggttgaggtttcagtgagccgagatcgtgccactgcactctagcctgggcagggggagactccatctaaaaacaaaacaaaacaaaacagctggaagatgacatccctgggacagggacttccatgtcatgtgaaaagtaggagtaaatcaatggaggcagggaaatgtagggtgtatttaggtaagagcagctagtttggattggatagtgtacattagagacataccatgggtgagggggtggatgtggacagtgaacytaaacgctttgtggtagcaggtcacaggggccgtgcatacatgcttaaggagattggatgttacaggaaatgggaagctattaaagatttctaagcaagagaatgacaggtcaaatccgacatgatttagaaaa

SEQ ID NO: 904518 - DNA, 638 bp, Homo sapiens
agttttacaggggcacacttcctcatcagtatattcatggttttttttttttactgtctgtactttgcacagagcagaattgagttttcttgtctctctagcaaggcactttttcctgtgtgctgtcaatggrggttttaattgcagaatcaaagctcatattgcgggcactttcatagctaccctatgctgccttccttaaaagataaaaaatctttgttagtaattggaactcatagccccttgactgatcaggtgagctccaggttttgttacttccatggccaaacattttagaagaaattaactggaagaatgggaataatggatgggatacaaaagtttgtgtgataagtaatgtgagaaagaagcaaaggagccagtgccatattttcatgcttacatgtacatggtaagtttacgttttctaaactagtaactgatcaatacattgcagtttttggatggacacataaaatacataaaatcagcatgacatttcttattgggagaatgaatgcctttgtggaagaaatgcatttttagggcaaaaagactcaggaaaaaaatctaggcaatggcttagtttagtttctcatttgggtgggtgcgtgtttgagggagtgttactttcctgt

SEQ ID NO: 904519 - DNA, 610 bp, Homo sapiens
ttttcactacatgcttcccaaataaccaagttgtctctttctacagagasgggaatctggatctaactgtaaataaattaatatttacctggatctgagtggacagcttcatttaacaacacatgaatatgctcctcccataattaaaggccttcaattatgaatgttatgtttcatggcataaatctcattgaaaagtaacttaaagcaatttaaagtatggatgggctctgatgaagagttttttagagaggctgtgatatttttataatgcagggttccaggaatagttgtgaaatttacatgtcattattttgaagaaggtatatggcctgaaaataagtagaaattagctgatgaagctgatacacaatatgaataaaatgaggacaccaaaataaacatggtccttgagctcctggaataaaatgtcatgtgccttttatttttgactgtttattcaataaatgttagttgagtactgtgctatgtgcaaacatgaatgagatacaccttggattcatacagtgtcgggtggggagagacaccaatattgatatagacagtacagtatgggaagactgaaatgtacaaagcgcttacaagaaga

SEQ ID NO: 904520 - DNA, 591 bp, Homo sapiens
aagaagagctggtaccattcctagtgaaactattccaaaaaattgaaaagaagggactcgtccataactcattctatgaggccagcatcatcctgataccaaaacctggcagagatacaataaaaaagaaaatttcaggccaatattcttgatgaacattgacgcaaaagttcttaacaaaatactggcaaaccaaatccagcagcacatcaaaaagcttctccacaacgatcaagtaggcttcatccctgggatgcaaggcttattcaaaatatgcaaatcaataaatgtgattcatcgcataaacagaactaagggcaaaaaccacataattatctcaatagatgcagaaaaggccttcaataaaattcaacatcacttcctgttaaaaactctcaataaactaggtattgaaggaatatacctcaaaataataagagccatttatgacaaactcacagccaatatcatactgaatgggcaaaagctggaagcattccccttgaaaactggcacaagacaaggttgccctctctcaccactcctattcaacataatattgkaagttctgactagggcaatcaggcaaga

SEQ ID NO: 904521 - DNA, 599 bp, Homo sapiens
gccactgcttttggtgttatacacatgaagtctttgcccatgcctatgtcctgaatggtattggacaggttttcttctaggatttttctggtcctaggtcttacgtttaagtctttgatccatcttgagttgatttttgtataaggtgtaaggaaggggtccagtttcagttttcttcatatggctagccagttttcccaacaccatttattaaacagggaatcttttctccactgcttgtgtgtgtcaggtttgtcaaagatcagatggtggtagatgtgtggtgttatttctgaggcctctggttttttctgaggtgttttggtttttggaattttcagcctttctgctcggtttctccccatctttgtggttttatctacctttggtctttgaggttggtgacctcagttggaaatgcagaaatcactcatcttctgctttgatctctctgggagctgtagaccggagctgttcctatttggccatcttccaacctttatgttttaatttatggttatcttttcacttaaaaacgtaataaattatgttgatagtgttgctaattttaagctrtctctgcattcctgaaataaacc

SEQ ID NO: 904522 - DNA, 659 bp, Homo sapiens
cttttgaatagctagaaaagatgattttgaatgttcccaaaacacaaaaacatgataaatatttgatgwaatagatatgctaattatcctgatttgactactatatgttatatgtatagaaatgtcactatgtaccccataactatctacaatcattatatgtcaaattataaaaaagaacagatgggtaatgtcagtagatagacagaaattctaagtaaaaataaaaaagaaatgctagagataaaaaaacactgcaatgatgatctttgatgggctcattagtggattggacatggcttagaaaaaaatctttgagcatgaagatgtgttaatggaaactttgcaaactgaaaatcaagaagaaaaatggctattaaagaagaacaggaaatccaagaactgagggacagctacagaaggcataacatacttataatgggaataagaatgagaagaaagaaagaaacgagaaatattttaagcaataatgactaagaattttcccaaattaatgtcagacatcaatctgcagatccaggaagctcagagaacaccaagcaggataaacatcaaaaaagctacatctagggatatcatattcaagctgcagaaaatgaaagagaaaaaaaaaatcctgaatgaagccagaggaaaaa

SEQ ID NO: 904523 - DNA, 600 bp, Homo sapiens
catatttgaattctctttagcaaaaaaggagacggccatagaatagccaagctgggaaagctaccctaacctatctccaactccctgccattccataaacattgtctcctaatagtccaggaaaactacctcatttaaacatggaggaaagaaaaatatgaatcaaattcatatttttataaaatacagaaaatgacaaaataatttgaaagaaaatgaataaaggacatagaaaaatgaagtctaatacacgtattactgaaaccctgaaaaagaaaactaagcagagaaaaaaatatttgtaattctaaaagcaacttttctcaaataaaagggctaaactgatgtactaaatgggtgtactgtgtatttgggaaaactgacccaagaataatcaataaaacaaatcatagtaagactactggattttaaagataaagaaaaaattcctttgcgtaaccagacaagtcacttatgataaaaagtaagtcaagacggcatcatatttcctgacggcaacattttattctgaaacagaatgaaatagctgggcatggtgatgcctgcacctgmagtcccagctacttaggaggctgaggt

SEQ ID NO: 904524 - DNA, 657 bp, Homo sapiens
cttgtctgtttatcttggtctgctatttgaagggcttaggatgcctttccttgtcttctctattctgcctcagggacaacttaagtcctatgtaattagttttgataatactttatatcaaagcatataactatatgacttaatttattacatacttggctttatttaactatttcatatttattattattatctcttcagcgacttcccaggcctataaaatgccatctgaagtaactgctttcaaaattttctttctgaatatttttataatgtccagcaccatgggttaatccagtaacatgaattatagatacttaaataacatattaattggtctaaattttaggtgaatacataaaggaaggaagaaactcaatcttccagtaatatatacagtttttggaaatataaatgctgcatggctgatcatgctatttttctactcatcctttcttccctcctcaagacattttctccaagaagtctttttcaaaacttcgctttatggtggttttggaaaaaataaaataaagcaggttgactcaggggtggcagaaaagaaacctttagccagccaaaaaaaaaaaaaagtctcccttactccctcagcagagttggattcccaaatastcacaaatcaacaacagttaatga

SEQ ID NO: 904525 - DNA, 616 bp, Homo sapiens
ccataattgtcaagtatgggaatactatgagctctggtccattagttaataatctacataatagtttccaaactaatttttgtgtaggacccattcaatrtgttttaaaaattctaaatatagtcttggtttaaaaccccaaagttttcaaaataagaatgattcttacaattaaagatggaaatccatcaaccatagacgtgatataattaagtaattcactaaaaacaaaataccaggagataggcactgggtttctcatttcactggacagtccctgaaaactcaaatgccgcaggatctattgtctcagcctgcaactgtgtttgccggttaaggtcacttcaatgtgaacagaaaggggaggaattctgctatggacatttaagaaagtataattctgccatgggcatttaaaacagtatttttttcacagtcgttttctacccatcttccctcagccccccgatattcaaacatatgctcagtactttcaggaaggaaggaaagctacccaggaggtagaaaatgagcgtgattcaaatgttttgtcagctggagttctagccagcaaccaattttcacaaactcttgtactttattcaaattatcataa

SEQ ID NO: 904526 - DNA, 603 bp, Homo sapiens
aagattacagttggactttttgtgcttctaatggtaatggggaacacaataagtaataataataaacagcaactttcaacttgacttttgtccaaaccaaatagaatttgaaatgtagatgttttgacatttgcaaaatgaagaatcattgtacttttgcatgatcctaaaaagttccccattcctaacacagcgtgtgttaggaatacaatactactagattgcatcatttttactgttattggtcaatgcagcttgggtacattcaatcactattcgttgactagctctttacccacaggaatagactgaactacccacaggaatagactgaactgaccttgttctctgtgggtgagggagcctgttcctaagacaaaaaagcatgcagcttctgccaagacccacttccttcctgagtcattttggatgcaaacatccttggcttcatctgatggacagaggatgagaaatctatttgtcaaataaacagggtaaagagataaagaaaaaaatcacaaccactattttgtagcaagctgggaaggatgagcattaccttagttttctsttttatgggagagaaaaagagactgggaaaag

SEQ ID NO: 904527 - DNA, 623 bp, Homo sapiens
gttcctaatcttgaaacaaaaccttgaaatacaacaaaatagatcctccwtaaagcataaatctcacagggcctataaaacaataacacaatgggaaaaaaatgcagtgtattcaggcaacaactagcatgatgaataaaagagtacctcacatttcaacactaatgtttaatgtaaatggcctaaatgctccatttgaaagatacagaatggcagaatggataaaaatctaccaatcaagtatctgctgtcttcaagagactcacctaatgcatagggactcacataaacttaaggtaaagggatgggaaaagagaattcatgcaaatggacaccaaaagcaaaaaggagtagctattcctatatcagacaaaacacattaaagaaacaacagttaaaaaaagacaaagagggatgttatataagaggatcagtccagcaggaaaatattatcatcctaaatatatatgcacctaacactggagctcccgatttatgaaacaatattattagacctaagaaatgagatagacagcaacaaaataatactgggggacttctgtactctactgacagcactagacaggtcatcaagatagaaaggcaacaaataaaaaatggcc

SEQ ID NO: 904528 - DNA, 642 bp, Homo sapiens
cctgatctctttttctatttattttacagatttacagcccacatttattgtgtgctcactgtgtaacgtgttctgtgttaagtgcttgatactcatgcatttgcaaaaactctctgaggtgggtaattattttacagaataccattttataagcatccttaaatgcttttgattgtagcagtaagtaaatagatgaatacacaagttaatctctaacgctcatctatctaattcttatatagagagtagtcaaactatacatagtatacacaatgagatgagatattacttaattctttatcagtctggtttgcataggggactggtacatgacatgttcatgagtggatccatcggatagctgaacatagcacattctgcttaaccttctgaataacacgagaacaaatctatcacatgccccttcagtttttaggagagtaatggaggagagggatttcttgacacaaaatggaaagggaaatacccaaattaattcagatgaagtagagatgtcataaacattaggtaactctaggaaatacaagctcccagatttttcaaaaggcactcacaaaatgaatactaaatagcataaaatgmtaacatcaccaggaagatggctctaggtctcagtacaag

SEQ ID NO: 904529 - DNA, 659 bp, Homo sapiens
aatatatactcttactacataaattttcttactgagctatttcatacttctgtgtgtttgctcttattgttcccaatgtatttctgcctgattgccttcttctacatttcccaaagcctgtttggtaaacacatcaatttctggaagcaacacctgctcagtttttcatctgaggttaatcacttcttccttttggcccacattttatcttaacctcatctcagtctccataatgttgtatcgaatatattaatttacatgtctctttctcctttctatgttgtaagatgctcaagggtgggagatgtgtataattcactttacattctcatcttgggataacagatgtttgaaatacacgtgttgaaagaatagatgaacaagtgaatgtggtattgctagatctcagtcctgtttgactagcaagtagtgtagcaggatgtcaagggggttggaagtaaggcattcaaatctgagaaaataaaaggtgcaaaggctcagataaattaattccatcgagtattgtagaaacttcaagtttagaaaattgatgaagggaacaaaataaataattacagcatggccaagttgctatattgagggatttgaactttatctagaggtgatraagacttgtctcaaggaattgtatctgagac

SEQ ID NO: 904530 - DNA, 616 bp, Homo sapiens
agaatcaccaccaagctgcacagasagaggtcagacaagctaagattatcattagggtttgccaacagtgctatcctttcttttggcacactaactggtggaaaaactttgggaattaaagtagaaacatggcatatctctgtttcccacaatttaacttctcttttgcagaagctgtgttgtgtaagaccctaagcaattccttgttcgccatgttgccaagggacttaattcttttgtctctccagtgatagttaagattctagcagtggctagattttacgaatggtattgatttagctcttcagtgggtacaggattcttttccaactttgctacagccatgccactttgacactgcagaagttcctctccaccacgaaaacacacacacacacagacacacacagacacacacagacacacacacacacacacacaaacaaggaccagcatcactgttccttatggcaaacctgttagatggacaaaagattacattgccttttatctgtgagaaaattgaggtttagagaattcttgaggcttgctgcagattaaaacagcagaataataatacccacccaatcttctgcctataaatgctttgtttttg

SEQ ID NO: 904531 - DNA, 558 bp, Homo sapiens
  misc_feature 1, 2, 3, 4, 5, 6, 7, 8, 9, 10, 11, 12, 13, 14, 15, 16, 17,18, 19, 20, 21, 22, 23, 24, 25, 26, 27: n = A,T,C or G
nnnnnnnnnnnnnnnnnnnnnnnnnnntccccaacccaaccctggccaactaaacagacccctttggcaaaagtgataccagaaaaaacttaaaaactgagttcccagccctgacagaatgagagstcagacacgactcattataccctcctcttttgtgtggtttagacacaactgaccagcattaaagttaaagtagagatcataagactgatagaataggctctttgtggcaataagataccaaattataagcaggatctaagtccatgccaaggaaggtttaagtcacgcttcctttcatttaaagaagaaactatgttttaactgccacaaggttttcctttttctctagcagctaaacaagcactgccccgagataagaaatattcaaacaatttgcagctccactagatgctgacaaactgtacccctgttccactaactgtaactatagctttgactgaacgtgagactgattttagtaactttctcctgataagaccaaccatggactcattctagcccttttacagagattgtgcacttctgtgctct

SEQ ID NO: 904532 - DNA, 661 bp, Homo sapiens
tacccaaaggaatataaatccttccactataaagacacatgtacacatatgttaattgcagcactgtttacaatagcaaagacacagaaccaacccaaatgcccatcaatgatagactggataaacaaaatgtggtgcatatacgccatggaatactatgcagccataaaaaagaatgagatcatgtcctttgtagggacatggatgaagctggaagccatcatcctcagcaaactaacacaagaacagaaaaccaaacaccacatgttctcactcataagtgggagttgaacaatgagaacacatggacacaggaaggggaacaacacacaccggggaccgttgtagggggagcaacgggagggagtgcattaggacaaacacctaatgcatgaggtgcttaaatcctggatgacagtttgataggtgcagcaaaccaccatggcatatgtatacctatgtaacaaacctgcacattctgcccatgcatcctggaacttaaagtaaaataaaataaaataatagtaataataaaagatattcttggcttaaaaaaaatagtaaggggaagagagaatacatgccagaaaggcaacaaaaaatacccttcaaaatgatttccaggcaccatcctatamtatgatatcaaaatcactctcta

SEQ ID NO: 904533 - DNA, 511 bp, Homo sapiens
atgtgctgcatgcacaaccgactcgcctcctcctcctcctcyattccctcttctgttgctctttgccacttctccatatttatgagaggggaaggatgaggggtggctgtcatggccttattatctgtttcttccaagtatgcctctgccttttacactctctcattgtttctttttctgccagcccaaaccccatttttgtgtgtaccaagctaactctgccagactttggggttgacgaccttaaattggaaaagagaaatacaagcacatgccaataccacacgtataattgtgacaatctatctttctgcacctgagaccaatatctaggcttgcatttgcaaaaatatggtagttgcttatcagctgtgtgaatttggccaagtttcttaacctctctcagcatcagttttcttgcctataaaatggagataacagtaactaccacataggtataatattaagaataaaagaaatagtcatatacatctgttatagtttctggcac

SEQ ID NO: 904534 - DNA, 632 bp, Homo sapiens
tgtagtttacaggccattttagattccaattaccccctttgaaaactggaaaaaatttgacaagtccttcaattgcaatgaccatatcaattgatttagtgcttctcaaaattccccaaaggcaagttcaggttaaaggtcgggttactagtgcatgacaccttactcagtaggatcaggatcagcagtttccaacagcacaacggacattatttccatttctcctgtccaagtattgcacagacaatttcacgaatacagttcatatctataaaagaggtaggactagtcacaaagtaactctgaatgaaagagtttgggggttcagcacgtacatgaaatccatgtttgcaagaattagatgctctgctttttaaaacttaaccactcaaattcattttaataaatttcatggcctgaattctccatacattacttccataaaagcatttaggtaactatgctctacaaaagtgaatttaaaaactacagatgtgaatatcacaattatttgccatagattggattttggagcttctcaaagtatggatgcaattatctattatttcctttaggttctttcatgtctgtggttccatgttttstcattgtaaacttctgttacttacaca

SEQ ID NO: 904535 - DNA, 563 bp, Homo sapiens
ttggcatatgatcatgcacagcttggacagagggtccatggtggaacatagctctagaaagaagcatgagaggagtctagcataacaagaggcaaggtctggagcaaggaggaggtgctgcacatgaaaggagccagcctggatgtagactgattcgctgtaaaaaagcagtcatggataccaagcaaagaatgaattatggagctatgtggagagaaatgggctcagggcaaatttattatgctccatttccactctgctagcaggctgcacagtatctcagaggtacaggtttactcaggactgaaattttacatccagggacagtatctctaataatctaatttggtgagataagaaaatcatatcttgtaaaccgatcatccctttccaaaagcccatataaaagtttataggctgttgaggtgtctagcctagcgcaagcttctattataggcaaagcagagacaacacacttaaagatgaaattattttaataagaatgctactactcggtatgtgcagtttgttctttacaacytgaacttcataaatttttataa

SEQ ID NO: 904536 - DNA, 587 bp, Homo sapiens
ggtggttggattccaaacctgcaaaggaactatcatgaggggcaagtttctgccagcgggtatatcccatcccagcaacactgttctgagcccctcagcaagattccatgtcctggtgcagggagtcactccttgtactcccaacaagctagccagagtactcctgccccgtcagcctccctccccaccttctcatcactgtttgctgtctctcctttgagcgcctccaggtctctaagtctttggtgtaagtggccctgccaactctctcttggtcattcaaagaacagtctgtgtaaacagcaccaagttgacaccatctggcccaattcccctgcattttcttggagagtgattgtcttgtgaagcattgagacaaagccttatttgaggagagtccttggtggggaaacaatagcttctgtgttcttcacaagaacctctttggagagcaaactaaacttgggtgggtggayattgaaaaggcttttccaagggtaggaagcaaaatgtaattatcctcctctgcaggagtttttctgttgacatttcctgctcttaacaaagtatagtgtgtgcccttaagt

SEQ ID NO: 904537 - DNA, 587 bp, Homo sapiens
ggtggttggattccaaacctgcaaaggaactatcatgaggggcaagtttctgccagcgggtatatcccatcccagcaacactgttctgagcccctcagcaagattccatgtcctggtgcagggagtcactccttgtactcccaacaagctagccagagtactcctgccccgtcagcctccctccccaccttctcatcactgtttgctgtctctcctttgagcgcctccaggtctctaagtctttggtgtaagtggccctgccaactctctcttggtcattcaaagaacagtctgtgtaaacagcaccaagttgacaccatctggcccaattcccctgcattttcttggagagtgattgtcttgtgaagcattgagacaaagccttatttgaggagagtccttggtggggaaacaatagcttctgtgttcttcacaagaacctctttggagagcaaactaaacttgggtgggtggacattgaaaaggcttttccaagggtaggaagcaaaatgtaattatcytcctctgcaggagtttttctgttgacatttcctgctcttaacaaagtatagtgtgtgcccttaagt

SEQ ID NO: 904538 - DNA, 607 bp, Homo sapiens
tacctcatgaaggtatagtagcgattcctctctaggggaccaaatgtgcctgaaagtggttttggtaaattcagggaaattctaactaaactcactgtcttaaaaagtaaagaataggagcacatagatatgaataattgtattgttaactttgacttttattctgtgatattacaaagatattgcaattatataacactctttcaataaaatggtctcaattataactatgggtttcaaaggaattaataataataaactcatgtcccttctgccatgatagacaaattagctgatatccataacatgtttagaactttcaaaatatgttgttatttaaataccactaatttttggtaggattagttttgttcttgctgtgaaattgttagtggtggtgatggcagaagggttttattttgctttatattttttctttttcattcaaagaggagattttttgataacttattcaaactgtttataatttaagttgaattgttatcaraactgtaagtgaacatttgatgcaataatttgggtaatttagggaagaaaaagtaaaagatttgcctgaaatatttaaaccctaagcttgttttttgtt

SEQ ID NO: 904539 - DNA, 450 bp, Homo sapiens
gagattaggaccttccttctttccttccttcctttccctccgtctttcctttccctcccwccctctctccctcccttccttccttccttccttcccttttccttttatctttcctactaacatttattagctacctgtgggtgtaagacagagtgcaagttgctgaagttacagcatatctaaatgattagtgttttaaaatttttgtgagtcataggtgatgtagaaattaagaagtcacactttcagagttgatgttagttttgaatgactgtacttaatttcatttactttgttggagtttcactgcctttaaaaattctgatgacataattaagtgtaatacaatatattcctggtttgctaatcttagcccttaatatgttgctgaatgattacatgcccaaacgtcagtgaaaatggttctattcctaattaacatagaaattt

SEQ ID NO: 904540 - DNA, 498 bp, Homo sapiens
tatccagaatctacaaagaactcaaacaaattacaagaaaaacacaaacaaccccatcaaaaagtgggcaaagtgtgtgaatagacacttcccaaaagaagacatctatgcagccaacagacacatgaaaaaatgctcatcatcactgatcatcagagaaatgcaaatcaaaacctcaatgcggtatcatctcatgccagttagaatggcaatcattaacaagtcagaaaacaacagatgctggggaggatgtggagaaataggaatgcttttacactgttggtgagagtgtaaattggttcaaccattgtgtaagacagtgtggcgattcctcaaggatctagaactagaattaccatttgacccagcaatcccattactgggtatatacccraagaattttaaatcatgctactataaagacacatgcacatgtatgtttatttggcactattcacgatagcaaagacttggaaccaacccaaacatccatcaatg

SEQ ID NO: 904541 - DNA, 591 bp, Homo sapiens
cattcagcagccatcaacatcaaggcaagaccctacaccagcaaaaagattatgactcagtgaagactgagataattgttagcatttttgagcaataaagtatgttttaattaagatatgtatgttgtttttctagacatactgctattacacttaacatacaatgctgtagtgtaatcataacttttatgtacactgggaatccaagaaattcatttgacctgcctaactttgatactcattctatggtggtggtcaagaactgaacctgcagtatctctgaagtttgcctgtaatatcagtttggaaagtccctgatttatggatcttttaagctcactgttacattgttataagtaaatacattacaaagctttttaaagactatttaatttaatattttacattggggaaaatgtcaatttttaatatcattatcattttgaagtacctttgagatagtggagattctagggaaattttatcaccttttgatgtttcctatayatctatgagacaaaagaacgcagtgtaaaaaatgtagcaaagttttgatctctgcctttattttctgatactaatcaaaatttg

SEQ ID NO: 904542 - DNA, 580 bp, Homo sapiens
atcacattgcctgacttcaaactacactctaaggctacagcagccaaaacagcatggcactggttttaaaaaacaacaacaacaacaaaaaaaaaacatagacaagttgaatggaatagaaaacctagaattaaacctgcacacctacaaatatctgatctttgacaaaatcaacaaaaataagcaatgaggaaatgactccctattcaataaatggtactgggatagttggctagccatatgcagaagaaactggaccctacctctcaccacatataaaaattaactcaagatgggatttaaatgtaacacttccaactacaaaaatcctagaagaaaacctaggaaatacccttctcaatataggctttggcaaagaatttatgactaagttcccaaaaacaattgcaacaaaaaaaaaattgacaagtagaacctaattaaagagcttctacacagcaaaagaacttaccaatggagtaaacagaaagccaaaagaatgggagaaaatatctgcaaactatgcatcgcatctgacacrgttttttttgtttgtttgtttgtttgtttgttttttgac

SEQ ID NO: 904543 - DNA, 559 bp, Homo sapiens
aatttctgaagaggaactgaacttagtctgtcatttgccaatactctcagtagctgagaaaatgagtggtttggtcctaaaaaggggaaatctgagcagtacatcccaaaataccgtggcttaagtctctctcaacaatccaaaaatagatgagttcaagagaaagtagaacagtggttactgggggctggtgggaggagtgagcggagaggtgtttaataggtatagagttttggccgggtgaggtggctcacgcctgtaaacccagcactttgtgaggctgaggcaggcggatcacgaggtcaggaattcgagaccagcctgaccaacatgatgaaaccccatctctactaaaaatacaaaaattatctgggcgtggtggcacgcgcgtgtaatcccagctactcaggaggctgaggcaggagaatcgctagaacctgggggkgcagaggttgcagtgagctaagattgcgccactgcactccagccggggtgacagagtgagactctgtctcaaaacaaaacaaaagaaaacaaaaaaataggtgtagagtttcaa

SEQ ID NO: 904544 - DNA, 655 bp, Homo sapiens
ggccctgtgaggtgtcagtctgcccctactggggtgtggctcccagttaggctgcttgggggtcaggggtcagggacccacttgaggaggcagtctgcccgttctcagatctccagctgcgtgctaggagaaccactggtctcttcaaagctgtcagagagggacatttaagtctgcagaggttactgctgtctttttgtttgtctgtgccctgcccccagaggtggagcctacagaggcaggcaggcctccttgagctgtggtgggatccacccagtttgagcttcccagctgctttgtttacctaagcaagcctgggcaatggcgggcacccctcccccagccttgctgctgccttgcagtttcatctcagactgctgtgctagcaatcagtgagactccatgagcataggaccctccaagtcatgtgcgggatataaactcctggtgcgccattttttaagcccgtcgtctgtcacccctttctttgagtaggaaagggaactccctgactccttgcacttcccgagtgaggcaatgcctcgccctgcttcagctcaygcacagtgtgctgcacccactgtcctgcgcccactgtctggcactccctagtgagatgaacccagtacctcagatggaaatgcagaaatcaccc

SEQ ID NO: 904545 - DNA, 655 bp, Homo sapiens
ggccctgtgaggtgtcagtctgcccctactggggtgtggctcccagttaggctgcttgggggtcaggggtcagggacccacttgaggaggcagtctgcccgttctcagatctccagctgcgtgctaggagaaccactggtctcttcaaagctgtcagagagggacatttaagtctgcagaggttactgctgtctttttgtttgtctgtgccctgcccccagaggtggagcctacagaggcaggcaggcctccttgagctgtggtgggatccacccagtttgagcttcccagctgctttgtttacctaagcaagcctgggcaatggcgggcacccctcccccagccttgctgctgccttgcagtttcatctcagactgctgtgctagcaatcagtgagactccatgagcataggaccctccaagtcatgtgcgggatataaactcctggtgcgccattttttaagcccgtcgtctgtcacccctttctttgagtaggaaagggaactccctgactccttgcacttcccgagtgaggcaatgcctcgccctgcttcagctcacgcacagtgtgcygcacccactgtcctgcgcccactgtctggcactccctagtgagatgaacccagtacctcagatggaaatgcagaaatcaccc

SEQ ID NO: 904546 - DNA, 566 bp, Homo sapiens
taaagcatatctcgacgatgtcacttcctagctcaggaactttcatcatttccattgccctagcagaggctttcaaagtgtgcagaatcagctggagggcttagtatgctgcagattgctggccccgccccragagatcctcaggagtggacccaagccagtcacttttaaccagttcccgtaggatgctgatgctgctggtcctgtatccctactccaaaaacactagcttcataaattaacaaatatgtgagccctttaaggtccttgggaagcagggcccacccagcctcatcactcacccctaactctcacctcccaccttccaagcacactgaacacacctcccctgcctgggcacaaccagtgctcccctgtcttcctgccttttccccgtcccagctctttctggtctgcttggcaaattcctggcgatcattcaagatccagctaaatgccaccgcctctgagaagcctcctcctctccccaagcagaattagatacccctccctctgtattttcatagcactccatacttgactctaactcacagcacacatgatat

SEQ ID NO: 904547 - DNA, 566 bp, Homo sapiens
taaagcatatctcgacgatgtcacttcctagctcaggaactttcatcatttccattgccctagcagaggctttcaaagtgtgcagaatcagctggagggcttagtatgctgcagattgctggccccgccccaagagatcctcaggagtggacccaagccagtcacttttaaccagttcccgtaggatgctgatgctgctggtcctgtatccctactccaaaaacactagcttcataaattaacaaatatgtgagccctttaaggtccttgggaagcagggcccacccagcctcatcactcacccctaactctcacctcccaccttccaagcacactgaacacacctcccctgcctgggcacaaccagtgctcccctgtcttcctgccttttccccgtcccagctctttctggtctgcttggcaaattcctggcgatcattcaagatccagctaaatgccaccgcctctgagaagcctcctcctctccccaagcagaattagatacccctccctctgtattttcatagcactccatacttgactstaactcacagcacacatgatat

SEQ ID NO: 904548 - DNA, 510 bp, Homo sapiens
tgcagtgagctaagatggcaccackgcactctagcctgggtgacagagtgtgactctgtttcaaaaaatgaaaaaaaagtagctgaaaagctgtagaaaacaaaattaaaaaatccacacagggaaaaacaggtgtaaaagagatcaggtaatagactatatcttaatttttacttataaacattttcacatctctaattctgcccctccacactgcctctcatatacaattatgaattaagcacttgcctcaggatgaaaaacagccattcctctttcatacttcatatcacactgtggtgcaatgatatcacccttctaatggtcctttgagaagtaagagtggagaattaaggccaaaacacataagcagaaaatgtggaaaaaatctgagaaaggatatgctccccagtgggccagactgtccagatcattctaagtcttattgcagtaaaacagactgggacaattgaaactaggtttaaaaaaaaaaaaaaaaagagagagaga

SEQ ID NO: 904549 - DNA, 560 bp, Homo sapiens
tcaaaatatggcactttgttctgcattacaaatttgttcaggtagayatgccttctcctcaatgattttattaatggcatctgagaactctgttgcttcttggtcagcagatatggcttctcctattatcttaacattttttaagccaaactgttttcttaaattattaaaccatcctttgctggcattaacttattcagctttagatacttcaccttcctttagctctgagttgttgcaaaatgactttattttttttgagctatattagattctataggtatgcttatagcaatcttgcagactccattgccactcgcgtgggcagatctggaagtgggatggtccttctaaattgagacaaaggattcagcctttgtcacctcatatccaccagtcataaataatgagttagctctttttgggtgaacccatttctgaagaggaaattcgctcattatccatcagcaggtaatactctcaacagctgaggaaatgattagttcactcctaagcatgacatctggataatgtaccatggtttccactgcttttcaaac

SEQ ID NO: 904550 - DNA, 578 bp, Homo sapiens
atctcactttgtatcacaataaacaactggggaccaatacccattggtaaaggggcaacgctgatatcttcattttacttaattttttaraagtcttcacacaaagtagaaaccataaattaatagcaacagataaaacatcaaaagtaaaaaagagaaaatgaaaacacactataaaataaacagaaaacaaaataagatggaaggcatggtttaagatatttatgttgactgagtattgggttcagtgacccagttctcccactggattaagaatcaagtcccatctatatgttgcttaaaataaactttcaaaaagacttttagcaatttaaatatagagatacagataagatggatgttaaaaggatagaaaaagatttataatgaaagagtactcataagaaacctggagtgactatataaatgtcagacataataaactttaggataagatatattactagagacaaacagggtattttatccctctcaaaatcccaattcaatttttgtaggaagtaccatgcttattcccaaagttacatggaagcaaaagagacataaaatagtcaaaa

SEQ ID NO: 904551 - DNA, 607 bp, Homo sapiens
actttaggataagatatattactagagacaaacagggtattttatccctctcaaaatcccaattcaatttttgtaggaagtaccatgcttattcccaaagttacatggaagcaaaagagacataaaatagtcaaaacaaattttaagtagaggacccaagaacattctcatgacttaaagttccactataaagctacagaaataatcaaaatagtgtggtattcacagaggatagacatataggttaatgaagcagactgaaaaagttaagaagtagaccaaaaaatataccataaattggtttttaacagagataccaaagtgattcacgggtaatagtattcttttagcaaaagctgctgcaacaaatgaatatcaatgttgggggtagggggcagagggtacttactttacagaataggcaagcatttaaaaaatgaatcatggtcctaaatgtaaaagtaaaaactagatgccacagaattttgttttatattttcatttagtttaaaatattttctaattgttcttgttaattttttctttgattctcaggttatttagaaaagtgttgttaattgccaratatttagtattatcaaagaca

SEQ ID NO: 904552 - DNA, 635 bp, Homo sapiens
aaaacgtgcacacaagattttgtagcagctttgttcatgattgacaggacttggaggcagagagatggtctatcaagccaggaaaatacatggaggaaacttgggttcgtattgctgcgtggaagaggccagtcaaagagggctgtatattgtgtgattccaactatgtgacattctggaaaatgcagaatgatggagacaatgaataacacatggttgttggcagattaagtcagcaggatacacgcacaaacaaaaaggctgaacacaaagaagtttgcaggaaatgaattcattctatataatgctacactggtgcacatgtgccatcatatgttgagacctgtagaatgcacagcaccagggagtgaaaaccatagtatgaactgttgactttgggtggtgatgaaatgtcaacgcatgttcatcaatgacaacaaatgcatcactctgattcaggatgttaatggtggggtgggaggaagggatttatgagaaatctttgtactttcttttcaattttcttctgaatctaaaacttctctaaaaaatttctacttaaaaatatatttggatatatatgcttttaaaaaattctagtgttctmcagagtaaagcagaaaaaaaaatttacc

SEQ ID NO: 904553 - DNA, 562 bp, Homo sapiens
caggagagaataagccaagttcaaaaagaatcactactgcacagaggagctatgtgtaggggtaagatatgaggatggacggtcaaataatgaccagatcatgaagattttgcattttgtaccacagataggcaggagcaactgtaagaattttcaaacaagtaccttgtcagcaatacaaaaggtttattagctaagattaaatttggagagtaaaagataagtgagtgagtcttttagggccttaactaggtgtaggtgagttctaagggccttaactagggtagaagccgtgtgtgtgtggaaattataaaagagattgtaaggcagtaggatgagcaagatttggcaactgattgggtgtgaggaaagactcagggatgattcccagggtttctggcgtgggtgaaggggctgatgaaggtaacaattcttgagcgagagaacatgggaaagaaacaaatttgaagatagttcctttggaattgtggcacaaagakgtgtgactgcgtttttattatgaggtctaaactaataatggaagaaactgtataaagcaagg

SEQ ID NO: 904554 - DNA, 562 bp, Homo sapiens
caggagagaataagccaagttcaaaaagaatcactactgcacagaggagctatgtgtaggggtaagatatgaggatggacggtcaaataatgaccagatcatgaagattttgcattttgtaccacagataggcaggagcaactgtaagaattttcaaacaagtaccttgtcagcaatacaaaaggtttattagctaagattaaatttggagagtaaaagataagtgagtgagtcttttagggccttaactaggtgtaggtgagttctaagggccttaactagggtagaagccgtgtgtgtgtggaaattataaaagagattgtaaggcagtaggatgagcaagatttggcaactgattgggtgtgaggaaagactcagggatgattcccagggtttctggcgtgggtgaaggggctgatgaaggtaacaattcttgagcgagagaacatgggaaagaaacaaatttgaagatagttcctttggaattgtggcacaaagatgtgtgactgcgtttttaktatgaggtctaaactaataatggaagaaactgtataaagcaagg

SEQ ID NO: 904555 - DNA, 655 bp, Homo sapiens
accaaatttaacaacacattaaaaagatcatttgccattgtaagtgagatttattccagggatgmaaggatggttcagcatgaacaaaccagtaaatgatatatcacatcaacagaataaaggattaaaaccatatgatcatttccttagatgctgaaaaacattcaataaaactcaatatccttcatgatataaaacccttaaaaaattgggtatagaaggaacatacttcaacttaattacaactatataaaaaagcccacagctaacatgctgaatgggggaaaattgaaagcctttccactaagatctggaacaagacaaagatccactctcacttttattcaacgtagttctggaagtcctaggtagaacaattaggcaagagaaagaaataaaaggcatccaaactggaaaggaagaaatcaaattatccttgtttgcagatgacattatcttacactttgaaaaacctgaagactctgccaaaaaactcttaagactgataaacaaatttagtaaagttgcaggatgcaaaatcaacatagatttaattgaattcacctcatgcaagtactgacttaggagaacactattcatatgtacagaatataaattctgggccacaaattcaagcacgtgagaaataatcaag

SEQ ID NO: 904556 - DNA, 580 bp, Homo sapiens
aaaactaacatctaatattatctcttttatttcttaaaactcttctatagcatcctatcattttaggataaagtccaggcacttctatatgatagcgccaaaccctgcatgatgaagcccttgtcgaattctctggcctcatctcttcctacattctttttcatcctatggtccagtcatattgaagtgctaactgcttcctaaaaacacctgactgtttcaagtcctctttgcctctctaatttgtctctttgctaatttgagaatgtgtgtttcttcacttagtagattttaagcctctcaaggaaaaagccattgctaggaggctggttaataatttctgacttttgagacctctagaacacatagatcctctctgattgccagtttcattttgattgccaccatctccttatttcttagctttgattcctaacctagttagtggttgtaagctaagkaatctttatatttggaaggctgcatccctgaatgtcatgtgccaccttctaaatgttttcactgctatagatttagtttaaagtatctacctattacaggttttagatggtcattttct

SEQ ID NO: 904557 - DNA, 591 bp, Homo sapiens
ggaacaatgtaaggtgatgttatttagcrtgattgtggtgattattttgcagtgtatacatatgtcaaaatatcccattttttgtatattctagatagatgcaaaattgatgcaatttttcaccccatcaatcatagagaataaaggatgcatacttcatttgttaatcatatctcaataaagctggaaagaaaataaattcaacacaataatgaaaaaaggtttaaaatactgggaaaataccatgaaacaaatttgagaaatatttctaacacacagccctgtaacacagggcctaagcttttttagtatacaaagagctttcacaaacaaggaagacaaagataagtaacttaataaaaacaaaacaaagtacacaataaggcatttcacaaaaaaaaatgcaattggccaataagtgtttgtacctttaagaatttaaatcattaaaatacattttctacctattagcataatatagatttaaaggtttaatgatacccagtattgactagcttgtgagacataaaccacaaagggaaataggattgtcagaaaatattgcttgcatattggtggaaatgtaaattg

SEQ ID NO: 904558 - DNA, 602 bp, Homo sapiens
ggctaatcggggagctttaatattttctgcaacagagcatagtagaggagttattaggcttggataggtgtatatatatacacacatgtgcgcacacacactgtgcttaggagagcatttgacacagaatgggagctcaatacaaatgcacaccataatgaacaaagccaccctagtcattaggcattgccagaagaaccaaaatgacataagctcatgaaaatgctttggatagttcaagtgctttatcaaaacatggacagtattgccactaattatcattatttatattaattttatttttgagccaattagtactctttgttcatcacagatgacacactcagttggtgtcactgtgccatgaatcgatatactgagagcttaatacactgttagcagtttaatattttatattcattgtgatcaggcagtgaggcattcccactaaagatatggcgaatcaaatgcttcttaccagcacctcagctgcgactgtagacccaaagaggaggggatgagagcacatcatagagtcaytctgtctctctggtcacactcccttgctccccactactaggtagttttaatggtgttacagc

SEQ ID NO: 904559 - DNA, 579 bp, Homo sapiens
tgcttaatgaatagatattagctatctactagaagcttaaatagcaccactttgggagagtgctataaagcaaacaacagcaaaaaaattttctgaaataaaatctttagtggtaaacagaaataaaataatygatttaatgagttatgcatattataacgataaatatgtagtaagtattttaatgtatttgtgggattaattaatacttgcatcattaatactaatgctaatacattaatactaataagatttccagttatttattttttcttcttgtttggaaactctcattgtccatcagttgtcactaaatcaagcctctgttactccagcctgagatgaagtgatcacagttactcatctccagaagtttataattttctaggaacacagaaaaaaaaaatcatcttttttaagcttacagagaaatcaacagtgaataaaagtatttaaacttagcatttattaaagaaatgtaaattttaaataatgaaaactgtcatctaccaccttgacacttgaggagtctgtcctccttggggaggtcatggaggctttcatagcagaagctgtgct

SEQ ID NO: 904560 - DNA, 615 bp, Homo sapiens
acacagcagtaggggctacctgagtcaggagtaagaaccccttcctctcccttgttcaggtgtgctctcaccattgctccatccatgagtcacacctcctatcttttgctgagaaaattctttcagtgctagttcttcttttcggcactgaggaataagcatttatttctaacaatcgtgacattttctccagtgtgcacagtcactgctaccccacagtcagattcctctaaagaaagtgtcactagccttgcaagcaggacaatcaccactgaccagctgaggctggtggccatgaaggggactgtcattccatcactcccctaagaaatcctttctgctagttattggagaggaaaaaacacatttattttattgctggtgaaactctcgaggcaaaagcaaacaggaaaacatattttgcagttccttgggagcccaggaataaatgttcagcttcaatgtaaaaggcacgtgggaagatctcacttgatatgcatttggattttgagcttctagggagaaaggagtcacaaagctgagggaatcattgcttgttgccctctaactgaaytcctctcatgaaaatatgattctgaaggaaaataaaatacc

SEQ ID NO: 904561 - DNA, 646 bp, Homo sapiens
cctgcacagttcaaacccatgttgttcaagagtcaactgtaccttggtcctgagacaacagaaagaggcatcctccatctgcggcatagasaagacagaaggagaatccttgtgggggagggtgtggctggcagtttccacagatggctacctgacagaagttctgggggaggactcaaaggaggccccaactttcccaaggaccccacactgggctgggtggatgaagcctgaactgtgtggacacggggcttcaggagacagtgtgcggggccagcgagtgcagcagggaccagatccccaaaagcaaccggagagaccaccctcacacagtctcagtagtagagggcagggctcttactcactctggaagttgctctgagctacgcagtaaggagaaaaacaaaacacatctagggagactaaaacgacagaaagacagcttgacagggctaaaataaagaacagttaatataagagattcgtgatagagttatcccttcccaggagctgaaggtgggtccagtctttccctcaccctctcctgtgagggcaggaaggcgcagccctactgggctccaaggctccgaggtcccatgaggcctccaggggaaagccaacaagttgcaatctcatcctgaaatga

SEQ ID NO: 904562 - DNA, 646 bp, Homo sapiens
cctgcacagttcaaacccatgttgttcaagagtcaactgtaccttggtcctgagacaacagaaagaggcatcctccatctgcggcatagagaagacagaaggagaatccttgtgggggagggtgtggctggcagtttccacagatggctacctgacagaagttctgggggaggactcaaaggaggccccaactttcccaaggaccccacactgggctgggtggatgaagcctgaactgtgtggacacggggcttcaggagacagtgtgcggggccagcgagtgcagcagggaccagatccccaaaagcaaccggagagaccaccctcacacagtctcagtagtagagggcagggctcttactcactctggaagttgctctgagctacgcagtaaggagaaaaacaaaacacatctagggagactaaaacgacagaaagacagcttgacagggctaaaataaagaacagttaatataagagattcgtgatagagttatcccttcccaggagctgaaggtgggtccrgtctttccctcaccctctcctgtgagggcaggaaggcgcagccctactgggctccaaggctccgaggtcccatgaggcctccaggggaaagccaacaagttgcaatctcatcctgaaatga

SEQ ID NO: 904563 - DNA, 589 bp, Homo sapiens
gtaatctcttatgacttattaatttcctctatactttatttccctattctctatyattttacatatttgtactttcctacccccatttggttcattaaatgagaaaacagtggagctgtatactatttagttggatttcttcatcctgtcccctaccaataaattctagttgttatttttgttttatttaatgttcttccataggcccgtatatttatacttctattgtgtaacttatgagatgcaattttgtccctggatattacaaaataaggaaatgagaataattatggtgcatcctactttctcacatcccatttcaacttttattatatcattttgacattgtattagtttgtcatatttactttttactctctaaggtaattcctatagttgttttagttttcatcctaaaaaggaatttaatgtttgttatgcatttttctgccagtttctctaataaattcttgctggtctcaaatgtgttccctttgagatgggcttatgggaattccattttctgaaatatgatactgtacagcaaaaaataactgttcattgtccttatccttgaatgtcaatttgg

SEQ ID NO: 904564 - DNA, 623 bp, Homo sapiens
gtcaagtctgacagtgaggaggaccccaactgtcacgagaaacacctgtcgaacacagccacccacctggggacagatcaagaagctgtcatagatggtggaagaaaacctgaggacagtgggacaaccagtcacaatgagtaatttaatggtagctgtgatagcggtaatcaccactgctgtgagtgattccttcaacaagggctgacacagagaacaattatacttattgggcatatttatcaaatttggctggcaataatgcctggatgtaatcactctatgatgcagttacgcatgctttctgatctcagtatttaccataataaatctactcctataattgaggcatactgctctcaagaatctatttgtaaacaaaattgaacctggccagaaaaaatcaacatacttgtttaggaagattgcattgcagaacagatagaggtgctgcatagcaactcctatggaatcattattgattggttccctaaggggatgtttagcttgaattgcacctctcagtctgcatgctacagccacactatgttcagctgatctgaacaaaacagtcggatggtagacatgatamgaagtaaggcaagagttcctattatctggaa

SEQ ID NO: 904565 - DNA, 643 bp, Homo sapiens
tttaaaagggtttagcacctctcacctttctgtctcttgctcctgctcccaccatgtgagatgcctactacccctttgccttccaccttccaaccttccaaccttccaacytgaaggttgccttccaaccttcaggaagcttgatggaaagcttactgaagccctcaccagaagccaagcagactccaacgtcatgattcctctacagcctacagaatcatgagccaattaaatctcttttcttataaattacccagtctcaggtatttctttatagcaatgcaagttgacaaacaaaattagccattaggcagggttttgtctttcttcctttattctataggtatttctccaggttacacatttccttgtgtagtatgagtagttattcttaataatcattttgctcttcttttacaactatataaatggatgaaggattcacatatatatgagtaaaatccattgttcatacggatagaaaacaatctttatggggtaggcagattggtgtctccccaaatatgacaatcttagagcatgttgatatgtggctttaaatggcagaagggacttggcatccagtgtggtttgaatgtgtccctcaaagttcatgtggaagaaacttaatccccagtgcaac

SEQ ID NO: 904566 - DNA, 288 bp, Homo sapiens
ctgcagaaaccctataagtcagaagagagtggggaccaatattcaaaattcttaaagaaaagaatttttyacccagaatttcatatccagccaaactaagcttcataagtgaaggagaaataaattcctttacagacaagcaagtgctgagggattttgtcaccaccaggcctgcctttcaagagttcctcaaggaagcactaaatatagaacagaaaaactggtaccagtgactgcaaaaacataccaaattgtaaagaccatcaacactatgaagaaactgcatca

SEQ ID NO: 904567 - DNA, 586 bp, Homo sapiens
tacacttgggggtgctgaaagaaacagaagctcagaaagtcatatgaggccaagctaayaactggaagtcctaagatcaacccatattctgtatgaacaaacttttaatttgcaatgaaagtcattaagagaaaataattaaatttatagcatttccaaagccagacatatttaatcacatttaactcctaccatattatttcttataaatgctgcttccacagtggggaagtaatagaggtctcaagtcaacttagagtctaacaaaactgagtcaatgacaaaatatacaaaaaatactacattaatttaggaagcaaatccattgagcattcctaactactgcaaatgcagggcattaattactatgtatttgtatattatattttactttacagtatcaaaaatgtaggttgcattttacaaatataaaatctatgaaaattctcatttatagttatttacattaaaatcagaacagaagttttgcatctaattataatcattactaatcagtattgttcgatgaggatttatatggcaggaattttatgtgtactattacatttactactcaaaacctcta

SEQ ID NO: 904568 - DNA, 557 bp, Homo sapiens
gggcagtggctcacacctgtaatcctagcactttgggaggccgagacgagcggattacctgaggtcaggatttcaagaccagcctggccaacatggtgaaacaccatctctactaaaaayacaaaaaaattagccaggtgcagtggtgcatgcctgtaatcccaactattcgggaggctgaggcaagagaattacttgaacccaggaggcacaggttgcggtgagccgagatcgcgccactgcactccagcctggacacagagcaagacttcgtctcaaaacaaaaaaaacaagtatcacaaatctaaatatagttagagcttctgaatattaagctatcaaaaaataaaaaaatacaacctaaggggaaatgtattcggcaaataatttaaatcatgtgttaatgttttataataactactcaaaaatattttggggcacctcctctctagcttagcatgccttgtgctagtgggtatgaatagtgaataaaggagaaaaagtccctgtcctcatggaagttgtatctagttggaacaatagcaactaaacgatta

SEQ ID NO: 904569 - DNA, 391 bp, Homo sapiens
tgtacagcctgaagaaccatgagcctattawacttattttcttataaattacccagtctcaggtatttctttatagcaatgcaagaatggcctaacacagaaaattggcaccagtagtaaagttttgctataaagatacctgaaaacatgaaaacagtgttagaactgagtaacaggcagaggctagaagagtttgtaagactcagagaagaagggaagatgagggaaagtttggagcttcttaaaggttgtgacccaaatgccgataatgatatggacaatgaagtccaggctgctgatgtctcagatggaaatgagtaacttattcagaagtggagcaaagatcacccatgttatgcctcagcaaaaagcttggctggattgtatttgt

SEQ ID NO: 904570 - DNA, 521 bp, Homo sapiens
tgggggaagggtgctattttgtcttccaaaatagacgcttctgtgtaatagcagtggaacaaaggataagcaaggttaatatgggcatgaaggcagtggcaatcagggartctggcttttgagatatattatattaggtgttatgctattctattggacacattataaaatatctgtaataaaataatacaatgagtagtgctaggacatttggattttgtccataaggaacgagataaaattagattcattctttaccatatgccaggaaaaattttcaaaatttataagtaaaatataaatcatagcatattaaagaaaaagatagatatggggcagactttctagccatgatgtaaaatgcacacagagaaaatatattggtaacttataaaaattaaggtaaaagaaatttttgtgaactagccttacaaaagtgagagcagggctttccttatagattgctaatttcctccaggggcaatgactttcctggataattagagaagtaaaggctaaat

SEQ ID NO: 904571 - DNA, 593 bp, Homo sapiens
ttcacatttaagataattatcaataagcaaggataatactgccattttgtttcattaggttttgttttgttttgttttttgtrgatttttttcttctttccttcctctctcttgctgttttcttttgtggttaggtgcttctctctaatagtacgttttgattccgtgcttttaatttttagtgtatccactatagatttttgttttgtggttaacatgaagtgttccaaaaatatcttgcagttaaaacaagttattataggatgagagcaacctaactttaattgtaaaaataggaaatttaaaaaaggaaaccaaataaataaatgaatctacaatttaactttatttccccccacatatggaacttttcacatcccacattacataatattatagttcctacatttttttcaaattaaaatagtcgttattttttagtaatttgtttcttaagtcttaatattacatccacactcactcttactgtgctggcacaatttagacatgccaatgaacctaacatgcacatctttgggatgtgggaagaaactagaacacctggataaaacacaaggtgatgtagggagata

SEQ ID NO: 904572 - DNA, 642 bp, Homo sapiens
aatgtgagaattagtttttactttataaatattctgtattgttgttttatcattttttattccaaaatacttctttaaataggaaaaagaataagtacgaaaaatatttgacttctaattaagaataaaaaactgtctcatagtcttgtcaaactgctttaaaattcttccacctaactttttctctttttccttcactcaggatcaaactctcattaatccgacagttcttccagctttgtctgattacttccctattttctcttactcaagtattctcattaacaaaatctttgcacattttattttgtcttgatatctacttatcagaggatctagtctaacaatctaacttttggggtctacattctcagaaccactaggtataagaatcatatgttaatctatcacagcaaatattccaaaagtggtaagatgcccattgggaatataaaaattgtaggtatataaagtatgcattcattaaaacattagctgtcttctatgactatcaatcacttgattctcctggagaatgcagagatctctactgaacactcmtccaggccagaaaaagtgcccttcctgcttcttccacacattaagacctagttatttaaaaaatatttttattttacaatt

SEQ ID NO: 904573 - DNA, 597 bp, Homo sapiens
ttggaatcctgtcaataggaatggtatcaatttttctttgaatgtctaataaaattcagctgtgaattcatctagtcctgsacttttctggggggtaaccttttaattaccatttcaatcttgctgcttattattggtctgttcagagattctatatcttcctggtttaatctaggaaggttgcatatttccaggaatctatccatctactgtaggagttctagtttgtgcatgtgaaagtgttcatagtagccttgaatgatattttgtatttctatggtattgatcgtaatatctccgtgtttctaattgaacttatttgtatcttctgtcttcttttcttagttaatctcactaatggcctgtcaattttatttatcttttcaaagaaccacctttttgtttaatttatcttttgtcttgtttttgtttcaatttcatttagttctactctgatcttagttttttcttttcttctgctgtgtttgggtttggtttgttcttgtttctctagctgcttgagatgtgaccttaggttgtctatttgtgctctttcagacattttgatgtaggtatttaatgttatgaacgttcctc

SEQ ID NO: 904574 - DNA, 552 bp, Homo sapiens
gctcaaaaacagattctcataaaaacatgtgtaaggggattggacagaagaaacctaccctggggtttctgtcttagcatgggctgctataacaaaataccacagtttgggtggcttaaacaacagacatttattgtagccactttctctctatgttgctcacgtagcctttccatggtgtatatgaagagagagagagagagagagatctatcttccccttcttctcagggacctattctaaacctacttacctccaaaggccctgcctccaaacaccatcacattgtgggttagggcttcaacatatagaggggcacaaacattcaatccataacagtttctttcagccatattggaaagtgctcattctcagacactcaggctttataaagtcctgtgccatgtggacacttagcatagatgaccctaagctgatttctgttccttacaggaaaaaggaactaaactccggcttacagaacttagcaaggtcgcttcaaatagcccytcgctctcagaaaggtgccactcttttctataggcttcttgc

SEQ ID NO: 904575 - DNA, 637 bp, Homo sapiens
cttatgtcagaaaaaaaaaaagaatggggatmtttgactacaacacaagacaaaatggcttttggtgggaaaagtacctctctgaacagaacagggcaatactgttgtcctggaaataggagagtgcatatgtaatggaagaaagaaaaaaaaaaatacctctctcaagatgaggccaccagggcttagagagcatccaaaattgtgatgtcattacagtgcagatcccagggagtttctattaatgcaaaatggctctctaagaattaaaagttgagctctccaaggtagaggtacagtatagtggtctctctcttttcccatggaggaagtcactgtggcttcctccaaaaaaataagaaataaataagaaataataataagaaataaacctcctcaaaagaaattggcttgggttctccatctgcaagccaaatgcccagagattctagggaaaacagagaaagaaagatgatgagagagagtttggaacaatacgtggtgttataatttaagggagatttgtcttccaaacaaaaatttcccaggaagattacagaattctggggcaaaatggaattctggcaaaatggaaggtggtgagatgtttctttggtcttttcaaatcttgcttttt

SEQ ID NO: 904576 - DNA, 566 bp, Homo sapiens
cagtggcacgatctccactcactgcaacctccacctcccgggttcaagcaattctcctgcctcagcctcccgagtagctgagattacaggtgcgggccaccacacccagctaatttttgtatttttartagagatggggtttcatcatgccaggctagtttcaaactcctgacctcgtgatctgcccgtctcggcctcccaaagtgctgggattacaggcgtgagccactgcgccaggccgatccctgctctttcttaatcatagctttgaacagttgtagtcccaaggctatccctcttatggttttaaagttgacccttctggcattataataagttatgcactctaggatttttcattgagaaaagactaagaattgattttaatctcagatcttacagttcagcaaacagctttttcctacttgattttttttttgtcccatatccctttcccatgcatttctcttttgctcttctctcccttccatttacccaactaggtctcacatctcagaatcagatgtaatagatttttgtgtttccacctagtactgttttcccag

SEQ ID NO: 904577 - DNA, 606 bp, Homo sapiens
cagagagccaagatcgtgccactgcacttcagcctgggcaacagagcgagcgagcgagactccgtctccarcaaaacaaagcaaaacagaaaaccaaagaaaaatattctaaagaaaaaaaaaatcagttgttgttttaataggttcagaggtaagtttgccatatcttatttaccatgaatgactctagtaatggcaatgccatcaatgcctctcatcttccaatggttgccttttcttctgttattactggactgttgggactggtagcactggtcatataagatgcccacagttgctaaaggaggacactgttagaaataaagtgacggccgggtgcaatggctcatgtatgtaatcccaacactttgggaggttgaggcgggcaaatcgcctgaggtcaggagttcaagaccagcctggccaacatggtgaaatcccatctctactaaaaatacaaaaattatctgggcatggtggtggttgcctgtaatcccagctactccagaggctgaggcaagtgaatcacttgaacctgggaggcggaggttgcagtgagctgagaccgggccattgcactctagtctgggcgacaagagcaaaact

SEQ ID NO: 904578 - DNA, 659 bp, Homo sapiens
ccccttcttatctgagctccattttttctcatagacaaaagggtttactgtcattattattattattgttatctgtcctcgaygtagcagaagctaaatacattttttggtttgaaacaacaggctagacatccatagtattacttgtagtgcaccaacataaacaataccaaactagaatgttctcttctcctttcccttttcttctcaaataatgcagtcctgaagacataatatgagacattgcaaaggctgtgttcaggatgattgttggtgctgggcagggaggctgcagtggactaggcttgggctttggagcccaagcgagaggaaaaagtaaaacgtttatgaagtaggaaggagattgcctggtgagtggtgtcagagttgaagtgggtatgggggtgtccatatgtagagtggcttcgtgcgtagtgtcaaagtccaagggaatcttcatggggaaaggagtagtagcaacaatggaagattggttatatgtagtaatattaatccataagtaaatatattaaaggcagtgagagccatgcttctctttggaggggaagaaaaattgcaaataagagaaagaaaactaggatgaacctttttgtatgagactggaattatagccattaatctgaactcatggttttcaa

SEQ ID NO: 904579 - DNA, 603 bp, Homo sapiens
accaattgatgaattcctgtaaacagaatgtataatggaaatacggaaactgcctaaagtgggattattcactgctactgtgatgctactgtaatgtaataaattattaaattgttgcaaagtgctgtttttgccttaaaattttatgtgtcttgaaaactatagtattaagagtattgagactgtgaaaatgctggggacagttggcatgagataatcagtttttatttttatgaaattgtaatgtaactatgcaagtgtgtttattaaaggaacaaactaaaaagaagttacgggaattttaaaaagttgtgggatgaaaaagttatgggataaaaaatgctgtggaaaagttgtggcaaaagaagttgtgaaaaaaagtagaaaaatgttttatgaaaagtattttaaaaagttatgaaaaggaagttacgggatttttttttaagtcatgggataaaaataaaagcaggtctctgtcggcacaagcctggagaagtgggactggagacttcgcccccgccatggaccaaccaccccttcccagtcacccctttaccattagggtrgcaagacaagatccctgcctaatggggggagata

SEQ ID NO: 904580 - DNA, 624 bp, Homo sapiens
aagcaaataaaatatgtacaaattagtgaaatcccactagagaccataaagcgtgaacatttatttttaaagtactgagaaaaagtagctgtctacttacttgtatacccagctgtactctctagctgaacrgcgtaagtgaatcaataatactttcaggagactaatataatcatagattatggttcaaataatacttaaaagacatagttcaggaaaaaataatcaatgaacccacaagcaaaaatgaggatataagaagcaatgtcaaaaaaagaatttgataaatgtgttgatatattaaaatatcatggattctattggtcaataacttaaacaagtattgccatttttctggcaactaaaaacaatgtgaaactaaaattacaaacaattaaattgatgagtggacagtgatgagagtaaacttttcgaaggtcaaaggtctgaaagctttagggtatctcatgcacttattaatttttattttacaaacacttaaatagtgcttaatattttcctcaaattttattaaagatgatataataatatgtagcctgaggtcactacttttgatgtatttattttaaaggactattgcatccattttcccacaaccttttt

SEQ ID NO: 904581 - DNA, 638 bp, Homo sapiens
aatataggcctctgatcctatagttgtcttatatattacatstatatacattgaaaattccagcaaagttttagttttagctttcaactttcaaatagattttaaataactcaagaagagctgatagtctattatatttaccttgacttttaccagtttttttctttcttatttcttggtgtcattgtcctttagtgcaaagaacttctattagcaattttttttttagagtaaatctgttttctgtgaattgttttagttttcctttatctgagaatgtcattattttactttcattcctaaagaatattattactgaatatggaattatgggttaacaattcattctttcagtcctttaaaatgttatgccacatccttctagactctacaatttatgatgagaaatatgcaatcaggccaggcgtggtggctcacgcctgtaatcccagcactttgggaggcagaggcctgccaatcacttgaggtcagaaatttgagaccagccttgccaacatggtaaaatcccatctccactaaaaataacaaaaaattattcctgtaatcccaggtacttggaaggccttggtgggaggattgcttaaaccccgggaggcaaaggctgcagtcagctgaga

SEQ ID NO: 904582 - DNA, 646 bp, Homo sapiens
aaattaataccaagagtaacgcttaagaccacacaaatacatggcaaccaaacaacttgctcttgaataacttttgagtaaacaaataaattaaggcaaagataaaaaattatttgaaactgatatggtttggctctttgtccccacccaaatcttatcccgaattgtaatcctcataatccccatgcgtcgaaggaggaatttcgtgggaggtgattagatcatggaagcagttttccccatgctgttctcacaatatttaatgagttctcacaagatctgatggttttataaggcagttttctctgctctctcttgcattatttctctgttctgcttccttgtgaagaaagtgcctgcttccccttctgccatggttgtaagtttcctgaggcctccccagccatgcagaactgtgaatccattatgtctcttccctttatgaattacccagtcttgggtatttctttatagcagtgtgagaatggactgatacagaaacaaacgaaaatagagatgcaacacaaacaaactttgggatatagcaaaagcattgttaaggaaagtttttagcacttaacgcctacatcaaggasatagaaagatctcaaattaacaacctaacattgcacctaaaggaattaga

SEQ ID NO: 904583 - DNA, 625 bp, Homo sapiens
atttgtagaatctgaaggtggatatttggagggctttgaggcctattttggaaaaggaaatatttttacataaagactacacagaagcattctgagaaacatctttgtgatatgtgcattcagctcacagagtttaaccaatctcttgatggatcagctttgaatcttttcgtagaatcttcaaccggatatttagagaccttatcggcctatggtggaaaagggaatatctttaaactctacaaggaggaattgtgagaaatttctttgtgatgtgtgaactcatctcagagttgaacttttcttttgatagagccgttttgaaacgctgttttcgtagaatctgcaagtggatatttggagcactttgtggcctattgtggaaaacaaaatatcttcacacaaaaactacacagaagcattctgagaaactactttgtgatgtgtgcattcatctcacagtgttgaaattttcttttgattgagcaattttgaaaygttgttttcgtagaatctgcaagtggatattcggagtgctttgaggcctactgtggaaaaacaaatatcttcacataagaactacactgaggcattctgagaaacttcttcgtgatgtgtgcattca

SEQ ID NO: 904584 - DNA, 668 bp, Homo sapiens
atcactacagagaacagcagatcctcccctaccctgagcaatcactctttcttgtgggaaacacagaaggcacatagtcctgtgyccacaagttccccactacaagccaacactacctccagcatgactgtacagacaatcctcagcagctaggcccattcactgtcaagctgcattgcctccaccaccatggtgaatgcccccagggagtcaggcacccagtccccaccagcactctgccatagctgctacaccttggccattccagtgaagtggactcttagccttgaaggacagagaacaaaattggggcccaatacaagtcccctagagtttgagcacacagtccaggagttgggaactttgtgtttgccctgtaaaatcttccagaaatgaagccatttagctgaatctactgtacatcaaaatcaaaccctcaggtcatcaaataggataaaagaaaaaaacaaagatcaacaacgtcaaaggttgaaggtagataagcccacaaagatgagaaagaatcagtgcaagaaacctgaaaactcaaaaaaacagtgtgccttctttcctccaaatgaccattttacctattcagcaagggttctgaacagggctgagatggctaaaatgacagaaataggattcagaatatgtatagatacaaa

SEQ ID NO: 904585 - DNA, 623 bp, Homo sapiens
gctgatagtgaggaattctcaaagcaggtgtcaaatgctgttttctatattcctcaccctcttggaaatacacatcaaggtctctaaatggtcactgggcctgawtaaggtaagcatctctcatctgattattcacttttttattgactgatgaatcacagcactctagcaatgaacctcaatgaaatcttgtcataagttactgtggtttttttcccttcagtgaaatggatgttttcttattaatgattttacttcttaattctacgctgggatgacctggttgaaacaaatcattctatgcttgtgaccagagaggagaatattttgtatttttagtagcactaacataggatttcagcctaagctgctactgacatcttagaagggcaatgcccctctttttaggttttagctggatagagcctgatagagtttggatgtttgtcctctccaaatctcattttgaaagtcgattctcaatgttgcagtagggcctaatggaaggtgtttgcactgtgagggcaggtgcctcatgaatagcttggggccctcaccgggtagggtgatttgtcatcttagctcctgaaagaactggctgttaaagagagtctggcacctcc

SEQ ID NO: 904586 - DNA, 639 bp, Homo sapiens
cataacaaaattttgccattttaactgtttttaagtgtagagttcagtgktattaagtacattcacattgctgtgcaaccattactacccatgcctagaactttttttgtcttccaaaactgaaactctgtacccattaagtaataactctcaattcctccctttacccagcccctgcaaccaccgttctactttctgtctctatgaattcgactactctaggtacctcatataagttaagtcatacaatatttgtctttttgtgactggcttatttcacttaacgtaatatcttcagggttcatctcttttgtaagcgtatattcgaattttatttattttcaaagctgaataatagtccatgtaatacatataccagattttgtttatccaaatggacacttacgttgcttctaccttttggctattgtgaataatgctgctataaacattgctgtacaaatatctgttggagtcttcactttcaattcatttgggtatatacctagaaatgaaactgttgtatcatgtagtaattctatgtctaatttttgagaaactgccatactgttttccatagctgccacacactttacattaccaccagcagtgcacaagattccagtttctccacatcct

SEQ ID NO: 904587 - DNA, 626 bp, Homo sapiens
gcgtaactgtggacaaagggatgacccagcctggttccatgctcaccactctgttgaggaacattttctgtcagtaaattaaggagaatgagcaggaaatgggcacagagcagatctacacaatagccactacattatccatagccagtgtgggttagtacggagtttattatccacttgttattgtcaaatacgtttttccaagaacggagaaaagaaattaataattcccctacattgtctttaccttggccatgaccaggcccacttctggaaggtacgggacactctccagcctgcctcctgctcaggaaagactgccagagagcatgagggcttcggaacctgcatgcgtaagcaggtgtccgctgtgctttgtggagactttctcctctctcggagctcttttgtattagtccgttttcattctgctgataaaaatctacccaagactgggtaatgtataaagaaaaagaggtttaatggactcacagcamagttttacgtggcttgggaggcctcacaatcatggcgggaggcaaaaggcatgtcttacatggcagcagacaagagagaatgagagccaagcaaaaggggaaacctcttatagaaacattagatctcct

SEQ ID NO: 904588 - DNA, 610 bp, Homo sapiens
ttttcctttgaagattgatttgaatgccataaaatatgcagagttcagagttatttagagyacagtgactttggaggcaagcaatgctgtgagttccatccctcggtgagttttatagttccactcttagtaactatgtgcccaatttcatccataactctagctcagagtttgctaatcagtggcccacaggtcagatctaacccttagtgtttcatttagaccacctttttaggtgtttattgttgctaacatgcaatggaaacaatctctgtttctaattttacttaagaaatcagaagctctgtctgagtgatatgcacacgccccatctgggaccaatcggctggagaaagtggctgctactcccttctgatggctcttcgtgacaccaccctcctccctcagcccacacatcttgaatctgtgaacctgcctgggacatgtatcatttggcaaccttgctttaagatctagggcagctcttagcctacatagcatcattttattatttaggaaaagtgaccctggctgccccatgcaggacataaactgcatttcagcctcttctcactacttcagccaagtgtcctttttagcagacaaactg

SEQ ID NO: 904589 - DNA, 596 bp, Homo sapiens
aattctcacaacaatacgtaatgtatgcttttactccactttacaaatgagaacatctaagcccaaagtcacatagctagaaaaactgcagagcaggacttaaacccagttctatctaaatacaaagaatgtgccctttaacacaatggtaaataagaaataaagttcactagaatatcacttaaatgaaactgttggcctttctctcctggacagataatgtaaacacagcagtcatgaccaatttcactcccaccttaagaagaaccatcagaaagtaggtaagtgataaagggaataaccaagtcaactctgaatctgctgtagttaatgagggaataaatgatttatctaactcattggttaaaagattatctgaaacaaaaggataaaagcattactatgaaacttaaaacatatgtaaaatagttggacattattttttatgaaagacaaagaataaaacagatatggatcatgaayattttcatttttagtgataaggattgtatttaaatgtagtaaaatatacataaaatggaaacattttacaatttagagatatactatggattggcacatgtatgtacattggg

SEQ ID NO: 904590 - DNA, 643 bp, Homo sapiens
aacatatgcaaatcaataaatataatccatcatataaacaaaaccaaagacaaaaaccaagtgattatctcaatagatgcagaaaaggcctttgacaaaattcaacagctcttcatgctaaaaactctcaataaactaggtattgatgggacatatctcaaaataataagaggtatttatgacaaacccacagccaatatcatactgaatgggcaaaaactggaagcattccctttgaaatttggtacaagacagggatgctgtttctcaccactcctattcaacatagtgttggaagttctggccagggcaatcaggcatgagaaagaaataaaggttattcaattaggaaaagaggaagtcaaattgtccttgtttgcagatgacgtgattgtatatttagaaagccccctcgtctcagccccaaatctccttaagctgataagcaacttcagcagtctcagaatacaaaaatcaatgggcaaaaatcacaagcattcctatactccaataacagacaaacagagagccaaatcatgagtgaactcccattcacaagtgcytcaaagagagtaaaatacttaggaatccaacttacaagggatgtgaagggcctcttcaaggagaactacacaccactgct

SEQ ID NO: 904591 - DNA, 724 bp, Homo sapiens
acaactccaaagccgtaagaatacctctggaaatataatgatgaaaacattaagtatgataatacttctcaaagaataattgtgcctgctggaattatgcaatgcatttcayctaagagctatgcctagtgaggatatatgaaattaatgtggatgggaggcagggaaatattaggcagagaagggcagggtccctaatgaagccccaacctcaagcctggacctgcagcccaaagtaagtacatgcattcttgttttcccacctgaatgttgtcttttctaaaaccaccctggcctggcctgccgcccatcctgcatccataaaaaccccatgctccactggcagtagggtagcagaggaggagagaagagaagcagcagcaggacatcagagaggagcagcttgacttcagagggacagcttgctggggggacttcggagaacagtttggctggggatggctaaactccaggggaagaccactttcccacttcttcccctttgcagctccccaacacactgagagccattttcatcagcaataaatcctccacttttatcatcttcaattcgttcgtgtgacctgattatttttggacgccaaacaagagctcgggatatggagggctgtcactctgagctattaaacacttaagccatccatgggtggcaaatctaaaagagcacactgtaacacaagccctctgttgctccggggatcaa

SEQ ID NO: 904592 - DNA, 618 bp, Homo sapiens
tcccgtcaaactacatatatgtattttttaaaagtataagtgaattcatattccattaagagaatgtccccctaccacggctaggtttctagataccttggacaaatttctaatataaatctgcctttcttagtttacaataataagcaaatgcattttgatattatcatatcaataaaaatattctttatccattatattataaagtttacattaattttgttccactctgctaagtatctcatttgttagttcaatcatggtagcgaactgagaaatgctcccatgtgtcaccaagtatttgtcatcccaagtattctctagcctgattcatgtttcctctaaatgaatttagattcctttgaaggatgaaaagcatattttatatcttttcaggtttattgttttaaattttatttgtttatgtagtgttctttgagatgcctatgagtctggatgtatatgcaaaaaataaaggaaggcctgttttggacttttctcttaaattgtatgccaaacactgggggwtggggaggaatcttcattatgtatttgctatttggcacaaattagtgagaattttacatgaggaataaaagatgtggtgcttctggactt

SEQ ID NO: 904593 - DNA, 591 bp, Homo sapiens
tgtgaagcaagggtaggtaagggagagagagagaaagagagaaagacaaacaacacaagtagacaaaatgatgcatttttcacatgataagacctgtagcatgaatgttttggctttatgaggggggcatattcttcctgccacagctaggcaaaattcagcaaatacatagagaggagcaggaataagagaccaaataaataaataaataaataaataagcttaacaaattaaaagattccatacttacctgagttttttattataaattatccttttctactgatgctagcaatatttgttttttaataactaacacaaaaattctaacataacccaataacatgaagaaaagtaaacaaaaatcagaattaggtaaataatacctaaaatggcagctcaagaccaggttgaaagtgaggatgtagtcatgcaaatcataagtttctatgtaattataagatctgagccacaaatttcactctaaacttcctggtggccaaagaaaatctagtcaaatgcataatttgtattatacatatacaaatgcaaactgatttatyaggtaaataacttttcttgatatataag

SEQ ID NO: 904594 - DNA, 625 bp, Homo sapiens
acagccatatgaaaagatgatcaacattactaatcatcagagaaaagtaaatcaaaaccacaatgaaatacttcatcacacctgtcagggtggtcattatccaaaaaacagaaaataacaagtgttggcaaggatgtggagaaaaggaaacccttgtataccattggtgggaatagaaaatgcatcagccactatggaaggaagtataaaatttcctcagcaaactaaagatagaactaccatttgatccagcaatcccatatctgagtatttatcccgagaaattaaaattaggatctggaagagatatttgtactcctatgttcactgaagcaattttcacaatagctaaaggtagaaacaatataaatgtccattgacagatgaatgagtaaaggaaatatgggatatacattcaatggaatattatttagccttaaaaatgaaggaaattctgtcatatgctacaacgtggatgaacctcgaggacatcatgctaastgaaataacagtcacagaaggacaaatactgtataattccacttacgtaagatatcttaagtagtcaaactcaaagaagcagaaagtaggatgatggctgccagagtttgaaaggggagggaaa

SEQ ID NO: 904595 - DNA, 625 bp, Homo sapiens
acagccatatgaaaagatgatcaacattactaatcatcagagaaaagtaaatcaaaaccacaatgaaatacttcatcacacctgtcagggtggtcattatccaaaaaacagaaaataacaagtgttggcaaggatgtggagaaaaggaaacccttgtataccattggtgggaatagaaaatgcatcagccactatggaaggaagtataaaatttcctcagcaaactaaagatagaactaccatttgatccagcaatcccatatctgagtatttatcccgagaaattaaaattaggatctggaagagatatttgtactcctatgttcactgaagcaattttcacaatagctaaaggtagaaacaatataaatgtccattgacagatgaatgagtaaaggaaatatgggatatacattcaatggaatattatttagccttaaaaatgaaggaaattctgtcatatgctacaacgtggatgaacctcgaggacatcatgctaagtgaaataacagtcacagaaggacaaatactgtataattccacttaygtaagatatcttaagtagtcaaactcaaagaagcagaaagtaggatgatggctgccagagtttgaaaggggagggaaa

SEQ ID NO: 904596 - DNA, 565 bp, Homo sapiens
aaacctccccaagttaaaaattcatcaaaatactgaatatttacaaagatggcaggcatgaggaattggtaaaatgtgtttatgccattgccatattgttgccccattttaaccagaaatactaatacctgctattctttcttaagattggatttgcaattgtgccagttttgagttatgtcaagtcttcagaagtacatccctttcatgggtcccactgggtttcagggatggcaacttgaaacatgcaatcattgtcattggggggccccttagtccagtgagggagatgaagaaatatatagggtgagtggaataaggtgagatgtaaaatgatgaacatgagtagaatgtttccaaagtacagagaagggacacatgacacaactttgaaggcaggtaagacattctaagggaactattgtctgagttgactcatgcagtaagtggaagttagcccaggaaattgttggctagatgggtagactgtaggagggaaaggacattcaggtagaagaaacaacataygcaaagacatggagataagcattttggatagtctgga

SEQ ID NO: 904597 - DNA, 640 bp, Homo sapiens
aatcctattttactttattctaatcgtcatagccaggaagagacattcaagtgttagggaagagacaaagaaaatcttctccaaggaaagtttttctatccacttaagcaaaaagaagctggcagcttcctctaaaacaataaaattattattaaacaaaagtagtatgtaaactcctcaattattaataaacaaaaatagtacataaaccttccacatattattaactccaataatattaactactaaagacaaaaggctaaataaaaatagtatcaatgatataacaaattattaatgatggcaactattccatatgccatcctttcctgacttgaaactctttaaaatgtttcttaacacctttaatgagatgattagaaacttttcttttgcaaataatacacatattaagacattttcccctgagcctagtcctgtctctagatattgaagagttttcagatgtttcgattctggagttgttcatacatctctcccatccttcattcctattttacttccaacctccttgggttttgcctctgtcagtttgctttacacagctgtctccttgactcataagttactggaattaagtaycaatgtgttttaagattttcttttatatatcctaaga

SEQ ID NO: 904598 - DNA, 626 bp, Homo sapiens
gaatctgcaagtggatatttggagcgatttgaggcctatagtggaaaaggaaataccatcacataaaaccttgacagaagcattctcaggaacttttttgagatgtgtgcattcaactaaccgaattgaacytttattattatagagtcgttttgaaatactccttttttagaatctgctattggatatttggagatttttggggccttagttggaaatggaaatatcttcacctaaaaactagacagaagcattctcggaaagttctttgtgatgtgcgcattcaactcgcagagttgaccctttcttttgatcgtggagtttttaaacagtccttttgtagaatctgcaagcgttcatttggagtgctgtatggcctatggtggaaaatgaaatatcttcacctaaaaaccagacagaagcattctcagaaacttctctgtgatgtgtgcattcaactcacagagttgaacctttcttttgatagagcagattttgaacagcctttttgtagaatctgcaagtgttcatttggagagacttgaggcctatggtggaaaaaagaatatcttctcataaaaactagacagaagcattctcagaaacttctttgccatgtgtgcatt

SEQ ID NO: 904599 - DNA, 619 bp, Homo sapiens
gcctgggccccaaggttctctgtgacytcctttgaaatctatgcggagatagccatgactacagacttagcaccacatgggcaccaccaaggtttactgtttatactctctgacactgcacctgggcctgcttgagccacagctggtgtggctaaggaatgctgagccacatgtgtggagcagaaagttgacgtggccctaggcagcaagccctgagttcccatggacaccctgggcccctcccttgaaactgttctgccctgaaggccctggcactctgagcctgtgataagagtggtagcctcaaagatctctgaaataccttcagggccactcctccactgacttgatgaataacatctggcttccttccatccatactaatctgcttatcaaacatgcacttggccatattcttggtattctctcctgaactcagtctttacaacctggttaggctgaaaaatttccaattctttaagttctgcttcctttttgattataaattccatcttgaattaatttttctctttttgtccagtatcataaacagtcaagagaagcatgtagcaccctcagcattttgtttaggtatttcttcccctaaatatcctatttc

SEQ ID NO: 904600 - DNA, 646 bp, Homo sapiens
aaaaccaattggctgtgttcctgaaaaactaaacatgtgcctactatgtgacctagcaattgtattcttgggcatktattccagaaaaatgaaaatgtatattctcacaaaaacctgtatactaatgtttataacagctctatttgtaatagccaaaaactgaaaacaatcaaaatgtcctacagtaggtgaatggttgaacaaacttcggtacatttgtaccatggaatactcagccacaagaaggaataaactgtagatacatacaatacagagatggattttaagggctttatgttgagttaaaaaaaaaaaaaacctgtcttggccaggcgcggtgactcacgcctgtaatcccagcactttgggaggctgaggcgggcggatcacgaggtcaggaaatcgagaccatcctggccaacatggtgaaaccccatctctattaaaaatacaaaaaaaaaaaaaaaaaaaagcctgtctcaaaaagtcatatattgcatggttccatttatataacattctcaaaaagacaaaattatagaaatggagaaccattagttgccaggagtatgggtggtgggaggacggggatgggtgtggctataactagtgactggaaagaaattgttgtgatgaccagttctgt

SEQ ID NO: 904601 - DNA, 604 bp, Homo sapiens
agtgcaactttttcagacatgtgaaagattaagtactagaattgaattgaaattttcaagactgggaataataacaaacttgtatgatacaaagaagagtgtcatgtgtttttcagtttttgcaatgctaccagtattgtatttattaatacattgttcccttttcatatatctatttttctacttttcccatacaagttgtctgtatggacttactttgaaatatacttgcatacattttcaaagaatatgattgagataacatagtattttttggataaaataaattcaaatagttgacaagccagtgctaagttttatttttattctacatttcagtaggtggtttttccaaatggatacattacttttagatatgatagaaaatctttatcaactgtattgtatatcttctgaatggttccatattttgaaaaatatttaagtgggaagatatttatgttacttaaatctataattcctcgaaatcctttttaaatagaatttggtgagctggtggctaatgaaacagtgtggtataggtggatgtatttggctcttcaatattctatatttygtttaatcaactgtatcttctccccta

SEQ ID NO: 904602 - DNA, 637 bp, Homo sapiens
tcactagaggtcaggagttcaaaaccagcctggccaacatggggaaaaccccgtctctactaaaaatacaaaaattagcrtggcttggtggtgcatgcctgtaatcccagttactccagaatctgaggtgggaggagcacttgaatccgggaggcagaagttgtagtgagcagagatcttgccactgtactcctgcctgggctactgagtgagactctgtctcaaagaaaaaaaaaaaaaaaaaaaaaaaaaaaggaaaagaaaaaattaaagaaagaaaagaaagtaaataaaactttttatttctaaactttttttttaactttaatgcttatttttatagattcagggagtactcatggaggatttttacatggatatattgtgcaggattgtgtagtggtgagggtttggcttctagtatatctgtcacccaaatagtgaacattatacccataggtaattttttcaacactcattctattcccttccacatccccctttttgtactccccagtggcttttatatatttaacttctgtagagcttttactctatgtttaacaccctgataaacatttttcataaattatcttatttcattcttacaacaatactaaaagattaatagttattt

SEQ ID NO: 904603 - DNA, 566 bp, Homo sapiens
actatcctcagcaatctaacacagaagcagaaaaccaaacaccgcatgttctcacttgtacgtgggagctgaacaatgagaacacatggacacagggaggggaacatcacacactggggcttgtgggaggtgggcagggggaaggagagcattagaaaaagtagctaatgcatgctgggcttaatacctaggtgatgggttgatatgtgcgcaaaccaccatggcacacatttacctatgtaacaaacctgcacaacctgcacatgtaccccagaacttaaaaaaaaatgaaaaattgttaaaaagatgcaatgccaataattactctatgacaacaggtgtgagctaagactgtcccaggcatatcagatggcttttgctacatagcatactagccattggatttaaacaacaataatttttttttattttcatgattctatgggtcgcttaggaggattttgcggcttgggcctgcttggctgattttctgtgggctcatagacagaatgtaggccagttggtggckgaatgatctaagatagctcctgaatcattctaggctc

SEQ ID NO: 904604 - DNA, 588 bp, Homo sapiens
tctctagaaaaacaaattcarcagtttcttgtcttaaaatagttacttgaacacagtactctgacttcttgaaagaaaactgttgctatagaaaattctaatttttatttctatcttggttttattataaactcctttgactcctctttgtaactatttttttttctcatttcagggaaaactttcacttatctcttctttaacttatcgtggaaataaaacagctgttttgcagattggactacaaggtatatagtataagcaaactatttctacttatctttttccctgtaatatataaatatgtgacttcatatatatatgtgtgtgtattctacttcatagccctttactctcatatctagaccattgcagtagctaactgcttctagtttcacttatgtgacttaaacatcttagcagcttaactgtcttaaaacttggcttttaacatgttacatagatgtacttgttacatagctgtatttgttacctaggtgttgttcttacacagggagaattctttctccatatagccctcaagtaatcatggtaagctaggaagggctactttgtaacacttaggga

SEQ ID NO: 904605 - DNA, 596 bp, Homo sapiens
ctccccagctatgtggaactgtaaggccaatawacctctttctttcgtaaattgcccagtgtcgggtatgtcttagcagcttgaaaatggactaatacagtggtcctggcattctggggagtatcttatcttttgaggctgtggccctctgttggctttctggaactggagcctctgcagtataccttgctagtcttttgtatttgaaatattactctgaatacatctgtgcttcctgaaggaaataggagaatttgcatgtattcattaagccattcacacatttattaaacaatatattgaatacctatgaggagtcaggccctattcctagacaccgatgagccaaacaaagttgtccttatgcagcatacgttctagggaagaaagacaataaaccaaaaaaagtaaatatataccttttctagttggaaacagtgctatggagaatgtaaggcagaactgtaaacatgagaaggggagggaaggtatatatttatctggtggtgaagaaaagactgacaagtaacatttgataagagacttcaaagaagtgatgtgaagtgatccttcagatatttaaagtaagagtattc

SEQ ID NO: 904606 - DNA, 598 bp, Homo sapiens
acagtggtatggtcctggcattcctagcagctgaacacatgaaaatttttcttatcaagtttgttctccttgcaatgtaacaaaatagtatacacatttatcaggatgtgtatttttttttaactatttttgtctcttcctattgctaactttgctctttctggaccttctattatggttctgtccatccctacctcctagtaaacgtgaagtgtcaaatgtttacattctctgaatgcttattttctgggtgtgtgcattctgaattttacatatgaattaaaaatcttaattcctttcttaatcttctacagattgtgaagaaacaagctgctctaagtctcaagattttgtgaagtcagtggaactcttgtagataatgtggactccaacaaagacaaagcaaaaaataaatagacttgaaacatcgaatcaataaatcaagatgtatttctgaatatcccagggaaggaaaatacatgactaattctattttttctctttgtagtataattctaataccattactaatactgccagtattactagstagcatgtgtggagcttgtagtatgcaatggactgtctatatagaaac

SEQ ID NO: 904607 - DNA, 597 bp, Homo sapiens
taacttcgggggctggccgtgggatacaccatttcttatatgtcacttattctttcactattagcatcatcccctgttatagttgattttwtgtgtcaacttgactgggttaaggaatacctgggtaaacatttttttctgggtttgtttgtgagggtgtttctggatgagatcagcatttgaatagctggactcagcaaagtagattgcctttctcaatgtgggtggacatcgtccaatccatttaggacctgaacggaacaaaatgtgtaggaggaaggaattttcccacttttccctgcgtcatacttgacaggaataactcgttacacctactcctgcacttggactgggatttagaccactggcttccctggttcttaggcctttggacttgaaatttggatttggactaacactggcttttctagatctacagtttgcacacggccagttgtgggacttctcagccactttctcacaatgtcttgtcctctctttctatatatatctatctctctttccccctcctccttctttctcaaaccctaacacatcccccaattacaaactatttcctcttccaagctttcaaag

SEQ ID NO: 904608 - DNA, 622 bp, Homo sapiens
agaaacactttttaaacaaaattgcctaaaaggtcatctgacatttgaggaagtggtatctaaaagagagagtgcagtctgaatcatgagttactggactagaagctatgtcaagtttaagcaggatgatagataaaggaaagagttgatgctttatttcctgacatttgcttcatagggtcagcattttttagttgttacttttctttaacttctttatcattgtttcatttttctactgaggaactaggtgaaaactatattttagcaaataaatcttttcaaactcttgctctgtcatatgacactcatcttcccaggtcttccccagaaaaaaaaatgttagcatacattaattccaagtataagccaactgcctttactcagggtggatatggaacttgtattagtctgttttcacactgctgataaagacacacccaagactgggcaatttacaaaggaaagaggtttaatgtagaactcacagttccacatggctggggaagcctcacaatcatggcagaagacaaggagaagcaagttaaatctcatgtggatggcagcaggcaaagagaccttgtgcagraaaactcccccttataatgaccatcagatctca

SEQ ID NO: 904609 - DNA, 597 bp, Homo sapiens
tttcacctctcctttacacctttctctgacccttttctgtcctcttaatacccaaaccatgccaccatggtggcagacttgcactcctatgacatatgtggcatgtggtatagacttctgttagagacagtgtgacctcatggttaagtgcacaggctgctctgaattcagagctgggtttgaattattgcttcactcctttcctggataagccacataaactctatggcatctgtttccccatttctaaaatgtgggtaaaaaattaactttcagggttattttgaggattaaatgagagaatgaatataaagatcatggcataatacctggtacaaaccaaagcctcaataaatgttggctgccatgttgggaaaatacactctctacaggatgtggtatgcattcagtctctatagattggtgtgtctgttgttcaccaccaaatgcttaactcctagaagccaggggctgtgttacagtactttacycactcacaaacacatagattctactcaataaatgttggttgaaggaaactatacattttaactaaattttatccttattactgatgataaaagtctcatttcctga

SEQ ID NO: 904610 - DNA, 631 bp, Homo sapiens
gataaatagcatcaatacaatcagtacctcagtgtaatgggcaccattagactttaaaatcaacaraacaacttcttccagtttccttgtggaataaaacacacaattagcaatcccacgagtgaaaccacaatttcctgaagatgactttaagagaactaatatctactattaaccttggaatttgtactggctttcacatgggtgtgacatgatgtaggatgtggctttttgaggttcattatctgtgaaaatgtgatccagagagagaatgtatctagactagtgcacctattatggatagattcttaataggtcatctgggaggcatggtgtgtgcaggcctagataggaacattgttttttctttttcccacatcacagagctactcactgaaatctgtcaacatggagattggagtctgtgtacacacacatgcacaaaatacacgttgtctatattttttaaacttttaaaaaaaactcttgtatgccaatgttatcatttatttgctgattttaatgagattgcattcttcttttatttaaaaatattgaatttacaaagaatatatatattcaaggtgtataatatgatgacttgatagatatatatacatacacattgtgt

SEQ ID NO: 904611 - DNA, 567 bp, Homo sapiens
gaagatggactaatatagtaaattggttcaggagtggggtgtggctataaggatacctgaaaatgtggaagtgacttgggagctgggtaccagttagagcttggaacagtttaaaggactcagaagaaaacaggagaatgtaggaaagtttggaacttcctagagacttagagggctcagaagacagaaagttgtggggaagttaggaacttccttgacacttgttgaatggctttgaccaaaatgctgatagtgatatggacaatgaagtccaggctgagatggtctcagatggagatgaggaacttgttgggaactggagtaaaggtcactcttgctattcaatgagactggtggcattttgcccctccccagagatctgtggaactttgaacttgagagagatgatttagggtatctgatggaagaaatttytaggcagcaaagaggaatcagagcataaatgtttggaaattttccagtctgacaatgcaatggaaaagagaaccccgttttctagggtgacattcaagtaggctgcagacatcagcataagtagtgaagagc

SEQ ID NO: 904612 - DNA, 557 bp, Homo sapiens
gctgaagctgcgcccacagccacccctttacccargtgctctgtcccagggagatgggagttttatctgtaagcacctggactggaactcctacctttctttcagagatgccctgtccagagaggaggaatctagagaagcggtctgggtacagcagctttgtggcactgtggtgggctccgctcagtccaaactgcctagtggctttgtttacattgtgaggggaaaactgcctactcaagcctcagtgttggtggactcccctcccccgaccaagctggaacatcacaggttgacttcagactgctgtgctggcagtgagaatttcaagccagtggatcttagtttgctgggctccatgggggtgggatccactgagcaaaaccatttggctccctggcttcagccccctttccaagggagtgaatgattctctctcgctggtgttccaggcactactggggtccaaaaaaaaagaaaagaaaaaacctcctgcagctagctcagtgtcagcccaaacagctacccagttttgtgcttgaaacccaggggccctg

SEQ ID NO: 904613 - DNA, 611 bp, Homo sapiens
tagataagtggtggtatttataacacaagttattcttttcatgtacataatccatatttttttgtttcttggcctaattactaaaataatgtcaagatctagaagtacgcctttctataagaagctgcatgtgattaccatgaaatggattaactatctttcttggactctctcacattttcctaactttaattatgcccttcaaaaagctttggtataattgttagtctaagattatactttctttatttttttaaaaaaaattatattggcctgtgtgcttcacaagtcatctcctcacagagtgcctggtatatctgttttatatattttctgaataactgaattaatacctttcagatgaaacttaaacattaaatttctaaatttgtcataattttagtgtgtattcataatgtacactttaatatacacagaaaaaatttcttaagtctggataaaaattgattttgtaaagtgatgtacaacaagttatatatcttaatatatcaaaaagttggttggtcatagcasttcccactaaaaccttctgacacataaagtgaactatcatttttgttttctttcatgcaacattttcctttccttga

SEQ ID NO: 904614 - DNA, 544 bp, Homo sapiens
tgcacacttcacaaagaagtttctgagaatgcttctatcgagtttttatgtaaagatatttcgttttccaacagaggcctcaaagggaaacaaatatccacttgaagattcttcaaaaggagtgtaacaaatctgctctctgaaatgaaaggttcaactctgtgagttgaatgcacacatcacaaagaagtttctgagaatgattctgtctagtttttatgtgtagatgtttccttttccaccataggcttcaaagcgctcaaaatgtccacatgcagattctgcaaaaggagtgtttcaaaactgctctatcaaaagaaaggttcaacgctgtgaggtgaatgcacacatcaaaatgaagtttctgagaatgcttctgtctatttcttatgtaaagatatttcatttttcaacatatgcctcaaagggaactgcatatccacctatagatccttcaaaaagagtatttcaaatctrctctatctaaagaagtgtacatctctgtgagttgaatgcacacatctcaaagaagtttctgagaatg

SEQ ID NO: 904615 - DNA, 667 bp, Homo sapiens
ggatatttggggcgctttgagacctatggtggaaaagaaattatcttcacataaaaactagacagaatcattctctgaaacctatttgtgatgtgcacattcaacttacagagttgaatctttcttttgatagagcagctttgaaacactctttttgtagaatctgcaagtggatattttgttctctttgaggcctatgttgaaaaacgaaatatctacacataaaaactagacagaagcactctgtgaaacttcttggcgatgtgtgcattccactcacagagttgaacatttcttttcataaagcagtttttaaacactctttttgtagaatccagaagtggatatttggagcgctttgaggcctatagtggaaaaggaaatatcttcacataaaaactagacagaagcattctcagaaacttctttgtgatgtgtgcattcaactcacagagttggaactttcttttgatatagcagttttgaaacactctttttgtagaatctgctaggggatattttgttcccttagaggcctatgttggaaatcgtaataacttcacatgaaagctagatagaarcattctcagaatcttctttgtgatatgagcattcatcccaccgggttgaacccttcttttgattgactagttttgaaacactcttt

SEQ ID NO: 904616 - DNA, 426 bp, Homo sapiens
gattctacaaaaagactgtttccaagctgcttaatcaaaagaaaatttaactctgtgagatgaatgcacatatcacaaagaattttctcagaatacatctgtctagtctttatgggaagatatttcctttttcaccataggcctcaaacagctcacaaatatccctttgcagattctacaaaaagactgtttccaaactgcttaatcaaaagaaagtgtcaactctgtgagacgaatgcacacatcaaaaagaagtttctcagaaagtttttgtctggtttatatttgaagatatttcrtctttcatcataggagtcaccctgctccaagtatccctttgcagattctacaagaaagtatgtccaaactgatcaatcaaaagaaatgttctaccctgtgaaatgaaaacacacaccacaaagaagt

SEQ ID NO: 904617 - DNA, 468 bp, Homo sapiens
gaaaaaaaaaaaaaaaaacactctctggctagggctgctgtctgtgtggagtttgcacattctccccatatctgcatggyttttctaccctgttttcctcccacctccctaagatgtacctattaggtgaagtggcatgtttaaatggtcccagtgtgggtgagtgtaatgtgcgcgtgttagtgcacctgctgtgggatggcatcctgtccggggctggttactgccttgtgccctgagtggctatgctaggatctggccatctgctaccctgaactgaaataattgggcagataattatcatgcttgtttttattaatctttcttaaatgtatgtataatcacatttattccaatgttttatactagaaacattttggtctttatttagaagtttggtgatgtctttatgaccagaaatatgccatagaaacttaattcctgtttatatcaattagcctgtggtca

SEQ ID NO: 904618 - DNA, 586 bp, Homo sapiens
aaattaaaaaaaattaggcccaccagacataacatgaagtctaaaggccaagacatgtctaaaatttggtgtgtcagttattgaattattgttttatcatctggttgtttcagtacgaaagaaaaatacaaaataagtttattgaaaaatattcaaaaatataaattgaaatgagaactttatttattttttgcctataagattgtaaaagttatgaagaacaatgttctccattgttgcagagaacatacagatatgaattcaaccaaaagccttaaaagtgttcatgctctgtttctgcacttctatgtctatgaatttatcttaaattattaattgagcttacaaaaatatatatttaaggaacatttaccttagtattacttataattgtggaaaattggaagtggaagcaataatctatgtctaacaaatataatggttagagaatttatatggattataacttttaataatataatcttataatatcatgcagcacagtgattatgatttggagctctaaagtgacaaatatggaacatatttctttgaaaatggaaaktaaggattcatattcttgttt

SEQ ID NO: 904619 - DNA, 717 bp, Homo sapiens
gaatctaggagcagatgggtgttaagaaaacctgttgctaagtaagagaacagtgccttagcccccatatagggtttagcagcaaaacttcactgcctgtaagacagacaggaatcacagtcccagacagtcccagccttagagcaactgaggtgcaaagtaagtgatcaaagcgaaaactcaggaatagggatctgctaatggaattcaggtgcaaagtagaaattgcatttcaggaataatgcatacatctggttatcaaatataggccagaatatgcaccctgaattagcagaggagacttgatactgaatcacagcttggattatagctctataactttctcctgcctcagttcagagttttcagagatcagagagagtttagggagcaagggaaaagaaatatatttaagcacctatgacttcgtgaagagagtggggatggtgggacagagctaagaatgaaacaggatgaaggacctgtgatccatttcagagtttcttctattttctactcctcacctaattgatttcatcatttaagtcaaacccattgccaggtcatataatgtcagatttgctgtgtgtgtggagaattcttccattgacttaactaacaaagttttctgaaaggcaaagscaatgtgaaaaagttttgtgctttcattactgtcaagctttttctcagaggtcaccaatgacaacctccttgctt

SEQ ID NO: 904620 - DNA, 708 bp, Homo sapiens
atttattatttaatagtaaaaagtattagtgaactcttatcatgtgtcaagcacaggactagacaatggtaatacaaagatgtgcatcacagtcactactgtgaggtcttcataacagaagaaaagtaaaaacataaactgctccatagagtgatgactgaaaaatgtgaatcatttcaaaatatgaaggtgtcactaagaagcacacatttatttaatggctgttttatctatgtggtgaggtttttgaaattattgaaatacttattttctcatgagctgatacatatttctaaagactttcatttcctttacttatgacgctttgaattgtacattttatgaatgctatctcctctatagtcttacaaagttagtaatttattatgtaatgtattgactttcattgtcagtcacttaatctctatcaataacgaactcaaagtattttcattccaaagaagggcttatgcatctttttgttttatggagtttctagcaccagtattcaactgagttcagggaagtatgcaatacattctgagaacaaaattttgaaactgaacagagatatgtaccccatgraatcaagatgacatttaaacattgagaagaataacatatttaaaattttaaacgaaacattactttgtaaaagaaggatgattcattcaaatgttaatatgtagacatatggcttcaggcata

SEQ ID NO: 904621 - DNA, 616 bp, Homo sapiens
tgaaacagaatagaaaacccagaaatagactcatacaaatatggccaattgacttttgctaaatgtgctaactatttcaatggaggaaagacagtgttttcaaaaaatagtsccagagcagttggatatttttaggaagaaaataaacctcaacctaagtctcataccttatataaaaataaacttaaaatagatcatggccataaattaaaacataaaattataagaattatataaaaacatagaaggaaatctttggaatctaaacctagacaaagagttcttagacttgataccaaaatcacaatttataaaggaaaccaccggtacactgtacctcaccaatgttcaaaacttttgttctgtgaaagaccttgtaaagaagatgaaaagacctactagagactgggagaaaatatgtgtaagccacatatctgacaaaggatccatatctacatgtataaataaccctcaaaactaaacagtaataaataaataaacaaacaaaccaaaaaatccagttagaacatgggcaaagggtataaagacccattcactgaagatacaaagatacacagatggaaaataatcacatggaaaaatattcgacttcatt

SEQ ID NO: 904622 - DNA, 582 bp, Homo sapiens
gcaggaacaaaatgtcaccagtctctttgctacagcataacaagagtcacattaattccayttcccaacaagttcctcatctccatctcagtccacctcagcctagacttcattgtccatatcactatcagcatttttgtcaaagccattcaacaagtctctaggaagtttcagactgtgctgcttctttctgtattctgagccttccaagtctctaagaagttcaaaaccttcccatatttttctgtcttcttctgagctctacaaatggttccgacttctgcctgttacccagttccaaagtcacttccacattttggggtattcttatagcagtaccccaatacatggtaccaatttacagtattggttcattttcacactgctatgaagaaatacccaaggctgggtaatttataaagaaaagaggtttaattgactcacagcacaggatggctggaaaggcctcaggaaaattaaaatcatggtggaaggggaaccaaaaacatgcttcttcacatggcagcaggagtgagaagaatgagagcctagcaaaggtggaagccccttataaaaccatca

SEQ ID NO: 904623 - DNA, 600 bp, Homo sapiens
ctgtatctcctgttccctttaacaactgctcagatgaatgcrttcatgattattatatatctcccatgactttattacgctctaaacttctaaagactagtgaacatgttctctagtataagccataagagcctagaaacatgttcaacatttggttaataatttatcttaaggtctattggctgttgaacacaaatcacttttttactctcactgcattatgaaagactgtaattattttaatgcaagatactacattgaattattagaaaatttagtattcgtaatatagagattaataagtctattaactaccacagtttgatcttattataagaattagtgggtgttgctttctcaccatctattttcatgtctgtaggctacttttggttttagtgtctaattaccctcttttttatgtctccttatctgccttggctactttactaaagttctacaaggagatacatgcattacctgccagctacacagaaatattcttcagaatgataacatttactgggtattactataatataaattctaattgatggttagagttggaataaaaacatgaaatacctttaacaccttgcc

SEQ ID NO: 904624 - DNA, 582 bp, Homo sapiens
tcagagaaatgcaaatcaaaaccacagtgagataccatctcacaccagctagaatgatgatcattaaaaagtcaggaaacaggtgctggagagratgtgaagaaataggaactcttttacactgttggtgggaccgtaaactagttcaaccactgtggaagacagtgtggcaattcctcaggaatctgggtctagaaataccatttgacccagctatcccattactggttatatacccaaaggattataaatcatgctattataaagacacaggcacacgtatgtttattgcggcactattcacaacagcaaaggctgggaaccaatccaaatgttcatcaatgatagactggattaagaaaacgtggcaaatgtacaccatggaatactatgcaaccataaaaaggatgagttcatgtcctttgtagagacatggatgaagctggaaaccatcattctgagcaaactatcgcaaggacagaaaaccaaacactgcatgttctcactcataggtgggaattgaacaatgagaacacttggacacagggcggggaacatcacacactggggactgtcatgggt

SEQ ID NO: 904625 - DNA, 654 bp, Homo sapiens
taaacaatatgaatgactgtagtggaaaggagaaacagtgtaaaccatgtggataaagacaaacaatgggatcaagatgatgctggcctcatacaatgarttgaggaggagtccctcctctcaatttttcggaatagtttctctaggaatggtaccagctcttctttgtacatctggtagaatttggctgtgaatctatcagatcctgggctttttttgattggtaggctacttattactgattcagttttggaactcattattggtctgttcagggaacaaatagccaggaaaaaactgaatcaatttcttcctggctcagtcttgggagggtgtatgtgtccaggaatttttccatctcttctaagttttctagtttgtgtgcatacaggtgttcatagtagcttctcatggctgtttttatttctgtgtagtcagtagtaacattccctttgtcatttctaattgtgtttatttgaattttctcttttttcttctttattattctagccaatgtcccatctcttttactatttctttcaaaaaaccaactcctggattcattgaccttttgaatactttgttgtgtcttgatttccttcaggtcagctctgatttttgttatttcttgccttctgctagctttggggttga

SEQ ID NO: 904626 - DNA, 654 bp, Homo sapiens
taaacaatatgaatgactgtagtggaaaggagaaacagtgtaaaccatgtggataaagacaaacaatgggatcaagatgatgctggcctcatacaatgagttgaggaggagtccctcctctcaatttttcggaatagtttctctaggaatggtaccagctcttctttgtacatctggtagaatttggctgtgaatctatcagatcctgggctttttttgattggtaggctacttattactgattcagttttggaactcattattggtctgttcagggaacaaatagccaggaaaaaactgaatcaatttcttcctggctcagtcttgggagggtgtatgtgtccaggaatttttccatctcttctaagttttctagtttgtgtgcatacaggtgttcatagtagcttctcatggctgtttttatttctgtgtagtcagtagtaacattccctttgtcatttctaattgtgtttatttgaattttctcttttttcttctttattattctagccaatgtcccatctmttttactatttctttcaaaaaaccaactcctggattcattgaccttttgaatactttgttgtgtcttgatttccttcaggtcagctctgatttttgttatttcttgccttctgctagctttggggttga

SEQ ID NO: 904627 - DNA, 593 bp, Homo sapiens
cagtgcatgagccaaaaagtctgtgtactacagtggctgggtctgaaagatgactgcacctgagtacacctgagtactgargagagcggaagggctgggaagagtccacaagtacatggagatttttttcttgttggattacagatctctttggcaatagtaaacttgggaacacatcaggagatcaaggctttttcatatcttctccccaagtataggaagggaatacttatgtaaatggataaggaggattatatttcccaagggattcattcctacctgccaataaacagtcctggttttctcagggacagtctgcttgatagttacagcataacatactagcttcatatagttattgatttaaacataggtggttcctaggagatcttacttgtttatgggttctactccaaggggaaaaagagccagtgcaccagcaggattgctctttataatatgcaacttagagcaagcaatgccacttgacaagggatgctttttgtgttattaggtcacatttctgcaatggagtttattccaggagtgttattcaaaatatgtaacaatcataatggcagaggcacatcaat

SEQ ID NO: 904628 - DNA, 666 bp, Homo sapiens
agacgaggatgcccacctccaccacttatactcaacatagtactggaaatcctagccagagcaatcaggcaagagaaagaaataaagggcatccaaactggaaaagaggcagtcaactaccattgtttgccaatgatatgatctcatacctggaaaaccctaagactcctccaagagactcctagatttgataaatgaattcagtaaaatctcattataaaatctacacaaatcagtagcaatgctgtccatcaacaatgatcaagctgagaatcaaatcaagaattaaattattttgcaatagctgcaaaaaataacataaaacacctaggaatatacttagccaaggaaggaaaatatctctaccaggagaactgcaaaacaccgctaaaagaaatcatagatgacacaaacaaatggaaatacatctcatgctcatgaattggaaaaatcaatatcatgaaaatcaccatacccccaaagcaatctacagattcaatgcaattcctatcaaaatgccaatgtcatttttcacagaattwaaaaaatatattaaaactcatatggaaccaaaaaagagcctgagtagccaaagcaatcctaagcaaaaagaaaaaatctggaggcatcacattactccagaattacattcaaattctactacaa

SEQ ID NO: 904629 - DNA, 617 bp, Homo sapiens
tttgttgaacagaacttgcatgtatctgartccatgaagattataaaaataaaaataaatgcatatgcctttctattataatggaattgctttgttttatttgcaagaatgttcaccacaagcttaattagtactctttagaccaaagaaataatgcctgacatgattcaccttctatcaggagtaaaatttaaaagaaaaatgtcaggtgtgaagacttggaagcactcagaatgtatcaattatttatattaacattcattatctgactaaaaggcaggataaaggctttgggggaatggtagggttcacataatttctctctaattattctaatttactataattaagacactaaaataatcttgagagaaacaataatgtcttaatatcaacccagagaggaaaaagctatttctgcatttttatctttatttactataactttttaatgcgacagaaagactgatcttgtgtaaaagtttttaaaattatggcttttagaacttctaacatgaaactcaaaattctaacagttaagtctataaagtgtttataaattcataaaatcgatcacatctatattatatatgaactctatgaagatcatggctttt

SEQ ID NO: 904630 - DNA, 589 bp, Homo sapiens
ctggtttctctccatgtttgtggttttatctacctttggtctttgatgatggtgacgtacagatggggttttggtgtggatgtcctttctgcaggtctgttggagtttgatggaggtccactccaggtcctgtttgcctgggtatcaccagtggaggctgcagaacagcaaatattgcagaatggcaaatgttgctgcctgatccttcctctggaagctttgtctcagagggtcacccggttgtatgaggtgtcagtcagcccctactcggaggtgtctcctagttaggctactcaggggtcagggacccacttgaggaggcagtctatccattctcagatctccaactccatgctgggagaagcactactctcttcaaagctgtcagacagggatatttaagtctgcagaagtttctgttgccttttgttcagctatgccctacccccagaggtggagtctacagaggcaggcagacctcattgagctgcggtgggctccacgaagtttgagcttcccagscactttgtttacttactcaagcctcagcaattgcggaagcccctcccccagccttgctgccaccttg

SEQ ID NO: 904631 - DNA, 683 bp, Homo sapiens
tattagtaaaatctttaggcattcaaaagctttaacawtttttttcataatatttgacctaaggtttaatctctgggaatttcctggggtaatactcatgggtgattacggtggtttaatttaattagtactcattgcagaactgctcagaatgaaaagaaaaaccccactcaacaaaaagggaataattaaataaatgatagtacatttgttcaatgaaattctaggcaactgtcacaaaaatccagtagcaggtatttaatgatcaaaaacaatttcataatatatgtgtacaactaggttttatgccagtccttcacccttttcttatttttacattaaaaacaggcataaatagacaagaagacacacacacacacacacacacactcaaagtgtgtctgtataaatactggggaataagcacaaaaccttgaagccagagtttagtaattgccagtaatttttgttactttttaaatgtaatctcaaaattttagaatgagcacatatgctttttgtaagaaacattgctaaaagaataacaatgttctaaaaacaaaattatattacactggccctgaaaatgtcaagttagtttttctggaatcacgcattaagtctgtttgatgaactcaatcgtatttggcatacaagtacttttcctggactctggctcagct

SEQ ID NO: 904632 - DNA, 632 bp, Homo sapiens
atcctttatgaggttggggttcttccctgacagttgctgaggctgtgggaacaaacgagttcatatagggagtgagtgaggaggragacttcagacgctcagggattctacaccatggaggaggctatgaaggagatccattttcttctaaatcattctgataggcttctggatggctttcggtctctggccaggtgctgatggaaagctctcctctctgatgaagattaatcatcaaacccaggagataattttattctgctcttctgagtcatgttagattccagaacaattaactttattttccccaaatcttgtatctcttgggaatcttccagtaactttggtttccagtctacggagctacttttggcagcttgttgtcaaagaagtgataattcttaaagcttagagtgctaaactgcaactcagttgagaattgaaacctttccagtaaggggctcagccccagacacctgggactcctctttctcctttcaccctcaggtacaggagtgttacataaaatggcactaatccacttttacagtttttgtgttattaagcaatacattaagatttaataaccataacaaaagggttgttttctcaccaagcagttattatttgtt

SEQ ID NO: 904633 - DNA, 632 bp, Homo sapiens
atcctttatgaggttggggttcttccctgacagttgctgaggctgtgggaacaaacgagttcatatagggagtgagtgaggagggagacttcagacgctcagggattctacaccatggaggaggctaygaaggagatccattttcttctaaatcattctgataggcttctggatggctttcggtctctggccaggtgctgatggaaagctctcctctctgatgaagattaatcatcaaacccaggagataattttattctgctcttctgagtcatgttagattccagaacaattaactttattttccccaaatcttgtatctcttgggaatcttccagtaactttggtttccagtctacggagctacttttggcagcttgttgtcaaagaagtgataattcttaaagcttagagtgctaaactgcaactcagttgagaattgaaacctttccagtaaggggctcagccccagacacctgggactcctctttctcctttcaccctcaggtacaggagtgttacataaaatggcactaatccacttttacagtttttgtgttattaagcaatacattaagatttaataaccataacaaaagggttgttttctcaccaagcagttattatttgtt

SEQ ID NO: 904634 - DNA, 604 bp, Homo sapiens
aaagggattattaaatatttcaatgcatgggaaaatatttcttctacctatttactgcctaaagyaaatgctaacccagaagatatttatgtcttggtttagaaatctgtagagtgacagagcaatctgagctctgtaatgtatgcaaaatttatcaggctcagagagacatgagtatgggactttggccacataccatacctgtgcccagggacaactgttaggaaacattttgttccagactagttgtgtcacctattatcttcatgttcctggaatttgtgatacaaagaacaatgtatagccaatcgatagcttatgtatttgaaagtatattcttggtaaacaacttaggaactgcctcttgtttttttcctaaaaaaacccacttgtaatggctggtagttggagtgtataatcagagcaacttgaatctacgctcctgagtggccatcttcaacaatcaccctggaataaactctttttaaactagaaaacaaaaacaaaggaaacaacaaaaaagaagaaatctatagagtgaactatatttttccaccttgcaaatagaaggggcaaaaatcaaccttgcctatctgatgattta

SEQ ID NO: 904635 - DNA, 527 bp, Homo sapiens
tctgacatagtctacctgaatgagatgggaccagaaaaacaattctggtagtatgacaaaataaggttrtttaacaccccccaaaaatcataccagctcaccagcaatggatccaaaccaagatgaaatctgaattgccagaaaaaagaaaaattggaaggttggttattaagctcatcaaggaggcaccagaaaaaggtgaagtccaacttaaagaagttgaaaacgtgatacaggatatgaaaggaaaaatcttcagtgaaataaagagcataaataaaaaacaattgcaacttctggaaatcaaggacacacttagagaaatgcaaaatgcactggaaagtctcagccatagaatcaaacaggcagaagaaagaacttctgagctcgaagacaaggcatttgaattaactcagtccatcaaagacaaagagaaaagaattttaaaaaaatgaacaaaggctccaagaagtttgggactatgttaaatgtcccaacctaagaataactagtgttcccgaggaaga

SEQ ID NO: 904636 - DNA, 577 bp, Homo sapiens
aaaaacaattctggtagtatgacaaaataaggttatttaacaccccccaaaaatcataccagctcaccagcaatggatccaaaccaagatgaaatctgaattgccagaaaaaagaaaaattggaaggttggttattaagctcatcaaggaggcaccagaaaaaggtgaagtccaacttaaagaagttgaaaacgtgatacaggatatgaaaggaaaaatcttcagtgaaataaagagcataaataaaaaacaattgcaacttctggaaatcaaggacacacttagagaaatgcaaaatgcactggaaagtctcagccatagaatcaaacaggcagaagaaagaacttctgagctcgaagacaaggcatttgaattaactcagtccatcaaagacaaagagaaaagaattttaaaaaaatgaacaaaggctccaagaagtttgggactatgttaaatgtcccaacctaagaataactagtgttccygaggaagaagagaaatctaaaagtttggaaagcatatttgagggaataattgaggaagatatccccggccttgctaaagatctagacattca

SEQ ID NO: 904637 - DNA, 674 bp, Homo sapiens
tttaggcatattttaaaattctaattytgttaaatatgaaaatgatgtgcataaaatcatcttaatgtctaagtttaggggattccaaaacatagttacttagttgtcataattacctgtatatgagaaaattaaaaacagatgaaaatcagagaccttctatgtaatcttaaatatttagactttccacctaatgccaagcatactctatgttagaggtcaaatctgttatgttactttttcttgaggtttcatattttgccccaaacctacaagaaaataaatcactgttctgtgggtacattgggtagcacacgctcatcccacgtctgtactcctttgtgatgtctcttggaacttgttctttttttgttcccccagcatagacggtttgtcccttccatcctccattcactgtacagttgactgccctcaatgcaaaaccaagtcagctgaagttagtcactcacaaaaaaatcagtgcttcagtcttgagcaataagttcaggaaacatttaagtgtttattacgtgccagttgctttcacaaaggttatcacaacaaattctgaggtagacactattactcctgcagctcagaaaggttcaatgatttgctcagggtcatggaactagttatttctgggattcagtccaagattttgactttgaatt

SEQ ID NO: 904638 - DNA, 600 bp, Homo sapiens
ctggagtctgagactaggatttaagcagggtgtgattcacctttgcaagttgatctcaaactggttgtgggcttctgcagctagaccagggagtgagccctgctggaactagtgtctgaaaggaatgtgtatcagctacccatcagcccaggctgtggccattgagggtggctccaccctctctagtggtggatcctcagcacggctgctacccacctctcacctgagcactccatctgctatttgaggatcactctgcctctgctcacaacagctggtgcctactgtcaccattggggtcagggcctcccatggacacccattcaccccattgcagccactgctaacattagtgaacaccacttatgatccagaaaattgtcccatcattgctattcccattgttcacaccacatctgattctcagggtcccgagaatctgttcacctgccaggtccataactaccataatggcattcaagaatgccacctggaggctgaagaatcagcctgccagtaactgacaatacaggtgctagtgtgcaccaycctggggcacaaagataggtatgctcagcccactgctgccacaattgtgac

SEQ ID NO: 904639 - DNA, 646 bp, Homo sapiens
tatacaagtaggcgctctgaatgcctggagacctgcctagacaagtgtcagagaggacccctgcaccccatactacaatctatgtccaggaagggtggggtggctcaggctgctggaccaggcaaatgggtgctccagatacctgcatttttgcctgcatgtgaagcagggagagacccactgcaccataatctattttgaggaagggtggagcagctcaagctgctgaactaggaaaatgggtgctccaaatgtctggagatctgcttggtcatggagcagagatagccttgctacaccacaatctatgtacttaaatggtggggtgactcaggctgttgaagcaggtgaatgagtactctgaatgcctgcagatctgctaggtgtggagcagagagaacctgactgcgccacaatctatgtccaggaaaggtggggtagctcaggctgctggtccaggcaagcaggtgctctgaatacctgctattttctctggggatggagaagagaggacaccactttgtaccccaatctcaggaaagcagggtasgtacaccagcagtggcacatgcagatcagttcctgcttgccaagctggactttgctgcaagtgttgccacccaggagaaactgcagctgtagtatc

SEQ ID NO: 904640 - DNA, 646 bp, Homo sapiens
tatacaagtaggcgctctgaatgcctggagacctgcctagacaagtgtcagagaggacccctgcaccccatactacaatctatgtccaggaagggtggggtggctcaggctgctggaccaggcaaatgggtgctccagatacctgcatttttgcctgcatgtgaagcagggagagacccactgcaccataatctattttgaggaagggtggagcagctcaagctgctgaactaggaaaatgggtgctccaaatgtctggagatctgcttggtcatggagcagagatagccttgctacaccacaatctatgtacttaaatggtggggtgactcaggctgttgaagcaggtgaatgagtactctgaatgcctgcagatctgctaggtgtggagcagagagaacctgactgcgccacaatctatgtccaggaaaggtggggtagctcaggctgctggtccaggcaagcaggtgctctgaatacctgctattttctctggggatggagaagagaggacaccactttgtaccccaatctcaggaaagcagggtacgtacaccagcagtggcacatgcagatcagttcctgsttgccaagctggactttgctgcaagtgttgccacccaggagaaactgcagctgtagtatc

SEQ ID NO: 904641 - DNA, 634 bp, Homo sapiens
gaaggcatattttttctcctgtatcattttcttctctagtttttcmatgtttgcaagggcttttagtcatgttgtatccaaaatgccttcaaaatagttatagtattagaaaaatacaaaagtacttcaaaatgtgtggaaacagtacatgtaaacaacagatcaaaatatcttaaaagagtttacctcttcatctttctcacttagtgtacacaggcaacatagaacatttggttatgtggtatgcaattcaaatttgttccatgtgatattctctgattagaaactactgtgttgagtgtgtctttcttaactaattttattagttatactaataattatttttattaataaattaaaaataaaaatagttatactaataaaataaaattagaaatactaattttattgtgtattttgtaaatttttgattaataagttcttatgccatgaaaagaagttgtcttaaaactggcatcattttccaagtcattatggcaaacaactaaccaaataggtatggggggaaagtcagtagagcagcagaagcaatatatcattccagtctgcttcttaatggcattctcccctctcctatgcacagggcagagagatccggagctgcatcccctgg

SEQ ID NO: 904642 - DNA, 663 bp, Homo sapiens
gaaagcgaggatgccccaaatttgaatatagttcctccctctgtgaaattctctcagaagaattaaaatcgatacattagtcccttcgcaagtttaagtctaatgttaacaaaacccaagtgaattaaagtctgaatcaaactctactgctttggtgaattaaaagcccaacccaacgtgactaattatatactgacttcccattaagggttggggtgaggggtctccacagtgttagcagagtgaggggtcctgccagggcttgcagctggggctcgctcttcttgaggctggtgtggttcctgcaggactgcagaaaatatatgctgggtttctgatgactttactgatgaaaagtttcaagcagttattattttcactggtgggccacacctaccatattgagaaaagaagccaaacctcatcctctaaagcaattatcccagaaaaaattacattctcagaatgtggggcttagtatattgtcaaaaactatggccccagatgcaatgtcaacatgaaggggaggctgaatgagtcctggaatggtagatggaagaacctcctcccaaacatatccacatcctaatcccatggaccctgtsatacgttactttgacttttcagacatcattaaggatttgagatgggcagattatcctg

SEQ ID NO: 904643 - DNA, 588 bp, Homo sapiens
ttggaatggggatcaggtaaaggaatttcaattttttaaaacattttttccatttaaaattttacagtgaagtgtatccatctttttaaactgcagaatatcaaaagtcaggaaaacaaaaaatcacatatagtatatataatagatatttattaaataagaacttagtgagtttcataattctgttacaaaatattactattatacttcacatttaatttggctttataatatatatatttttaatatgcattatgtcatttgggttttatataaccctcttgagttgggcagacagcatcttacaaaatgggattttgaggctctgagaggttacatcatttttccaaggttatacataagtgatacttggacaatcttcttgttacttgacttttattcttttacctgagattttttggggcccctctatgtgctaggcccactgttctccccactacaccatatgcactgcaatttgcaaataaagatttgaaaatacacaagcaccatataactcaaagcytgaaaatgataaatacaaacctctaactaatggataactcttagatgcaaattttattttgg

SEQ ID NO: 904644 - DNA, 660 bp, Homo sapiens
aacttttatcagcttcagaaatattccttccaatattttatgagtgttgccacctcccattgtttctgttgtttcagcccaaaattcctattagatttttttgtaataacttgtatctatgtctcttaacttccactcattatgcgacctttttttgtatttttgctttgcttattgtgagatcttcttgactcactggaccagatcagcagcttggtcttcagatatatccattttattattcactgtcctttgaaacatttattgttgcagtcatatttttaactttcttattttccttcagttacctagtcaacaaacaaatattaagtgcttaaaatgtactgagcactcttccagatggaagggatacaaaataacatcttttctccaaaggacctactttctacaggagggaagcataaaataaaacagtaaaccaactaaggggtggaatgaactaataagagaaaagaatcagagtggaatcctagaagctgggtgaaaaagctgtttctgaaaggaaagtaagatcaaatgtctcaaatgctatgcatagacccaartagaccagaagaaaactgacatttgataacaggaggccaacaggccagcttgtttaggcaagtttttgtgggagcatctgcttattttcagtgg

SEQ ID NO: 904645 - DNA, 543 bp, Homo sapiens
ctgtgaagtgcttgagaaatagtataaattctacaaaaagtgctgggacaactggatatccacatgcaaaaatgcatttggatccctacctcacaccatacagaaaaattatctcaaaggagatcatagagttatgcaatggcttggatatggttgtctccaccaaaaccaatgttgaaacttgatctccaatgtgtcagtgttgggcctagaagaggtatttgggttatgcagacagaaccctcatgaatggcttggtgatattctcgtgggagtgagtgagttcttgttctgacaaggtaagaacagttcttgaaggaaaagattagttttgttgaggtagtttgtttttaagcaaattccctcctcatgtttggctgtattttgtacgtgcccacttcccctttgaccttcttcaycatgttttgacacagcacaaaagccctcaccagagactggtgccatgcttctgctatggcccccaacaaccatgagtgaaataaacctctttctttataatttatccagccccaaatattcctt

SEQ ID NO: 904646 - DNA, 592 bp, Homo sapiens
taacatttggaaaatatctttctgcctactatgtggagaatggaccactgtagacaccttaataaacatggcaaagaggtgtgaagctactgaggagaggaatttgacttgagtgacaatagcagacaaggagagaaggttaagagacaaagtttctctttttttctttttttgaggtggagtcttgctctgtcgcccaggctggagtgcaatggcgtgatctcggctcactgcaacctccacctcctgagttcaagcgattcttcttcctcagcctctgagtagctgcgattacagacgtgcaccaccacatccagctattttttttgttatatttttagtagagacagggtttcaccatgttggccaggctggtctcgaactcccgaccccaggtgatctgcccacctcagcctccagaagtgttgggattacaagtgtgagccactacaccaagcctagagacaaaattttaaaygtcaattcaaaacatttaacttgcaggtgcagaatactaaaataaataattttttttgtgctgagaccagttgaaactctaatgcgtcttaaaagaagcagtatcaaaaatacc

SEQ ID NO: 904647 - DNA, 627 bp, Homo sapiens
ggttattttgcctgttagttgatgcagtttcttcatagtgtcaatggtccttacaawttggtatgtttttgtggtggctgttaccagtttttcctttccatatttagtgcttccttcaggagctcttgtaaggcagacctggtggtggcaaaacctctcagcatttgtttgtctgtaaaggattctatttctccttcacttatgaagcttagtttggctggatatgtaattctgggttgaaaattcttttctttaagagtgttgaatattggcccccaatctcttctggcttgtagggtttctgcagagaattcctctgttagtcttggactttcttgaagaaatgggcttctctttgtgggcaacttgacctttctctctggctgcccttaacattttttcctttatttcaaccttggtgaatctgacgattgtgtgtcttggggttgctcttcttgaggattatctttatggtgttctctgtatttcctgaatttgaatgttggcctctcttgccaggttggggaagttctcctggataatatcctgaagagtgttttccaacttggttccattctccccgtgactttcaggtacactaatcaaatgtaagtttggtcttttcac

SEQ ID NO: 904648 - DNA, 627 bp, Homo sapiens
ggttattttgcctgttagttgatgcagtttcttcatagtgtcaatggtccttacaatttggtatgtttttgtggtggctgttaccaktttttcctttccatatttagtgcttccttcaggagctcttgtaaggcagacctggtggtggcaaaacctctcagcatttgtttgtctgtaaaggattctatttctccttcacttatgaagcttagtttggctggatatgtaattctgggttgaaaattcttttctttaagagtgttgaatattggcccccaatctcttctggcttgtagggtttctgcagagaattcctctgttagtcttggactttcttgaagaaatgggcttctctttgtgggcaacttgacctttctctctggctgcccttaacattttttcctttatttcaaccttggtgaatctgacgattgtgtgtcttggggttgctcttcttgaggattatctttatggtgttctctgtatttcctgaatttgaatgttggcctctcttgccaggttggggaagttctcctggataatatcctgaagagtgttttccaacttggttccattctccccgtgactttcaggtacactaatcaaatgtaagtttggtcttttcac

SEQ ID NO: 904649 - DNA, 622 bp, Homo sapiens
taatcctaggactttaggaggccaagatgggtggatggcctgagcgaagtgtttaagactagcctggacaacgtggcaaaactccgtctctataaaaattagctgggcgtggtagtgtacacctgtagtcctggctactcaggaggctgtgtaggaggatggcttgaccccaggaggttgagactgcagtgagctgtgtttgtgtctctgtactcgagcctgggcgacagagcaagaccctgtcaaaaaaaaaaaaaaagaaacaactttttttttacacttcaatagagctttcttaaaatcagattatgagataaaaagtagttgcctgcagaaaacttagtgatttggggtgttatatactaatggtatggggcctatctcaaagccactattgaagactatgggacttctgcctctattaagggagaaggacagttcatgggatcgttttccctacttatataatgataaatagttgttactatttatcaaactaacttttatcccatctctttcttggatgtaggattctactggagattgctttagttagccactgaaattctgaaagcaaatacaacttyaattattgaatacctgagtgtcaataatgaattta

SEQ ID NO: 904650 - DNA, 635 bp, Homo sapiens
tctgtgtctgcgtgtgtgttttactggagagacattttgctccccatcacctttcaaaaaaattacatctgttttcaayaatacaacctcaaccttctcagcatttatttctgctgtacaaagcctaggaaaataagacattagcaatatcataaataaaatgctagctatttaaatatagtcaaatctacattattttcacaaatggattcaaattactaatatatgtttgcatgtggtctttcaggtacataataatatgttagtgtaaatgtgaagttaattttaataaataatatttgtttagattctggattatgttataaaatcaataagaatttatttatctggttaaaattacaaaatagagatgcacacactaaaatagtcaagggaaagtgtaaataatgtatctgctttcaacatataaagtgaaataaacatctttttttccaaagatatgtcatcaaatatgatttgagaatagattcagtgctttgcacctcatgttggctgactgttctactccaagtatgattcaatgtattaattttactttaatgtctctatgattcagcaactacataattcctgaataaataaccagatattcttagatattattactatagtcc

SEQ ID NO: 904651 - DNA, 656 bp, Homo sapiens
gggatctcagattctacttccttagttggagctcctcaattccttctaaatccatttcccctttaaaggctcctctctcagtggcctcttttacctagtcctcagggctcaaaaccatggcattatattctgttcctcctctatcacccccatccaaatcattgcaagttcagaagaacttatttccatgacttgcttcattttggttcccttcatcctcatttctgctgctgttgccttcttttgtgccttcattatgtctccactgtcctccctcccttccatgtttcctaatttcatttggtcctacacatgaatacctagccaattcttctaaagctcagatctcctcatatctcttctaagcaaacaacaaccaactaaccaaacaacaacaaaaccacacacgcagacacacacagacacacacacccttttgataattctcttttgctgaataaaagcatcttctttcatgcttttgttccagcttactttctcccctcttctttcatcatattatctcctgcaccctcattcagaataaactacttgctgatgttctcccttactaaattgttaataaggagctatgttcacctctgtaacctacctggtgtctygaatgctgctcggagcacagcaggcactcagta

SEQ ID NO: 904652 - DNA, 590 bp, Homo sapiens
cttacatacagcaggagcccagaggagtgtatggggttgaagaggctggttaaggagggagtgtccagggcagaaaatgaacttaaccttaggcaggtcatgcaagcacattaatccaaagtggcaagtgagagtcagtccagaaatgaatccagtagttcaagttagggacatttgggatgaacacggggaattccccaaccacagggctttttgtatgtaagcagcaagttatggtcagcagttctcagctgtgtcattcactgctttggggacccagtagtagaccccagcatgagcccacaactgaacaataccttgaatagcatgagcccagaaaatggaaattctttgtccaaagtcagccagtggttactggcagattgggagttagtatttcactcaaactaaccagtcattaggacaaacatagaaaaccagtttttgccgatgataaacatgtttgcaaaggaggatcattccgaggagcaatacaaaagcagtgacatcaacatataacaaaatgaagttctttccggggtrattgcagaaatggtagtcatacaatgactcaaactttactgatccaa

SEQ ID NO: 904653 - DNA, 620 bp, Homo sapiens
cctaattgtatccctccccaagccccccctaatccactcacaggccctggtgtgtgatgttccccgccctgtgtccaagtgttctcattgttcaattcacacctrtgagtgaaaacatgtggtgtttggttttctgcccttgtgatagtttgctgagaatgatggtttccagctttatccatgtccctgaaaaggacatgaactcacccttttttatggatgcatagtattccatggtgtatatgtgccacattttcttaattcagttgaaaattgatggacatttaggtcggttccaagtctttgctattgtaaatagtgccacaataaacatacatgtgcgtgtgtctttatggcagcatgatttataatccttcgggtatatacccagtaatgggattgctgggtcaaatggtatttctactcctagatccttgaggaatctccacactgtcttccacaatggttgaactaatttacactcccaccaacagtgtaaaagttttcctatttctccacatcctctccagcagctattgtttgatgattttttaatgatcgccattctaactggtgtgagatggtatctcattgtggctttgatttgcatttctctgatg

SEQ ID NO: 904654 - DNA, 535 bp, Homo sapiens
atggtgggctgaggagcagcagatgggaagggagggctcakgatgtgggagggaagaggcggtggactgcaggggtgctgaggatgaggtgggactgtgggttggaggctcaggaaggtatgcagacactgttctataaggcacatgcccccccaggtgaagtgaggcagacagccctccctcaccagctaggcccatctgattcagctccatccttgtcacccccagagccacaaggactccccagagaactcaaagaaggatgttggtgcagccaagtcacccagaaaaggtgggctggatgaggtcgatttgggagataatatcccaggataggaagtcattgttattcagaacatggttttgctgtgaagatcctggcctccaggatagagtccttctctcacaggtaagggggaggaagggatgctggagaccaggcctgagtctgctgggaaggatgaggctaaagtaccaagtcttacccatgctccttctgaccccatgtcataggcaggaaacggagagtcctgtg

SEQ ID NO: 904655 - DNA, 658 bp, Homo sapiens
ctagaatcaattgtgtttcccagaagcagtaataggatccrtattgtcacactggctttggacagggaagaaggggaaagggctgatagcctactgagattttgccaggccttttgtacaagttgccagtacttcacctatagaggatcatgtgtccaatcaaccatttctttatttcaatcctgttcatccaagcaaataaaaattcctcaacgaatctcatgtgagaaaaccatgggttatcagaattgattaaagttatgtcttacttttatattccactggtcatttcatcagtagtcatatgtgcttcattaacaatctgtattaatgtagaggttttttccttttgggtactaaaatgccatcctaggatataatcctatgctttcaattttatgtctactctggctgtgatgtttctgaaaacagtgcctaacaactgggtcagtttgtccactgacatctgggaaaatgctagacttactttggtccatgagtggaagaaaagtcacatagaagcatatggtctcttcacattttcccagcttctggcaacttccaaaacagctgcaaagagtggtttgtgccagcacttcagagatcgctttagcctttttgttcagagaggacatatttctctctgtggattaacaat

SEQ ID NO: 904656 - DNA, 638 bp, Homo sapiens
gatgggtgcagcaaaccaacatggcacatrtatacttatgtaacaaacctgcacgttgtgcacatgtaccctagaacttaaagtataataataataaaaaaaaaacagtccaaagggatctacttgtctggacactctttagaacattacattgatccattttatcagtgatgtcatggtaatcagaccagatatacaagacacattcactccatgtatagcaggaaataaacccaccatatcagtaaacttttggggttcagtactctggaacattccccccaaggtagagaacaaattattgtatctcacaactcctacaaaaagaaagtagcacaatgttggtaagcttgtttaatttatggaggcagcttattctacacttgagaatactgctccagcccatttactgagtgactcagaaggctactagctttcattgaggccaggtaaggaaagagctttttaagtatgggctggaatgtgagcatccctgttacatgggccaaatggccagtagaccctatggtaccaaaggtacccattacgaaaagagatgctgtgtggaaatcatgttgagccccaataggagaatcacaacatggacacttatggttctggagcaacagcatgtcatc

SEQ ID NO: 904657 - DNA, 594 bp, Homo sapiens
atctcctgacttcgtgatctgcccgcctcggcctcccaaagtgttaggattacaggcgtgagccaccgcaccaggccactactccccaaactcttaaaagtggcacactgtgtgtctaaactatttgtgcaaacaatgtggtttatgctgaacacctgctttccttatgggaatctggaattttggtaagtgctcggcagaggttacccacatgatcagccctgaaggtaatattccttgcccacagtaagtagtcaaaatgttagccattattatttcattactgcactttaaagagtcttataaagtgggccaatttacttttctcagcctattatcaagttcaataattagaaaagtatcagatacatttattgatgtagttagcatttccagtgttcttcattttgttgtgtaaatccatttggtatcattaccctactgcctgaacaactgtctttaacatttctggtaatgcagatctgctggttatcaattctttcagctactgtatatctggggaaaaaaaamcactttatttcgcctttgtttttgaaagatattttctttgggtagaaattttaggctgacagt

SEQ ID NO: 904658 - DNA, 667 bp, Homo sapiens
attctgatccttccagaggtggtagagaacagcgtagagtgtggatcctacagccaggctttctaacttctcaccataggtttcccactaattggatgatgttccacaagttacttcacccttctgtgcctcagtttacttatctgtaaatgaagttcatggtagtgtacctactactcattggatggttgtgagaattcaatggattgttttaatttttgttagctatttttattgggtttaaactacttgttgaggtgacttctcctaagagaaggaagacctgatctgagttctgccttgcacaaacacctttacccttctgagcctcaacaactccgtctgtaaaatgggaagattacatctgagctacttgcatcactgagctggcatgaagacaaagtgagaaaatgtggcagtgccttgtaaaccgaaagagctattcaaggcaaagtagtaaatacatgccacacccaccaacttggctacatgactttctccctcaacagctacagtgtgaatccagcgagctatctttctcagtttcttcccaccagccgatcaccctactctctttttagggcaattcatattgagaacagctgccacagtctgcaagttctttttctactgtctcgygtagtgttttagacatcagacattctgc

SEQ ID NO: 904659 - DNA, 555 bp, Homo sapiens
ctaaactccagcctgggcaacaagagcggaactctgtctaaaacaaacaaacaaacaaacaaacctgattttaaaaaaagttcttggaataatgtctggcacacagtgaatactcagtaaatattagcttttattaccttttctattctggaagcagaaaaagcatggtaaaaaggtgaaatactttttctcccttttattagaaagtccttgaactttagaaaagggattccctaattatatctaactagctcccttcacctcacccacaattgctctctgggaatcttttcattccaagcccatttcaagaagcacctcttctgggaagtcttccctgatgcctgacctctcctcttcctcctccacattttctacagcattttgatacctgccatggaatacttctgaatatggccaatacctgctttccagtttctgggtgtctctttccaatcacctaagtcagtggatctcarctaccttcctgtggaatatattgaccctagagctaaacaaagatgttttgctgctgagattaaataatgacattta

SEQ ID NO: 904660 - DNA, 590 bp, Homo sapiens
aaacaccaattaaaactgtgaaaaatatcacctaccatagttastctaatggaacatgctcttacaggaaggaactgattcaatgtttattttcataccagctgtggcttccaaatgtaaatcatttcacttcttgctagtgtatgccgatcctccgtggcccctgcattgatcctatggtcgaataatttgcacgtagtattacataacaaggaagctctactggggctgcagttgaattcccttaattgtctggcaaatcatcattttctttatgtgttttactagtattctcattttggggattactgttaactgatggagggcaaaagccatcaccaaatagccacagttcttcctggcacatgtgacaactgtcctaggttgagacaatctcttttacaataattctgacactttgatctttcttgtcacatcagtcactggagtctgttagtacaacgctatgtatccacataattcagacttctgttgcagcgcaagttcgagttcagtacgggtttgcttatttctaggatttaacccagtaccaggagcctgccaatgctagtaaatgagctctggatgga

SEQ ID NO: 904661 - DNA, 608 bp, Homo sapiens
taccattgcaagtagttcaaaaaaaaaccctaaggcccacccacaagtctccagtgtaactggcagaataaaaccctaatataagaagccaatttgtatttcaacggtgcttttcttttatcaaatgtttatatatctttttaaacgtacactcattttccgtgttattttcttccacttgtactgcaatttttgtagaaggtaacaacttggaaaccctataatacaatttttaaaacggctggttcttttaaaagcaacgttctctttgtagaacatttagaaaagtgtaaaggataaaactacacaaacaactgcccaacttggggttctgtccattttgtgcaattgaaaggcagttttcctgaccctgagagaaaaatacagctggattttagttaggaggtaaggggggttggggtggggagagtgacttcctgttttgagttaaaccaaccaaaatgctaaagaactgctttctgacaagattgtcttgggcttttattcataacctgggacggaacccgccctgrggatccagtctaacatcagtggtgtctgtggcattaggggctttctgacaagagggaacctgaagtaacctgtgg

SEQ ID NO: 904662 - DNA, 599 bp, Homo sapiens
atgtgaacagttgagttatgacaaagtgtagtggagaaaggattgtcttttcaatatatcatgttattgtttgtatcccaatactgaaaagcaagtaaattaattcctaccacaygtcatgtacaaaaaaatatataccaaaaaaggtagattttaaatctaaatgcaaaaccttcaagaagataactcaggatatcgttatgaccttggaataggcatttttttttttttttgagacgaagtctcactctgttgcccaagctggagtgaagtggtgctcgctcactgcaacctccacttcctgggttcaagcgactctcctgcctcagcctcctgagtagctgggactacaggcacacaccaccatgcccagctaatttttgtatttttaatagaggcggggtttcaatatgttgcccaggatggtctcaaactcctgacctcgtgatccgcccaccttggcctcccaaagtgctgggattacaggcatgagccaccacacctagccagcaatttttttaaataattaattgttttgtattcttaaatggtacatgaaatgtgctaatcataaaggaaaagattaatagatggactac

SEQ ID NO: 904663 - DNA, 599 bp, Homo sapiens
atgtgaacagttgagttatgacaaagtgtagtggagaaaggattgtcttttcaatatatcatgttattgtttgtatcccaatactgaaaagcaagtaaattaattcctaccacatgtcatgtacaaaaaaatatataccaaaaaaggtagattttaaatctaaatgcaaaaccttcaagaagataactcaggatatcgttatgaccttggaataggcatttttttttttttttgagacgaagtctcactctgttgcccaagctggagtgaagtggtgctcgctcactgcaacctccacttcctgggttcaagcgactctcctgcctcagcctcctgagtagctgggactacaggcacacaccaccatgcccagctaatttttgtatttttaatagaggcggggtttcaatatgttgcccaggatggtctcaaactcctgacctcgtgatccgcccaccttggcctcccaaagygctgggattacaggcatgagccaccacacctagccagcaatttttttaaataattaattgttttgtattcttaaatggtacatgaaatgtgctaatcataaaggaaaagattaatagatggactac

SEQ ID NO: 904664 - DNA, 579 bp, Homo sapiens
ctgtgtcataaattgatagcactccagctaacaaaagattgacaataaaacttactgtaaataaaaccatctaaatcttgagtatgaataaagtccattagtttgggttgtatttttattattgttgtttttgactcctgtgctgcatgtacattttcttttattcatctactgcaaaatcatacatttgcacatttaccagagaagggcaagaaaatataatcaagtgatattacttcttagaccttggaagatttggataggtgagaaaggtgaaagtcaacagccaaaaaagaaagagagagaaagaaagaaagaagagagagagagaaagaaagaaaaagaaagaaagaaagaaagaaaagaaggaaaagaaagaaggaaggagaaagaaagagaaagaaagaaagaaaggaaagaaaaagaaagattgcacactgatcccctctgcctgtaaatttcccttacttccattgcctttgacccatgaatctggctcacacttgcttcgctgcttaaaggtcacttcctyagggaaaccttccctgacctcccagctataaaaatctaccacaacag

SEQ ID NO: 904665 - DNA, 657 bp, Homo sapiens
ggggactcaaagcatgtgataccaggaaaacgtgactcctctgccttcttgcatatcaccttctcccaccttcacctccttccctttacagtttaagttccatggtccattactgcarctactcttttgcaaaaaactctgtcatccttgctgcgtttcattcttccattacaggtgccaggcaaaaagactgactccagatcaaaccacctatccgtttctctgctaagatccccaggctgctgactttgcaagaagaaatcttacaaatgtacacatcaattgcactgtaaactaatagtctccatccttaactggttcctcaaaacgacatggtagtcatttagtattttcctaggtggctctctctcctttgcacagtgcttcacagaattcaacgttttcactttcctcaaaatctgacgcctgccttcctccccaacagagaagataatgctattaaggaactccttcaccttctcaccctaaccagtggtatgagtaaatgcctgataactggctctccagatgtcagggtatggggaagtactgatgtatagtatttactaatttccatgatgtaaatatccccactgtggctgaattccagctgttaatgtgaggttaaccaattagcaaaattgctgaaaatttaac

SEQ ID NO: 904666 - DNA, 657 bp, Homo sapiens
ggggactcaaagcatgtgataccaggaaaacgtgactcctctgccttcttgcatatcaccttctcccaccttcacctccttccctttacagtttaagttccatggtccattactgcaactactcttttgcaaaaaactctgtcatccttgctgcgtttcattcttccattacaggtgccaggcaaaaagactgactccagatcaaaccacctatccgtttctctgctaagatccccaggctgctgactttgcaagaagaaatcttacaaatgtacacatcaattgcactgtaaactaatagtctccatccttaactggttcctcaaaacgacatggtagtcatttagtattttcctaggtggctctctctcctttgcacagtgcttcacagaattcaacgttttcactttcctcaaaatctgacgcctgccttcctccccaacagagaagataatgctattaaggaactccttcaccttctcaccctaaccagtggtatgagtaaatgcctgataactggctctccagatgtcagggtatggggaagtactgatgtatagtatttactaatttccatgatrtaaatatccccactgtggctgaattccagctgttaatgtgaggttaaccaattagcaaaattgctgaaaatttaac

SEQ ID NO: 904667 - DNA, 632 bp, Homo sapiens
gaatacttaaaagaatccagatttaatgaaatttaaaacttgtacttctttatagggacattcttaagtaayaactgttttttgtgtttttttgtttgtttgtttttggagacggagttttactcttgtcccccaggctggggtgcgatggcctgacctcggctcactgcaaactccgcctcctgggttcaagggattctcctgcctcagcctcccgagtagctgggattataggcgcctgccaccacacctggctaatttttgtatctttagtagagacagggtttcaccatgttggccaggctggtcttgaactcctgacctcaggtgatccacctgcctcagccttccaaagtgctgggattacaggcatgagccaccgctcctggccttttttttttttttttttttttttttttttccctgcaagaatagaccttgctaggtgtggtggctcacaccaaaagaccaaacaaaacaaacaacaaaaatgacaacaacaacaaaatagctgaactggaagtaaagaatatactgactattactaggaccctttgctgtcattgccttgatttctgccaaggcaccagcactttcacccatcatcactttgtttcactggcacaagtatc

SEQ ID NO: 904668 - DNA, 621 bp, Homo sapiens
gcatttcacctttctttcaagtgtggaatttyaaaatcaaaacaaaacagaaagaacacgttttccagattcctttgaagcaacggttctagaggcaaattagatctgccaatcatatgcacgggcatgaaatttggaaagccaaagtgaggtagaagccatcttcctgtcacattttgtctgcttctgcttggaagcctgtggtggaaaccacaatttctctgcagcaattaatcttcaacagcctcttttcctagctctgtgctgcctcagtatggagtcactagcgtcatgtggccacggagcatatgcaatgtggctgggccaaatggagatgttctgtaagtgtaaaacacacagtgggctttcatgtcttactattccccaaaacataaataagtaaaaatcaagtaatcaattttcataagcattgtgtattgaaatattttatatataattatgtaagtataatcatattaatttttgttaaaaaatttaaaattaattttacctattttactcccttgtttaatgagggcacaagaaaattttaatttacatatatgtctcacattatattgctattagtcagcactgctccagcttacttgtgtagagaga

SEQ ID NO: 904669 - DNA, 637 bp, Homo sapiens
ccatcagaattaattcagtaagcactgttagattcttttggcccatttagtccagttatctcttccaggaagaaacagaacagttgttaaaagattttatgtaatgtcatctaaacaaattataacatttgtagacaaaaggtgttattcacgataggtaataaacattatttctacatctgatcctaaaactaaaaaaaaaaaaaacaagaaaacttctatcaaaagaagggacccatattaaatacacatataattatgaggtaagttaaactgtaaatatcaataatgtttggaacacatcaattgataacaaaattatatagttattaatatggaaatgttagactttatttcacccacacagtggcgtcacagttttttttttctagtatacttccatattttccaaagaattcttgtggaattgtgctattattaaaaagtgagatagagatagcatgaagctactgttgtttaaattttagtttccctcacttgcactttctgggtagggatttaacaataaactcacaagtaatatgtctttgtgaaaattctgtaagcaaagatattttaaccatgaccaactaaggccactttccmttaatattctgacttccacttcatcacactt

SEQ ID NO: 904670 - DNA, 638 bp, Homo sapiens
gcagatgaaaaaaatcataactgttcattggatttaatcttgatagaatgtagaaccaacttaattcagcatattctataatcaaaattattttacatattatattttattaatgcaattttccttcaatatttactccaatcttgtgaacaaactattaatgttctcattctatagacaagtagatatagcaaatcattttgcacaattgctacaagttctaaaattctggtattgtattccaatgctctgtcccctgatacagtctcttgtgtatttggatgcccaaagattgtttaagccactcatttttgtgtgttttaatattatttaatatataaacagcttaatacaattcagtggtaaattaaccagtagacctgatgattttagaaacagaataagtccagccaactaatgaacgtccatttcttccatttgattctgcagtgagtggcatgaacacatggctgaccagtttgtcactgtcttctgattcactactagagaattatgcactgctgaatatatgtcgtacagtatatacaagagcacagttaacatccccttgagtcatggtgttgttcattmtttttgtcataatatgaactgtaactttatgcatatcttcaagtttg

SEQ ID NO: 904671 - DNA, 604 bp, Homo sapiens
ggttaaagacaatgagggaccaggcgcagtggctcacacctgtaatctcagccctttgggaggctgaggtgggtggatcacttaagatcaggagtttgagaccagcctggccaacatactgaaaccccatctctactaataatacaaaaaaaaaaaaaaaaattagctgggcatgatggcgggcgcctgtaatcccagctactcaggaggctgaggcaggagaattgcttgaacccaggaggcagaggttgcagtgagctaagattgtgccattgtgctccagcctgggcaacaagagcaaaactctgtctcaaaaaaaaaaaaaaaaaaaaggacaatcaggcagagagagggcaaaggctcccttactcagacttttgctcttatctagggctatctatctatctaggactcagattagatgaggcacactcacactggggaggacagtctgctttacccagtctactagctcaaacattaatctcacttagaaacattctcacagatacaccctgaataatgtttgacaacatatgtgggcatccaggcccagtcaagtcgacacatayaatccatcccttgtcaacttggcacccacatg

SEQ ID NO: 904672 - DNA, 649 bp, Homo sapiens
ttagaatgaataagatctagtatttsatagcacaatagggtgacaacagtcaatcgtaatttaattatgcatttaaacataactaaaagagcataacttgtttgtaacacaaaggataaatgctcaagggggtgcatatccaatttttattatgtaattatacaatgcatgcctgtaccaaaatatctcatatagcccataaacatacctgttacatacccacacaaattttaaaaataattttaaaaaagaaaatttatatattttgtgatatctaattcaaatgtctttagagttatactgaaaaatacatatagctttctatctcagagccaaagtaataaaaaatcaaattaagttgaagaggtgaattggagactattttgagtaggtaataaagcagataatatgtataacctacactcctgaacaagggctctttatttaaaagttttgaagctcatgatacagtgacattaaaaaagggcttggtatgacagaaaagtcagggagagggaccttctgatatctacagtctacgctatctgtagcccaaatctactgtcatccaaaacttcaaggagctagatgtgactattttccctggcataaacatatttaactctgggaagatttgaggttatgcata

SEQ ID NO: 904673 - DNA, 612 bp, Homo sapiens
atttttctttattgttctgtggttactggtgcattgctgtttttgtaaagaaattgtgaaacttgctataccctacaggtttttgttctgatttataatcatttttatgaaatgttactaaagcagaattaattttaaattggctaatttgaagcatttcaaggcccacattctaaaactggaattgaagacaagtatttcatttaaacaagtagaaacaaatagaacaataattttcatgttccattaatgaaatgccaatggattcattttgtcctaaaaagaatcattttggctttcgatattcgcagtatgactcactagttgatattcctggctcagtgatatggttccacctgaatgaaatattgctatttgcccacccaatagttattctccacttttcttacagaacccaattacactctagtggacaatatgcccatctagaaactacatttcccagctccctttgttgctagaataaccatgtagcccaggtttgtccaagggaaataagtggtagtcactggacaagacttctgggaaacctacttaaagagtaagcccatttaagtggsctgtgtgattcccttctcttgagtatggtca

SEQ ID NO: 904674 - DNA, 652 bp, Homo sapiens
ctttgctcctgtctttccaccagtcaytcccttgcacactgtttcttttttatctaattatgtgattgcttagaagttccagcgactaaatcttgaaacaaaccagttgattgtggatttctcccctacctggaaattacctcaaggctagagttaatttacaacccagccgtaaccaagactttgccagcccattcaccagatggaacaaaaactcaagatggtcatcagaacaagtcacatagaccagcacctccttgccactcctgcatgcccctcaagccaagttttcctttctaatcctctatactcagcccaaaatttgaaacggtttattcaaggtatgagcctggccatttcctcaattgctagcttttgcaattaaagtcacggtcctttcactgcgtctcatctttgttcatttgattttgcaagctgtgagcagctgagcttgtattcagttatagaatgagcctcggaatgatgattggttatgctaacaaaaagaatgcaaatcaatggattactgaaaactacttcttcgtagttggggtttataattatttctaataaatgggaaatttaaaagtaaattaatacctgaaatttgactgtaggtatactaattgatagctggatcttggcttaattg

SEQ ID NO: 904675 - DNA, 634 bp, Homo sapiens
tggtggtgaccctgcattatgaaatgcacagtttatgtattatagtttaaataaaataatctacaacatatcttttcacataagacccttagggtaatgtcaagtcagatcttctcttccattcattttgctattttttgtggtaaattttactgttatgtatggtttaaacccagaatgcaccagcatagttttgctagatatttattttttaaagcaattaaaatgtccaatatttgttattttttattttcagttatacatttttagtgctatttctttatttgtgtgaagccatgttttcttatgttattacagaccctctacttcaaaaatagttggagcacaagtctcttgattatcaattatttcagcataagtaggcactgagcatgtgtgtaggtgtgtatgtatgtgtatttattttcctgaaaataggcttcatttagtttcactttttgtatgtctccttcctgggatcctcttcctggtatcctcttaccttcttggaccaatggtttgatggatttcttacttttacaaaattattcaccactgtatcttcaaatgtttctcaagcttcckttcttctccattattcttctgtttgttattagactacttgacattgcca

SEQ ID NO: 904676 - DNA, 534 bp, Homo sapiens
aagggcaatctgatttttaaattataaaactctaatgggtgcagcacaccaacatggtacatgtatacatatgtaacaaacctgcacattgtgcacatgtaccctagaacttaaagtataaygaaaaaactatatatacactaaaataaataaataaataaattataaaaatcaggccttggttttgcaatacaaattattgaagagataaacaaaatatataaaacaactagaaatcaatttcaagtataagaaagaattagagaattgagtataatttgtacgcaaatgtacagaaaaataaaaccatctttggggcaaagttagtgttggaggttgccgtagaaaaaaatgacatattagactttaaataaatggttggatttgttacaacagaaaccaaggaagtgctcagaaaatgggaagagggagcatataacaaggaaacaggagccagtttgaaggggctctcactagccaaaccagagacaatttcagcaccaaagaaacttaagctcagaaatacattatgaa

SEQ ID NO: 904677 - DNA, 534 bp, Homo sapiens
aagggcaatctgatttttaaattataaaactctaatgggtgcagcacaccaacatggtacatgtatacatatgtaacaaacctgcacattgtgcacatgtaccctagaacttaaagtataacgaaaaaactatatatacactaaaataaataaataaataaattataaaaatcaggccttggttttgcaatacaaattattgaagagataaacaaaatatataaaacaactagaaatcaatttcaagtataagaaagaattagagaattgagtataatttgtacgcaaatgtacagaaaaataaaaccatctttggggcaaagttagtgttggaggttgccgtagaaaaaaatgacatattagactttaaataaatggttggatttgttacaacagaaaccaaggaagtgytcagaaaatgggaagagggagcatataacaaggaaacaggagccagtttgaaggggctctcactagccaaaccagagacaatttcagcaccaaagaaacttaagctcagaaatacattatgaa

SEQ ID NO: 904678 - DNA, 635 bp, Homo sapiens
agtgtcaaggttgagaaactctggggcagatgatgtccatttgagagatatcagcatatacatggaaattaaagctgtgagcataagtctagtgaatgattttaaaaacccagatttgagtcttgagaaattttgaatagccagatgaaggcagatgagcctaaaaagatcttgtaagaaggagagaacagagaaataaaaggaaacccaatagatagagatcaatgtaaccgtgttaacaaggatttctgaagaagggagatgcccagcaagagaaagactctatccactggatttagagatatggaggcagcttgtgagctgtgagcttagcaaaagcagtttctgtggcatatcagtgacgaaactaaatttaagtgaatgaagaaaaagaaaataaagatcctctggcctgggatgagaaggctagacattaaggtaaagtgtgttgaaggaaggtgggtttgttattgatactgctgcttttgctatgggggagtcatgcataaataaaaataaaggacctagtttgaagtracagtttgaacatatagaagagattagagtatttttaagaatgggtaatagaacactagtgggtcatgaaattaatttataggttaaaagtagcattt

SEQ ID NO: 904679 - DNA, 605 bp, Homo sapiens
tcttgtttctcactaattttaatgtgctaattaatttactagtttatcaagtttttaaagagctgtttcagcctgaaaaacatagcaagaccctatctctatagaraattagccagacatggggccgtgtgcccgtagtcccagttattgggaaaactgaggcaagagcatcacttgagtccaggagttcgaggatgtagtgaactgtgattgtactactgtgctccagcctgggccaaagagtgaggctccatcaaagaaaaaaaaaagaaaaaggaaaaaaattttaaaaaaaggctattcctggcctgccatggtaactcatgcctgaattccaacactttgggaagctaatgcaggaggatcacgttaggccaggaattcaggactactctgggcaccatagtgagaccccatctctacaaaaagtaaaaaaattagcatggcatagtggtgacctgcctgtagtcccagctactcaggagactgagacaggaggatcgtttgagcccaggagtttgaggctgcactgagctatgattgcaccactgtactccagcctgggtgacaaagcaagactctgtctctaaaacaaacaaacaagc

SEQ ID NO: 904680 - DNA, 557 bp, Homo sapiens
attaaatctcttttgccttataaattacccagtctcaggtatctttgttagcartgtgaaaatggactaatacagtaagttggtaccaggtgtggggtgctgctgaagatactaaaaaacatggaagcagctttggaattgggtaacaggtaggggttggaacagtttggagggctcagaagaagacagaaaatgtgggaaagctaagaatttcttagagacttgttgaagggctttgcccaaaatgctgatagcgatatggacaataatatccaggtggtctcagattgaaatgagaaacttgttgggaactggagcaaaggtgactcttgttttagcaaaaagactggcagcatttttcccctgtcctagagatttctggaactttgaacttgagaaggataatttaggttatctggcagaagaaatttctaagcagcaaagcattcaagaggtgacttggatgctgttaaaggcattgagttttataagggaagtagagtataaaagttcagaaaatttgcaacctgacaatgtgatataaaagaaaatcccat

SEQ ID NO: 904681 - DNA, 616 bp, Homo sapiens
atattatgagtcctgtggtggtttacttaataatttggactcttgggtacagaataatcagatgagattgtgcctgagcaagagatgaataacatgattggtggatctttgtatctcagcttgttwttaagagggggtaagaccatcttcacttgtacaaggcttaattgcatcatactaggtggaagcataaagagggtgttattgctgtctggaagcttaaatgtgggtaaaggcagtgtttgaatattgactagccaaatggttgggctgggctggttatttttctgtttggtcttagctcccacacatttctattctttgatcaatgctgctgggcttgggaattgaaaactacatttcccagatgcctttgccagctggcttcctgtttgttctgccaatgggaggcattggaggagaccagaaaatagaacctgtgtggttcttgctctgacagtagtgacagttgccggcaatgaaggcagtgcaagaaggggtgggctgctgtgagtccagcagcctaggaagtgcaccacctctctggtgactctactaccttggtgaccactctttgattccaacgttgtcagaaagaatagcttctcagcatttc

SEQ ID NO: 904682 - DNA, 648 bp, Homo sapiens
agtattactagaatgtaagctctgaaagtatctttttcatcactacagaacataagcacctacaactgtgccttgcatggagtagacaataaatgaatgggaaaataaactkgataaacactgtatatcttaacaaataaaagctaggtatgaattgtaaagaatatgcacaaattttacaaagcccaaatatatctactagtgggaatataattatataaggatttctaactaataactcaaataacaatttaaatcttggaaactttttaattgtggaaaacaattacttaacttttaacaaattaatttttgaacagttatcaattttaataatgtcaatttttagatattactttgagttcctaatattaaactgaatagtatttcagaggaaatgataatgaaataaaaatgaatacgcagtatacttgttaacacatgctgaactcattttagaatgtttaagaggcttgagctactaggaggaaaagaatacactgcagccaaccacttcatactaaactttttattaaaacagtccttacaacatatttaaaatggcatgttccacagtcaaatatttaagaaaaaaaatctatatgcaattattggcacacaaatttaagaacataattaaaaccaagc

SEQ ID NO: 904683 - DNA, 639 bp, Homo sapiens
tctatcttattccacacatccaaattgttttyattttgtttgctctaactttaaaatatatccaggatctaattattttttaccaccttcactgttacaactatgtctaaattaccattatgtctcacttgcattgctgcaaaacctcctattgggccctcgatttctatcttggcaaggtagaaatgtttaagcttagtgaagaaggcatattgaaagttgagaagggccaaagctaggcttcttgcaccagttagccaaattatgattataaaagaaaatgtattgaatacaattaaaatgctactccagtgaacatataataatacaaaagcaaaacagctctatggccaatatggagaaagtttgagtgatgtggatagaaaatcaaactagccacaacactttcttaaggcaaagcttaaaccagagcaaagccataactctcttcaattctatgaatgttccagagaagtgaggaaaccgcagaagaaatttttggagctaggagttggttcatggggtttaaggaaagaagtcgtctccataatataaaagtgcaaggtgaagcagcaagtgatgatgtagaagctgtaaccagttatccagaagatctagctaagatcattcatgaggctg

SEQ ID NO: 904684 - DNA, 589 bp, Homo sapiens
aggggtgactggtgagattttggtgcacccatcacccaagcagtgtacactgaacccaatttgtggtcttttatccctcatccccttcccaccctttcccctaagtccccaaagtccattgtgtcatccttacgcctttgcatcctcataccttagctcccacttatgaggaagaacacacaatgtttggttttccattcctgagttacttcacctagaataatagtctcaaatgccatccaggttgctgcaaatgccattaattcattcatttttatggctgactagtattccatcatatatatacacacacacacacacacacacacacacacacacacacacaccccacattaccacattttctttatccactcattgattgatggatgtttgggttaattccacatttttgcaattgtgcattgttccgctataaactcgcatactcacatactcacgtgtgcaagtatctttttagcaaaaaatgtatttaagttttaagaagtttttaaaaagaaacactgagaatgtgttctagattaratgagaataaggaaacatcacatgtaaatgaggcatttgatcc

SEQ ID NO: 904685 - DNA, 628 bp, Homo sapiens
ctgcagttaagaggaatgaggaaaagctacattaatgctgaagagaaacctctaagacctgctgttaagtgaaaatatacacattaaaagyggaagaagacaattttaagaacaagatattctagcacaatgtgaatgtacctactgccattgaactgcgtgtatatttaaaaatggctgatggtaaatttcgttatgtgcactttatctcagtgtttcataattttaaaagacaaggtgttcttatgatatcatctataaaaaactaagctatattttctcatatgtatggcttaagcatgtgaatgagtgtcaacaaggtcagatattgacctccagagagaggacttgaattgaggatagaaacagcacagaatttagctttggcagcattatacaaatgtcttataacaagaatacagccatagatactatacttaataaataatttaaatgaaacctgcaagtgaagatcaagtttcttctctaagatgggggtattgaactaggtcagcatttcaaccatttcttcctttaatagtgatatccatggcattgaaagatttgtgtttatggaattactataattactaggcatcaaattgatcccatgcaattcttcttcatc

SEQ ID NO: 904686 - DNA, 640 bp, Homo sapiens
gcagttttccagacctgtaaactcaaatttcacttacatcttttctgtctccccagtaaaactagaattcacagaatgataaattgaaaatataaaacgtcaggrgggaaagtggaaagggagaagaaaaatgaccaattttggatgccaatgcatgccattttgacatttatccacttaatcaatgaatatttgttaagtataaaataggtttgtttcatgcaatttatcttacttaataaaagtaataacttatctgtttatttaaatgcaattccaggaaatcttatggttctatagtaactactcaattaatcaaattacttgaaagaagaaacattctaattgattaaatttaaattagtgggatttcaggagtcgcattagaagctttttttaaagcaaatttataattacattggatagcctatttctcatatgtttttaggagaaatcatttttatcaagcacaaattttacgtccagattgtgaaccataatgaagataatatatcacagaggctaagaacttcctttccttcaccacacctggttccaggcctggcttaggtagtcagtagctgtctcatcttaacttatttaattttaagccactcagcttatttaattagaataatca

SEQ ID NO: 904687 - DNA, 640 bp, Homo sapiens
gcagttttccagacctgtaaactcaaatttcacttacatcttttctgtctccccagtaaaactagaattcacagaatgataaattgaaaatataaaacgtcaggagggaaagwggaaagggagaagaaaaatgaccaattttggatgccaatgcatgccattttgacatttatccacttaatcaatgaatatttgttaagtataaaataggtttgtttcatgcaatttatcttacttaataaaagtaataacttatctgtttatttaaatgcaattccaggaaatcttatggttctatagtaactactcaattaatcaaattacttgaaagaagaaacattctaattgattaaatttaaattagtgggatttcaggagtcgcattagaagctttttttaaagcaaatttataattacattggatagcctatttctcatatgtttttaggagaaatcatttttatcaagcacaaattttacgtccagattgtgaaccataatgaagataatatatcacagaggctaagaacttcctttccttcaccacacctggttccaggcctggcttaggtagtcagtagctgtctcatcttaacttatttaattttaagccactcagcttatttaattagaataatca

SEQ ID NO: 904688 - DNA, 654 bp, Homo sapiens
tagatatatagatagatgtagatataatgtacgtatttctgtctctatctatagatatctatatctatatctatatatagagtctattatacatgtgtctatgtgtgtgcttgtttctatatgtataaatacacatatatattctctattacttcagaaatttgttctctttattctcttttgatattcttaaagaaaaacaaaaccaaactttggtttcccaattaatataaggtcagaattcattgtctcaaaatagaatctgttacaatttgaagaaataatgtagtagaagttggtcttctgggtataagctttgtgtgggtccttaacatttcaatttaaatttagattgacctcttaacccaacactttgctttaaattaatttttctcagatgacacaaattacagaaacattttgctaatacttcactgatacaacatcacagataaacccttgaaatatattcaagtgcttacaattaaaaccaaagttgtccattgtaatgctaatccattatgttttatttatgaagcataccaaaattaatttcctaatttaaaatgttattagacacatttttatgtcaatcatttcattgttgatgtttttatttttatttttattttwttttttttttgcttttcgttt

SEQ ID NO: 904689 - DNA, 607 bp, Homo sapiens
actattattctaaaaccaggtactataatctctcattttgttttctagcttttgtgaatgtgttttcttgcatagatatttgttcaaattgttctttctttgtgtatgtgggagaaggggcactcactggagggttcttttccaccgtcttgctctacctcctcataatgttatttcttaatgaaagttttactattgaccaaaaaaaatcggatcaacaactttgaatgcgtagtaattaaacacaaagtacagtgtaacataaaatatttctttactgcattaacaattaaagaaacaattttgtttaaatatcatataaatacaacaaattgcctataccatacgtgtagaacttaaatttctcataaactagacatggctatgttaagtttcatcaatattaaacactacctcaggtgttttagatcaatgttcatggtttgtccacttctccttaccacccaaatcacaagcactatgttgacatttagaatcacagatttgtttttacaccttccagatttcataaaagttgaaccatatcacatgtactcatttgtctctcatttatcactgartttatatttgtagtttcttgaaattt

SEQ ID NO: 904690 - DNA, 614 bp, Homo sapiens
tgtaaaatggagataatagcatctggctgctagaatccttgtgaggattaaatgagttccgaaacatgtaaagaacataggataatgcttggtacatagtaagcctcattgtcatcatcactgtcatcgatgccatcatcatcatcatcatcgttatctttcctgtgatcctgacactctgctcagggctgagtgtgccaggacaaacaaggcagcacaggcacctgtcctcatggagcccccagccttggaaaagagtccagcaggaagtgatttgcagggagggagggcatgggaagctcaggccatggaaggaagacagaatctgcacagtgcctggtggtccagggtggtgtgctgggggaggatggagaagctctattttatgctgtttttggcctggggctggaagactatagtgaggcgaaaaatgagtggaacaaagtgacagaggtgacagaacaaagccttgcaccctctgaggtcctccctctccaggaacaatccaggccagggctatagagggctggtcctatgtataaggccacctggggcctcagcctcaatgtggcatctaggtgrataagtgaatggaccttactgccttccctggg

SEQ ID NO: 904691 - DNA, 614 bp, Homo sapiens
tgtaaaatggagataatagcatctggctgctagaatccttgtgaggattaaatgagttccgaaacatgtaaagaacataggataatgcttggtacatagtaagcctcattgtcatcatcactgtcatcgatgccatcatcatcatcatcatcgttatctttcctgtgatcctgacactctgctcagggctgagtgtgccaggacaaacaaggcagcacaggcacctgtcctcatggagcccccagccttggaaaagagtccagcaggaagtgatttgcagggagggagggcatgggaagctcaggccatggaaggaagacagaatctgcacagtgcctggtggtccagggtggtgtgctgggggaggatggagaagctctattttatgctgtttttggcctggggctggaagactatagtgaggcgaaaaatgagtggaacaaagtgacagaggtgacagaacaaagccttgcaccctctgaggtcctccctctccaggaacaatccaggccagggctatagagggctggtcctatgtataaggccacctggggcctcagcctcaatgtggcatctaggtggataartgaatggaccttactgccttccctggg

SEQ ID NO: 904692 - DNA, 633 bp, Homo sapiens
tattgtaggagtgagttagtttttgcaggggtgaactagttctcacaagagtgagttggttctcaagatagcaggttattatgaaagcaaacttaacttgctcttgaggtctttttcacatgcttcacttacttttgtgttcttccaccatgaaataacacagcaagaaagccctcatgaaatggtactgccatgcgcttgggctttccagcattcagaactgcaagaaatatatttcttttctttataaattactcagtttatggtattctattattgcacagaaaataaactaagacacctttcctccgcttttcaataataagtacctcatttttgtctgagacctcaccaatatcacctttagtattcatatttctaccaagagtcccttcaaggcagtctaagctttttcagcaggcacttcaaaactcttgcacctccaaccatcacctagttccaaagctactttcacatttttcactatttgttacagcatcaccctaccttttggtaccaaaatcttgtctgttagggcaatcataacaaaataccagagtctgggtgtctcaaacaacagaaatttattttctcatgatttttgacgctgtsagtacaagatcagggtgctgt

SEQ ID NO: 904693 - DNA, 674 bp, Homo sapiens
ctgtttactcctaagtattacctattgcctccaagaatttggcttactataatatggctctgatattacttattagaggatagtgatttagaatgtattagagtatctttttctgttccttctgcttaaagacaaagaaatattaatgtatgcctgatagcctgagagccacaaaaatctcagaaatctgtgttctagtggaataacatacctaaactttatcagtggattatacttttcaatccacctactgttgagaatgtcaatataacagaaagtaatgtagtcctaacaaaacttgtagaacttctattgacaagcaactatattaatgacataataaataaaaaagcagggcataaagcactatagaaagcatttttgtaactatattatatctgtatccacagccagatccacattaacatctattctaaatttaagattgtaaaaatatacatcaacatggattgtggcagtacagatacttttttgtctatctttttttcctaatttttattcaagttatatatattacttttgtaataagacaaaaaataatagttggaactagaggaagtatcttcagggctttaacttctgaagtaagcagggcttagctggaagaaaggggtatctaggaagctggccrcacagaggcccaccagccaaga

SEQ ID NO: 904694 - DNA, 634 bp, Homo sapiens
actttaggtggtaagtatatagatattcactgcaaaattmtttcaatttttccatatgtttcaaatttattggaaaatgttggaaatgaaaaatgttgaaaaaaattatattttatgaggctaaattcctagaattggactagattattcatagtatgtgcacatctttaaactttgtgaagttaaaacatcaaccagaaagtgtcagttccctcacactgtcaacaccactttttagtgcttttcaaatctctgccaacttgttaggcaaaaactagtaattcatttttaaaatcaccatttctatgttaatttttaaaactttttttaagttaatatataatgaattgaaaagcttcctaatatgcttggcttcaaatttgatgttggttattggaaccatgaagcagtaatcaagattcaagcacccatctgggggcacttagcttattaccaagcacaatactctcaagaataacttgcaaacctaattataaataggtgaaagttacttgcaggccagcatcatatacaggcaagggggctgatgtctgattggcaaatgggcctgatttaacatgttctgagaaacagttcttcctgcacacacacaaaaattcacctctttcatttc

SEQ ID NO: 904695 - DNA, 544 bp, Homo sapiens
aggttcttctttggggaaatacaagtcaatacaggcagtgataggatgcccctactctagcctcatatccaagccatgtctcaatttcaactttgtcttgtactttggcaattattgggcactttaataaagtggatgtttgctctcatttgcaattccttatatctcttccctggtgattagactttgatggagataaggggcgagtctgcactcttcataatctgtaagagataccaggcatgggaaagctcagtgaccaatactagaaagatagtacccccaaagaattcttatttttttaacttttattttaagttcagtcatatatgtttgttatataggtatataggagtttgttatatgggtaaacttgtgtcataggggtttgttgtacagattatttaatcacttaggtattagtctagtacctattggttctttttcctgatcctctccctcatctcaccctccaccctttgacaggccccagtgtgtgttgttcccctctatgtgyccatgtgttctcatcatttagctccca

SEQ ID NO: 904696 - DNA, 579 bp, Homo sapiens
tgtcttttgcagggacatgaacgaagctggaaaccattattcgcagcaaattaacacaagaacagaaaaccaaacactgcctgttctcactcataagtgggagttgaacaatgagaacacgtggacacagggaggggaacatcacacactggggcctgtcgggggatggggggctaggggagggatagcattaggacaaatacctaatgtagacgacaggttgataggtgcagcaaaccaccatggcacgtgtatacctatgtaacaaacctgcatgttctgcacatgtactccagaacttaaagtaaaataataataataataataaaaagaaggctccaggatagccacagttactgccacatcaagttcttttacagaccccgttctacatttgggaaccaccttcctcctcccatctcatcatcaatgaagctcgtactcagccccttcctyaggcaaggcaaccttcgcgtttggccagtctctgaacttctcccaacactcctcaatgtgaccatgtcctttctcttattctacagctcaccacccacacaaatattgatccttggtatggtt

SEQ ID NO: 904697 - DNA, 579 bp, Homo sapiens
tgtcttttgcagggacatgaacgaagctggaaaccattattcgcagcaaattaacacaagaacagaaaaccaaacactgcctgttctcactcataagtgggagttgaacaatgagaacacgtggacacagggaggggaacatcacacactggggcctgtcgggggatggggggctaggggagggatagcattaggacaaatacctaatgtagacgacaggttgataggtgcagcaaaccaccatggcacgtgtatacctatgtaacaaacctgcatgttctgcacatgtactccagaacttaaagtaaaataataataataataataaaaagaaggctccaggatagccacagttactgccacatcaagttcttttacagaccccgttctacatttgggaaccaccttcctcctcccatctcatcatcaatgaagctcgtactcagccccttcctcaggcaaggcaaccttcgcgtttggccagtctctgaacttctcccaacactcctcaaygtgaccatgtcctttctcttattctacagctcaccacccacacaaatattgatccttggtatggtt

SEQ ID NO: 904698 - DNA, 667 bp, Homo sapiens
caaaaacatttaatgattttgttattgtctgacatgtcaactcttagtcccagaacattttcccttgattctgtaacatttctcaacaagggtagggggtgctgttggagctttgggatggataattctccctaacatgggacttcctaggtatggtaggagatttcgcatccctgaccttcacccacaaaaagtcaagggtggttacccattcacagccgtaactccaaattcccttaagcatttccttaggcccctggagaggtcattaccttcccctttaataacaatttatcctgatgctttgcctgccttttcacaatcatccattcttcctgcacctctactgtgataccttccctgactgtaccaacccacaaagagctctccctcctatgaatgtccaatatcattttcttggcactaatatattatcttgtggtatctatcatattgttattatataataaaatatgcactatgatataatgtgtatgtattatattcacatattatgttgttatatgttatctattawgttattatttagtatatatatactttttaaacttttatgtttctatatgtttctactttcccaattaatttataagctagaataactgagagttgggggaggggaaacagaaggcttccatggtgtttc

SEQ ID NO: 904699 - DNA, 647 bp, Homo sapiens
ttaattgcagaaccttcagagctgtcaagtcctgattttaaatgagtaagacttgtcatcactcaatgggttcatcttgcctactgcccagaaaaaccaaggcactgggaacagcaggtttttgcaatagagaaagagtttaataatcacaggactggccaagtgtgaagacaggagtttattattactcaaatcagcttcctgaatattcagagactagagctttttaaggataatttggtggacgggtgtggctagggaatggggaatactgattggttgggtcagggatgaaatcatagggggttgtaactgtctttttgttgtcttcatttcctgagtaggatcacaaaaccagttaggtgagtttagctggtctatcagaattcaggggctgaaaaatacctcaatcaccaaccttaggttttaccatagggatgttatctataggacctactggggaggttaggaatcttgtagcctttggctgcatgactcctgagccataattctacactgtggctcatctgttagttttccaaaggcagtttttgtccctaagcaaggagatagtttcaggaagtggctgttatcawctttgttttaaagttaaactaaactcctttcatagttaacttggcctatgc

SEQ ID NO: 904700 - DNA, 666 bp, Homo sapiens
ttgtcaagggcattcagtttcaaaaggaaaacagagtataaaagtttggaaaatttgcaacctgaaaatgcagtagaaaagaaaatcccatattctgaagagaaattcaagctggctgcagaaatttgcataagtaatgaggagccgaatgttaatcaccaagacaatggggaaaatgtctccagtgcaagtcagagacctctgcagcagccccttccatcacaggcccagaggcttgagaggaaaaagtggtttcatgggccaggcccagagtccctatgctgtgtacagcctagagatttggtgccctgcatcccaggttggcccctttcagctgttccagatgtggctgaagggccaacatagagctcaggctgtgacttcagagggtgcaagccttaggccttggcagcttccatgtgatgttgagcccgccagtgcacataagtcaagaattgagattggggaacctctgcctagatttcagaagatgtatggaaatgcctggatgcccaggcagaagtttgctgtagaggtgggrtgctcatggagaacctctgctagggcaatgcagaagggaaatgtggggtggaatcctccacacacagttcctactggggcaccacctagtggagctgtgagaagagggccaccgtcctccagacc

SEQ ID NO: 904701 - DNA, 515 bp, Homo sapiens
taaaatttcctaaatagtctcaattttagtacttatatcatagaagagcagcaccaatctgtggtccatactttcagtaatactgagctatatgatgaatgagaataagccaataatgttaacgtatattarcttgtatattaaaagtatattatgcatctagcttttattgaaataaaaagtgattcctatcccccaaacaattgttgcaaattcttcttacttcattaagctgctgttcatgctaatttagtatgaaaaaacacaaaggtctgtttaagaaagttgaatatagaataaaatgtatactgtcttaataaaccaggtagagagaaaaaatggagacctgtcaattctgatgatgttcatttttgctttgattttatatatattattgttaataagcattaacattgctaattaattttgaatatggtttattattattctgtagttaaaatcatttcatctttctgacaggctcgggggtgtgaattattcttactgaatatatt

SEQ ID NO: 904702 - DNA, 600 bp, Homo sapiens
ttctacagtgttagattaagtgcataaacattagcttaatcctctaataaatacaattttacaggagtatttattttatatttgtaaatgtatttatattacatttacttgtttttcatcttgatttatcactrtcttaggcataccttttttcctttagcaaatctattgcttcttccatgcttaagttatccatagagactccaccactgaatttaggggatggtatttcctttggtttgatgcctgtttataatactcctgaagtatttgttacaaagttttcaactgtttttgttttctctacctaaaactcattttctatctttacctaaacaaaagttgttttcatatgcaggagaagttgttcatgtagggagacaacacctaatttgattttgaagatcacataggaaatacagcatgtccactgatttcttgagaacctggtaaatccaatcactgttagtcacgcattgtagtaaaagatgtttgttaaagttttccgtttcaaggaatttataacctagaggcaataacttatccaaatatctataacacaaactatattatgtgattcatttctttctagatcttatt

SEQ ID NO: 904703 - DNA, 608 bp, Homo sapiens
gttctcgttttacagatacattatactgccccactacacagcattaaatgattacatacgacacctgtgagatgaacttyttcagagcattacagcagaaggcaaattttggataaatgtaactctttgcaaacttttctgaaaataggagatgctgcctcaggctgaagggaggtttctgtcatttagaaggttcaagaatatctgagagacatacagagtagttatgcattaggttaggtgagaaaattcctaagctcccttccacttttaagattctaattctatatttagagtacaaggagtaaagtgaagtatttaagagcaaggaaattaggtcaaggtaacctggatttaaatcatatgtaatccatccaataccaactgtttgattttgatcaagttgcataacttttccaggcaccagtgtccttttatttttccatgaagagaatggtatcaacctcgccagtttgtctataagattatgagagacaatgtagatagtgtgctaagtaccgtgcctgacaaacagggagcatcaataattgatagctggtgttaatgcggttccatggattgcatattgcttaaactttgtccacaaa

SEQ ID NO: 904704 - DNA, 624 bp, Homo sapiens
ttgtattgaaagttttagtcaggtcaaaaaggttgaaaaagaaaataaaacgtattcaaattgtatagaaagaaagtcaaaaatggactccttccttacaccttatrcaaatattaaatcaagatggattaaagacttaaatgtaaaacctaaaactataaaaagcctagaagaaaatctaggcaatatcattcaggacataatacactggcaaagatttcatgaaaaaaatgcgaaaagcaattgcaacaaaagcaaaaacggacaagcgggatctatttaagctaaagagcttttgcatggcaaaagaaactatcatcagagttaattgacaacctacagaatgggagaaaaattttgcaatgtatccatctgacaaaagtctaatatccagattctacaagaaacttaaactaatttataaaacaaacaaaaaagccatcgaaagtgggtaaaggacatgaacagacacttctcaaaggaaggcattcatgtagccaaaaaacatatgccaaaaagctcaaaatcactgatcgttaggaaaaggcaaatcaaaaccacaatgagatattgtctcatgccagtcagaatggtgataattaaaaagtcaagaaacaacagatg

SEQ ID NO: 904705 - DNA, 699 bp, Homo sapiens
tctgacttacaaattgggaatgaaaatgaactatgaaatctgtttcaaacattaaaggaatataaattgtgaatctaattggtgtatgttaatcaatagatacatttcgtttgtttttaatattttccattgggaatgctatgtgaatgtttctgaacaatttacacattaacttgtctccttcatctcctagtctttaagatgaggtccaacctaaatccaaattctattacaactacaactatatactaaatcaaatgctatcttttagttgattctgaaggaaaccaaaatatttcttcccaaactatacttcattgacatatttgaagacggccgttcagagggccagtagacaaaattagccctgaacatcttttatgggggagatttgcatctgtagagaatctgcactgatgcaaccagatttactctgaggctttctcttatatctaggaaagattaactgagagtctcacatggttacttatctgaaagaaacattttccatctattgtctctgagggctgctatctgtgaggtctcatctatataacaagacaacctttgctagccaggcctctgcttctctccctcccatatcctgtcttaccacyatgacttatttggggccatgctccgagcccccatattctctacaactctaagatggtatacaagggtcaaccattttacctt

SEQ ID NO: 904706 - DNA, 565 bp, Homo sapiens
ctgcattaatgtaaacatttacaaaagggtttttttttttttatttaagaaagaagatttggaaaatcaagwttaaacacaaagtcttcttgataatggttttataagtcactgtcaatcttaggaaactggcatttatcagtcaatcaatcaataaggagtagcaaacttcaaattttaaaaatggaagaaggaaagatagaaattgtttttgagtttgttgttttgtttataatttttatattacaaagtgaaaacatattttataaaatatagcatatattatttatagaaaatgtttcaaaaaatcaatgtctataatacagtgatttctcaaaaaacagattaagatcgaattatttcattcaagtatagaatgaattttcataatgaaaacagctgtctgtatgagtacttttatgatacaaagtcatcagtagctttctccccaaagaggtcaaaataaattggcatcacctgaatcaaggttatgacttccttgaggcttatcttctgacagattcattttctataatctttttttttctattagcaactactgtct

SEQ ID NO: 904707 - DNA, 592 bp, Homo sapiens
cccatggaccaatcagcatgcattttcttccctctgaagcccataaaaaccctggactcagccagacttggacaatgcgatgacctgtctgcagattggagctattaactgtgggtstcctctctgctgagggctctgcagatgatgggatgacctgcctgcagaatggagctacccactctgggtctcctctccactgaggaccgcacagaaattgtgactaccagtttcaggaaggagctacacactccagatctcctgagaactgttctgccactcagtgaagttcctctctgacttgcttaccctccagttgtctgcatatctcattcttcctggatgtgagacaagaacttgggacccactgaatggtgggactaaaaaagctgtaacacaaacaaggctgaaacatgctccctgctcaccacattgcgggcaatgagaaggcgagaagagctgaggccctttgtgaagcccagacctaggggctccccaagccagagctgtgacattctctttgaggctttgtagttcttggaatctccaagcctctggcgccaccatgttctccttgtccagccatgggtgccct

SEQ ID NO: 904708 - DNA, 605 bp, Homo sapiens
aagtagcagggtttggcagggttgaatccaatgctgaaataatttctactgtgaggaaaatgatatcaaaaacagcaacatattctacagaggaatctttcctgaaaggaagattcrgtccagcaaacttcatgactgtcttattttaagtaattgccacagctacctcaattctcagtatccacagccctgatcagttaggagccattaacatcaaggacaagactctccgtcgaaaaaatattacaactcactgcacgctcagataattgttagcatttattttcaacaatttttttttttttttgagacggagtcttgctctgtcatcaagctggagtccactggtgtgatctcagctcactgcaacctccacctcttgggttaaaggattctcctgcctcagcttcccgagtagctgggagtacaggcacgtgccaccatgcccagctagtttttttgtatttttattagagacagggtttcaccatgttggccaggatggtctcgatctcctgatctcctaattcgcctgccttggcctcccaaagtgctgggattacaggcaaacaaaatatttttaaattaacgtatattcattgctt

SEQ ID NO: 904709 - DNA, 605 bp, Homo sapiens
aagtagcagggtttggcagggttgaatccaatgctgaaataatttctactgtgaggaaaatgatatcaaaaacagcaacatattctacagaggaatctttcctgaaaggaagattcggtccagcaaacttcatgactgtcttattttaagtaattgccacagctacctcaattctcagtatccacagccctgatcagttaggagccattaacatcaaggacaagactctccgtcgaaaaaatattacaactcactgcacgctcagataattgttagcatttattttcaacaatttttttttttttttgagacggagtcttgctctgtcatcaagctggagtccactggtgtgatctcagctcactgcaacctccacctcttgggttaaaggattctcctgcctcagcttcccgagtagctgggagtacaggcacgtgccaccatgcccagctagtttttttgtatttttattagagacagggtttcaccatgttggccaggatggtctcgatctcctgatctcmtaattcgcctgccttggcctcccaaagtgctgggattacaggcaaacaaaatatttttaaattaacgtatattcattgctt

SEQ ID NO: 904710 - DNA, 590 bp, Homo sapiens
gttatacatgaaaatagtttatggtcattgtccatttttattgcatttactcatcatactgatagataaattatatttcctgtgtttaattgtatgtgtcagcacacctctcagaaaacttcctatattcattgagaattttggcacttgacctatattctttacccataagctcctgtaatgattatagataaatacagtgtcaatccatcatcttatccttactattcattgaaaagaaaatcgaattttgggattaatatggcccttagtaaactataatgtttatccagaaatgtaagacttgctccagatatgcaggacatttttttcaagtaataaaaaagaaaaaaaagaagaaatgtatgactgcctcagaaaagtgtgtgggggctatctcaaataagggtgtttacaggatatctttaactacattggtgtatcccttaaaatctggagcctagcycttaggtttccagaaacagaaatgaagaaatcatcaatctctcaaggagaagtctcagtaatcaagtcaagtgagacaaggctgatatatataaaatataaaggtatattaggttaaaataatt

SEQ ID NO: 904711 - DNA, 681 bp, Homo sapiens
taaaattaattataaaggtaacagacaaccaaaattttttcttaattttagtcagactcagtaaaactttaatgtagtgatttcaagaggctgtgctgaaccattttgctgaatatagacatcttgtgggttgtgggtttattttattttttgagacagggtctcaatgtgttgcccaggctggagtgcagtggcgcaatcacagctcactgtagccttgagctcttcaggctcaggtgatcctcccacctcagccttctgagttgttgagactacaggcacatgccactatgcctaattttttttctattttttggatacagggttttgctatgttgcccaagctagtctccaactcctaggctcatgcaatcccacccacctcagcctcccaaagtgctgggattacaggtgtgaacaactgtgccaggcctgaatatatagatattttggatgactgttttccccagaaaattaaagttgccattttcctcctgcctccctacaggaggttaatgaatgtgctgaagtacgccaaattttaaggtacmcaaatgtgatatgcaacataataaattccactgtttactgagcttctactacatactagttaatagacattatttaattagattttcacaactctgcaaagcagttattgggacactcattgatgaagag

SEQ ID NO: 904712 - DNA, 627 bp, Homo sapiens
tttgggtatttgctgaaatgctttcttatgggaggcctgcactaggttctgcccattatgattgggtcagctttgccaaccayatgctttcatagcctctgagagtatgcttaattaattttacatgacggtgtatttaacttctggctttcctggtagacttttagttccttgagggcagatatcaggtgtcttttgttgttgctgcctccctagcaccaagaactatataaaggccaatatgcttactaagcatcaatggaatgaaacaaatggaagcctctgttgttggaggcaggccactccaaacgcccctctgcctcctcccttgccttcccatcaccctcgtgagtctcccgtgtctatggcccagggcaccgatgacctcgtctcttctctctttgtcctcttgcactggagaatagcctggagccgcccctttctcagcagatgttcaatactcagagggttgtcactccctagttttgctgtgtccctggtccttgacctccttaacgattagtaaaggacattggatatgaagaaaagggaacacatctcacttcaaaatccctgactgttcttttttctgttagtgccacaaagtttctttgtcccctgaacttt

SEQ ID NO: 904713 - DNA, 581 bp, Homo sapiens
cctaattgttaaaatgaccctgtgaaatttgatccctatctattctctatgcctctagcattgctttctatatcctgccatcgcagcttactttcattttcccagatcggcgcrcactgtatttcttgctactgccaatcctttgtgtgagctgctcttttgtttggtatactctatgcatataacttcactcccctcctttaccacgtaaatctcttttaatttttcagaggtcttcagttttaatatactgggaaagcctttaccttttcactagcatatgtcaaactccttggaatagctctcctggaactgtgttccttttctttccaaggtttgcctcaacttttcttaagtgtttggagatattctttacatacaataaaaatcaccctttttatgtggataattgggtgacttgtgtcaaatgtgtaaccaccactaaattcaagatacatatttgcattaccacaaaaagtgactcatgctcctttacagtccttctcctcagccttcagaccctgacaaccatcaatttctttttttacatttccatattggtttattataaaagtggattt

SEQ ID NO: 904714 - DNA, 577 bp, Homo sapiens
tcttattttccttaatccattcagtcactccatgtctttgatcaggaaccataagccacttacatttaaagttattgttgatagggaattatttactgctgcattttgtttattgttttccatttgtcttgtaattcttttgtccctatgttttctctcttgctatttctttgtgttttcttaactttccatattaatatgagttgatttctttatctttttttgtgtgtaacttctacaggtattttatttgtgtttactatagggtttaaggaaaatatcttatagtttataagttgattttgtttttgtttttgcttgtttcaaggtattttctaatttcccttttgatttcttttatgtcccatgggttgtttaagggtgttttgtttaattttatttaatttcaaatgcattaattttttcttctgctttatttagtcttctgctaatctccagtagaatttctaattcagtatgatatggtatcratctgtgccctcacaaaatctcatgtcaaattatcatacccagcattggatgtgggcctggtgggaggtggctggattatgagtgt

SEQ ID NO: 904715 - DNA, 643 bp, Homo sapiens
ggactatgtatcatattttctttatttagtctactgttgacggacatttaggctgattccatgtctttgctatttctccaatgtttagtaatgttgagcatttttcatatgmtttttggccgcatgtatgtcttcctctaaaaccaaccacacaattggacataaaacaatccttagcaaattaaaaaaaaaaaacctgaaatcataccaaccacactctcagaccacagcacaataaaaatagaattcaatacaaagaaaattgctcaaaaccatacaattacaggaaaattaaaaaaaaaaggtcctcaatagcttttgggtaaataatgaaattaaggcagaaatcaagaagttctttgaaacgaatgagaacaaaggtacaatatcagaatctctaggacactgctaaggcattgttaagagagaaatttgtagcactaaacacccatatcaaaaagttaaaaagatctcaaattaacaacttaacatcacagctagaagaactaaagaagctagagcaaaccaaccccaaagctagcagaaagcaagaaataacgaaaatcagagcagaactgaaggagagtgaaacacaacaaaccgtacagaagatcaacaaatccaggagttggatacttgaaaa

SEQ ID NO: 904716 - DNA, 593 bp, Homo sapiens
tgtgaccaggagagtaaagccaccatctaagggttatttargtatgaaagacatgagaggcagtgaccttggtggcatcctagaaaaatttggagcagatatgaaaggtctgccttctgatttcctctcaagtgtgattcacaaaactctatcaagtcttattaattgtttacaacaacaccatgctacctgtagccaaatgcaaccccaactgacacacttatccagacaaaagactgaaatttatgtagagaaggcacatattctcttgcaattttctgactaaactgacatgtaatggtgccgatttttgatccacttgtttgaatgttgcattttttcaccataaagaagagggaagtaatttaaaaatgtattaactgtacatgttctattttacagattcacattaaatcaccacaatggcacaaaggttcgaattgtcacatcaaactcatagaaatcctagaccataatgaaaaaaatttaattcatttactaatgaattaaaggacataggcaattatgagacacaaatcagtcttcctttggagacatcaagactgtcagaaatagcttcccagtatggtcct

SEQ ID NO: 904717 - DNA, 632 bp, Homo sapiens
gaaagacaaggcaaggcaagcagaaaaaaagaagaagaagaagaagaagaagaagaagaagaagaagaagaagaatgcatttgagccctttggtgaacttatttgtttagtgaacatcttcgtttgtctttccttctcttgttcattcctttcttccttcctttttttttttttttttgttttctgaggccttaaaaaactactcttgtattctcttatgatctttggaagactttaactcaaatcagggactggcaaatgtttgatccatttgacggatctcatatctatagtaattttaactatgttgcaatagctcatgaggccctaaagctaacatttccatttgtggtattttttaacaaggactaaatttggtttgctatattggtctatcatctgggctttgttttaaagccctgactcacagttgaacattgtacagaaagaccacactactatttctagactggtatcttggtacaacgggcttgatgtcagccagagaagttgaggaaggtgaaatggacttgtggaagtataacttyctctcttgttttaaaaaatctttattgaaatataatttacataccacacaattcacccatttaggatatacagtacaacagata

SEQ ID NO: 904718 - DNA, 610 bp, Homo sapiens
attatacctaatactctgaggggatagtgtttaaattaagccctggacccctattagtcaaaataatatttagcatacttgttattttaaaaattctaggaggaaatagaattacatgtttyttctaattagcatttcaggtatattttgtatatactcttatgctgtacccaaattaaaggtttaaaacagaagagtgtataattttaatatatgagaaacatatatgtgtgttaaacatttctttttataaattataaagagaaaaatgatgagtaagaatgtgtctccatagaggggaacaacacatactggggcctattggagagtagagggtgggacgaaggagagaatcaggagaaaataactaatggtgctagccttaatacctggatgacaaaataatttataccaaaaaaaaaaaaaaacccatgacacaagtttacctatataacaaacctgcacatgtacctctgaacttaaaataaaagttaaaaaaacagaatgcatctcatagagtctcaaaatatttttctaccagatgaaaaattcaattttggctaagaattatactggttcagattactatgaaaattatgtattgctcaaa

SEQ ID NO: 904719 - DNA, 577 bp, Homo sapiens
gccattggtttgaatttctcctgtagcttggagtagtttgattgtctgaagccttcttctctcaactcctctaagtcattctccatccagstgtgttccgttgctggtgaggagctgtgttcctttggaggaggagaggtgctctgctttttagagtttccagtttttctgctcttttttttttcccatctttgtggttttatccacctttgatctttgatgatggtgacgtacagatgggtttttgatgtggatgtcctttctgtttgttagttttccttctaacagacaggaccctcagctgcaggtctgttggagtttgcctagaggtccactgcagaccctgtttgcctgggtatcagcagcagtggctgcagaacagcggatattggtgaaccgcagatgctgctgtctgatcgttcctgtggaagttttgtctcagaggagtaccaggccatgtgaggtgttagtccagccctactggagggtgcctcccatttaggctactcgggggtcagggagccacttaaggaggcagtctgcccattctcagatctcaagctgcatgctgggagca

SEQ ID NO: 904720 - DNA, 668 bp, Homo sapiens
ttcttttgagaaatgtctgttctcgtcctttgtccactttttaatggggttgcttatttttttcttgtaaatttgttaagttctttatagatgctggatactagacatttgtcagatgcatagattgcaaaaatwttctcccattctgtaggttggctgtttactcttgatagtttcttttgctgtgaagaatctctttagtttaatatgatcccttttgtctatttttgctttcgctgcaattgcttttggaaactttgtcataaaatctttgcccgtgcctatgtcttgaatggtattgcctagattgtcttccagggtttttatggggttttgcatttaagtctttaatccatcttgattaatttttgtatatggtgtaaggaaggggtccagtttcaattttctgcatatggctaaccagttatcccagcaccatttatgaaatagagaatcctttccccactgcttgtttttatcaggtttgtctaagatcagatagtcttagatgtgtagtcttatttctggattctttattctgaagaaccacttttaacacactatatttgtttgtctttgtctgcatcttgtctctatagctgtttttcttcctgtgttaatttcactattatatttaatataggttaggataacttaggttgactgtc

SEQ ID NO: 904721 - DNA, 636 bp, Homo sapiens
tgatcaattacagcatcacatccctggagccatagtgattagttyagaggtgaacaaaggagctcagtcaaggctgattgtagccaatgagtcaatgtattcaatgccagggctctaacttgaaagagagatgctctgtttccatgtgtactgcttttaattcatggatatccattttccctcacttttagtttttgttttgttttgctttaatcatttctactccctctcttcaggttgttgtttttttttttttttttctaactctggccaactttttccatgtcttattcttttggaactgcagtatcccaggaaccacccagagaacagaaaaacattttttgcttcagaaggattaggatctaggcaccatgtggaattcagttgaagagtttcttacatgttctttacaaaaacaacaaaacagaaaataataaatgaaacaactaccatcaaaaggcagctgacccagcacttcttttccttttttcttgaagtttggctgggcagcctgcaaaacaaagaaacgtattggcgatatgaggttcatatgtcagaactctttatcttgagtggggctgaaaacttaacttgaattgacttgagagagagaagatattttctcctctatca

SEQ ID NO: 904722 - DNA, 575 bp, Homo sapiens
aatagaaatgaacagagtgaaaatttatcccttaatcactatcgtagagaaaatgtkttactccatttgcagaatccatgaacaaatatttaagtcattctcccttaagtatgatataaggtgtagattccatttactaggatgaagaatatttttttttctaatagtattgtgctttttgtgttatagctgaaaacttttagtttactccaagattttctcctatgtattttttcaaaagctttataatctaacttttgcactttggcctacaatttattttgcattaattttcatgcattgtatgaggtttttaaataatattttcatatggctatataaaattatatataaataatagttggctatgtaattattcaatgtatttgtttaaaagactaccttttctccattgacttgttttggcaacttttttcaatatcaatttcctatatcataatcatatatttctgaatgcttagttctgttccacatatctgtatgtctgtctttatgcatgtatcatacagtctcggtttctgtaggcttgcagtaaatttggtattcaggaagtg

SEQ ID NO: 904723 - DNA, 615 bp, Homo sapiens
ctaaaccaacaaagatcaacaaagacaaagagtggtattacataatggtaaaggtattamtgcaacaagaagagataactatcctaaatgtaaatgcacccaatacaggagcacacagatttataaagcaagttggtagagacctacaaagagacttaggctcctacacaataatagtgggagactttaacaccccactgtcaatattagacagatcaatgagagagaaaattaccaaggatattcaggatttgaactcagctctggaccaagtggacctagtagatacctacagaagtctccaccccaaataaacagaatatacattcttctcagcaccacatcacacttattctaaaattgaccacatatttggaagtaaaactctactcagcaaatgcaaaagaacgaaagtcatgacaaacagtctctcagaccacagttgtaatcaaattagaactcaggattaagaaactcactcaaaaccacacaaatacatagaaactgaacaacctattcctgaatgactactgggaaaaataacgaaatgaaggctgaaatgaataagttcttggaaaccaatgagaacaaagacacaatgtaccagaatctctg

SEQ ID NO: 904724 - DNA, 614 bp, Homo sapiens
aataaactggcattcttcataccttcagtgaacaaggctaaaataagctaacccacattgacaagaaaagagctcagaattatatctcctcagtcgagtatttgcagagctaccacttagcaarcatttgtaactggctgggttgaatgggggaatttcatatgatgtgaatagtatattcctgtttaatatctgtagaaagcagaaacagtcccccaaagatgtccacatctttatcctcagaacctatgaatatgttacatcacaaggcaaagggaaattagtgttaagattgaattaaaattgttaattagctgatcttaaccaaggaagattgctctggataatccagacgtaattataagagtccttaaaaacggaagtgggaggcagaagaggcagtcagagagatatgatttgagatttattcaacctactgttacaggcttagaaaattgagttagaaagccatgagccaaggaatgctggcaacctctagaagctgaaaatgcaaggaaacttattcttccttacagcctctagaggggaacaccaagggagactcatgtcagacttctgacctgcagaactgtaagtaataaattggtgttgtt

SEQ ID NO: 904725 - DNA, 582 bp, Homo sapiens
ttctgcaactctacctgatacgctagtaacatgtaagaattaaattaataaattaatcataatgtagtgaaaataagttttatttaaggtagaaatatttaaatttattttctagatataagtgaaatgactgaattcttcctcaaaaagaaatagatggttcaatagagaaaacccacagaaaaacttgaagttacatcagttcacacatattcactcagaaaagcattgcctattggaataaatgagaatgttactcctctcattactcataacagggaaagctgccatttgcaagtaatttagatttgaataatgtggtatgtctggtacctacagtgttattcagtttctcttttgttgatgacctgccatgtcaacttgtcttttgctgttgttgttgctgctattctagaaaatagggatttaattacacttttcagagagtatgttgttggagcagaaaaggaaaatggacttaaaatgaaaaatttaaagacatatttagtggtgccctgactcgtaaaattaaaagcagtctttctattgaagtatgcaasaggggctgctgcatttaagagg

SEQ ID NO: 904726 - DNA, 647 bp, Homo sapiens
cacattaaattactcagttcttacmcaatactaggcattacgtctatcactctatatgaatttctcattaacccttaccaaaactttataaatactctttccatttcaagtgtgagagaaatgaaacacaaataactcattaagttctctaagatagctagcacctttgaatccaggagagaaacttgggatgtttgtcctcagagcccatccacttgagcattatatcattcaaggtataataaataacaatttaaactgagaaaggacacattagagatcagtaccgaatatttagtttttatggagaaaaattttaaagccacaaaatggaagcataacattaactactatttataacaacaaaaggaaaagaaagtatacattttaaaaatatgtcaaggtaaagaaggtatcgaggaaaaaataggcttagtaattcatgcgtagaggagtaaaagtaatgactataaataactcatagtttgaacccatttcttcttctttttttttttttttttgacagattttttctcttgttgcccaggctgtgcagtggtgtgatgtcggctcaccacaaccttcacctcctgggttcaagtgattctcctgcctcagccccccgagtagctgggattacaggcatg

SEQ ID NO: 904727 - DNA, 626 bp, Homo sapiens
ctgaaaaggacaggatctcattcctttttttggctgaatagtactccatggtgtgaacatacgttttctttattcagtctgtcattgatgggcatttargttgattccatgtctttgctattgtctctgcaatgaacatacacatgcatgtatctttgtaatagaatgatttatattcctttgggtattgtattagtccaattttatgctgctgataaagacatacctcagactgggcaatttacaaaaggaagaggtttattggacttacagtttccacatggctggggaggcctcacaatcatggcaaaaggcaaagaggagcaagtcacatcttacgtggatgacggcaagcaaagaaaacttgtgcagggaaacttgcatttttaaaaccatcagatctcatgagattcattcactatcatgagaacagcatagagaagaccacccatcccatgattcagtcatctctcactgggtccctcccacaagatgtaggaattatgggagctacaagatgagatttgggcggggacacagagccaaggcatatcaggtatattcccagtaataggactgctgggtcgaatggtattgctgcctctaggtcttttaacttccagcag

SEQ ID NO: 904728 - DNA, 649 bp, Homo sapiens
cttctgggatgccatgaatataatttcttaatcctctattaatgaaatgtggaagacaataatagcaagtatactttcagtgcaagtggggcagaatatttgaaatcacatctagcccagaaaattgtggacatgctataatcttatatttggcatgtgtaaattgtcatatattatatcttcacattttacatattctcactttaaattgtagacacttgaggccttaacctatattacctacagtttcaagctttgacacagaccgtactgtggagtaatgtctgaataatatgtatattcaaaatacaggttcattctttcaaatacaatatgttttcaaatgtaaaattgatgcaaaattcaagtgctcacctagcataagtttagtcagtgagattgtcctatttctttctctaccacaactgaagtaatggcaatgtgactagagaaatggaatagataagacagtgacaaaatataaaaatacttgaaataaataaggttgggttcgctcaaaagttactgaacaagctggaaaattactaattttaaagtttgcmagtgattctgaatatatggtattttctatagcctttcttctgtggggggtataattataggtcatagtatgcattaagttgaacca

SEQ ID NO: 904729 - DNA, 577 bp, Homo sapiens
aacaatgataacttcacatgattcaatataacaccttatgcagtatttagtgggaaacaactgaacacacggcttataattggaaatacaaaaatacaccyttaaacaatctttaaaaatgaccaatagacttgagtttcctcatttagaatattgaatttaagaattatatgaaattataagaattttaaaaatatgtaactttgttttctctagatacatgcattttaaaggaaattatttgaatgatgttaaacgagctaaacatcagtttttcagtctctgaggagaagaaaatatgtcacttttgtttgtcaaatgccagtattttagttcagtaaacctatttaaggtactatgattttatagttttaattaaggacacaattaagcataaaccattaaaatttgtccttgcaaatcttccaaagagagagctgctttcaaacaaccgaatgttcataatcatcaatatggagaacaacaacgatttgttcatgtcttttgaattttgcatgtaactaaaagaacaagataattacctccaacctattccatttattctccactgtaactt

SEQ ID NO: 904730 - DNA, 644 bp, Homo sapiens
actccaagaatccctgggtatattttgtggagaatgcattaagaaacccagatgtagatgccaggtaggcttgttgctagcaggagtcattataggtttgttcaatggacagaggtaggaaatatatttttaaaaaacatgagttcattcatattttaaaatctaagattttacgaggaatgttcagattaataaggacattctgttgacctgtggtgttatgtgagctgttccttctgcatcttttcccctcttagtccacctttcccatagactcttagccttgtctgcccttgagtttcttctgtgattcattttgtctcaaagttagttgtggaattcttggttctcaaagtcagcctaactgtgatttagtgttagtgactgggaaagagtagccacagacagacaaggataccaactccagaagaagtacagactagatctcaaggatatgggaggcaacaacagcaaaaacaacaaaaattgcttaccagttagtatgtgccagccagcatctcacgctctctgagctgttcgtgcattgatcctcttggccaccctctgacacaggtgctgatgtgtcatactccccataccgatgagaaagmtgagccaccgtgaggttgtccattgcccagtta

SEQ ID NO: 904731 - DNA, 580 bp, Homo sapiens
acatttttctcatggccccatggcacttactctaaaattgaaaaagtaagcagaagtaaaatactcctcagcaaatgcaaaagaactgaagtcrtaacagtctctcagaccacagtgcaatcaaattagaactcaagactaagaagctcactcaaaaccatactattacatggaaattgaataacgtgctcctgaatgacttttgggtaaataacgaaattaagccagaaatcaagaagttctttgaaactaatgagaacaaagatacaacatactagaatctctgggacacagctaaggcagtgttaagaaggaaatttatagcactaaatgcccacatgaaaatgctagaaagatctcaagttaacaacctaatgtcacaactaaaagaactagagaaccaagagccaacaaaatccaaagctagcagaagacaagaaataatcaaaaccagagctgaactgaaggagattgagacacaaaaaaccattcaaaagatcaacaaatccaggagctgtttttttgaaaaaattaataaaataggtaaactgctagctagtataataaagaagaaagagag

SEQ ID NO: 904732 - DNA, 649 bp, Homo sapiens
ttaacggcaatcaagcaagacctctgtcttcatatcctggtggrgagtggccagaccctaggttggacaactgtaagggaaggttgcttgctggctaagtggcatctcactgtccattctgaagttttctataactatggacaaaattatataccatgggctgtctgtgaataaatatggagtagttttgtttctctttgcttcattctcctgaaatgaatatttttcactatggaagaatggaagcaagatatatatatttcacttcattcctctttcggcctaaacaatttatgatagacattgacgctaaaataaacacattcctgctacaaaatatatgttctttatcaatgtgctagctgatagtacagccattgtggaaaacatcgtggagttttctcagaaaactaaaaatagaactaccatataatccagcaaatccactactgggtatttattcaaagaaaaagaagtcagcatatcaaagggatacctgcacttgcatgtttattgcagcactattcacaataataaagatatcgaatcaacataagagtccaccaacagatagatggataaggaaaatgtggtacatatactcaacagaatgctactcagcttttaaaaagaaagaaatgttgtcatg

SEQ ID NO: 904733 - DNA, 587 bp, Homo sapiens
tgtctgttattggtgtataggaatgcttgtgatttttgcacattgattttgtatcctgagactttgctgaagttgcttatcagcttaaggagattttggactgagacggtggggttttctaaatatacagtcatgtcatctgcaaagagagacaatttgacttcctcttttcctgttggaataccctttatttctttctcttgcctgtttgccctggccagaacttccaattctatatgcaaagacacacataggctcaaaataaaggaatggaggaatctttaccaagcaaatgaaaagaaaaaaaaaaaaagcaaacaggagttgcaatcctattctctgataaaacagactttaaaccaacaaagaccaaaagaggcaaagaagggcattacataattgtaaagggatcgatgcaacaagaagagctaactatcctaaatatatatgcacccaatacaggagcacccagatttataaagcaagttcttagtgacctacatagagacttagactcccacasaataacggtgggagactttaacacccccctgtcaatattagaacgatcaacgagacagaaaatt

SEQ ID NO: 904734 - DNA, 609 bp, Homo sapiens
tatactcatgacacacgttcaacttaagacagcggttgttttgctgcattgcrttgtgttgggctgtgttttctttgagattctagttccaggaactaattttaagacttgcttctttttttctccttttctccctcctttcttcttcctttctcttcccttccttcctcattatttcctccttccttccctccttcctcctttctttcttcttagtttcttttctttcttccttccatcctttcttcctcccacacttcaccaacttcttcgtctgtgtattttaccatcagttttctttaaaaaaaaaaaatgtgttcccttttgctactttaaaaaaatgcacttttagcacccgtgtttgtgtgtgtaactggcaaagtcatttttcctaatttgagggaaatgactatttcatccggtactttcggagccctgcgtatcagtcagaattaaagggttgggaaaagtgggagatggataccacaattttgacatgcctgttcaaacactttcaggtatgtctctaatatgcataaacaattcatctgtcattctagttgtcatcctttccccttgcataaaaccttgcagatttactagagagaa

SEQ ID NO: 904735 - DNA, 553 bp, Homo sapiens
gtggggacccagagccttggtaccagcatggcccttaaagcccctgcatctcctccacatttgcagatgactaggtgggtctctcctgagtctcagatctcatactttgttgccaatgctgagttttattcagctagttatttacactccttgacaaaagggtaagttcttccatgagatcttttgtttcttaggaagggaaatttttgtccaggttccgtggttcatgcctgcaatctcaacactttgggaggccaaggaaggcagatctcttgagctcaggagtttgagaccagcctgggcaacatggcaaaacctcatctttacaaatacttcaaaaattagctgggagtggtggtgtccatctgtaatcccagctatttgagagactgatgtgggaggatggtgtgatcctgagaggtggatgttgcagtgaamtgagattgtgccactctccagcctgggggacagaggcagaccctgtctcaaaaaaaaaaaggaaaagaaaaaaaaagaaaaagaaagttcagagcttaaatgatcattactcaaa

SEQ ID NO: 904736 - DNA, 553 bp, Homo sapiens
gtggggacccagagccttggtaccagcatggcccttaaagcccctgcatctcctccacatttgcagatgactaggtgggtctctcctgagtctcagatctcatactttgttgccaatgctgagttttattcagctagttatttacactccttgacaaaagggtaagttcttccatgagatcttttgtttcttaggaagggaaatttttgtccaggttccgtggttcatgcctgcaatctcaacactttgggaggccaaggaaggcagatctcttgagctcaggagtttgagaccagcctgggcaacatggcaaaacctcatctttacaaatacttcaaaaattagctgggagtggtggtgtccatctgtaatcccagctatttgagagactgatgtgggaggatggtgtgatcctgagaggtggatgttgcagtgaactgagattgtgccactctccagcmtgggggacagaggcagaccctgtctcaaaaaaaaaaaggaaaagaaaaaaaaagaaaaagaaagttcagagcttaaatgatcattactcaaa

SEQ ID NO: 904737 - DNA, 579 bp, Homo sapiens
tacctgatgattttgtctcacaacacttaaaattatttccttcatcttgattttagatagcctgaagactgtatgcctttgtgatgatctttttgtgatgaatttcccaggagtactttaaccttcttatatttcattgtatagatctttagcaaggccacagttttcctcaattattctctcaaaaaaattttccaaacttttacatagattttcttcctcaggagcaacaattatttttaggtttggacattttatataatcccatatttcttggagactttattcattttaaaatcttttttctttgtctttatctgattttgtcaatttgaaagccttacttttgagatctcagattctttcttctacttgttctcgactattgttgaaactttccactgaattttgtatgttcctacgtgtgtctttcatttccagaagctctgattgktttttctttatgatatctatatttctggaaattttattcatattctaatttttaaaatttttttataaattcacttttacgtttctccagtatctccttgagtagcaaccttaataagcaaccat

SEQ ID NO: 904738 - DNA, 623 bp, Homo sapiens
agtagactaatcttttggaagactagaaatcaatttgattttgtttagtaactttacatcttttgcacatggaagggatcccaaacacctttgaattctctgatcttattaagatggtcaaatagcagagaattttatgtagcatattttaaatgtgttactattattctaatatgggaataggaagtctggatgttcatgatgtagtcagatggagtatttaagtaaagttagtttttgaaggaaaatacacttctattagatggagaaaaacatagatgaacactagactaaggcaaagagttgtgttttaagaaacaggaagtgtctgcagatttaaaatagaatagatgatctggcttctggttttactttttcactctgaaaatagaaaacatgttaaccagttacccattttcaggggtaataaaatttgaatcccaaattagctctgtataactttactaaactgtcttgaattagttcttttcccaatggttcgagaatacaaggtctaataaagacctaactctgagtaccaaaaagcactcattgtagaaagtatctatcaatatgatcaggttctttgtttrctaaaataatctacataatttgagaaataa

SEQ ID NO: 904739 - DNA, 623 bp, Homo sapiens
agtagactaatcttttggaagactagaaatcaatttgattttgtttagtaactttacatcttttgcacatggaagggatcccaaacacctttgaattctctgatcttattaagatggtcaaatagcagagaattttatgtagcatattttaaatgtgttactattattctaatatgggaataggaagtctggatgttcatgatgtagtcagatggagtatttaagtaaagttagtttttgaaggaaaatacacttctattagatggagaaaaacatagatgaacactagactaaggcaaagagttgtgttttaagaaacaggaagtgtctgcagatttaaaatagaatagatgatctggcttctggttttactttttcactctgaaaatagaaaacatgttaaccagttacccattttcaggggtaataaaatttgaatcccaaattagctctgtataactttactaaactgtcttgaattagttcttttcccaatggttcgagaatacaaggtctaataaagacctaactctgagtaccaaaaagcactcattgtagaaagtatctatcaatatgatcaggttctttgtttacyaaaataatctacataatttgagaaataa

SEQ ID NO: 904740 - DNA, 542 bp, Homo sapiens
ctctttggttaatattcatctcaagaagatagactgccattagataccaagggttacaaattcaaagttatacttcctgatttgmaaaataaattatttttcttatttaatcacctaagccaggtttaatgaaccattttataaggccatttagataagattagctaatccatatgatttgtctaacttctatgtttttccatatcatctatataatgctttacttgtagtaagttctcaagtaaatgtaagttgaatttaatttcattttcacttattggagagattcataatccatgttggaaagactgcttaaatgctcctttacaccaaactaaaagcatacctttttagtttttactatttctttgcatttctcccaaaatctacggacttactgagaatgaaaactgtttaaggtctgagtttcagggtatcacaaaatcacagggcccaagacgtataagacaagggtcaaacgcactccaaggctccaaagatgtgtgcagtaacagagaccccacttcagctgttgctcagga

SEQ ID NO: 904741 - DNA, 546 bp, Homo sapiens
cataaatgatatggatataagagactttccccacatgcctcattactttgatatttatagtcagcaatgcggtttgaaaccactgacattcatcgaaatgtcatattttagttgacttgaaagctcttttagcttctgttgtttgaaagtttagtctatggtaaaatttctgctatagacacaattcaaatccacattcacacggaggtcccctcacctcctcatctttattttttatttttatttatttatatttttgagacagagtcttgctctgtcacacaggttggagtgcagtggcgggatctcggctcactgcaagctccgcctcccgggttcacgccattctcctgctcagcctcccaagtagctgggactacaggtgcccgccaccacgcctggctaattttttgtattattagtagagatgtggtttcaccgtgttagccaggatggtctcgatctcctgaccttgtgatctgcccgccccggcctcccaaagtgctgggattacaygcgtgagccaccgcgcccggcccacctcct

SEQ ID NO: 904742 - DNA, 597 bp, Homo sapiens
aaacggtagcttctttaatgtgtttgagaactatcccctgtcaatttaacccaagccctgcttttgtgtctcccagggcgaggcgaattacgaaaacatggcatggggtcttgggcctacaactcctgtccagcccccaccctcctgggacagcaagacacctggccttgcggctctgagtccgagtcccacctccatcatgactagttgtggcctttgcccctgctcagctttgattccccatctgtaggacgaggaaaacactgcctgtctagtgttcaggggtgcggttgccacctgtgaaatgcccggcaaagacaaacccatcccttccgagcccaactgacgttggtcagcagctccttttcatgtctggaggtctgcaaaccttccgcccacatctgactcccaatttcatctccgcagctctgccgaggagggctctcccccagctctgaccaccaatcccatgtrccctgacccacgcccagcgcacacatcctgtgttacagagaagccgatggcatagtctttcctggaggagaaattacagcacagacagcaggacctcctcttctgatacctgaaatcagactg

SEQ ID NO: 904743 - DNA, 570 bp, Homo sapiens
attcattaagcagtgtggaatcttactttttgtgcaatctgcaaaggaatatttgtttgcagtttgagacctatggtgaaaaagtaatatcttcacataaaaactagacagtagcattctgagaaactaatttttttatgtgtgcattgatctcacagagttgaacctttcttttgatgaggcagttcagaaacagttttttgtagaatctgaaaagggatattttttatctctttgaggcctaaggtgaaatagaaaatatcttcacataaaaactagacagaaactttctgagaaacttctttgtgatgtgggctttcatctcatagatgtgaacctttattttgattgagcagtttggaaagagtcttttgtagtgtctgaagtgggctattagtgagtggactgaggcctatggtgaaaaaggaaatggcttctcaaaaaaagtatacagaagcattctgagagacttctttgtaatgtgcacattcatcttaaagtgttaaacmtttcttttgattgagctttttggaaacactctttttgtagcatctgcaagtgtatacttct

SEQ ID NO: 904744 - DNA, 594 bp, Homo sapiens
atatccacttgcagtttctgaaaaaataatgtttccaaactggtcaatcaaaagaaagtttcaactctgtgagttgaatgcacacatcataaagaagtttcacagaattctcctgtgtagtttctatgtgaagatatttccttttccacaataggcctcaaagcgttccaagtatccacttgcagattatacaaaaagattgtttcaaaactgctcaatcaaaagattggttcaactctgtgagaggaatgcacacatcccaaataagtttctcagaatgtttctgtgtagtttttatgtgatgatatttcctttttccaccgtaggctgcaaagggttacaaatatacacttgcagagtatccaataagagaggttcgaaagtgctcaatcaaaaaataggttgaattctgtgagttcaatgcacacatcacaaagaagttgctcagaattctattgtgtagtttttatgtgaagatatttaattttgcaaaataggcctcaaagcacaccaagtatccaatggcagattctacaataagagygttttaaatctgttcaatcaaaagaaaggttcaactctgtgagatgaata

SEQ ID NO: 904745 - DNA, 614 bp, Homo sapiens
agctaatcaagttttcagaaagttgtagaatgttttcttagctagacagagacaagtaattgccctgcgtgtctaagcatttggtcctcctttaaaccaacactacttacatatacaagatttttttccaacgttttttagctaggtggggagaaaataagtttctattaataaaaagtttgtgcttcttaatattcaaaactagaactgatatcaatgttataaaacattttcacttgaactgtgccttcagattttaattactatattattcacgatggaatagtttgcatcactcacatccaataaaagtaaaaatgagtataatttaaaagttcaggtctaaataactacaatttctccttttggctgacattctgggcagcaaatcttacctcacgtttctgcattcctgttttcagttcagtgttcttttgtatttgctttcgacccatgactgaagttgtcacattgatgctgccaattctctgtgcctttgtaagtgagaaaaacytttccttctcctcatatggggaaagtaataagtcatttacaaaggcctgtttgtaattgtggcctttagcgtctgtggactgcgttttaggtgcattatg

SEQ ID NO: 904746 - DNA, 648 bp, Homo sapiens
gaagaaaaccttcaaaaaatcagtgaatccaggagctggtttttggaaaagatcaacaaaatagatagactgctagccagaataaaaaaagaagaaaagggagaagaatcaaacagacacaataaaaatgacgaaggggatatcaccaccaatcttaaagaaatagaaactaccatcagagaatactataaacacctctatgcaaatgaactaaaaaatctagatgaaatggataaattcctggacacatgcaccctcccaagactaaaccaggaagaagtcaaattcctaaatagaccgataacaagttctgaaattgaggcagtaattaatagcctaccaaccaaaaagagtccaggaccagaaggatacacagccaaattctaccagaggtacaaagaggagctggtaccattctatctgaaactattccaaacaatagaaaaagagggaatcctccctaactcattttatgaggctagcatcatcctgataccaaaacctggcagagacacaagarggaaggcaaatttcaggccaatatccctgatgaacatccatacgaaaatcctcaataaaatactggcaaaccgaatccagcagcacatcaaaaagcttatccaccgctatcaagttggcttcatccct

SEQ ID NO: 904747 - DNA, 392 bp, Homo sapiens
aaatagtctctcagaccatgatgcaatcaaattagaattcaggattaagaaactcactcaaaaccacacaactacatggaaactgaacacagtgccatcaaattagaactcaggattaagacactcactcaaaactgcacaagtacgtggaagctgaatgactactgggtaaataatgaaatcaaggcataaataaataagttctttgaaaccagtgagaacaaagacacagcatacgggaatctctgtgacacagctaaagcagagtttagaaggaaatttatagcactaaatgcccacatgagaaagctctgaaattgacaycctaacatcaaattaaaagaaccaaagaagcaagagcaaacaatttcaaaagcctgcagaagacaaga

SEQ ID NO: 904748 - DNA, 461 bp, Homo sapiens
atcaggcaagagaaagaaataaagggtattcaaataggaagagaggaagtcaaattgtctctgtttgcagatgacatgattgtatattttgaaaaccacactgtctcagccccaaatctccttaagctgataagcaacttcagcaaagtctcaggataccaaatcaatgtgcaaaaatcacaagcattcctatacatcaataatagacaaacagagagccaaatcatgagtgaactctcattcacaatggctacaatgagaataaaataccaggaatacaacttacaagggatgtgaaggacctcttcaaggagaactataaaccactgctcaaggaaataagagaggacccaaacaaatggaaaaacattccattctcatggattgggaagaatcaatatcatgaaaatggctatactgcccaaagtratttatagattccatgctatccacatcaagct

SEQ ID NO: 904749 - DNA, 567 bp, Homo sapiens
ctcaaaaaacaattaaaaaaacacactatttggcatttttctgcccaggagatttttttcttttcctttattaatttatgtatatcaatatggacttatagatgtgkattttatatgttaggttataatccaatactattttatttgctttattgctcaaatgttccagttttgaacattgggaactcttttagttttttacttggcccatctccctttgacatttgccatcattgcaggtatgattttgttctctgctccagtcctgcggtctgccatttctccaagaagcccttgttctttttactaaagagtaatgttaaaaactaagatctgatcactaggtgtttttatttctatgggagtatttttttttatttatgggagttttatttttttatgattatttttattatcatcttttacttctctcttgccctcctcatgtatatcagttatcaaaatatcattcttttattcctactgctgttacccttatcccatctacagtacttgttagctatatagccttgggaatctaagtcttagttttctcatcaatgaaat

SEQ ID NO: 904750 - DNA, 658 bp, Homo sapiens
cacggccaccatcctggcccaagtcagaatcatgtctcctgttgaccactgaaagagcctcctcaatcatccacactctttccagtaatgcactctctgcatggccgcctgaaagctacatctactgatatatctgattaaagcctaaatcaaatcacaccactcccttactggtagttcttcaaagatttctcaaagcactaaaatgaaatcccaaattgaaaattgaaattcctttccccgatctacaaagaccaaaaaatctggcccccactatgccttcaatttaatcccaggccatttgcttcatccatattcatttttttccctctgtctttcttttgctgtacttgccattggctcctgcctgttagttctctcccaagatgctcacagggctggcttcttctcaaaaatgtctttgtttaaatatcacttcccctgggaggacttctgtgaccaccccaactaaagtagccccaaacgtactgtctttcatcttcctcttttgcttcttgctatcatatttctttttcttttaaaaattgatttcttctaatgcaagatcaaggagaaaaggatcttrttcatcgtgtccattgtttcattcaaaatgcctggcatcaagcaattgtttaattaataccgatagaatgaa

SEQ ID NO: 904751 - DNA, 754 bp, Homo sapiens
aggagcaagtcacatcttacacacatggtagcaggcaaagagagggcttgtgcagagaaacccccatttttaaaaccatcagatctcgtgagacccatccactatcatgagaasagcataggaaagacctgcctccatgattcaatcatcccccactgggtcccttccagtgggagctacaagatgagacttgggtggagacacagagccaaaccatatcagtcaattatatattgggtttaatatcaattattttaatcaactgcactaaaaaaataacatttaaaaagcccacaaaattattaatattgatggtgtaattccctaggaaactgactctaaaatggaaatgtgctgcaattcaagcttaatggcagcctttatcaaatccttcatagttgtcctgggttatacctcatggtcatttgatgctggttgcttccagaagctctctgaagctgaggcatccatgaaaaagctataagctgcagttgcctactgacagccccctcagatttgatgttttcatccgggatgcccataaactccacacagcatctttttctatcacttccatttctaatggcacagtgtctgaaatttatggatcaagctttggagctgctttcactttagcctggtcctgatgcagagtcctttcctgctctgtatctcacacaaacccggcagcttttcaaatcacccaatgtatggtgtggagcagcgtccccagatgttgcgtatgctgcctcca

SEQ ID NO: 904752 - DNA, 595 bp, Homo sapiens
ccctgtgcccaggaggaatcttcttcctaggtacactttaactaaaacccaacacatttagtctgtacttcctacagtcttatctggctgtcacactttgatccactctacacctgccctaatcaccttagggccacgtactagacaaatagggacaacccttatgcccagagcctattgaaattattccaactacccaatcctaaatttgtttaccctgtattacctgttcctgcctgcagaaaccacaaggaaaacttgcccagtttcccccctccaccctgccttctgaccaagcccagtactccctcaagtggcccccctgtagtggctacttttatgtgtcaacttgactgagacataagatgcccagatatttgggcaagcattattctcggtgtgtctgtgagagtgttcttggatgagattaacatttgaatttgtaaactgaataaggccaattttcctgcctaatgcaggtrgccttaatacaatcagttgaaaacctgaatagaacggaaaggttagccttcttgtgagtaagggggacttcctcctgcctgactgcttgatctgtaatgtgagtgttctgtct

SEQ ID NO: 904753 - DNA, 797 bp, Homo sapiens
atttaacctgtacctagatctttagagtatacaaagttgaacaaaatgctggtttgagagtactgtcttcaaataacgtaaaagctaatttgatgggtaatattttagaaatattaaatgtaaagggaaaatgagatagcagaagtgtagaccaaatgagcgaaaggtagcatgtaggtggggactaaggaaatcctacatgtcaaacgtgtttacatgagcacaagggtgttggaaggattttacaggcagatttggaaacatggaggccattgctgctgttagaagtgcttgatttttagtatttgttttgtgatcctggggtaacctaaaggaaggtaaagaaagactgaataaaattgatatatttcagtccttgggaacaccatataagaaacatacaatacaatgccttatgtttcatatgtaaccaaatgtatacatccacaggaaatatttttcttcagttaacaattcattatcttttcccaattatagtctctttccaaaacagaataataatccatatagttaaatcagataaacgtttttttccatcaaacttgaattcttgagtaagaaaaatctgtgtcaatcttatgaaattatttgaattttatgatcatctgttcataacatgaatgcaggctatattagagacctaatgcttaacttcttgtcccataaccagaatcaaaaaatctgagatgagcataccaagagaaaaatgaagcaatcatgggcaaatgtggtrcaggctgacacagagttactttgacgcaggctaacagtgctga

SEQ ID NO: 904754 - DNA, 701 bp, Homo sapiens
ccttccaaagtgctgggattacgggcatgagccactgtgtcaggccttattttccactttctgttgaaagcrttacagataagtttcttactttattctcttctaatttaggaaaagtaacgatttcttaaaattattttgtattttctctcttatcaaccatgtactgtattgccttattttagcacaactttgggccaatatacatatacacactgctctatgttgctctaatttatcaatatagcattgttggtatactagagacctacagaaaagtttatttgaccctttcaaatttctcctgaaaaaattacagttttaagtacttatctgtggtctatttcttagcatcctattacttattggttacctatgagggaaaaaggtatgtttttctagatcattcgttactacctccctcatggtcttttgttaggattttcccttgactggaatttctgctgaagttcagtgggagtgggtaaaaaggaaattcacaaataagaatacaagtcaatcttaggtgaaatttctaattactttctcacctaaatagaaaatgacatctaattgttggcctttcatcaggttaactggcaacgtgacgaaattaccacagtaagagtattgttaacatcacaatttgtttggaattaggctgtgggaaagaggagtttctacagaaagttaagccaagt

SEQ ID NO: 904755 - DNA, 616 bp, Homo sapiens
tttgtagccagtgagtatcaaaagccttggtagatccacagcaaagaattaaaaaaaaaaaaaaatggagggtggagccaagatggccgaataggaacagctccagtctacagctcccaacgtgagtgacgaagaagacaggtgatttctgcatttccaactgaggtaccaggctcatctcactggagagtgtcagaaagtgggtgcagggtgcaggacagtgggtgcagcgcactgagcatgagccgaagcagggcaaggcattgcctcacctgggaagtgcaaggggtcagggaattccctttcctagtcaaagaaatgagtgacagacaacacctggaaaatcaggtcactcccacactaatactgtgcttttccaacggtcttagcaaacggcacaacaggagattatatcccacgcatggctcagagggtcctatgcccatggagccttgctctttgctagcacagcagtctgagatcaaactgcaaggtggcagcgatgctgggggaggggcacctgccattgcaccraggcttgagtaggtaaacaaagcagcccagagctctaactggggggagcccaccataactcaaggaggcctgcctgcctctg

SEQ ID NO: 904756 - DNA, 638 bp, Homo sapiens
gtctcactttctttgaatctccagaatctagctccatgagcaagatattatagggatttattaaaatttgctaaataatggaataaacatcttaatgtccaattggaatacttgattctttatagatatccactcaacatagttttttgtgtgtgtacctactcatgccaggcattatacgtacatgagacagacacagcctgctatccatggtacttttggcataaggagttataaaaagcattaaggaggtaatttgcagccaagtgtaatattagagtggtgagaaggctcaggctgttttgacagtctatagcagggggggaaagttacctcatgcagttagttacttagatactcctttaaccaaatacataggattaaattgctagacgttttcgtagactcagaaagccatatggtgcaagtgccttcactgcctacattataatgaagtcttctcttcaacatcagaatactatgttttatgttttttgtttgtttgtttgctttttgagatggagtctcactctgtcatccaggctagagtgcagtggcgtgaacttggctcactgcaacctctgcctgctgggttcaagcaactctytgcctcagcctccccagtagcttggattata

SEQ ID NO: 904757 - DNA, 611 bp, Homo sapiens
tactaaacatagaatcatcctatgttaaggttaagagaaattttagcgattataagcccaacctcctcaatttataggttaagaattttataatagaaatgaaatcccgtcttyacaattatggagatacttggaaaaagaatggggacaaaatgtaggcatcataattcattatccagggagaccttactgctctattatgaaacatgctccagtgatatttatgggtaattttgaaaagtttatatggatgaaatgcatgaattttattcttttccgtgggttcctctgattttatcttctatttcaacactaagaaataaacagctcaatagaccagcaaaatggcttttgaaaatctcagttaaggcatcagctcagggacaacattctatggaaagagtgcatcgtccacagtgcagtgtatacactgagcaaatggacaaaaaatgatgctcaggctctataacaagaatactcatgtccaggaagcaagagaaaggtgtaagactgacctcttacattgtgattctcagtggcatacagtggaatttatgctttctttctccaccttgggttcagctgggctacacaaatgcatttccatgaaa

SEQ ID NO: 904758 - DNA, 519 bp, Homo sapiens
ctgagtgaatatgactaaaatccttattaaaataacttattaagaataaacttcaaaaaaagaaaaactagaataagatattaagaacagtgatgaattttaaaaactcattacatgtaccagtaaatttaataaaaacaaaaaacaaaacagacttctagtttcagttttgacatgtagagcttggaagacatcactcctgtcctaaaatcaagcaaaagctgagcaaaccaaaattcaaccatggatttatccatgcagaactgagactgcagagcaaactaccacccaaacctggaaagagagactaatgctcaaaataatagccaagatttgcttatcgggaacagaaaccactattgacataaatggttaggaattaccatttaaataactgtgattaattgctagaggaagattgtgaactagcataaggatgaggtaactccccatgattttggtcttggaagaatccagttacttttgtgggtttyaccttcaggaattccattattttta

SEQ ID NO: 904759 - DNA, 649 bp, Homo sapiens
ctttagtaacctctatactgttttctacaattgttgtaccaacatacattcctactaacagcgtacaagggttccagtttctccacaccgtcaccactacattatctatcatctttttgacaacagccatcctgcaggcatgagatgatatcccattgtggttttcatttgcatttccctgattattggtgatgttaagcactttttcctttttttcttctccttctggcattaccattttgtatattatacaacttatgctattattccacagttcttggatattcttttcttgtttttttaattcttcttttgagaaatttctactgatgtattttcaagcttcaatctatttaattctttcccccagccccactgatgggctcatcaaaggcattcttcattttggttaaagtgattttgatacctagcatttccttgtgattcttagagtttccatttctctcactgcattatccattctgttcttgcatcttgtcccattttttccattagaactcttagcatgttattcatagttattttacatttctgtaccataattcccaaatctctgcygtatctgagtttggttttgatggttgctctgtttcttgaaactgtgtttaattgacttttagtatgtttt

SEQ ID NO: 904760 - DNA, 590 bp, Homo sapiens
ccccaattaaaagacaaggatgggcaaattaggtaaagggtccagacccgtaggtgtgctgtattcaggagacccacctcacgtgcaaaggcacttgggctcaaaataaagggatggagcaatatttaccaagcaaatggaaagcaaagaaaaaacaaaacaaaaacaaaacaaaaaaaaccagtggttgcaatcctactctctaataaaacaggctataaaccaacacagaaaaaaaagcaaaggagggcattacatagtggtaaagggatcaatgcaacaagaagagctaactatcctaaatatatttgcacccaatacaggagcacacatattcataaaacaagttgttacagacctacaaatagacttagactccagcataataatagcaggagacttttacaccccactgtcagatagatcaacaagacagaaaattaacaaggatattcaggacttgaactgagctctggaccaagtgaacctaatagacatcaaaagaactctccactccaaattasagaatacacattcttctcagtgccacgtagcacttcttctaaaattgaccacataattggaagtaa

SEQ ID NO: 904761 - DNA, 590 bp, Homo sapiens
ccccaattaaaagacaaggatgggcaaattaggtaaagggtccagacccgtaggtgtgctgtattcaggagacccacctcacgtgcaaaggcacttgggctcaaaataaagggatggagcaatatttaccaagcaaatggaaagcaaagaaaaaacaaaacaaaaacaaaacaaaaaaaaccagtggttgcaatcctactctctaataaaacaggctataaaccaacacagaaaaaaaagcaaaggagggcattacatagtggtaaagggatcaatgcaacaagaagagctaactatcctaaatatatttgcacccaatacaggagcacacatattcataaaacaagttgttacagacctacaaatagacttagactccagcataataatagcaggagacttttacaccccactgtcagatagatcaacaagacagaaaattaacaaggatattcaggacttgaactgagctctggaccaagtgaacctaatagacatcaaaagaactctccactccaaattagagaatacacattcttctcagtgccaygtagcacttcttctaaaattgaccacataattggaagtaa

SEQ ID NO: 904762 - DNA, 682 bp, Homo sapiens
acagagactgtcccaggaattaggaggatataagaaggagagagggatagtctcatttgctatgatgatttgctttccattcttctctatcctgtttgacaccccaagagagtggcttctrtgcaccacatcagtgggattctttttaattccagtttctggtggaattgagacactgggagacacctggatgagactggaagacagcaggagagccacttgggatttccacctcctggctctctgcctgtgtattagttcattcttgaattgctacaaagaaatacctgagactgggaaatttatgaagaaaacaggtttaattggcttatggctctgcgggctatgcaagaagcatagcagcttctgcttctaagaaggcctcaggaagcttccaatcatggtgaaaggcaaagggggagcaagtcatctcacatggtgagagcaggagcaagagagacagggaagaggtgctacacacttttaaacaactagattgcatgagaactcactatcactaaggcaataccgaagggggatagtgttaagccatttatgagaaaccatccccactatttaatcacctcccaccaggccctccctccaacactgggaattacaatcaacctgagatttggttggggacacagatccaaagcatatcagcctgtgtggctgtgtg

SEQ ID NO: 904763 - DNA, 613 bp, Homo sapiens
ggcaacatatgtaaaagtgagttataaactgtaaatatacgtgttacatgttcaaacttctttaatatagaaatgtaaaatggatgcttyagtttttttcaactatggataaaaataatatttaatgctaattttttcagaaaaaaagttaaaatggaaaaagaaatttttgaaggaagtaagtacagtgtatgatataccaaaaaatcaaataaatttattctttttccagcagtgctattcggaaaatgttatagaagttaaaacctgtttttgaaaataagcaaggcatagaaataaaaagagaaatgtaaaaaaaaaaaaaattagccaggcatggtggcaggggcctgtagtctcagctactcaggaggctgaggcaggagaatggcgtgaacccaggaggtggagcttgcagtgagccgagatcgtgccactgcactccagcctgggcaacagagccagactccatttctaaaaagaaaaaaaagaaaacttgtcaatcccaattatgaataaagttaaaaaaatagaaaaaaattaaaaaatttaaaaagcacagatttttaaaaaagtgtacagccatgtaataatagtgggggacttcaatacc

SEQ ID NO: 904764 - DNA, 559 bp, Homo sapiens
taggcatcaaaggaacaaaactcaaaataataaaaattatattcagcaaacccacagccaacagtatactggacaggatactgtttaaagcattcccctttaagaactggaacaagacaaggatgcccactttcaacactcctactcaatatagttagtactagaagttgtagctagagaactcaggagagacaaataaaacatatccaaattggaaaataggaagttaaattatttctgttgactgataagatgatcaaaaaaaaaaaaaacaaagactcctccaaaagactcctagatttcacaaatgacttcattaatgtttcaggatacaaaatcgacatgccaaaatcagtagcatttttatataccaataacaatcattctgagagctaaatcaagaagtgaatcctatttacaatagctgcaaaaagagtaaaatacatacaaataaacttaaccacggaggtgaaagatctctacaaggagaactacaaaacactgrtgacacaatcatcgatgacacaaacaaaaatcctatgctcatggattgtaagaa

SEQ ID NO: 904765 - DNA, 604 bp, Homo sapiens
cccgcgatgttccctagcttggattctctgcgcatcgcaccagcaactcctgtgctttggcttctaattcactaattccaccaactcacttggggcttctatgactagcatgcgaaaaggrgggaataataagaaaaatgccacaccacactactttacacacctcccgggaattacagaatacgggggtatggggggcatgaagtgggaggggacgagggtccgaataaaacaacctataggctcttattttgagtcaccatcaccgaggagaaatctttcaaacccactggcgggaaggtgcgggatcctgggaatggagacccggatagtgcctggcctctgcagggaaagccggtgagccactggccttccattcctgaaacgccgggccttggctcatcctcgaatctaacacttcgctccccctcctttaaatcttttttcctttccttcccactcacccctccttccccccaaagctctcaccgaagtcacgactatccctttgaacatccttaaccctctcgtccccgtatccctctcctgcatccagggcggggctaaccgcagctggcgccaaccccgccccctggcgcacgga

SEQ ID NO: 904766 - DNA, 620 bp, Homo sapiens
gattgaccaacatggagaaaccccgtctctactaaaaatacaaaattagcccaatgtggtggtgcatgcctgtaatcccagctactcaggaggctgaggcaggagaatcgcttgaacctgggaggtggaggttgcggtgagccgagatcgcaccactgcactccagcctgggcaacaagagtggaactccgtcaaaagaaaaaaaaaaaagaagtatcccatgtcccatgaaggacatactgtaaacattcatgaccaaatctcctgcagtcccatcagagcagagttaaagtttacatccactctccatagaaaaatatcaagaccaaattagaaagcaaataattcaataaggtgattttgcatttttatttgctggaaaacattggtaataaaatatcaacaattgttacttaaaattgcaaaatactagatacttaacaaatatttatttgccaataagaaaattgacatttctcatctgaccacttactctaggaaacatttcacyttaaaaattctgacagtaaatttttactggggctttacattctgaatagtaagactactcataaagatatgtatgtatttcttaagcttctgaaggctagtgtacaagg

SEQ ID NO: 904767 - DNA, 572 bp, Homo sapiens
acgcacaaacaaccacactagttctctattaatggatgataaccaaaatgaaaactttgaaatgacacataaagaattgaaaatatggattgtaaggagctcaaagagaaccaagagaaagttgaaaatcatcacaaagaaatcagaagagtaatgcaggagatgaaagatgagatagctatattaaaaaatagaccaaacagaacttttaaaaataaaaaattcactgaagaaatttcaaacacagttgaaagctttaacaacagactagaccaagcagaggaaagaatttcaaaggctgtagcccagaatttaaagttaaccccatcatacaaaaatgaagacaaataattttttaaatgaacaaagcttttgaaaaatttgagattatgctaatggatcaaacttataactcactggcatttctgagaaagaagaaggaaatgtggaaaagatatttggggaaataatttagaaaatatccctaatcttgctagagaggtagacattcagatataagaaatttggaraacacctgtaagatactatacaaaattagcatcaccaaggca

SEQ ID NO: 904768 - DNA, 613 bp, Homo sapiens
aactatgaaaagtctgagaaaaggagacaatttcaaaagyagcaagagaaaatgacttatcatatacaaggcaaattcacaagactatcagcagatttctcaacagaaatcttgcaggccaggaaagtgtgaaatgatatattcaaagtattggaggaaaaagattgctaaacaatagtattataccctgcaaagctattttttaatagctgctctttaaaaatgaaggggagacaaattctttccaagagagagggactttgtcactacttaacctatcttacaaaaaatgcttaaggaaggccttcaagcaatgtaaaagcatatgaaggtagaaatctcacaggcaaagtaatacacagtcaaatacagaataataaacactgtaatggtggtgtctaaaatacttacaacacgcaagataaaggtttggttaaattattaaaaataactatactaaaatttgataatgaatttagaatataaatttgataaataattcacaatgaatgaaatcagagtaatctctgacttgaacatgtagtgtgaatggggcaggtaagaatgcagagttttttttaatacaatttaagttgttatcaactgaaataga

SEQ ID NO: 904769 - DNA, 623 bp, Homo sapiens
attcttttaataatgacttttcaagattaaaagagtaaatgtttacacaaaaagaactaatcattaaaataaaatatatttaaaagaaaaggcaagggacaatattttataatattatttaaatactaaatgaaatgcacaattttctagacagaaaatataattcatcaaaattggcctcagtagaaggttagaacaactatcatagaagaaatagggaagtggcaagcctactggttttgagagggaattctgacaaacttttaaagactgtataatcccaatgtggcttaaattatttgaaaacatagtaaaagagaaaacaaaattaaattccgttttaaaatttgcttcaaaataatgcagggggagcacgtgtaggaagtacaaatcagacaaaattggtcttgagttaagtaagaaatattaaagctacctggctaagtgtggtggctcgcgcctttaatcccagtactttgggaggctgaagcaggcaaatcacctgaggtcaggagttccagaccagcctggccaacagggtgaaacyccatttccactaaaaacaaacaaacaaacaaaaaaaaaaaaaaagaaagaaaagagaaacagaaatatcaaaacca

SEQ ID NO: 904770 - DNA, 604 bp, Homo sapiens
tcttcaatgtatgtagagggagtatttaaaacagttatattacaaatggcaaagagtaaagagcttcaaaggaatgtttctatactccactcaggggaaataaaaaacctcatggaaccaaatgaaaataaaaatacaacaaatgaaagaagctaaaacagtacttcaagggaaattcatggcacaaagcatatattagaaagaaggaaaatctcgaatcaataatctaagcttccatgtcaagtatgtagaaaagcaaaggaaaataaagtcaaagcaagaggaaagaagctaataataaaaagtagaaagcaatgaaattgaaacaaaaaagtagacaaaatcaatgcagcaaagaggttattctttgaaatgatcaataaaagagataaacctctaacaagactggcaaagaaaaaaagaaagacacaaattccactatcaagaatgaaacgggatatttctacagaccccacagacttcaaaggataaacacycataaaatttaacaacttagatgaaatgagccaattccttgagaaaaaccaactattacaactaacccaatatgaaggagatattttgaattgccctataagtatta

SEQ ID NO: 904771 - DNA, 588 bp, Homo sapiens
taattttctgtctcgttgatcgttctaatattgacaggggggtgttaaagtctcccaccgttattstgtgggagtctaagtctctatgtaggtcactaagaacttgctttataaatctgggtgctcctgtattgggtgcatatatatttaggatagttagctcttcttgttgcatcgatccctttacaattatgtaatgcccttctttgcctcttttggtctttgttggtttaaagtctgttttatcagagaataggattgcaactcctgtttgctttttttttttttcttttcatttgcttggtaaagattcctccattcctttattttgagcctatgtgtgtctttgcatatagaattggaagttctggccagggcaaacaggcaagagaaagaaataaagggtattccaacaggaaaagaggaagtcaaattgtctctctttgcagatgacatgactgtatatttagaaaaccccaccgtctcagtccaaaatctccttaagctgataagcaacttcagcaaagtctcaggatacaaaatcaatgtgcaaaaatcacaagcattcctatacaccaataacagaca

SEQ ID NO: 904772 - DNA, 614 bp, Homo sapiens
cctctgtttgtctattattggagtataggaatgcttgtgatttttgcacattgattttactcccacacaataacactgggagactttaacaacccactgtcartattagacagatcaatgagacagaaaattaacaagtatattcaggacttgaactcagctctggaccaagcagacctaatagaaatatacagaactctccaccccaaatcaatagaatatacattctactcagtaccacgtagcacttattctaaaattgaccacgtcattggaagtaaaacactcctcagcaaattcaaaagaagggaaatcataacaaacagcttttcagaccacagtgcaatcaaattagaactcaggattaagacacttgctcaaaaactgcacaactacatggaaactgaacaacctgctcattcatgactactgggtaaatagcaaaattaaggcagaaataaataagttctttgaaaccagtgagaacaaagacacaatgtaccagaatctctgggacacatctaaagcaggattaagagggaaactcttagcactaaatgcccacaggagaaagcaggaaagatctaaaattgacaccctaacatcacagttaa

SEQ ID NO: 904773 - DNA, 562 bp, Homo sapiens
aaaaggatgtagaattcttagtcatctcaagatggcagtcagtaacatgctgctgctgctgtttttttaaatgtaatatgacactcamctatatttacaggatcagtgaccccagaagaaatgcttccaatgcacttagaaataattatatatttattgaaggctcgcattctgtttgtggatgagcatctaagcaaagtgagaaagagctgtccagtcgcaaacacacacacacacacacacacacacacacacacacacacacacacagatacagatttagaacaacaaatctaagactagaactgatagggagtttctattgttctgcccaggaaagtgatggctgagagatgatttaatatgtttctccagtctataaagggtcactatctggtggtttatgaccatctgttctttactttccccaaggatggaaaggaggaaatgagcttaaactttaagaaaataaatttaggctagaccaaagggactgccagactgaggtctgtgtaatgttgcaaacccgtggttgtggcatttcctcctctgacctcaactg

SEQ ID NO: 904774 - DNA, 625 bp, Homo sapiens
cggagtgatttaagaaaaaaggatcttggagatggaatatagatagatgcttgctcagaaatattaaagctcccttgaaccttcaaaaagctggattgcttataratgtaaatgaagagcaatggttgaaggcttcattcgaaaatgaaatgtattaaggcccctcaagaccagtagttaatggatattatttgattagttcaagtcctcatcaaaatgagaaagtaaaagggtctagcacacagcctgctagaagctccacaaacgtcaggaatttttttattcttcttaaaagataggaaatttgaaaattacatgccaacatggtgaaaccgtgtgtcttctaaaaatacaaaaactagctggatgtggtggcacaggcctgtagtcccaactattggcaaggctgaggtgggagaattgcttgaacccaggaggcagaggttgcagtgagctgagatcacagcactgtactctagcctgggtgacagagtgagattctgtctcaaaaaaaaaaaaaaaaaattacttggatggatgttgttgaattacagtggtaaaaattactctttcattctcagctttttcttctaggaccaataagttaaggagccgtgagccacag

SEQ ID NO: 904775 - DNA, 687 bp, Homo sapiens
gttttacttaaaggttaaagatggttttctcattagagaaaagatagttagataaaaaaaataacaatttttatttggaacaattgtaagcctttgcctcattttgtttctcttttattcctttcttttcttttttttttttttgagctgataaatatatttatgccaaccacagaaactatgaggcatacaaaaacaaacagcaaaatgatagaagcagttccttccttatcagtaattacttcaaatataaatagattcaactttcaaataaaaaggcagagattggaaaatggatcagaaaataaaccaaaaccatgattaaattacatgctgtctacaagagattcatgttagattcaaaaagacaaatagcttgaaagtacaggatggaaaaagatattttatgcaaattacaaccaaaaaaattggagtggctatggtaatatccaacaaaatagattctaagccaaaaactgttacaagagacaaagacagatattatatggtgataaagggtgagttcatcaagaagatataacaattataaacatgtatacactaaacaacagaaccccaaaatatatgcagcaaacattggcagaattgaagagagaaacagttctacaataatakttggagtttttaataccattttcaataatggatagaatatgtagacagaga

SEQ ID NO: 904776 - DNA, 586 bp, Homo sapiens
gatgtcaataatgactagtaagccagggaagcaaatcctacagatttagatactgctgatttactttcttcaaaacaacacaggatagaaagataaactataaaagtgcataaatttaaggaaaatactttcaatccaatatactataagaaaaatcagaaagaaaagagagaaaggatttaatgttttctgtttctttttatctggtcatccttctctcataaaatggaatttcatttttaatatattgaataggaggtaaataattatgtaatttactattagtttcctagcttctcagattacttttgtaataataccttttaatcataaaaattcataaaataggcattccattgcagaaactttcataaaggcttatcatctgataatcatttaaatatgcattcttatattgaaactatgcaaacaacaaccaaaaagctattgtgcaaygcagaatttatggtttttgattaacgggtaagcaaatgtagctgaagcagattataatatgaaatcacatattggctgaacagatgtttaaatagaggtaacatctgaagttctctacttatcattcaca

SEQ ID NO: 904777 - DNA, 596 bp, Homo sapiens
gatatacaagcaataatttaagaagaaatatgttacaatgatatagaaagctgctgtcacactgtctttgttacaggttcttctaatgattgaaggatctttaaaaataaactgacaaaatcamgaaagctgtctttaattcaaatttaattgaatgcacctgctagaatagtctaggttgtgttgcaaaacccagtggtttaaaacagtccatgcttattttctacacatactgcatatatatcacagattaactggtgtatctgccctgcattctcctcactttagaatctatactgacaaagcagaagtcatctgcaacattgactgtttctaaggcaaaagctaaaagaaaaggtaattaaattaggttaggttcttccagcttcggtctggtgataaatgtatgcattccacccatatttcatcagcacaaaacatgttacttcagggaggtaggtgaattaaatcctaccatgttcccgtatgagaaccagttaaaaaccataataaaaatagtaatatttatttgcgtctacacttctgatcaccaactatttagtccaatctcctttacattttcgagatacacacag

SEQ ID NO: 904778 - DNA, 604 bp, Homo sapiens
aaaaaaatcccattttccgaggagaaattcaagccagctgcagaaatttgcataagtaatgaggaacctaatattaatcaccaagacaatggggaaaatgtttccagggcatgtcagagacccttgtrgcagtcccttccacagagggccagaggtttagaaggaaaaattggttttgtgggccaggcccagggtccctctgttttgtgccgtctaaggacttggtgccctgcatcccagtcgctccagctgtgactaaaagggaccaagtcagaggctcaagctgttgtttcaaagggtggaagccccaagccttagcagcttccatttagtgttgaacttgcaggtgcacagaagtcaagaattgaggtctgggaatctctgcttcgatttcagaaggtttatgaaaatgtctggatgcccaggcagaagtgtgctgcagggacagagccctcatggagaacctttcctagggcagtgcaaaagggaaatgtggggttggagcccccatacagagtccctaatgaggtaccacctagtggagctgtgaaaagagggccaccatcctccagaccccagaatggtagatccactgacagcttgc

SEQ ID NO: 904779 - DNA, 544 bp, Homo sapiens
ctaaattatttataataaagattagtgggtctaacaaattctttatgtttattcttcttcattgtatccttccatcattaaattatttttattcttaaatattaattactatatatttatatccttcttaactgtatctgcacttatacccatacttttatctgtatcccactagctagatgaggagaaactcaaagtcaatgctataattatactgtatctgtaactgtagtgttgataatttgtttaatatatctattcttatattaactatttcattccataaatgtaggttcaatctctctcagtgaattcctttgcagtctttctaaattcctcattaaagtttttatttaaatattatttttaaaaagtcaatcactaaccgtcgcaggtgctatggtttaaatgtatccccctaacttcatgtgttgaaaacytaatccccactgcagaagtgttgggatgcaaagtctagtaagaggtgattacataaagagcagactgacctcatgaacaggttaatattgttattggagaaggg

SEQ ID NO: 904780 - DNA, 617 bp, Homo sapiens
taggataacaaagtattttataaaatgttaggtaggaaggagcacgtgaatcaraatatcactgttttgcaacctttaataaaataataaatgttggtcgtggctgcaaacatcacagatagggcaacattctgatgtaagtacacaacaccacctatgatatagtcttgccaaaaaacaaccctgaatttcactactagtttataggaaataaaggggaaaaaggaacattttgaagttagcaaactccagatctcgagaaactctaaaggcaaatgagtaggtatctctaacgaataaatagctagggaagaagagaaaaagaaagaaacagagacacagagagacagagattgcttttagttctagatttagcttaaaatgtatttaaaatgtatctttaattctaattagaaaaaagctttaaattttttgaagaaagacaatccaaaaatttttaacattgagtatttgatgaaaataaataaatattcttaattattttgtgaacaataatatttttatatgttttaaatcctattatttttacagttatatattcaaacatttcataattaaattatattctatttgtgattatctttataaccatatgg

SEQ ID NO: 904781 - DNA, 513 bp, Homo sapiens
aaaacaaacaaaaaaatcaaaaacttcactattattttccatcttctaagtaacctgacttgaaacctaacctcaggttagggtaacagggtaagagggctcagggttggggtaacagaaagaaaggctctcttccccgactagcaatacacttttaagttactttcaagtggtatttacaggagtcaactgaaaaaaatgtaattaaagtaagtttttcagccaggtgcgggggctcacacctgtaatcctagcactgtgggaggccgaggtgggtggatcacaaggtcaggagttcgagaccagcctggccaatgtggtgaacccttgtctctactaaaaatgcaaaaattacccgggcgtggcggtgggcacctgtagtcccagctactcaggaggctgaggcaggagaatcacttgaacctgggaggtggaggttgcagtgagtcgagatcrtgccactgcacttcagcctgagtgacaaagtgagactttgatgtgaaaaaaaaaagt

SEQ ID NO: 904782 - DNA, 583 bp, Homo sapiens
ccaaagcccccgcgtttgtgtctggttgatagcacccaatgcccctgcatctatcaccttgtgatagacttaaagcccctgcacctggaactatttgttttcctgtaaccatttatctttttaactttttggcctgttttgcttctgtaagattgcttccgctaggctccccctccccttcctaaaccaaagtataaaagaaaatctagccccttctttggggccaagagaatttttgagctctagctggttttggtaactggcaataaaggactcctgaattagtctcagagtgtggcatttctctataactctcttggttacaacatctgcagcatcggcctcaataagccggcgaagttcacatttatttagtacagattaaatgacaaaggtctcaagtaaacaccactagagggtaattaacattgccaaacttctgattagagagcagttgcacgcccaaagatgatcaaagctcggtcttaggaccacatgagtcaacaagctatttagataaactcctctacattcctatgcatctacgtactaagcttttaaragaattcagctgccttcagtc

SEQ ID NO: 904783 - DNA, 624 bp, Homo sapiens
ttttatgttctgaatccgtgctgttcagtatggtagaaactaatgatatgtgactgttaagcaatttaaatgtggcaggtcaatatggagatgtgactcatatttctataggtcagtgctgttattgacaaaaattctatgtcaggtacatattccatagacattttctccaacggcgttggcttcatttttattatctcatttttttgatcaataatgatctttgtttttaatgaagtccaatgtttcattcttttcctttgtgattattgcttttttgtgctgtgtaaaacaactattgtcttccctaagaacataaaataattttagtatcctgagacttcactgaagttgcttatccacttaaggagattttgggctgagttgatggggttttctaaatatacaatcatgtaatctgcaaacagattacaagcattcctatataccagtaacagacaaacagccaaacgatgagtgattcccattcacattgctactaaaastataaaatacctaggaatacaacttacaagagatgtgaaggacctcttcaaggagaactataaaccactcctcaaggaaataagagaggacacaaacaaatggaaaaactttccatgc

SEQ ID NO: 904784 - DNA, 615 bp, Homo sapiens
aaacaagtctcaacaacttaaaaaatcaaaatcttattgagtatattctcagatcacatggaataaaattataaatcaataacaagagcaactttggaaactatacaagtacatggaaattaaacatgttcatgttcttaaataatcattgggtcaacatagaaattaagatgaaaatcaaaaaagttcttaaaacaattgaaaatgaaaatacaacataccaaaatctgtaagatacagcaaaagcagtactaagagggaattttatagcaataaacatcataaacaatctaaaaatgcaactcaagcaattagaaaagcaagaacaaacccatccccaaattaaccgaaatagagaaataataaagataagagtagaactaaacaaaataggtttaaagaacaatataagggtcaacaaaatgacatattggttcttcagaaagagaaaattgataaactaccacctaaaatagcaaagaagagagaacacctaaataaacaaaatcagaaaagaaagaggagacacgaccattgatacatgcattagtctgttttcatactgctatagataactkcccaagactgggatctaccatcctagggtctggagga

SEQ ID NO: 904785 - DNA, 648 bp, Homo sapiens
cagccataaaagttacagaggtagacgatttaagcaattagccatggcaggacattatagggtttactgctgtccgtagctggtctgcttaaacaaggctgaaagccatcaacgcagctgagcatgaaattacagaatcttaatctgcccacataaagatgctcactgttattacagtcaaatgtcatatttaagttaattttgtgaaagatggaccagccatattttcttttgtgaaacaaaacaaaaggaagaaaatagcttgaccccgtaaacaggcacaagtctgactacattctcttacgactgagttttttattaattaatgaatattaaaaatacagaggttaatcaagaaaatgcaattttatagagaaaatagtttagtggttgtctggggctggggtgggaaaggagattaattgtaagtgggcatgagggatttactgggggcatgaaagtggtttaccactgatttatggtgatggatgtaacactgggtaaagttactaagcattattgaattatayactagaaatgggtgaagtttattgtatgtaaatatatgatgtgaaattatgtataataaatcagtctagggcaaaatataaagcttgaaactacagtacaagattttttaaaaatcat

SEQ ID NO: 904786 - DNA, 606 bp, Homo sapiens
aaatctcagctctggtagctatcatctttatcagtgaaatagaaataaaaatacctactgtatagatttattattaggattagtgattatttttgcaaaacaccaaacaaaaagtagttagtaaatgagaactatagccatgttaaaaatgtaaaaatctgaaaaccttcttctgaataatttatttgaataacctttcatagacaaattaaaactttttaaaattattttttattatttttatctgaatatttgacattataaggacatagtattaatgtcactgtggctatataaattatttaacttttaagtaagaattttaagtaagctttattgagatataatttacctacagtaaaatcacctatttaaagtgcattgttcagtggcttttagtatatttacagaattgtgcaaccatcatgacggtcaacttttaaaacattttcataatctcccaaagaaatcccatacccatgatcagcatctcctaattcccatagcctctccctctagccccaggaaatcactaatctattttmtgactctacagatttatttgcctattgttgacatttcacagaaatggaatcatgcaaggtg

SEQ ID NO: 904787 - DNA, 643 bp, Homo sapiens
taggctattatacagctactaaacatgtttttgaagactaagaacattagaaaattctcaagatataatgctaaagcaaaaaataaaagcaaaaactctctcattgcacatagtatggtccaaattacatgaataaacatacagacatggaaaaaactcaaaggaaaatatttcaagtaattatctctctgtggtaggaaaaacagtaattttagtagtttttctttatatttttattttacagtttttctacaaatatatattacttttataatcagagaaaatgaaattagacaaaaataaaacattgaaagaaaaaaattaaggagggctataaggtagatcagtaggtaataaaaagcaaatggatataaagatggaaaaaatatctggagacatatataaagcagtattttcaagatgtgtttttacacagttatagtttgccccattatctatattaatacaattacctagaagtaaaaaatgaacgacataacccaaaacttatgaaatttataaattgatagtgtcgtaagaatgtctttggaatgcaatgattgtatctcacaattttcctatattttgttcaggtaattactaatattaatatagtaamctcacccacagcagctaatgatat

SEQ ID NO: 904788 - DNA, 788 bp, Homo sapiens
atatcaagtacattatattcatactgrtaaaactctgtatcagtgaggaaaaaaattttgaaagggtcaaagaaagaaacatcatttgtgggtaagaaaagttcaggctcctgaaccttcttctaggcccatctagctattttgcaaaatccaattttagcaaggaattctgctaagtcaatttagtaagaaccttccacccttgataactgatcaccctgatatctgattgaattcctcatccttcaccatcccccaggttatgtctgactaccctgtcctgtcttcagcaagactcctgttaagtcagtttagccagaatccccctttactcttaatgttttattttagtaactttccatccattaacccctagaccacttctttttatatttatttatttatttatttattttgagatggagtctccctctgtcgcccaggctggagtgcagtggtgtgatctcggctcactgcaacctccgcctcccagattcatgccattctcctgcctcagcctccagagtagctgggactacaggcgcccgccaccacgcctggctaattttttatatttttagtagagatggggtttcaccatgttaggcaggatggtctccatctcctgacctcgtgatccacctgccttggcctcccaaagggctgggattacaggcatgagccaccacgcccagccccctagaccacttcttgactataaattgtcacttgcctgtgctgtgttcagaattaaacccaatctctcttctccattacaaaatctcatt

SEQ ID NO: 904789 - DNA, 553 bp, Homo sapiens
gggcgcctgtagtcccagctactctgggaggctgaggcaggagaatggtgtgaagccaggacgcggagcttgcagtgagccgagatcatgccattgcactccagcctgggcaagagagccagaatccatctcaaaaaaaaaaaaaaagataattttacttggacaaacacttcctcagctaagtaatcaaaacaacatcgacagtcataagtcatgctgaaagtatataaacttgctatagtgtaatggaaatggcactttacctctgttcatcctcttaaaacccacatctctactctaattatgagaaaaacaccaggcaaattgcaataaaggaacatcgtttaaaattacttagtagtagtccataaaactgtcaaggtcatcaaaaacagggaacatgtgagaaactataaccttaagtgaagcytaaggaaatatgataattacatgcaatagtttccaggatgggatcttggaaaacaaaaataatcttaggtaaaaaatgagaaaatcagaaaaaagaatggactttgatatgggttggctctgt

SEQ ID NO: 904790 - DNA, 626 bp, Homo sapiens
tgtgtttttgttgttgttgttgttgttgtgggggaggtggattataatatataatgcagaaaacgctatgtaactgtttgtagaatatagcctatggtaatatgcggcaatataatggattattaatttatcttttattcttattgcattttttcccttttctaaatgaaacagcctggtccttatgatcccttactgtgctgaaactctttgtttcaaaatgcaataaaaacttactgggatataaaggctagaagactgataaatttgaagcaactgtggttgtggaaaggaggtttaattaaaggtagaaggactatcaagaggaggagaagaaaaataaggaggaaaaatcttttgataatgtctaaaattgcattatcagttttattaggcaatgaaaaataacttaataaataaattacatttagtttgattttttttaaaaagaggaatattatgcttcttatgctttcacatttgtagaataaaactaacagtctatacaataagaaaatcattgcttaagtgaagttcttttgatatctccarcatgtacagctttctctataatgtgcaaagcaaaccctgtattgtgctaaagtcagcactattgcagggccctg

SEQ ID NO: 904791 - DNA, 644 bp, Homo sapiens
gagactatttctaatgcttattatgttttagatgatctgcttttctaacttgattcatgtagagttttttctcttttttttakttaaaaaaagtcccatctatatcttaaagtgaatcaatgtttattgatttggtctgatacacgatggcatattttgatcagctagctcatattttctttgtcaggcaaattttcttctgtcataattttgattgttccttctgtttcctctggtttttaattagaaaattctgtactcttaaccctctgtcttccatgtctgctttcctatcttgaaactttttagtctttatcagttaggaaagtgttcagatattaataacagaatatatagcaaaagagtggattaaacaaatagggctgtttatttcacacaacaagaagtccagagactggcaggttatgcccagtgcagctgatagatgcaggaggcagagaagcgagggtccctggagagtcttcaaccctccccacaagtgtttacatcagatgtttttgtgcaaatgagggaaccttcccagggccttctctgggcatgtgcgcaatggactggggattcacctacacactgggagaatagggtggagccactgagaattcacaccttatgcagtggggagg

SEQ ID NO: 904792 - DNA, 644 bp, Homo sapiens
gagactatttctaatgcttattatgttttagatgatctgcttttctaacttgattcatgtagagttttttctcttttttttagtwaaaaaaagtcccatctatatcttaaagtgaatcaatgtttattgatttggtctgatacacgatggcatattttgatcagctagctcatattttctttgtcaggcaaattttcttctgtcataattttgattgttccttctgtttcctctggtttttaattagaaaattctgtactcttaaccctctgtcttccatgtctgctttcctatcttgaaactttttagtctttatcagttaggaaagtgttcagatattaataacagaatatatagcaaaagagtggattaaacaaatagggctgtttatttcacacaacaagaagtccagagactggcaggttatgcccagtgcagctgatagatgcaggaggcagagaagcgagggtccctggagagtcttcaaccctccccacaagtgtttacatcagatgtttttgtgcaaatgagggaaccttcccagggccttctctgggcatgtgcgcaatggactggggattcacctacacactgggagaatagggtggagccactgagaattcacaccttatgcagtggggagg

SEQ ID NO: 904793 - DNA, 601 bp, Homo sapiens
ggacagcagtgaagagaagacatgtgcaaagtggagatagaccctgtgcatgagatgtcagaacacacctttagaaacatactgtcagagagtgaggatccttgccaccccaaaatgaatattataatttatatttgcaagaatgagtatagaactagggtgagcaaggcagcctgggtgacagagcaagactctgtctcaggaaaaaaaaaaaaaagagagagagaaagaaagaggaaggaggggtggaaggtgtggagggagcatgctggataggaggtgctcagtatgtattcagtattcagcagttgcaggaaatgagggcagctgtcaggttacaaagctatgagaacttcaggagggtcctgaccactgctgtgtgatcctcatagaagagctgttttgtgggtggccctttcagattccatgagttccaaagcaagcgcttctagcaatgctgagaaaggtcaaggctgcaaaccacccagcttattacattaactaaagtatttctcattcatttgggtccatagtttatccacygaatataataatgcagcatttacaattgcattttgttgttgttgtgaatagaacaccc

SEQ ID NO: 904794 - DNA, 568 bp, Homo sapiens
agaatacttttttctaattctgtgaaaaatgatgttgacagtttgatagggataacattgaattcataaattgctttgggaagtatagccattttaataatattgattgttcctattcatgagtatggaatatttttcccatttgtctgtgtcatctctgatttctttcagcagcgttttgaaattctcattgtagagctcttttacctttccggatagctgtgttcttaggtatttcattgtttttgtggctattgtgaatggggttgaattcttgatttggctctcagcttggatgttcttggtatatggaaatggttcttcaaaagaattaacaagattgagagaccactaactagattaacaaatataaaaagagagaagatccaaataaacacaattagaaatggcaaaggggttattactaccaaccccacagaaatacaaaaactytcagagactattattaactcttctgtgaacacaaactagcaaacctagaagaaatgaaaaaattcctgaaacatacaacctcctaagattgaaccaggaataaattgaaatactg

SEQ ID NO: 904795 - DNA, 579 bp, Homo sapiens
ggggatttggaggaattctccacaaaaatataacaaagaagatttttgaccagagatatcaagttttctttcatgtgactctggttatagattacataatgtaagccattctgtgactacttttctccctgagtaatacaaaatatttgtaaagtacaaaattgtcttcacttctcagttcagtgccagggatatatggatgccttcatgttaatctgtgccactttttattaatagaaattaaaagtttgccatgatgtcacatgcaagatcagtgaaaatgttttttattttttatgggagcagtactttctgtgatatgtttatagagtttaaaaactagttttaataaattttattgatgtaacttttaagtaaaaggcaccaactttgaggatacagttttaagaattttagcaaatatagatacccatataacaactgcaattggttttaacagggaaatgtatgcatgtataggatgagaatatgtattcttacctggtgaggttawaaaatatcagataaaagatccaggaccttttcatctagaacccatggatccaaggaaggcatcca

SEQ ID NO: 904796 - DNA, 622 bp, Homo sapiens
cagtaaccattttcccattcaactttatgttaaatatcaaccaaatccaacccaccagatttgtgtttttgctgtgttacatctatgccccacccaatatggacatatcttggtacaaatgcactttccaaatgataattacttaatcattaataggtactctactgagaaataattacctttcttgataggctcaattaacctagtattttgtcttcagtgagccaaacagtattggagatcttggcaacactaggctaaaactgtatacgttacatcgtgaaaattaatgtctcaagtaagcaaatgctttatttcttctctttgctgcagcactttgtcttctagtctttcacattttcaaatactttagataaaaataaaggaaaatggaaacaaaggctctaaaacccaaaacaagatttctcagaaaataagtgcccagaactgacttaaatgatacactggggcctcaaacatgtctagaaaaaaakaagcaaaggagatcttggagtctcttgtaaatgtgtagatttattttactcagattacttgagaggagttgttggttttagctttctgtatttgaacttaacaaagctaatggcaactcactttgaat

SEQ ID NO: 904797 - DNA, 506 bp, Homo sapiens
ctgggataaaaaggaaacactttactgaatagataaaaatgggggcttctatcaatgaaagacagaatggactcaggcaaagagaagaacaggaggagaatagcacaaaacatgattggaaagtytgaaaactgcattcttagtagctccttatgaaacccaatgtttccacttgcccactacaacctgcgccagccgaggcaaatctctcctctctaattttttttctcctctttcaggtggacaatttcttttttaattttttgagacagagtcttgctctgtttcccaggctggaatgcagtggcatgatctcagttcagtgcaatctccacctcctggattcaagtgattctcctgtctcagcctccggaatagctgggattacaggctcccgccatcatgtccatctaatttttccatttttattagagacggggttttgccatgttggccaagctggcctcgaactccagacttcaggagatctgcctgcctcggcctcc

SEQ ID NO: 904798 - DNA, 557 bp, Homo sapiens
agggcaaaatgacaccagtttctttgcatagcaagagtgacctttactccagttcccaacaagttcttcatcttcatctgagaccacttagcctggactttattattcatatcactatcwgcattttggtaaaagccacccaacaagtctctaggaagttccatactttcccacatcttcctgtcttctgagtcctccaagcctctagaaagttccaaactttcccacattttcctatcttctactaagccctccaaattgctccaacctctgcctgttacccagttccaaagtcatttccacattgttgtgtatctttacagcagcatcccacttgaccagtacttggtcaatcagaaaattgaccacttgggtccattttcatactatgaaagaatacccaagactgggtaatttataaagaaaaagaggtttaatagacttacagttccacatggctggggagacctcacaatcatagtgttaggcaaaaaaagaagacaggcacatcttacacagaggcaggcaagagagcatgtgcaggggaactgcccttt

SEQ ID NO: 904799 - DNA, 662 bp, Homo sapiens
tagatctttcttggatcagcctagtggcacttgctgcagttaactatgttggtagatttwttcccatatcccactggggtagacctacatctctcacctctgctcatctttaaaagttaaaacaaaccacagagtaacataggcaaagtacaataagtgacccaacatttcatacagttaaaaaatgcttctaataggaaaaaatcccaaagcaaaagtattaggttaaattgtttatataaaaattaaaagtgtacatatttcaaaagcaaagctaaaactatgtcacagtagagacatccaaacaaatatgactaccaatggtttaatttttttaatatataaagagcttctataaataagtaagaaaaatgctaataccacagtatataaaagggcaagctatggacgatttgaagaagacatatacatagctaataattaatatgcatataagatagaaaaattattaataatcaaaaaaaggcaaattaaaatgagataatattttactttgttgaattagcaaagtcatttgaaaggaaaaatactcagctttggtaggaatgtattaagataggcaagttatacactgggagaaggaataaaaattgatataatctttctggagagtgagttggtgatgtgtgtcaagggcttta

SEQ ID NO: 904800 - DNA, 624 bp, Homo sapiens
tgtagaggcattttaaatagaaaatatacaaatgacttgacccaaaaacatataagaagatgcttaacatcattagtagccagggaaatacaaattaaaaccataatgagataccactacacagccaccagaatgactaaagttaaatgggcaaacaatactaagtactggtgaggatgtgaagcaatacacactttgctggtggggatggatgtaaactgatttggactatgaaacagttttgcagtatctactaaagctaaacatacactggacttattacccaacaatttttatcctgggcatatacccaaaggaaataagttcatcaaaagacatgaatgagaatgttcatattagcattattcataatagctccacactggaaacaactaaaatttcttcagtagtggaatggaatacactgtggtgtattcacacaaaggaacgctgcacagcattaaaaaataacaacacgtacaacaacaaatgaatctcaaaaacataatgctgagctaaagaaccagatgcaaatattatacactgtttaattacatatgaagtttaaaagcaggcacaattggtatatggtgaaaraagttataaaagtggttacctgtggga

SEQ ID NO: 904801 - DNA, 591 bp, Homo sapiens
tatatatgaggagactgaggcacagagtcacaaayaataaatagtacaaaagatgtcaggccgggcgcagtggcttacgcctgtaatcccagcactttgggaagctgaggcgggtggatcacttgaggtcaggagttcgagattagcctggccaacatggtgaaaccccgtctctgctgaaaatacaaaaatcagctgggtgtggtggcacaagcctgtagtcccagctacttgggaggctgaggcaggggaattgtttgaacctgggaggcggaggttgcagtgagccaagatggtgccactgcactccagcctaggagacagagcaagactccgtctcaaaaaaaaaaaaaaaaaaaaagatgtcaaacttgggtagtaagaatctaaagtactctatattaagaatctaaagtatattgttgccctagctgtaaaattaagtgaaagatatttttatttatgcgcagagaaaagtttcaaatatatcttataggggataggattaaaccaaaacatttgtacatttgtaagaacagttatcctgtagtgtgggagccatcacataagatcacataaatgttggttggt

SEQ ID NO: 904802 - DNA, 519 bp, Homo sapiens
ggaagtatttctcattactacattaataaactattctcaaattttgctcacttttccttcagcttcaagttttgttactttagtatccaaaggaggaatgctcccacttaaggatcaaagaaccttttcattgacctggatgtttaaatagccatttgacaattttacaccactttcgcattgaaagaagtaaataaggaaatgactatgagtgtcaagggaacaagtcacaggcacaaaacatctgtctgaaactcaagagattctctggactaactcatggtatttttacatgtgttagtaaatattgatggaagattagagaaacttaatataagcaaaatcactaaactctcaggacaaatttcaggagagaaacttgggcatgctmtactgcagaaaacatcagtaacaacaagaaaactgcaatggttgaggtattgtctaacacataatggttagtggaggaaggacgttttacgatccagatgaaagttataaattatggagaacacttgg

SEQ ID NO: 904803 - DNA, 580 bp, Homo sapiens
atcccagctactcgggaggctgaggcaggagaatcgattgaacctgagaggyggaggttgcagtgaggctagattgtgccactgcactccagcctgggcaacagagcgagactccatctcaaaaggaaaaaaaaaaagaaaaaaaagaccacaggccctggtagaaggctagaaggccatgccaatgtgccccgcctgcagcatcatgtggtggaaggcagacagaagggcttccgtgcatatgtggccctggcccaacaccacccccgctccaaggatgaccagcaatgagaatactttggtagccatgcacacatttgtcagcatggtggccagcttcaagctccagcagttagccaccatcagcaggaggatgctggtgacagccacattcttgagcacagcagggggcagtgaggcacagccagggtaaaagggaaccattgcatgctcagcaaagctcagagaaacagaagcaatggtagctagtctggccaccagcaaatatgtgaagatgaccaggaaggctggcaaggagccaaagtttcataagatgtaggtatacttgccccagattcag

SEQ ID NO: 904804 - DNA, 550 bp, Homo sapiens
gtgtgactgcctgcctcctgctgaagggaggcattttggctttactcacctcagtatctcctgggtccagctgggtgtctggcctggcccagaatcggtgctcatcgaaggtgtatagaactcacaaggacccaggaatgttttgcaaataacaccaccctcccacacttctccaatgtttactttctaagctcctttactctttgacattcaaatttctaaatggcctgtatgtatttacaaagcctgggaaaacgccctcagaggacaaacacaccccactggcagaatgtatttgcattgactagcattatggatgaaattcagctttctggcaaatgaatcatttggcattgactgagtatctgctctgtgcgggatactcagctgtgatctctagaaagagacgtgaactastgacgcggtccttgaccccgaagagctcagaatccagtgagcttgatttcttgtaagttagagacagagttcagagcagagctcaggcaggagaagagaagtaaggtggacacaccagaggcagtgacagaca

SEQ ID NO: 904805 - DNA, 580 bp, Homo sapiens
ctctaactgggacaggcatggtggctcatgtctgtaatcccagcaattcgggaggcctagctgggtagatcacttgaggttaggagttcaagatgrgcctggccaacatggtgaaaccgcatctcaactaaaaatacaaaaattagctgggtatggtggtgggcacctgtaatcccagctcctcaggaggctgaggcaggagaatttcttgaacccaggaggcagaggttgcagtgagcctagatcacacccctctactccagcctgggtgacagagcaagactccatctcaaaaaaaataaataaataaataaataaagagagagagagaggcctccagctggatccaagtcagttaattaccagatcaaatctgatcctggacctagttcagtttctgtcctgactttcaaactgtttggatcacagatttgttcagagaaactcagagaattccaaacacaaatccatggagttctgaaatctgagagaacttacccatgatccccagccactttgagagatcaagggacaaaagtaggtccttgcaggtaccttgcttgttcactcagcactcctg

SEQ ID NO: 904806 - DNA, 600 bp, Homo sapiens
gcaaagccctccaaatttccacttrcagattctacaaaaagagtatttccaaatggcacaatcaaaagaaagggtcaactctgtgagagaaatgcacacatcacaaagaagtttctcagatttcttgtctctagattttatgtgaatatatttcctattctaccataggcctcaaagcgctccaaatgtcctcttgcagattccaaaataagagagtttcaaaactgctcaatcaaaggaaaagtttacctctgttagatgaatgcacacatcacaaataagtttctcagattgcttctgtctatattttatgtgaagagttttctttttctaccatagaccacaaagcgctcaaaatgtccacttgcagattctacaaaaagagtgttttcaaactgctcaatcaaaagcaatgttcaactatgtgagatgaaagcacacatcatgaaaaagtttctcagaatacttctgtctagtttttatgtgaagatatttactttttcaccataggcctctaagcgatccaaatgtgcacttgcagattctagaaaaatagagtttcaaaactactcaatcaaaagaaagctttaacactgtgag

SEQ ID NO: 904807 - DNA, 593 bp, Homo sapiens
aattttttggacatttctttatacttgtattacataagtatttaatatctctttccacttctaaaataatggcaaatcatttaaccctgctcagtgattttcttgtcagagtaaatttcactcaggattgtgaatctaacacacagactactctagttattttgtttaaaacataaaagcctactgtggctgtggttttaataggcttctggatttcatattccaaggaattcctcagtcacaaacttgaaatgttcccaacacatagaaatgatcaatgtttaagatgatgggtactccaaataccttgatttgaacattacatgttctatgcttgcaacaaaagatacccccataaatatgtaaaatattatgtatcaattttaaaaaataaattctttggtcatcttctgtctccaaactatgttgcctcttaagttaaaagcattctgtcttcactgaaaatctatgaaaatagcaaaatcagtttcttaatagatttcagcaatttgattcctatttcagtakgctcatttcatggcttgtgaaaacattgacatattgcaaaaagttaggttggaagatccaagtgc

SEQ ID NO: 904808 - DNA, 620 bp, Homo sapiens
ctacaaatcagtggctcatatagacttgtcaggataatgcattaatgaggcttggcagttgtctgttggctgtctcaggctgargaattacaaatcaatagtttcttttggacaaacacctaagtttgtattagtgcttacttatttcattgtttgtattatcgaggctctactctaaaaataactagaaagcaattgatatctttgctttttattaactctaagctaataatggctatcaaacattagcaaagtctgtttaaatttgtctgaacaaaatattaaaaggaaataacaagaactttcttcccctgcttctacacctcttcctgttgttggaggacttgtgatgttacttcatgaatcacctactttgtgcttgtaaggccgtatcttggggtagtgacagcccagccatgtgggaataatctgtttatcttgcctatgaaagtgtgaactatctccctggaggcatggtctgagtcacagcctgtgttcagttttaggaccagtgtggcatctcaaaaaatgctatatttacttgaaagatctgagaaaaatagagtaaaaaacatataaaattatgactatactccaccaaaagaaaatggtatagaatg

SEQ ID NO: 904809 - DNA, 582 bp, Homo sapiens
cttaattagcagtgtgaagatggactaatatagtaaattggttcaggagtggggtgtggctataaggatacctgaaaatgtggaagtgacttgggagctgggtaccagttagagcttggaacagtttaaaggactcagaagaaaacaggagaatgtaggaaagtttggaacttcctagagacttagagggctcagaagacagaaagttgtggggaagttaggaacttccttgacacttgttgaatggctttgaccaaaatgctgatagtgatatggacaatgaagtccaggctgagatggtctcagatggagatgaggaacttgttgggaactggagtaaaggtcactcttgctattcaatgagactggtggcattttgcccctccccagagatctgtggaactttgaacttgagagagatgatttagggtatctgatggaagaaatttytaggcagcaaagaggaatcagagcataaatgtttggaaattttccagtctgacaatgcaatggaaaagagaaccccgttttctagggtgacattcaagtaggctgcagacatcagcataagtagtgaagagc

SEQ ID NO: 904810 - DNA, 608 bp, Homo sapiens
  misc_feature 41, 42, 43, 44, 45, 46, 47, 48, 49, 50, 51, 52, 53, 54, 55,56, 57, 58, 59, 60, 61, 62, 63, 64, 65, 66, 67, 68, 69,70, 71, 72, 73, 74, 75, 76, 77, 78, 79, 80, 81, 82, 83,84, 85, 86, 87, 88, 89, 90, 91, 92, 93, 94, 95, 96, 97,98: n = A,T,C or G
  misc_feature 99, 100, 101, 102, 103, 104, 105, 106, 107, 108, 109, 110,111, 112, 113, 114, 115, 116, 117, 118, 119, 120, 121, 122,123, 124, 125, 126, 127, 128, 129, 130, 131, 132, 133, 134,135, 136, 137, 138, 139, 140: n = A,T,C or G
caattgccacaaaaaaataataaagtacataggaatacagnnnnnnnnnnnnnnnnnnnnnnnnnnnnnnnnnnnnnnnnnnnnnnnnnnnnnnnnnnnnnnnnnnnnnnnnnnnnnnnnnnnnnnnnnnnnnnnnnnnncaacgattaggaagaatcaacatcataaaaaggkccatactgcccaaagcaatttataaattcaattgtattcccattaaactaccattgacattcttcacaattaaaaaaaaaaaacttttaaaattcatatggaaccaaaaaaaagctcatatagccaaaacaaccctaagcaaaaagaacaaagctggaggcctcacactactcaacctcaaactatactacaagtctacagtaaccagaacagcataagactactacaacagcagacacatagaccaatgaaatagaatagagaactcagaaacaagactgcacacctgcaaccatctggtcttccacaaacctgactaaaacaagcaatggcaaaagaattccctgcttaatgaatggttctgggataactggctagccatatgcaaaagattaaaacttccttacaccatatacaaaaatcaactcaagata

SEQ ID NO: 904811 - DNA, 585 bp, Homo sapiens
atgagaatctcatctgtggaatgccagagggccaaagctttttagattcatctgtgtgcagaacaaaccagccacccagggtgtgaatgagagattagtgtgtgttcatgtacaaattaacaggcgggttcactccattccagcttcaagccgacagcgccagctgtgtggcagccacgtgcattatagctccaagctttccacccacaacaatgcctcgtcacaacagcatcaagaaacttggccgggtgaataggagtgaatgccagacaaagccaaacgcagcctatctcctatttcttgatgttcctctttgttcatttgtggtctctgacaaggtacagctgaaaagaaagaattaatccctagcaaatcctataaaacaactgtatgggaggcggactcatttactcagctgcaggtaagaatgtcacttggaggtaggaagctccgtgcaaagtgtcatgcagccctgaaaagaaagagatgctccattggagcagtggtctattattattcccagtcttgattagggaggcagtttggctgtayagttttggcagcatctttgcccagggaaaagag

SEQ ID NO: 904812 - DNA, 656 bp, Homo sapiens
gctgcttttagtaaccatttcgaatctgttcccctcctttttttcttttttttgacagagctcactctgtctcccagctggagtgcgtggcgtgatctaggctcactgcaacctctgcctcccgggttcaagcgattctcatgcctcagcctccgagcagctgggttacagggcttgtgccaccatgcccagctattttttgtatttttaatagagacagaggtttcactgtgttggtcatgctggtcttgaacacctgacttcaagtgatccgcttgcctcagcttcccaatgtgctgagattacaggcatgagccaccacacccaagtctctttcatttcttaatacaaattattgcattgttgtaaacttgatatatgcttattatttttagtttttccacatttattgaggtataattaacaagggaaattgattatatttatggtgtacaatgtgatatcttgatatacctaaacactgtgaaatgattaccacgatagagctaattaacatatccatcacttcaaatagataacttatttttctgtgtgtggtgagaatatttaagattkactctctaagcaaattttgagtatacaattgctatggtctgaatgaatccccccaaatttatgtgttgaaacataatcgc

SEQ ID NO: 904813 - DNA, 656 bp, Homo sapiens
gctgcttttagtaaccatttcgaatctgttcccctcctttttttcttttttttgacagagctcactctgtctcccagctggagtgcgtggcgtgatctaggctcactgcaacctctgcctcccgggttcaagcgattctcatgcctcagcctccgagcagctgggttacagggcttgtgccaccatgcccagctattttttgtatttttaatagagacagaggtttcactgtgttggtcatgctggtcttgaacacctgacttcaagtgatccgcttgcctcagcttcccaatgtgctgagattacaggcatgagccaccacacccaagtctctttcatttcttaatacaaattattgcattgttgtaaacttgatatatgcttattatttttagtttttccacatttattgaggtataattaacaagggaaattgattatatttatggtgtacaatgtgatatcttgatatacctaaacactgtgaaatgattaccacgatagagctaattaacatatccatcacttcaaatagataacttatttttctgtgtgtggtgagaatatttaagatttactctctwagcaaattttgagtatacaattgctatggtctgaatgaatccccccaaatttatgtgttgaaacataatcgc

SEQ ID NO: 904814 - DNA, 549 bp, Homo sapiens
attcctctgaggtatgcctatacttactgccactttgtgacctgatgaaaggtcaacatgttgggagctatttcatttctccttcatacttgctcaactattaaattaacttgcaaaatgacaacatgattactgccttgtagtctaaaccaacaggttacccaaaaatgtgtttcatgctgagaataaaacatcactaaaaattaatgattttttatattacaacttataataattatattaataaactggtaactattaataccagcattaatttaaacaccccaccagatcaagaggtctatttaaacatcagctatcctttggttattcaacgtttttactttttatttaattcatttattttttatattttgtagggatggagtctcactatgctgctcaaggtggtctcaaactcctcggcttaagtgatccctctgcctcagcttcctaagtgctgtcattacagttgtaagccaccacacctagtcctcaactttgyttagtcatagcattgcctatatctattttgaatattactcttct

SEQ ID NO: 904815 - DNA, 437 bp, Homo sapiens
ccaacagtccctcaaaatcttaactcatttcagcattaactaaaaaatctacattccaaagtcttgtctaaggcgaggcaagtcccttctgcttataagcctgtaaaatcaattcaagttagttacttcctagatacaatggaggtacaggcattgcataaatacagctgttccaaatgggagaaattggccaaaacaaaggggttacaggacccaggcaagtctgaaatccagtggggcaatcaaatcttaaagctccaaaatgatctcctttgactccatgtctcacatataggtcatgctgatgcaagaagtgggttcccatggtcttgggcagctctgcccttgtggctttgcagggtatagcctccctcctggctgctttcatgggctggcattgaktgtctgtggcttttacaggtgcatggtgcaagctg

SEQ ID NO: 904816 - DNA, 648 bp, Homo sapiens
tactttaatgacctcatcttaactgattacaacggaaacgattctatttccwaataaagtgacattctggggtactaggggtaggacttcaacagtgtggacagagttcaacctgtaacacacctatctactattatacttcttctctgagaaatgtgggagtggcatgattttcttagtattgagagcacagaaaacaaattgttatgaaggggcgcaacagaataataaagtagagggaatcctaaaaagcacatctaaacaccaattgcattattcctagttcccatcatgaaatttcagtcaataaaatatattccttaacctatttccatcttaataaggatgctactgccacgacaaagtttaacagaagcaaagtcttacacttaaaaaaaggttaatttttacattagggatttgacttcattatacagaaaaaaatgttaatttgatcaatgtaaggaacaaaagcagatgtgagttgggtttcatgcagctaattgtctaagtttaatcaaaagattatgtagtatttgttggcagcagtggtagatgaagccagctattcacatacaatttgtgcttcctcttccagagtgtggagttgccactcagaggttacattactactcaccaatgggatgt

SEQ ID NO: 904817 - DNA, 623 bp, Homo sapiens
gtcactgaggtcacttcatacagagggcatcattgtccagggtcatccagggtgtagctataaaaagaggcatgccattcattgcctgccattcctggacttgccttgtacagaacattcccctgggttttgccagtgaaattttaattcacttaagcctgagagttccccacacttccctcagaaggctgctatccttctgctttagcagtttaataggcagagacaggggaaaggatattgaagaaagcaggagctctatccatgtaactctataccataggactaccaaggggtttcatgaatttattctcagaatgagaggaaagcctgagcaaatcgtaaagcatactcgttttcccccatctctcttttccctcctctctttcgctccctccagactggaatatccttaagtgcagtaatcaagtcttggttatgtctctacttacagcaccaagtaaagtatctaggtcatggattttgaacagaacatctatgtactccctctctgccacacttttacaataaataacatctctcttgtaccctggttttcaagcctggttgtacattagcattactagagagctkaaaacaaacacagaggaaaagctatggcc

SEQ ID NO: 904818 - DNA, 646 bp, Homo sapiens
aagctgactgaagagcccttgggccttaagtgaacattggtggtagtcaagcagtacttgctgtgggcctggggtggcagtggcagtggccatggaaaaagactcctctgatggtggaaaggagagggaagagygggagaaactttgtcttgtggcatgggtgccagtttagccacagtagaatagagttccaggtagattcttaaggtttctgactccaggccttggctcctagatgttacctctggatccacacagggctgggggcaacttgcttctctggagggaagaacaaaggcctggctagttttgctgccagagccctagggccttgagagaacatagatgatagccaggcagtggctaccatgggccttgggtgagactcagtactgtgctggattcaggtctgacccagcattgtcccagtgttgggtagagacagggatgcttatgtcacccctcttcaagctctaggcagctcagtagacagagaaggagactctgcttgtttgtttgggagaaagtaagggaagagaccaaaattctctgcctagtaatccagagaagtcttccagatcttatccaagaccacaagacctctatgagtctgcaaaagtcatagtgttactgggcttgggatgcc

SEQ ID NO: 904819 - DNA, 589 bp, Homo sapiens
aaaacaccaattaaaatgtgaaaaatatcacctaccatagttastctaatggaacatgctcttacaggaaggaactgattcaatgtttattttcataccagctgtggcttccaaatgtaaatcatttcacttcttgctagtgtatgccgatcctccgtggcccctgcattgatcctatggtcgaataatttgcacgtagtattacataacaaggaagctctactggggctgcagttgaattcccttaattgtctggcaaatcatcattttctttatgtgttttactagtattctcattttggggattactgttaactgatggagggcaaaagccatcaccaaatagccacagttcttcctggcacatgtgacaactgtcctaggttgagacaatctcttttacaataattctgacactttgatctttcttgtcacatcagtcactggagtctgttagtacaacgctatgtatccacataattcagacttctgttgcagcgcaagttcgagttcagtacgggtttgcttatttctaggatttaacccagtaccaggagcctgccaatgctagtaaatgagctctggatgg

SEQ ID NO: 904820 - DNA, 571 bp, Homo sapiens
taagaactgcaatcttcctggatcccagcactttggtaggccaaggtaggaggatcacttgagcccaggtgagcagactgggcaacatagtgagatcccatatcttttttttttaatttccttttttttaacaaaagaactgccgtcttctcaaagctaatcaacgttgctgcaaatggatttccttctcttttaggactaaataaataataataaataatacatactccattttatatatatacacacagacacacatatgtatatacacatatacatataaatctattcgctttatcaattttctttatccattcatccattgaatggacactgtgtttccatgtcttggctattgtgaataatgctgcaatgaacatgggagtgtaaatatctctttgagatactgactttgtttcctttggacatatgcccacaagtgggattaagaagacaaaaactgtatgatctcacttagatgaggcatctgaaaaagctgaactcatagaaaaaaagagcagaagtagaatgctgattgccagggrctggaggacgggggaaatggggagat

SEQ ID NO: 904821 - DNA, 672 bp, Homo sapiens
tcccatttgtctattttggcttttgttgctgttgcttttggtgttttagtcatgaagcctttgcccattccaatgtcctgaatggtattgcctaggttttcttctagggtttttatggctttaggtttaagtctttaatccatcttgagttaatttttgtataaggtgtaaggtagggatccagtttcagctagcatatggctagccagttttcctagcaccatttattaattagggtaccctttccccatttcttgtttttgtcaggtttgttgaagatcagattgttgtagatatgtggcatgatttctgaggcctctgttctgttccattggtctatatatctgttttggtaccagtaccatgctgtttgtgttactgtagccttgtagtatagtttgaagtcaggtagcatgatgcctccagctttgttctttttgcttaggattgtcttggctatgcaggctcttttttggttccatatgaactttaaagtagttttttccaattctgtgaagaaagtcaatggtagcctgatcggaatagcattaaatctataaattgctttgggcagtgtggccattttaatgayattcattcttcctatccatgaggatggaatgtttttccgtttgtttgtgtcctctcttatttccttgagcagtggcttgt

SEQ ID NO: 904822 - DNA, 599 bp, Homo sapiens
atgaacaactgaatagaaagaaatagtgcggcactattcacaatagcaaagacttggaaccaacccaaatgtccatcaatgatagactggattaagaaaatgtggcacatatacaccatggaatactatgcagccataaaaaaggatgagttcatgtcctttgtagggacatggatgaagctggaaatcatcattctcagcaaactatcgcaaggacaaaaaaccaaacaccacatgttctcactcataggtgggaattgaacaatgagaacacttggacacaggaaggggagcatcacacaccgaggcctgtcgtggggtgagggggtgggggagggatagcattaggagatatacctaatgtaaatgaccagttaatgggtgcagcacaccaacatggcacaagtatacatatgtaacaaacttgcacattgtgcacatgtaccctagaacttaaagtataataataatawaaaagagaaaacctgaaagagtagcgttaaataaaactagcccaggaaaattaccatcagactgtggacaggaataacaataataatacaaggcgaattaacgaattttgaaatcaaatcccagca

SEQ ID NO: 904823 - DNA, 594 bp, Homo sapiens
ccaccttccttctgtggcctcacatggccttttctctgtgcacacatccttggtgtctcttcttcttatagggagaccarccctattagattaaggcctcacccttatgatctcatttaacttaattacatctttaatgactctatctacaaatatagaaacattgaaagttagggctccaacatataaattttgggggaaataattcagtccttaacagttaccatatgccctagcaattccactcctaggtattacaatagccaaaggaattgaaagcaagggctgaaacagatacttgtatgccagtgttcactgcagcattattcacagtggccacacagataggagcaacccaagtgtctatcaagagatgaatggagcaacaaatcacggcatatacatacaatagagtattactcagccacagaaaggaatgaagcactaatccatgctacaagttggatgaaccttgaaaacattatggtaagtgaaataagccagacacaaaaggacaaatattgaatgagtctactcatgtgaaatagctagaacaggtaaatttttagagacataaattagattcaaatttac

SEQ ID NO: 904824 - DNA, 622 bp, Homo sapiens
acaataaaagtgacaatttcaaaattacagtggtaatattttgttatggaaaaagaaaaattttattaaaagtatcatatagttaatataattatcttagaattatgaatataatggtttctgaaataataaaggcatgattctctgtctttaatatacttacccaccaacattatgccatttcttataggatttaaacattaaaagaatatttgttgccctgaatgattgtttcagagaaatgaatattaacttggaagacttttagctgtatgtaaacttctggcattacttaaccttactgagcttcagtttccttaacagtaaataataatataacatgaaaccacattagattatatgacctagccatgacaaccactaaatataattccaggcccaagtcaggttatttacaaatattaactttttatatttctaaatacattttatgcctccttttggggcaaaacagaattataaaatacttcaccttttcttttttgttacggctgccccaaaattcaaagttatattgtttgtttgtttgtttctttgttttttttggtgctactcrtgtagctaagacatctctctttttagaactgctcctagtctcatt

SEQ ID NO: 904825 - DNA, 527 bp, Homo sapiens
aaggagaaatttacagtcaagcaaatgctgagggattttgtcaccacyaggcctgctttacaagagctcctgaaggaagcactaaatatgaaaaggaaaaaccggtaccagccaactgcaaaaacaaaccaaaatgtaaagaccattgacactcttaagaaaccgcatcaagtaatgggcaaaataaccagctggcatcataattacaggatcaaattcacacataacaatattaaccttaaatgtaaattggctaaatgccccaattaaaagacacagactggcaaattggatcaaaagtcaagacccatcagtatgctgtattcaggagacccatctcacatgcagagacacacataggctcaaaataaagggatggaagaagatttaccaagcaaatggaaagcaaaaaaagcaagtgttgcaatcctagtctctgataaaacagactttaaaccaacaaagatcaaaagagacaaagaaggccattacataatggtaaagggatcaacacaacaagaagagcg

SEQ ID NO: 904826 - DNA, 642 bp, Homo sapiens
tcaacatcattgttcggatatagtgatctgttgagtttcagttctttgatactctttttgagaagtctgaaggtcatttcctaagaaagaaactcagataaaacaaatatgtttcaagttttaagaccataattgtccatttctatgtttatccaataaaactatctataggactattgacttggtttcaacatcaccaaagccatctaaaccatttgaattaaaaaattattcaaaagcaattggttcaaaacaacaatgagataccacttttctaacagtatttatttcattttaaacaatggcttagttttgaaaatttggaaatttttttattgtaaaaaaataaattactggtaatcacatcctctataacgactataatcaaaatgagagtaataagaagtgttgacaaggccatggataaatttggcccgttatatactggaaatgtaaaatggtatgaccactgttgcaatcagttcctttaagtggaaggcataaaattagcagaagaataaacaatttcatttattgtaactgtrcaaaaacaaaacaaaacactgaattgtacatttagaatgggtgaattctatggtatataacttatatctcaataaagctatattaaaaaaagtagtt

SEQ ID NO: 904827 - DNA, 637 bp, Homo sapiens
ctgacaccatttatccaaagcctgaggccttgcagtgaggctatccatcacctcaagtcccatccaccacacgtgcctttggtgaggccagytgcagccagctttgctatttttgtatagtcagtttcctctggactcataaagactacaacagataaacttttagtttttacaccgtatttaagtcttactgggaaaagaagtcaaggaagctgttttcagtttgtctcttccatttctcatgagttagcattaatgtccataacatatataaatttttagccaaggtgagttagtagagttccgcctactactttatgttaaaaatcacctctcactgaatgggtatatcaaccctgtcttgaaagaaaatagtgaactccctctttacttctaacaggacaaaatcataatgtcagtttgcaattcagagctggttttgctgttgtctgctgccatatccttgactggcattgatatattagagaaagaagttactgaagccttgtttcaggcacttctgtagccttagaatgtgagctgaatataagaatcaggaaaaacctctccaacaaaaggtaataaaaaatacgatttggtattgtttcacttatgatcaggcaaggcaataagactc

SEQ ID NO: 904828 - DNA, 526 bp, Homo sapiens
tatgtttttgagacagagtcttgctctatcacccaggctggagtgcagtggcacgaccttggctcactgcaacctctgcctcctgggttcaagcaattctcctgcctcagcctcccragtagctgggactacaggtgtgtgccaccatgcctggctaattttttgtttttttgttagagacagggtttcactgtgttagccaggatggtctcgatctcctgatctcatgatccacccgcctcagcctcccaaagtgttgagattacaggcaaaaaccactgcacccagccctaaagctattttttaaaacaacaatgtccaaatatcagtggacacatagatggtaataagtgtattactctccccccctctagcccaaaccacacacacacacacacacacatacacacactctacatatgcagcttcttatgtttatcttgtttctatcttgaaataatctgtttatttaaagaagaaaatcaagaagtggtagttttagaaaatgtcaatttaaaattattaa

SEQ ID NO: 904829 - DNA, 614 bp, Homo sapiens
tgtgtttggaaatattgtagacacactatttttctaaaaaattagcaaacaaattctgtttgataattgtttcatttctttctatcttttcaaccrcctgtttctattaattaatattttttctatctatctatctatctatctatctatctatctatctatctatctgttttgcttactgatttcccctcagtagccctactgctcaggttaaaaaaatcatttgtcattttacacatgtagtgttttatacttttcttggctggaactttaaatttcagttgaccttccaaagaagattttaaataaaatatgagcctattatttactaaaatattatataatgtatacatatttagtataattaatatattaaaatatacattttcttcagtaaagggcattaatcatcaaaaacttcatttggtaaaactgagaaactgttgaattacttcctgtactgcactagtttctacataagaagcttaatttgtactcttcattttccttaacaaaaacctatgatgccataaaatttacatatttacgagttttttaaagaataattgaattaacctcaacacttttaaaatttgcatcagcaggttcattaa

SEQ ID NO: 904830 - DNA, 610 bp, Homo sapiens
cctgagaccttatggattctttataaggttgactgataatttttatgcagaatagcaatttgagacactgagctactaaaatatatgtatttttttcttttctctaaaatggatggtgactgagccaataccatatcataattgataagaacatctaaaataatggtggtagtcaggcagtgtgctgtgtgtctataatcccagctactcagaaggctgaggcaggaagatcccttgagcccaggagtttgaggccagcccgggcaacatagtgagacccatctcttaaaaaaataaaaaataaaaaaaaaataagtccccactccttatttttaactttaatcaattgtacatttcaaaataactagaagagaataatttgaatgtttctagcacgaagaaaagataacggttgggcaccatggctcatgcctgtaatcccaacattttgggaggctgaagtgagaggatcacttgarcccaggagttcaagaccagtctgagcaacatagtgagaccccatctctacaaaaaatttaaaaatcagccaggtatagcgtcatgaacctgtggttctctctgctcaagacgttgaggcaggaggatcact

SEQ ID NO: 904831 - DNA, 610 bp, Homo sapiens
cctgagaccttatggattctttataaggttgactgataatttttatgcagaatagcaatttgagacactgagctactaaaatatatgtatttttttcttttctctaaaatggatggtgactgagccaataccatatcataattgataagaacatctaaaataatggtggtagtcaggcagtgtgctgtgtgtctataatcccagctactcagaaggctgaggcaggaagatcccttgagcccaggagtttgaggccagcccgggcaacatagtgagacccatctcttaaaaaaataaaaaataaaaaaaaaataagtccccactccttatttttaactttaatcaattgtacatttcaaaataactagaagagaataatttgaatgtttctagcacgaagaaaagataacggttgggcaccatggctcatgcctgtaatcccaacattttgggaggctgaagtgagaggatcacttgagcccaggagttcaagaccagtctgagcaacatagtgagaccccatctctacaaaaaatttaaaaatcagccaggtatagcrtcatgaacctgtggttctctctgctcaagacgttgaggcaggaggatcact

SEQ ID NO: 904832 - DNA, 599 bp, Homo sapiens
ggtgggaattcaacaatgagaacacatggacacaggaaggggaacatcacactctggggactgttgtggggtgggggaagaggggagggatagcattaggagatatacctaatgctaaatgacgagttaatgggtgcagcacaccagcatggcacatgtatacatatgtaactaacctgcacaatgtgcacatgtaccctaaaacttgaagtataataaaaaaaattgaacaaaaacaaaacaaaacaaaaaaataaattaaaatcttgattttgaacctggaaagtagtcttatgatatctctatctttttgtagttgctaaactgaaaagtactgtctgttctcagagatatcacaatctcatcagtagattccatgggctggcatatttgactgcagttaaatccattctttgtggtcttcatagtgaatcttatttcatgtagttccgaaaaggagaagagataattacatctaacttgaaggcttattgaagaatcctttaaattacytatgcctctcttcattaagaaaatacaagataatttgaatctagctaataaattaaggcttactggaaataacgccatacaaatta

SEQ ID NO: 904833 - DNA, 595 bp, Homo sapiens
gcaccagggagctcttcaccccacaactacagagctcctgtcttccaaggttcccgaactgttctgggaagtgctcctaatcacctgaggtttacatacaaacaaccccaggacatttcatttagctaccaatgtcatgattaccaaaaattaattaacaatatggtggtcgtcatcacatctgagtcaccaaatcaaaattcaggacacatttccatgcaaagtgcagccttcttcttacgtttcataattgtcatttcaaatgagatcttggttggaaacaattgcttaactgtttcaaggtatactgggttatcactaactcatttctgtaaagcagaatacaagacctcaacctgttagagatcctttgttgattaacaagctgattaataagctgattgttctcctgatttaaggcctataccaaaattcttgaagctcaatttgcaccacagagtacgccaatatgtttgagtgaactggctctggctctccgaagctgttttgtaaagacaagagactataagccatggtgagtagttatacatgaagaacctcaattawtgccttacatatggcatgaggagactag

SEQ ID NO: 904834 - DNA, 602 bp, Homo sapiens
cacagagtaaattttcagttaattaaatgataattgatgcttttacacacaaaaaaaaccacttattgtatttagagtttataacaaagagagctatttattatctgttcaaggaaagaagatttatgtattattattcctattaaagattataccatctcatgtattgtgaaagctgaccagtagtggtgaaaagtcttcccatatgtataatcctttataaaacatatttatttccatttttcatttgagccactgaaaagttctgtgaatttagtttattttttatcatcatcatcatcatcatttccatacttaaattgagcagactgagtttagaagaggtaaagtaataggctcaaattctttcacccaatctctacaccaaatcagttgccagcatgtttctcattttctgaatttttgatagtgctggatgtaaaacctgacatgagttgtatagcaacaaataaccacaayaaaatcatcagccaggtttcttttaagctcccacaatcccatcatgttcattaatttttaacataattcactttaaacagaattttctaatgggtaagaaagagttaggagggtattcacca

SEQ ID NO: 904835 - DNA, 541 bp, Homo sapiens
ctgtcccttctgcccattcttgccttcctagctttcctctcctcttcctcctcttcctttctcacacttrttcaaaacacagggccgttgctccaggtaaatctattcatttccttattggacatatttcgggctttccctgatttttcttttacagattccttttacttctgtctattaatctttgctaatttctttcttcagaaactgttggtatttatctccaaaaattatcttctgatcaacgttatctcatttgggccacttttaaaaaatatcatattccttcttttcaaattcatttgcgtactgagatgtaagtgttaagactttttaaaagcatttgatctaaaatttcttagttgtaggactgtagttgttggattgtatttcatctaaaaaatttacaacaaaaatcctatgtttttttaaacattatgtaagttcattatgagcaggaggaaatagataaataaaaatcctcatgttccagacaaaatcttttttttttttttttttttttgagacagagtttcactgt

SEQ ID NO: 904836 - DNA, 470 bp, Homo sapiens
gtaaattcctggaaacgtaaccccgccaatggcccagcttgaatcyggaagaaaccaaggtcctgaacagaccaataacaagcaatgagattaaatcagtaataaaaacctgccaaaaacaacaacaacaaaaagcccaggaccagacagattcacagacaaaacctactagacattaaaagaagaactggtatcaattccactgaaacaatcccaaaagattgagaaggacagaatcctccatagctcattctacaaagccaatatcaccctgataccaaattcaggaaagtatataacaacaacaacaacaaaaacctacaagtcaatatctctcatgaatacagatgcaaaaatcctcaacaaaatactagcaaaccatatctaacagcacataaaaaaatttcaccatgatcaagtaggtttcagtccagggatgcaaggatggctcaatatacacaacaaacatg

SEQ ID NO: 904837 - DNA, 630 bp, Homo sapiens
  misc_feature 1, 2, 3, 4, 5, 6, 7, 8, 9, 10, 11, 12, 13, 14, 15, 16, 17,18, 19, 20, 21, 22, 23, 24, 25, 26, 27, 28, 29, 30, 31: n = A,T,C or G
nnnnnnnnnnnnnnnnnnnnnnnnnnnnnnncttatagttaggcaggctgtattggaagtgtagtgtccacatctgcttgtgggaggtcttagggagcttttactggtggcaaaaggtgaagtgggagcttgatgagggaacgtgccacacatttaaacaaccagatctcaagagaactcactcactatggccaggacagcaccaagccatgagggatccctccagcatggcccagtgttttaacctgctgccatttgaagcatccaggttgtttcagaattttgctaatgcttaatgacactatttttgcctattggaaaaatagttcctatgttagatagcttcttaggtcttgaaccctgatcttttatctttttaacaaagtctctgctaatgcttttgatattagtagacatttccaagttttttgtaattatttgtcattaggagaactttagagagctaaaaccaatgataaaggactatgaaacacaaagtgtacaaagggactgtttgtaaaagtagtgaacaatgaaaacacatgaacacaggaaggggaacaacagacactgaagcctrtcggcaggggatgggggagtgcaggggacaaggagaaggagagcattagg

SEQ ID NO: 904838 - DNA, 666 bp, Homo sapiens
ggaacaacagacactgaagcctgtcggcaggggatgggggagtgcaggggacaaggagaaggagagcattaggaaaaatagttaatacatgctaggcttaatacttaggtgaygggttgataggtgcagcgaaccaccatggcacatgtttacctatgtaacaaacctgcacatctttcacatgtaccctgtaacttaaaataaaataaaaaatacctctatatataccatggaatactatgcagccatcaaaaagaaccagatcatatcctctccagggacatggatggaactgaaggccattatccttagcaaactaatgcaggaagagaaaactaaatactgcatgttcacacttatatgtgggtgctaaatgatgagaacacatggacacatagaaaggaacaacaatggggcttatcacagggtggaggttgggaggagggagatcaggaaaaataactaatgggtactaggcttaatacgtgggtgtttaaataatctctacaacaaaccctcatgacaaaagttaacctatgtagcaaacctgtacatgtacccctgaacttaaaataaaagttaaaaaaaaaaaagaatgatgtctctggagctagatctacatggttcagattcagtctgtcatacagccattctgtcaaattgttt

SEQ ID NO: 904839 - DNA, 592 bp, Homo sapiens
gtttcttttaaagcaagtctcagttatggtagcatttcacctgtacatgcttcagtattatcactgataaataatgttatagaccaagctaaatttatattawttccttaacaacatctaatctccagatcatatacttatttccctgatcatgtcaaaaaacattcttttagagtttttaaattagaatctaactttaagcaagttccccatgtgtcatttgggtgttacgattccgatgagtttttttttaatagaaaacagtttctcttctcatccattttttaaaatgtaatttgttttttgaagaaagtgggacgtttgttccatagaaattcccatgacttggctgatcatatccatgtgatatcatttaatatgggagtgtatttcctgtatttcacgtaaaccagtagatatattccagaagtttgattagatttaagaccaattcttttagccagaatacttcacaggttgtgctgtgtccttcctaatagatcacttcaggaggtacataatgtctcattgatctctttgtgaagttgaaattaattagtgggttcagttgatgtgagcccagtcttccttt

SEQ ID NO: 904840 - DNA, 634 bp, Homo sapiens
tttctgtgtgccagcctggcatagctgtccctggcacctrtagggtgtggccttcaaatagctgtcagttgctgagggaagtaatccaggcccctgatgtgtcactcgtgcatgcttttctctttttccccaaaaatgtattaggcatgtggaccaccaattacatgccaggcccccttgacacaacttaatcctctggtcaagtgtttggaattatgatgacaaagggcgctgtcttcttggattctccaacattcttatcaggtccttgaaagtgccaatgcagttcccagacaccaaatgggcccttaggaagacagcattcttcattccttccaattaacagatggggacatagaagctcagtgagattaagtgactgattcaaggccacacagttaagtagaggaggagaaagtccttaggttttctgactgcaaagttagtgctcttggccctacaccaagctaacctccaatgaggggatttgcatctctctgagggatatcaagccatagtgattcatgctgaggggagagcatgagcctgcaagttgggaggcctggtgtatgagtttgctagggctgccataaaaaaataccataggctaagtggtttaaacaacaaacattta

SEQ ID NO: 904841 - DNA, 634 bp, Homo sapiens
tttctgtgtgccagcctggcatagctgtccctggcacctgtagggtgtggccttcaaatagctgtcagttgctgagggaagtaatccaggcccctgatgtgtcactcgtgcatgcttttctctttttccccaaaaatgtattaggcatgtggaccaccaattacatgccaggcccccttgacacaacttaatcctctggtcaagtgtttggaattatgatgacaaagggcgctgtcttcttggattctccaacattcttatcaggtccttgaaagtgccaatgcagttcccagacaccaaatgggcccttaggaagacagcattcttcattccttccaattaacagatggggacatagaagctcagtgagattaagtgactgattcaaggccacacagttaagtagaggaggagaaagtccttaggttttctgactgcaaagttagtgctcttggccctacaccaagctaacctccaatgaggggatttgcatctctctgagggatatcaagccayagtgattcatgctgaggggagagcatgagcctgcaagttgggaggcctggtgtatgagtttgctagggctgccataaaaaaataccataggctaagtggtttaaacaacaaacattta

SEQ ID NO: 904842 - DNA, 630 bp, Homo sapiens
  misc_feature 22: n = A,T,C or G
gggtttttcatttgaaaagtcnactaaccaagcaatgtgtttttctttagttaaagttggaatagggttttccccggaccaatattaagtgaagtggatcaccaagtggagtagcggcacgaaggtggtttctttagacttttaagtccaactcctacggagccgtttggtattaggcatataatctaagctttctgagcctcaatttccccattcacaacaaaagggcaatgcaggctcttctcataacttcaaggggcggtggtctgatatagagtactatgaaaacaaaagcagcacaccaaagtaacacattattattatgatcacttatagaaccattacccgctaggatgaaactccccacacaagagatgaagcccgagagaaaagagttgaaggggaaggtccccacgaggagacagtaaccgaactgcagcgccccggtcagcagtatatacagcaggtacgcgtccagcaacttcagacgctgcggagtggagctcaagtactcttctaagaaccgcgaaatgacagacactaccgacgccgacataactgcacgcaaggtactccrgtccgcgccccaaactcttggaggacccgtcgaccacaccggatgtgctgttt

SEQ ID NO: 904843 - DNA, 612 bp, Homo sapiens
ggtgaaaaaaacaaaatgaaaatgctagtcttgtgttcagacaatgattatgaccatagaacactacctatawgttctgtagagctaatttctttcccagtggggttgatattctatgatagattgcatcagcggtgtgattgttttggaccatagaatacgtatacagaattggcttgttgagccttctggtgtcttgaagtgaaaatcatatctctggacatatctgtcaggcctgaagccctaggctactggaaagaaagataccatgacttatccttcctctaaagcttagaagttggagaaaaattctagttcttgggaagctctgcaaagcagggttcgttaagctgatgccacaggtttttgcaaagcccctcagcacagtgtttaagaaaccagtggctctaggttgacctttggggaaggaacacagctcacagtgaatcctggtaagtggaggggagcattgaatcctctgcctgaatgtatccattttatgccaatgaattgagatatggcttcttgccccatctctgccacattcaagtcctgcttggctaaacaatgctcacggatgtgcacgtgtgcagtgggatgcagctttttcta

SEQ ID NO: 904844 - DNA, 549 bp, Homo sapiens
gtgaaatatttgttgagattcaaaaaccccatgagatttaacttaagctttccctgtcagagagattctaagagctaaaagatgggaagctggtatttgggaactagattaaaaagaaaatccaaattaatcccaaggagcaaggctcaatagatagttatttagacataacatgtccaccctgcaagcctagttgctcagttgactgggctgcccctatcttagtcttgcctggaagagaaataagttgtttgccccatacctgtcttgagaaatgtcagcctccagacctgaaagcttcttgtgatttggtttatttctgtagagtttattattatacacagtgttcttgaagtaatagagaagtgcattagaagctcctgcaaatggaaatgaaatgtaaatttagattgtaaatacatgactgcggtaaatagatagcaagaaaaaggatgaagagattagaaatttgccacatttctctaaccctaaagggatgtttctataaatagtttaaaactgtwgaagacgaagggggaggaggaagga

SEQ ID NO: 904845 - DNA, 724 bp, Homo sapiens
ggtcatttcatattctgcatctctccagaagatgctacattgatagagtgatagaacagcctgttgcaggtgcagcttagatgtcaccttagagatgatactcacaggatatacacacggtttacacctaaatcaataaccattatgttgtattgtgcccctagtaggtagaatgcataggcctgggaaacaaagggtgaaaaaataggagtgccttcactttactatcacccccagtgacccaccaggggaatctgtgcttcttttccctgaaacttcagactctgcatgtcttgagatcctatttctcacaggagtagcagttctatcagaggatgcatgagtcccattatactttaagtaagttactttgagctccttgttccaaaagccaagcaagcaaagaaaggcactaccatactggcagaggtcactggtcttgttcatcagcagaaggtagggctgcactacacaagagacagggaagaatgtgtgtggcacccgggtgacctactggcacttctcttgggattccccctgcctgatttgatgatacaaggacacgtacagtagacttggatcttggatatctcaggaatgaccaggggtttagtcctcaccacataaggttaacacctaagccagtagatataccasccaagagtgacaggaatttagagggagtataaagaaaaaatgctgagtaccacttgtagccttgaga

SEQ ID NO: 904846 - DNA, 589 bp, Homo sapiens
tcattgctctctctaccctcctctctctgctgtgccagggagcttgcaatttctgtttctcagactctcttgttatctgtattcctggtaagttctgctaaaagtggaggtaccagtgggagaatggaatcttggaagaagacagagccagtccatttttttttacaatctactctctcaggcagtggtgcagccgcagtggagatttcatacatgaaaatgctgagactgaaactcaggtgttctcactacaaattttgcagtgtttccccaatatcccatgtattcattttctatgactgctgtaacaaattaccacaaatttattggcttaaaataacccaaatacatactgttctatagttcagaaacccaaatggctcacactgggctaaaatcaagaccagacttatttactcttgctaaatatgtcaaagccaactaattgacgaaatataatttaagcttggccttttattatattctgtagctgaaaatccaaggctggactgaaaaatcagcagagctgtatttctttctccartccctaggggagagtccatttccttgctgtttccacttccagagg

SEQ ID NO: 904847 - DNA, 608 bp, Homo sapiens
agaggttccaaaacctccattcttgacttctgtgcayacgcaagctcaacaccatgtggaagctgccaaagcccggggcttccaccctctgaagctacagaccaagctctacattggcccctttcagccacagctgaagtggctacaacaggggaccaagtccctaggctgaacataggaaggggaccctgggcctcacccacaaaaccactttttcctcctgggcctctgggcctgtgatggaagggactgccatgaagttctctgacacggcctggagatattttccccattgtcttggggattaacattaggctccttgctacttatgcaaatttcttcagctggcttgaatttctcctcaaaaaatgagtttttgttttctactgcatcgtcagcctgcaaattttctgaacttttatgctctgtttcccttttaaaacagaatgcttttaatagcacccacgtcacctttggaatgctttgctgcttagaaatttcttccaccagataccctaagttacctctctcaagttcaaatctctagggcaggggaaaaatgctgccagtctctttgctaaaacatgacaagagtcacctttgctcca

SEQ ID NO: 904848 - DNA, 369 bp, Homo sapiens
cacccagtatctccccagatgcaatttctgtctctagtgtattgctaatataagtgatagatttctcttattttcagtactaatgtttttacctaatagcaaaccctaktgattgatacagattgttcatactgcttcttgcttaaaagaatagcctcctttccactctttctatgcaagaggcataatttgccactttcacgaccttcgagcatggctatatgacttcctttggcctcatggtgggtgggagttactccccctccctttgactttaggctcagccatgtgacttgctttggcctctggttcgtggcaagcatgaagcaagccacccggagacaggctggggtggatggaattgcttta

SEQ ID NO: 904849 - DNA, 678 bp, Homo sapiens
tgctagcataaactgctgctttacagcatgaggcccttctggaagaacattaactcttgsatctccccagagccccagttcagcatatttccaatcaatatttgctccgtaagcactgtgtgtacaggactagccattttattttacttatttcttaatctagatgcccactgactttcccagaagaaaccaggcaaccacagacttaacgttccccagaaatcgaaacgctgtgtcttgttgctgtcggtacactggttttcagctctgcacggttttttgaactaatttcagaaaagacgttttgtacacatacctttccccacatattagttacaaataaaatgaatatgaatagataaatgaatgaacaaatgaatgaacaaattggtagggcactaccaatgtgattgaaagttgacatttcaaacccttctggccttataaaatcttagagtgacttctattactgaatgtggtcatgattctagggcccagaacataatcccccaaaatatggaactttggcgattgggaatactgcagaagcagaagcagcagcaagaatgccactatgacctcctcctcccattctcccctgagccacggtcataaaggaattctctgacctacctctccagagagaaggttgtaataccctcattccagaggggtcct

SEQ ID NO: 904850 - DNA, 662 bp, Homo sapiens
gctcttagtagttaagttttgggggattcaaaaattatatgtgaacaaaaattatatgactgcayaggggtgagcatccctaacccccatgttgttcaagcgtcaactgtaattctgtttggattaacacgtgttattcccaatactgttcaacattatcactagccacaaactctgaatatgacttaccattctcctggactctttaatcaggataaagcaatcctgaaatgggctcaatcaagctttcaaaccccataagcaataatatacttctatatcagacatctatacctgaaaagtgggtgcgggaggtgagaggtttaatctaaaataatatgttagtggtttaacttcagtacaaaagtacatttatcaaaagtttcatttaagaagatctaatgatttttttgtaaaggagcactgaggaacaagaagcagttgaaaaaattgaagaactttttagccctagtatttggaagctgagacaatttccaatagtggaagtacacaacagaaatattacaccccgaataaggggatcacaaatgaaaggcagccttcagatatctacaattttatatacagtagatctggcagaatatcagaggcaggaatgatctgacacataatctgttagctgctctcagaaggatctttgt

SEQ ID NO: 904851 - DNA, 553 bp, Homo sapiens
aaactggctgacatcaccagctgctaattgtggagccctaaggctttgagtcaacataagcagtagcctggtagtggttacagtagaccttaggtgaracccagtgctgtgctggcttcaggcctaacccagcacagtcccagtggtggtggccccaagggtgcgtgccatcaccacacccccagttccaggtaactcagcacagacagagacaaacttcactttgggggagaaagtaagggaaaagaacaagtctttgctggtaatccagataattcttccagatcttatccaagaccaccaagagagtacctctatgagtctgcaaaaaccacagtgacattgagtttagggcccaattcccttcaaatacctcaaaagccttctcaagaaggatgagcacaaacaagcccagactatgaagactacaataaaaacctaactctttaatgaccagacaccaaagaatacttgcatcagcaccatccaggaatacgtgatctcaccatatgaactaaataaggcaccagggatcaatcctggagaaacgtat

SEQ ID NO: 904852 - DNA, 225 bp, Homo sapiens
ttgactgctttgaggaattctttggaaacgatattttcrcataaataccagacagaagcattctcagaaacttctttgtgatgtttgcattcaactcacagagttgcaccttccttttgatacagcagttttgaaacactccttgtagaatacacaagtggatatttcgagtgctttgaaaccttcattggaaaggggaatatcttcacatgaaaagtagacaga

SEQ ID NO: 904853 - DNA, 611 bp, Homo sapiens
aggaaaccaaagagtctcagccccaaagctccttaagctgataatcaacttcagtgaagtctcagggtaaaaaaaacaaatgtataaaaaccactagcattcctatacaccaagcatagccaagccaggagcaatcccattcacagttgccacaaaaaatgaataaaatacctaggaatacagctacccagggaggtgaaagatctctacaaggagagttacaaaacactgctcaaagaaatcaaagaaaacacaaacaaatggaaaaacattccattctcatagataggttaaattaatatcattaaaatggccatactgctccgaacaatgtacagattctatgctattcctattaaactaccaatgacatttgtcaaataactagaaaaaactattttaaaattcatatggaaccaaaaaaaagagcctgaatagccaaggcaatcctaagcaaaaagaacacagctgaaggcatcrcattacccaacttcaaactattctatacagtaaccaaaacagcatggtactggtccaaaaacaggcacatagaccaaagctacagaatagagaacccagaaataaggccacacatctatgaccatctaatc

SEQ ID NO: 904854 - DNA, 611 bp, Homo sapiens
aggaaaccaaagagtctcagccccaaagctccttaagctgataatcaacttcagtgaagtctcagggtaaaaaaaacaaatgtataaaaaccactagcattcctatacaccaagcatagccaagccaggagcaatcccattcacagttgccacaaaaaatgaataaaatacctaggaatacagctacccagggaggtgaaagatctctacaaggagagttacaaaacactgctcaaagaaatcaaagaaaacacaaacaaatggaaaaacattccattctcatagataggttaaattaatatcattaaaatggccatactgctccgaacaatgtacagattctatgctattcctattaaactaccaatgacatttgtcaaataactagaaaaaactattttaaaattcatatggaaccaaaaaaaagagcctgaatagccaaggcaatcctaagcaaaaagaacacagctgaaggcatcacattacccracttcaaactattctatacagtaaccaaaacagcatggtactggtccaaaaacaggcacatagaccaaagctacagaatagagaacccagaaataaggccacacatctatgaccatctaatc

SEQ ID NO: 904855 - DNA, 324 bp, Homo sapiens
ccgagaagactttgtaaaggtggaaagaaccactggtatcacacatgatagaacacaccagtttagaatgatgattatactgcaatggaagagtctctattccacctggaataaaatccttagatgagtcttaaacaaacatgcatgctcatcaaaatgcatatgcaacactggctcggaggattcagggagacccactactggggagattctgctttcagtcccaactctaaaccgaactggtttgtgctgctcaatgagtcactctgctttggtatgcagctgatatcttattccaaaayatcagctggtgtggaaagaatg

SEQ ID NO: 904856 - DNA, 530 bp, Homo sapiens
cagaagaaacatggcttttcttgagatctgttgcacagagtggtgaatatarttaataatagtgtactgtacatttcaaaatcgctaagagtaaatttcaaatattctcaccacaaaaatgttaagtatttgaggtgatggatatgttaattggcttgatttaattattccatattgtattcacagatcataacatcactttgtaccccataaatatatacacaatagtaaatagtcaatttacaataaaataaaaaagaaaaaaaaagaatagctgttggatttctgggcaagaccttctttaaattttcatccagaaataaccagaatacactggtgttgtcattggttccaggggctcaggaggacaggaaagagaaaagggggaaaaaaggagttgagagagtgaggactgagtcaaagacgagggcgaaagtgagtgaagggagaggtacattttgtgattgcaaactcttacccttccttcaccctccactgtttagaatttaaaagttttggccaagaaaaaa

SEQ ID NO: 904857 - DNA, 619 bp, Homo sapiens
ctctcaaaattcacaagtgttcatgatatattcagataattgagatcaatatcatgcctttgctcaattattggagagctcacaaatcactaaatcaatctctcagttggatgcggacactgaaatataaacttaatgtaagtttactgtactttaaattacctttatatatcgacaatctagaatgtaaatattaactgaagcatgttattcactaatttgaatctgaaattaactgcataaagtacatttcacaaaatctactcttatcaaaaaataaacaaggttattcagagcacgaaacacattaagcctttgttatcagccccttggtttaattccttttttttttttaatgatttctctgaattctattttttcctcaaatctgctaggattttagtttcctattcccttaaaacattttgaagcttgccttacttctttaaagagagggttttgttttataatctgtctgacaattatgaaaccttaagttgtgtggttctatttcggtggttggttgtttctgctggttcttatcctgggttcctagattccttgtatgcttgcttaaatttgacygtgatttgcccaagttattcatggaactatttgg

SEQ ID NO: 904858 - DNA, 586 bp, Homo sapiens
aagtgcctagataagaaaaggagaggccaggcgtcgtggctcatgcctgtaatcccagcactctgggaggccgaggagggcagatcacgaagtcaggagatsgagaccatcctgactaacatggtgaaaccccatctctactaaaaatacaaaaaatttgccaggcatggtggcgggcacctgtagtcccagctactcgagaggctgaggcaagagaatggcatgaacacaggaggtggagcttgcagtgagctgacatcgcaccactgcactccagcctgggtgacagagcaagactccatctcaaaaaacaaacaaataaaaaacaaaacaaaacaaaacaaaaacaaaagaaaaggagaaaaatttcaaataaacaaccacaaaatgcatcttaaagaactagaaaagcaagagcaaaccaaacacaaaattagtaaaagcaaagaaataacaaagatcagagcaaaaatatataaaattgaaaggaaggaaacaaaacaaaaaatcagtgaaacaaaaagttttctgaaaagttaaacaaaattggcaaaactttagccagcataagaaaataaaaagggag

SEQ ID NO: 904859 - DNA, 637 bp, Homo sapiens
gcctgtaattcctataaatttgagtgaatttctctcttcttgaggtcctcaaaatatttttaatcttcctagttcttccttattcaatctgtaaggctgggaaacccttaaagccaggtactaggccaatttttttccaaggggctttattgggtccataaagtccaccttagttccttaaagttgtctggtcatatctgaacatatgataatcataatcctgtctaaacattggtaatattcccagtggttccaattgtgtcctgttacaaagactgctgattgtcccagatccaagttgagacagtcagtaaaaaagtttaactcctagaattgattggaacagggtggggacctcactcaaatttgatcaattggagtccttcttgaatgctttgaatctcacctgggagagcaagttccagttaattctgatgacagtattatatgatgtaaggccatgaatgaagagctagcaacagccatatttcccagtgatggagaatgtaggctgactgaaagctgctattttcatgagtgtgtcccatgatcaactgcagtccytggcacatagtattcaataaatacttatagaatggatggtgccggctgtttatgtcatgtccattgtgtgcag

SEQ ID NO: 904860 - DNA, 624 bp, Homo sapiens
tatagaatggatggtgccggctgtttatgtcatgtccattgtgtgcagaacactacagcaggcattatgaaaaagaaaccaaataaattaaaatgggaactaatatagagtaaaatattcaataattaggtactgattgttttctccacattctgatgaagaaacagaggcatagctgggtaggtaacttgcctgtatttatacaggtgttaaatggcagagtgtgaatcacggacgtatactcaggtctatctggctccagagtctatgcttttttcactgcaccatggtttctgtcttctcaaagcttacttgtttattgggaagataaaccatacaccctttaattaacttgagaactgggtatgccttctggatgttcactgatcaaacagatattgaagtttagggtaaagctttcatgaaaagttgtcatgtcccaaggcctaccacagttgcagactgttaatcagatttaggtttaggtgattggcttaggcagtgctaattaataaggtctgctgaaaaatataactataaacagaaatgtctgactgtgatacaaaaagaaartaatgcaatatatctcagcatttgttcagagtttgctgtttctctgatggc

SEQ ID NO: 904861 - DNA, 660 bp, Homo sapiens
tgaacttcctggctgggagtatggccaagccctgatttgggtttcctgaaagagctcggggaacctccttacctggaggtttctaggcctggtcatgtggctcygagtgattacattgaaggggcagtggctggggctggagccggtgggctctgagcacagtcacgcaggcatgcgcactttctggctgctctcctgccattgtcccttgggttcccattttggtgaggcgtgcaccctggcggcgctccccagggaactaaatagtttgctgcactgtgcgtggagatggagaatgtacaattggctgaccctgtgctaatctggtggaactccatgccagccctgggaaagaacaattgcatgggtgtgtccacactcaccaggtgctttttagaaaaacactcgagaataatgctgtggcttaggatggctgttgtgccggacccggcatcttcccaggggggctgtgttgttgggctgagtttcttaggtactggacccccaaatccccaaatacggcgtggacaggtggcccagtaggggctggactatccgataggcccaggtgctggagttcagacaagacataccctggcctggcgtggaagatacggggtgctattaatggcagcaatggctgcatttctgaaacccggg

SEQ ID NO: 904862 - DNA, 752 bp, Homo sapiens
tgctggttcaaagtgtaggtgygtttataattttgataaataactggcaaattgttctccagataagttgcaccaatttgcactcccaacaaactgtatgggagctcctttgaaggggagagattttgatgtctctctttgggtgtctcatctggtgatcttggcatcctgtgataaaccaagtgtgtcaattagcacttgaaagtcaccatctcttatcaaaggcactcagggcttcttaaatccaggaataattttcaaaactttaagtgtcctctaaaagaaggcaaacaccaagaagacatgaattctaaaatttcaactctgattgtctaactatacccagatcataaaaagacccaggaaactgttcctagatgaaagcgatttcagtttcacagaagcattatcaaaaaggaaacaaaaggaaagaggaacagagagccagccaaatttgtttagtgagttttttaaggcgctcattccagtactgttttaatcctctttacatttccccctcatagagaaccaaattaaatgtttcatttcacaaagacaagaaaaaattatgataaccttgaaaatatttattttagatgaaaacaatgattaataaagcttaattcagataaaattaattgatcctctgttatgttaaacaaactgttttaaacactgctgagcatgaaaactgaagtgaaacaacctttccatgaggtagttaaagccatttaagtgttgccagaaggctg

SEQ ID NO: 904863 - DNA, 752 bp, Homo sapiens
tgctggttcaaagtgtaggtgcgtttayaattttgataaataactggcaaattgttctccagataagttgcaccaatttgcactcccaacaaactgtatgggagctcctttgaaggggagagattttgatgtctctctttgggtgtctcatctggtgatcttggcatcctgtgataaaccaagtgtgtcaattagcacttgaaagtcaccatctcttatcaaaggcactcagggcttcttaaatccaggaataattttcaaaactttaagtgtcctctaaaagaaggcaaacaccaagaagacatgaattctaaaatttcaactctgattgtctaactatacccagatcataaaaagacccaggaaactgttcctagatgaaagcgatttcagtttcacagaagcattatcaaaaaggaaacaaaaggaaagaggaacagagagccagccaaatttgtttagtgagttttttaaggcgctcattccagtactgttttaatcctctttacatttccccctcatagagaaccaaattaaatgtttcatttcacaaagacaagaaaaaattatgataaccttgaaaatatttattttagatgaaaacaatgattaataaagcttaattcagataaaattaattgatcctctgttatgttaaacaaactgttttaaacactgctgagcatgaaaactgaagtgaaacaacctttccatgaggtagttaaagccatttaagtgttgccagaaggctg

SEQ ID NO: 904864 - DNA, 598 bp, Homo sapiens
tcttggagtgtaacaagctgtgtggtaggggccaatccaggcagctttctccagagacctaatggcctcaacaccttctgaacgtggatagtgccagaacacttaggagggtgtctttggaccaatrcatagttgcgactcctgtgctctcttttcagtgtcatggaactggttttgaagagacactctgaaatgataaagacagcctttaatccccctcctccccagaaggaacctcaaaaggtagatgaggtacaaggtcctaagtgatctctttttctgagcaggatatcaggttaaaaaaaaaaagttactggctggtttaatactttctaccttcttcacagagcagcctttgaatagactatgtcctagtgaagacatcaacctccgccttaagctatgtatgtatggaggccagtcgcagctttattatgcagacacacaagtggtctggacatgagggtacagtttctgcctaccaagacactacttgcactggatcttacgcaaaaaagaaccagaacacacagtgtggacaactgcccatatattctatctagattaggagagggtcctggctaggattttagtggta

SEQ ID NO: 904865 - DNA, 627 bp, Homo sapiens
atgaatttcatgttaatattgtgaaatattaaaataattccrcaatagttgagaaaaatgagcatttttttccatttttaaaaaatgcatagaaaagacaattttaaaatcctgggaccatatttatttagaagtagctgttagtaaaacattagaaaaggagtcaggccattaggttatttatccaaatctctaagcaattaggttgaagttattaagtcaagcctagaaaagctgcctccttgtaaggctttcatgacaatgtatagtaatccacagtgtccaattcttcacactcctcaggaatatcactacctcaggttacggtacacaggctataattgatgatgatgttcagataactgaagacacaataaatgacattcagacatcaggacaattccctcatgttcttttctatgatggccacctgtaccagcaacgtgggtttcacccacacaacgatgaactgttctcttacttctccagttgattttaaagacttgttaagaggtcttactaataaaatttgggtatgatagaaaatccacaatcaaatcttgaaccaaataacatattaaattactaatatttaagtgatggaagacacacaaaaaacttaaaagc

SEQ ID NO: 904866 - DNA, 598 bp, Homo sapiens
agttttttattatctactttcctatcattttatccctagtacactttcacttgctgttttccttgcatggmgggggcaataggcctggtgggtaaatctgaataaaaacgagaacagctgcagtctaactagctctgccacttaatggcgtgactggcccttttcagaaagttgtgcctcactggaatgtttcaaaaatatgtaaaaataatatgatctataagacaatcaaaaacgcttcaaataaggcgcgggttatattacataatatccctccactctggcagtgttggcaatggcagacaacaccatgaaactgaaagcatcccttcagtctgaaactggcgaaaaggctacaggtttacaaagtctcacatcagctgaaaataatacatccatcaattctatctttggcatggtgtattctgacagtggtggatagaatgtaaccacttgctttattaattatgagatgattgaaagaggaactactaaccaagaaattggtaaaggcctagcacaaatattttccccctaattttacaggggcgggaaagacctgaagaacttcaaaaccaagtgggaaataagaatgggt

SEQ ID NO: 904867 - DNA, 618 bp, Homo sapiens
catttagatagagagatcatggaattcttctctgttagggtgacaactgagcgggggcctgaagacaggagtcaattataagggtaatgtkggaaggggcaggccaggtgaaaaataaaagaaaaaaaaatagattgctttgctgtttgagtaacataaggagcccatcctggctgaagatggttgaagaggagtacatgagagatggagtgacagtaatctggtaaagatcatgtaggggctatggtcatgatgacataatagaaataaatggtactcaatagtcaatgtcctgttttgaaccaaccatccttttacagttttataacatgtttcatccttcttgatttctatgaacaagtaccttctactgctgatgttcaaactctttaaataccatgtgcttagaatgaaagaggcccattagctcattgcctccatccctctggcaatgaaaagcagaggttaaaatgatccctagctattatctctaggtgcaatggcctaactttttttttctttttttttttttttgagatggagtttcactcttgttgcccaggctggagtgcaattgcttgatctcagctcactgcaacctccacctcctgggttcaa

SEQ ID NO: 904868 - DNA, 618 bp, Homo sapiens
catttagatagagagatcatggaattcttctctgttagggtgacaactgagcgggggcctgaagacaggagtcaattataagggtaatgtgkgaaggggcaggccaggtgaaaaataaaagaaaaaaaaatagattgctttgctgtttgagtaacataaggagcccatcctggctgaagatggttgaagaggagtacatgagagatggagtgacagtaatctggtaaagatcatgtaggggctatggtcatgatgacataatagaaataaatggtactcaatagtcaatgtcctgttttgaaccaaccatccttttacagttttataacatgtttcatccttcttgatttctatgaacaagtaccttctactgctgatgttcaaactctttaaataccatgtgcttagaatgaaagaggcccattagctcattgcctccatccctctggcaatgaaaagcagaggttaaaatgatccctagctattatctctaggtgcaatggcctaactttttttttctttttttttttttttgagatggagtttcactcttgttgcccaggctggagtgcaattgcttgatctcagctcactgcaacctccacctcctgggttcaa

SEQ ID NO: 904869 - DNA, 622 bp, Homo sapiens
ttcattgattcaaaaaatgcttaataaatgttaaccatttgccaaacactgtgctaagtcgtgtggatagcagagaggatagaaaacatagaccttgcctacatggggctgttagtatagtgggacagaaagacagaaaacaagtcaatcaacattgcctattacatcaccctaaaccaacaccatatttatttcttacataggcagtgttgcatcgtttcatgtttataatggaaagttggatagtcaggggaagcctctcagagacgacatgtaagccaagctctgagaagagcagagggcagtgtgttacaggcagagggaacagttggttctaagtccccaagatgttgaagagctgcttctattagagtcttgtaactcaaaatttgggtctccaactgatgaacagcatcagcatcacctgggagcttggcagaattgcagaatctcaacccatccagtccagacttacagagccacaattcacattttaaggaagactctgggtgatgcttaagcctgttaatgtttgagaagccctggattaaaggaatgcaaaggagtytcccgaggctggaacacacagtgtgtgaggagataatgaagatgggtcagaaga

SEQ ID NO: 904870 - DNA, 607 bp, Homo sapiens
cagtgaagccacctcagagattccagatctatagagacactggtttacaatttcagccttggagaactgcaggaatgacactccaactggtgagaactgtggcatggtttaagcccaacaaagccataagagtggagctatctgagtcattgagagctcaatccactcagagtgttcaggatgcagcacatgaaataaatgattattctggaggtttaagatttaatgctgtctgcactgttgggtttggacttacctggggccagttatttctttcttcttgactatcactaccacttgaaatgatattatctattctatacctgtcccaccattgtacttcagaaacatataacttgttttaaaaaaatttgacaggctcagagttggaggagaattttcctcaggaggaattgtgccttgagtctcactcaattaccgtctaatttaatttagatgaaattctggactttggactttttacttaaaagtgaaaaaagttaggacttttgggtcaattgggatgaaataaatatattttgcatgtgataatgtcatcaatttggggggccaagggargaatgctataatttgaatgtgttcatca

SEQ ID NO: 904871 - DNA, 649 bp, Homo sapiens
tatctatattaataggcttttagaagaaattgattccaatgcttatagatgactttgaggrttttgagacttcagtgaagaaagtaactgtatatgtggtggaattagcaagagagctagaattagaagtggagcttgaagatgtgactgaaacgccacaatctcatgatcaaactttcatggatggggagttgcttcttatggatgagcgaagaaagtgatttcttgagatggaatttattcttggtgaagatgctgtgaacatggttgaaatcacaacaaataatttaggatattacatcaacttgataaaactgcagcagggtttgagaggattgactctatttttaaaagaagttctactgtaactaaaatgctatcaaacagcatcacatgctacagaggagtcttttgtaaaagaaacagtcaattgacgaggcaaacatcattgttgtcttattttaagaaattgtcacagccatcacaacctttagcaaacaccaccctgattattcagcagccatcaatattgaggcaaggcctgtaccagctaaaagattatgactccctgaaggctcagatgatcattagcattttctagcattaagatatttttaattaaagtatttctgttattttctcagacata

SEQ ID NO: 904872 - DNA, 573 bp, Homo sapiens
ttatgagagctacacttcaagatgagatttggggggggacacascaaaaccatatcacgtggacacactcacgacctttggccacccacgatattgcaagcactggaatagctgttgtcttctctttcttgggatcacgattgttctgtcatgagttgctgtgatggcttgtgttgggtggcctccaaacaagaggtggggttttcaagagagcaccatctgtggtaatagtagggggatccaagtatgtcctgagttggacaagataagtattttagtttctcaggtgttgggtggggccataaagctcccaagagtttctttttagtcagctaccacagaacatatagaaataccatcaggtgggtggcagagttaagtgggtctgggttcatactctccttgggcagagcttgccatatccactgtgaaggatggtggggtgattctcaggccaatggtattatgttccagaggggattttgactgcttctgctgtgtcttatagttcatcagggaagtgggggatagctggtagcgagaggcctcatccagctctcatgcacttggcaa

SEQ ID NO: 904873 - DNA, 658 bp, Homo sapiens
taggattttaacccactacatggatggggttttaagtgtggttggagaaccacagacatcagaattacctggtgtttatttaaaacwtagattgatacataccccacagagactggaattagaatctctcagagtggggtccatttagctcccctttaatgtaccttaaaatttggaaagcagcacattaaactacagtctttccacgagctgtcccaagtccaccggctcagctggtggagttaatctctctctgctccccatatccttaaaaatggattctagatgagtctgaaagggatcatcttccctcattttaggtaccccagaacccatctgcatcccaactggtctgataaggataaggaactgagaagaataaaacaaactgagcagtttcacacacacacacaagtgtgaatatttatgtattcatagctaaataccttttaaactttttattatatttggtatttaacttttacatttttaattatagattcacaggaaattgcaaagaaatgtacgggaaggtccagtgtaccttttacaaagctcccctcagtgttagcatcttgtataactatagtataataacaaaaccaggtaattgatgtcggtataattcacagaccttattcagatacatgcacattgt

SEQ ID NO: 904874 - DNA, 568 bp, Homo sapiens
gactcaatagaggtgcctgaggaaaagctctgagtccttgtcttaagtccttttagagatgcccaygcactggctgtttagcaagtctggcgtagggagggcagctttcccccgtgaggcctgccaggtaaagcctttgaaattgtctgtgatcaaatctgaaaaatcacacacaggtttttatcgagggactggactccttaatttattatcattgtgaaaatttctggtatttatgccagttcagaatacacttgaattctccagattcttttctgaacagaatgtgcaacacctcccttagagatcagacctagagagtaaatcggtccaccttaccttctctctgatggttttctactggtatccagatatatgtggatgttgttttaatggcataattgacttctaatacagagtttttattgtattaaatacttacaaaccattattttatctatatacgctgccatattttttgtaggtaacatcaaactcagtgactcattgcagaatgcaatttcttccacctttaaaaaaaatagagttgcatttgtctacctaaatt

SEQ ID NO: 904875 - DNA, 628 bp, Homo sapiens
cccatgcctatgtcctgaatggtattgcctaagatttcttctagggtttttatggttttaggtcttacatttaagtcttttatccatcttgagttaataatawtatactgaaggggcaaaagctggaagcatttcctttgaaaattggcacaagacaaggttgccctctctcaccactcctattcaacatagtattggaagttctcaccagggcaattaggcaagagaaagaaataaagagtacttaaatatgaagagaggaagccaaattgtctctgtttgcagattacatgtttgtatatttaaaaaaccccatcctcttagctcaaaatctccttaagttgataagcaacttcagcaaaatctcaggatacaaaatcagggtgcaaaaatcacaagcattcctatataccaataacagacagagtcaaatcatgagtgaactcccattcataattgctaccaaggaataaaatacctaggaatacaacttacacgggatgtgaaggacctctttaaggagaactacaaaccactgcccaaggaaataagagaggacacaaatggaaaaacattccatgctcatggatagaaagaatcaatatcgtggaaatggccatgctgccca

SEQ ID NO: 904876 - DNA, 584 bp, Homo sapiens
ggtcatcagtggccaagggagtggctctggtgtttgcagtgtgggcatgcatggaacaccacagaactgggttttggaatgtgggcacacatgaagcaaccatggagcagcatctggagtgtaggcatatatgacatggccacagatccagggtctgggaggtacacagggttgagaaatgtagcagtcgtcgtccagtggtaacacaacagaagctcttacttgggagtgggggtggagcacagcagcatctccctctctggacatgagcagaagaaatggctattgacaaagggtgtctcagtggcaaagggtgcttatgtcatctgcagagcagatcactggggactgctgtgacacccactgcttagctgatactgatagcccccatccttccatccttattttttgttcttagccatttccaaacatctcagctatgtcagacaacccagtgatactttctgcacaattatttgcgagtttttttcaccaatgtgttgctgcaccttcataagtggactcttgagccctccctaagtgtattagtccattctcgtayggttataaagataccacttgag

SEQ ID NO: 904877 - DNA, 665 bp, Homo sapiens
atacaccctcccaaggctaaatcaggaagaagtcaaatccctgaatagaccaataacaagttctgaaattgaggcagtaattaatagcctaccaaccaaaaaagcccagtaycagaaggattcacagttgaattctactagaggtacagaaaggagctggtatcattccctctgaaactattcctaacaatagaaaaagagggactcccccctaactcattttatgaggccagcatcatcctgataccaaaacctgttagagacacacacacacacacaaagaaaatttcaggccaatatccctgatgaacctcagtgtgaaaatcctcaataaaatactggcaaacagaatccagcagcacatgaaaaagcttatctactatgttcaagtcgacttcatctctgggatgcaaggctggttcaacatatgcaaatcagtaaacataatccattacataaacaggaccaatgacaaaaatctcatgattatctcaatagatgcagaaaaggcctttgataaaattcaacaccgctttatgctaaaaactctaaataaactaggtattgatggaacatatctcaaaataataagagctatttatgacaaacccataaccgatatcatactgaatgcccatcatattgaatgcccattcagtatgata

SEQ ID NO: 904878 - DNA, 626 bp, Homo sapiens
ctatattataataacattaaatgtaaagggataaaataatgaaaaggcaaaaattatcagactggatttaaaaacaaaaatatatcctattgtctgctgtctacagaaggcagactttagattcaaatacatraataggttaaatataaaagatgaaaaaagatgtataatacaaagagcaaacataaaaatactgaggtggcgtatccaggcatggtggtgcatgcctgtagtcacatctgcttgggaggttgaggagcagggatcacttgatccaaggagttcaaagccagcctggaaaacagagagaccctgtctcaaaggaagaaaattatactggagtggctatgctaacatcaggcaaaactgatttaaatttttaaataaattttaaattaaaaaattataaaatgttaaagataaaacatattgtagaatgaaaagagggtcatcagaaagttataacaactacaaccatatatgtaataaaagattgtaaactagtagtcactttggaaaaaagtctggcagtgacataaaataataaccatgaagttatcatttgacccagcaattccactccccaggcaaataacaacaataaatacttaaaaatgtatacgttc

SEQ ID NO: 904879 - DNA, 587 bp, Homo sapiens
taaggctcactctctcaattccttcaggtctttactaagttactgacttttcaacagcgtttcttggaaactatctaacattttagttgcattcctatctcccctaaacttctcccctctctacctgacttttttctctttagcacttatcatctaacatacagtatattttactaattgtattgtttattgtctgtttcctccatcatatgtgatttcaacaagatcagggactttgttattgttttctgctgtagttcctgcttctagaatggtgcctgacacataggagacactcaataaatatgcatttaatgaacaaatagatgaatgatacaaaattatatgtagaatgggagcataactatttattctcccataaacacaatcaaaatagtactaagatggtaagattttaatagcttaaaaacctatttcctaaatttttactgttgctatcttgacttaaagaaaaggcccaacagaagagaccatcctctggaaaataggccttagccaagcatgacatayttagtgagcagattattttgagataatgtgaaggaccctatggctcatcacagaaa

SEQ ID NO: 904880 - DNA, 659 bp, Homo sapiens
ctgccatgccctgaggaagcccaaggtagaattgtgaaagagaactaaggacctctgagcaaaaccccagctgagtccagttcccagctcgtctactatcttaatgcagtcacataattgaagctaggtaagaccagcagaagaaccccccagcaaatccagagaaccatgacaaaccactattttattttgtgagccactccatctggggtgatttgtgaccccaacataggcaactgaaacaatatctatattgggcggatggaaggagaggtgaagttatataagagaattaaaccatccactaaaatctgaggatatttacaaataatatatttaaaaatgaaaacaagaaaaagaacactgtgggtatattattagagataagatacaagaagaaactagtgtttaaagttgttgcctggggccagactgtagggtgggccaggggaatgcaatgttttattacgtaccttttagtagtatttgatttctaaaatgtgaacatgaattgctttgataaaaataaattttatatattcttaaattgtccctgggatatgcaatcatgtgaagttatggtgtgaggaggcctcagggcttkgcagttgaatggagagacagctctagtttagtcagtggttttctgttgtccatcc

SEQ ID NO: 904881 - DNA, 610 bp, Homo sapiens
gggcctggccacaccgcctcagagaatggcttctggaaatggagtagctcattgtgatccatcctccttcacagatgagcagattaattgggctgccaattaggcagctaataaaagaatgagagaaaacaaaggcagaccagaggctgcagctgcccagagctccctctcctagggtgggtgtggggcaaggagaggggaggttttaagactcatctgttggtttgaggtcagatacaatataaaatcattcccattcatcaggaaatagggagatctttcttttcttttcttttctttttttcttttttctttgtggtgagagaggagtatggggaagactgagagggcatgtaagagtggagagatgatgccatcctggccaaagaccaaaagcactggatggaccaagaaaaaagagggaccaggggagcagaaagtctcaggacctgagtttgaatcttaactgagtgttagctacagaagttactgactagctttccctgactagttttctcatcttgatatagggatartaatacctaatctggaagactgttgtgtacctgtatcagagatcctgtgttagctgcctgacacagcacctgaa

SEQ ID NO: 904882 - DNA, 568 bp, Homo sapiens
ctgctgtggaacagaggcagagtattctggcccttcagagctgctcggttaattgctctggttttcaagtctggctaccagtttctgtgtgattctgtaagccccttcgtataaattccctttttgcttaagtggctagagtcagtccttgttaattttagctgactgcacccctaatcagatggccctatgaaataagtcatagaaaattctggcaggcccctatattgtccacttcccaatgactagtcaaaaaacagagggaatcactggtctgggtgctgtgctcacaaagcttttccagccctcactgagcatctaaatatttagaaaggtacattacccttgacaacaggatgtaatcataaaacaattgtatccttagagatgctcagttatgtgcctctcctctgcccccaaataggaatgtcctcagcactgtcttgggcatgtcaccagcttgctctaggatacctctatgacctaaaactcacyacctttccagttagcttatctcattcttgaatcttccattagaaaattcttctttcctttttagctgaatgtg

SEQ ID NO: 904883 - DNA, 611 bp, Homo sapiens
ctgaggttcattaatgatcctgtctagttgggaaaatagacattggacaaagaatttataactgtgttggttattgggcatggaatgtaaaatatattatgggagtatataagaagggtttctaacctaatattggggggtgtaaaatatcatgttttgcttggattgggggtaatgtctatttcagtaaatgggatgatgatgatgatgatgatgatgatgatgatgatgatgatacttgtagtaataacagaagtagtaatacaggttgagcatcccaaatcagaaagtccaaaatctgaaactttttgagggcctacatgatgctcaaaggaaatgctctttggagcattttggatgtttggatttgggatgctcaatcagtaatgcacatattccaaatccatcctatcctttaggaagattcaaaaaaatccaaaacactcctgttcccaagcatttcagataagtggtactcagcctatagcaagaaygatagctgtaatggggcaggctctgagcaaaagttttttatttaatcctaataaaaacctgatgacatagtactattattatcctattttccttttgaaaaatctgagccaaagaaa

SEQ ID NO: 904884 - DNA, 576 bp, Homo sapiens
atgttagcaaagtatgtgttttatatagtgttttctgtataaaaaactataatttctatttactaagttgaatctatrtggaatagtccataaaataaaccttacataccaactagttggatgtagtagtgaaaatcattcatggatatttcactctagtttgatatataaatctcttggattttcaacatagagtggggaagaaatcctaattacagttctcttcccattttaatttctcctcttttttttttttttttttttttttttttgctgtttttctcaactgtcagtggaattattgtcttcctgtctccatatttaggtagtgtcagtggctgagtatcaccgcaggatcgatgctctaaatactgaagaactgcgcacactctgcagacgcctccaggtgcccccttcagtagtttaaacccctccagagactaaatactccctgtttttagtgttctttgtcatggcaaatctcatttgaagaatttgctttgactgcagcactaaaattaaattcctttttgtattaaaggttatagtattgccgtgaagagctgtggattatct

SEQ ID NO: 904885 - DNA, 420 bp, Homo sapiens
tttaatctagttaagtacaacgaaaaagctaggaactcctgagcaatgtgagagatatcaccgattgcttatccaaaaatgatctctacttytttctagacttgagtaaaagccacaaaggccactccatgctctttctgtttttggtatttggggcagaccaggatggcatcctacaagataatggagtctcaatatggaaggaggttggatccctgaattgctgcatggaagagagctgcctaccaccctgaacatctactttggattactacagtagtaagaaataaaattacattgtgtttgggctattatacattggttggctgtattcaatacagcagtttagcatatattaaggaatacaatttatttattaaatgcaacatatggatattttgccctcctggagtcccatat

SEQ ID NO: 904886 - DNA, 420 bp, Homo sapiens
tttaatctagttaagtacaacgaaaaagctaggaactcctgagcaatgtgagagatatcaccgattgcttatccaaaaatgatctctacttttttctagacttgagtaaaagccacaaaggccactccatgctctttctgtttttggtatttggggcagaccaggatggcatcctacaagataatggagtctcaatatggaaggaggttggatccctgaattgctgcatggaagagagctgcctaccaccctgaacatctactttggattactacagtagtaagaaataaaattacattgtgtttgggctattatacattggttggctgtattcaatacagcagtttagcatatatkaaggaatacaatttatttattaaatgcaacatatggatattttgccctcctggagtcccatat

SEQ ID NO: 904887 - DNA, 553 bp, Homo sapiens
tgtacccagatagcagttcagctcctgtgttcaacagttcttgaaaagttgatttattctactttttccagtgtatgattgccagaatagtggtyatagatctctttggagaagaattagtgaaattattaccatgcaaacttgccttggtattgcagggtcttttcttctaggtatccagcttttccttcagtcaatggttctgaatttaaaaactagctcaggttcagaaactagacaaaggatcatgccttcttattacagtgtctgtccttagcctccttatcatctatccatgatttctttggtttagactgagcaatgggcttattggctgtccacctattttgcccctaccgtgccttattgtgttaaccatctacctagctcttcatgaatcagatactcctggctgccacttgggctttgcaatgtatcacagtcactgtgcctgcaatggactgaatatttgtgtcccctcataattcatatgttgaaccccaatccctaatatgatgtattaggaggtgtggcatttaggaggttattagaa

SEQ ID NO: 904888 - DNA, 459 bp, Homo sapiens
cttgatttttttctgtaaaactgggttctaaataaagttctcagtacataaatgaacacagagtgctgtgcargtgggcttgcccttggtaacagacacagctgtgcctatcaaacacaaaatatggtatttaattttggaaaattgctaacggcaggcagaactgtacaaaggaaagttaccttcaactgtcatttaggaagaaacaaggatatcaggaacagtaccatttttcctaatgtttccaggcttcagttgcattcggtgcctttccagaacaactgaacaatgaaatggatagtaatctgccaaatgcatacagctgtatgcctgtttgcctggggtttatattagggcctggggaaacaaagttaaggaagtaaggctgcagggtagcatcagtccatccactatagtccgattcagattcagatggtcagattggagtctaaggtggaa

SEQ ID NO: 904889 - DNA, 679 bp, Homo sapiens
aatgagaattattttaagtgcagagtagtgtatgtaatccttcattaatatattaataaacatatttataaataattttctatgtgtcctaagtactctgggagtaagcaaaggaagagaatatattatttctgtctgaaaagacgagacttaaaattcctcccccttcaaaataagtgttaacttgatttagggttgttatgttagtgaagaagtttttatttatttagcagcctctactgagaaatccctgatgctgagttcacatgtaaagaaactacaaacaatggcctgttaagattttgggggcatacatggtcataatattattgtagaatgttgcattctttttatttaaaaatacttttatgattttataattaggcttaacttttaacacatacactactatatactatatacttttactatatacagaactcaggggtccttttaactacagacaatagagtttggatattatccccaaactagctagagactctacggaggttagacaaaggaataacatgattaaatatgtgtgttagagagagcctgctaacagcttgtggagggtggtttggaaggtgggaaaatggtgtaataggtaggaagactggaggcagaaagatcaattagaaaawaccataataatctggacaagagatggcatggg

SEQ ID NO: 904890 - DNA, 581 bp, Homo sapiens
cataccaaccctatcgggtagatactgttattaccccactataaagttcattatactaagtgacagtgtggttaagtaaattacacaacatcccactgatagtacagcacaaaaacagttcaaatttcagcagtctgccaccagacccacattctaaaactctccctgcaccatgtccaaatggtaatagaggtgggtcacaggacagatgtggggagggcttcctttgccctccagcagatatcctaagattagaagagggtgttcctggacatggggtgtatcagagcacacatgtccggcaaacgtaagagatgagggttatgcatacatgtaaagagattgctttgactaaagaacacacactgtggtggaaaatgaatctataagaactgagagaccctgaggaagggagacgtcttgttccgtccttggacccaagcaaaycttgctaggcagcatctgtgagggcctcatgtcaagcgaatacttttcttaataccgggtcacccatctcaaatgcggctatgtgccctggccaccacaatcagcggacagcagaccaggaaaaaaggactgag

SEQ ID NO: 904891 - DNA, 701 bp, Homo sapiens
ttattccaaaaatcatgaatatgctttattatgttatgctctagaagctttactrttttgcctctcacatttagatctacaatccaccttgaaatcatttttgtataggtgtgaggttgtggctgagattcatttcttccttcattccttctatagacctagaacaattaatttaaaagaattccttttcccactgctctgcagtgttatctttgtcacaaatcaaatgtcatatgtgtgtggacctatttctggactgtgttctgttctattagtctatttgtctgtccttttgaaaaggccacagtctttattaatgtagttttataagtattgctatctgtgttaatcttccctttgttcttctactttaggattgtcttggctattcttggctctttgcatcactttctaaattttagagtgagcgtgtcaatttccactccctgaagaaagaatgtgctgagattttaattggactatattatgtttataaatcaatttgggcagaactcacatctttgcaatattgagttcttcaagaacttagtaaattcctccatttatttacatctgcttcaatttctctcactaatattttgtaggttcttgtgtagaggtcttgttaatctaattcctaggtattttatgttattctaaatagtatttttaaaattttttcatttacaattacttgttgc

SEQ ID NO: 904892 - DNA, 613 bp, Homo sapiens
tggttaagatttgcgcccttcctggccctgacagaatgtctgacacaagcacacagccagtatttggtggttgaaagcgctaagccctcctggtggctgttgtaaggcagatgctattaccaatgcagctccttactctgcattcgttttgtggttctacgtacagttggtactatgtctgactgtgtcttcccaacttcatatgttgaatcctaacccccaaggtgatggtattaggaggtgaggcttttaggaggtgacgcttttgggaggtgattaggtcaagaccgtagagtcctcatgaattggattagtgctcttgtaaaagaggccccaatgagctctcatataacttcttccatgtaaggacacagtggaaagatgctgtctctcaatctggaaaaagccctcactcaatagatgttgaatctgttggcaccttgatcttggattaccctgaatccagaattgtgagaaattaatgtttattatttaagccacctactctttggtatttttgttagagcagccccaatggactaagacagttgatatcacaccttctggtatttcctgatatacyatattgcaatggtatggccctctgttttct

SEQ ID NO: 904893 - DNA, 415 bp, Homo sapiens
agataaaatctatttatgaatgacctttcaggagttagcctacaaaatattttctaatttyttcatgtataaaatgcaaagggggctgggcgcagtggctcacgcctgtaatcccagcactttgggaggccaaggcgggtggatcatttgaggtcaggagttcaagaccagcctggccaacatggtgaaaccctatctctacaaaaaaaaaaaaaaattagccgggtgtggtgacaagtgcctgtaatctcagctccttgggaagctgaggcaggagagtagcttgaatccgggaggtggaggttgcagtgagccgagatcgtgccattgcactctagtctgggcaacaagagtgagattccatctcaaaaaaaaaagcaaagggaaggcacagatggaaggaataaggaattct

SEQ ID NO: 904894 - DNA, 651 bp, Homo sapiens
gggccttttgggggtgattaggtcatgagggttccaccctcatagatgggattagtgccttattaaaggcctagagggaaatagccaggaacttttgccctttctgcccttccacaatgtgaagagacagcatttgttacccccctagaagatgtcgcattcaaggcaccatcttggaagcacagactgggctctcaccagataccaagcctgctggtgccttgatcttgtacttcccagcttccagaactgtgagaaataaatttctgttccctataaattactcagtctcaggtattttgttatagcagcaaaaatggactaagacagtaaccatcctttattaacgtctgtcacatagtagttacatgtagcagttacttgacatattctttttcattcattcatttaaatattattaacttataaccagtacatggctaaactgtagtttgaaagtaatcaaactaatgtgtatagattgaaggcctattgacaagccaggcattatgctatgcactacrtttgatcaacaaattacaatcccactttcaaggaatttacccttcagtaacagattagcaaacaaataagcaatcacaatctagaatgaagaatattggtctgaaggctatgctctcttccctccaa

SEQ ID NO: 904895 - DNA, 626 bp, Homo sapiens
caaaagggtttccgtgttatccagggacggggtggatcaactttgatcatttggacctggctttggtcatttcttggtacccattacatggctgggtgatggcagtmcatgaatgtatggagaatgatgtcaaacagggtgatggatgacaagttcgggtctccagagcacttatgtggtctgtgaacataaatcattccattcagtcaaacctccacccttgccccctccctcattgagatgctacaccactgcgtcttctctctcttggggccacttattcttgtcttgtttgtgaaagccaaaacaataggatgctaggttcttgaggcagataaaatagattcccaggttaactccatttatgatttgtcgatcttttcccttcttcactcctgcagtaagggaattatcatagggagggaccatcagacaggcctttttggggactttttcttatatagcgttaacacatttatttccaagtggtttaaaggcaaaatatatgaatgcctaggtattttgagatctttcagaaaatagaaggaatgggaatgttcttgttcatgttattgggctagtattgcatgagaagagcagtcaaaagcctaaaggaaatattagca

SEQ ID NO: 904896 - DNA, 626 bp, Homo sapiens
caaaagggtttccgtgttatccagggacggggtggatcaactttgatcatttggacctggctttggtcatttcttggtacccattacatggctgggtgatggcagtacatgaatgtrtggagaatgatgtcaaacagggtgatggatgacaagttcgggtctccagagcacttatgtggtctgtgaacataaatcattccattcagtcaaacctccacccttgccccctccctcattgagatgctacaccactgcgtcttctctctcttggggccacttattcttgtcttgtttgtgaaagccaaaacaataggatgctaggttcttgaggcagataaaatagattcccaggttaactccatttatgatttgtcgatcttttcccttcttcactcctgcagtaagggaattatcatagggagggaccatcagacaggcctttttggggactttttcttatatagcgttaacacatttatttccaagtggtttaaaggcaaaatatatgaatgcctaggtattttgagatctttcagaaaatagaaggaatgggaatgttcttgttcatgttattgggctagtattgcatgagaagagcagtcaaaagcctaaaggaaatattagca

SEQ ID NO: 904897 - DNA, 625 bp, Homo sapiens
caggaggctgaagcgggaggaactctcgaccccgggaggtggaggccgtggtgagtgagccgtgtttgtgtcactgtactccagcctgggtgacagactgagaccctgtctcaaaaaataaataattacataataaagatttaaaaagcaagcacaaaaagacaaatactgcatgatctcacttatatgtgcaatctcaaacaatgcaactcatagctgtagagagcagaacggtggttacccgaggcaggggtcagggagggactggagagatgatagtctcatgatacaaaatttcagagaggaatggttctagagatctattgaacagcctggcatctacagtgtataagtatgtattgtatacttgaaaattgctataagagtagattttagacatgtcctcatcacattaaaatcagtatgtgaggaaacgagtgtgttaattagcttgattttgtcattccacaatgtatacacgtatgaaacatcatgttgtatgccataaatatatataatttttatttgtcaagttaaaattaaaattcatataaattataaaaataaaatgaaataacatacactacaaaagacgtttakttattaaatccccacagaaggggtc

SEQ ID NO: 904898 - DNA, 656 bp, Homo sapiens
catcaccccatgttcagtacatctaagtggaactttgtgattacctctgctgcccttttaagccccttgtccttataccttaaatactaatcctcagacttgacttcagtctattttggtgacttattagatttttcttttagctttcctccaggggacatcaatttccaaccaccacaagcacaggtgcaacttctgctcttataattcccacccacactcctaactccactctatctcctgataacaccatattaagtcactaatggctagagtttgaaagattgaatgttaaaagcataattagagacttaagggaaacaaattgtacccataaaatttagaattaatttcaggaaaatagggcaattgaagcaccttgtgcaattggaaatgacttttctaaatcagcgactgtgcctgaaatcagccccctcctaacttcctctgcttccttcttgtttccttctaagaataagggcaggtcggtgggggtaagtttggtaaacagcaatgcgtattgcttgtcaggatatcaaccacaaagagctcaccttaaagttaagctttctctctgtaatggaratagaaaatgggaggaggtgtgtgggtgagaccaattattgcccttgggcgagctccagaaattgcaagag

SEQ ID NO: 904899 - DNA, 615 bp, Homo sapiens
ttctccagccctatcattcaattcccacgtttttatgtaaacatcttgttgtcccaagtagattacagtgcctttgacagtaagattcagatattcccataattttcagagccgcaattatgcatcaagaacatcattgtgttttaaacaaagcactagttcatttaatgctcacaaaccctgaaaatgggtattattcttctttccattttcagaggaatcaactaaggtgttgaggatttaaataacttgtccatgcttttacaactcagaggcaaagcatatttcaaaggcttgtttcaaagctcttcatctttccacaatgaaaacatgatggaaaaacaaaagagtcaatacttgagtaaatgaatgtttgaaaaaaacaactaactactcagtaattatcaaaataaagaattaaaaacctctgtgtaatttcagggaataaaaaatatttgtttagctggaaaaagtgacctctcctctcatactcattcttcaartctttccaacccaaatggcccatgggaagaatttaaaagcttctattttatgtgtaaacttgtctcttattcatgtcttcctttcctcaaccaacagttctacctgaagctg

SEQ ID NO: 904900 - DNA, 461 bp, Homo sapiens
gggaagtgtgcatggaataggaaatgactgtgatggtggagggacagtcctcaggatctcaggcaacatgcacttgtgttatcagtgaatgtgacaggttcggtgaacaagtcctcaktgcccaggtggtatgtgctggtgggtactggttgtgatggtagcagcatgctgagtgggtctatcttcagtcccctgggaagacggcatagatgccagcagtggtagacaggatgggatgatcctcagtcctgggtggtatgtttgggcactggcagaggaggtgccaggctggttagggctgtcctcaggttgttgtgggcatgggcacaagctgtagtgggcagagtgaggtgatccctacctccctggaagcagtagcagcagtgagtattggaagaccctctgtggggcacatgtaagtgcattgctgccttgcttctggggagtaatttggtttatgt

SEQ ID NO: 904901 - DNA, 683 bp, Homo sapiens
ggagtgcagtggcatgaacgctgctcactatagcctcaacctcccgggcccaagcgatcctcctgcctcagcctcccaagtagctaagaccacaggggcatgccaccacacctggttatttttttatttttatttttttgtagcgacaagatctccctggtcttgaactcctggactcaagcagttctaccacctcagcctcctgaagtgctgggattacaggcatgagcgcccatgcctagccatctttgcccatttttttaatggggttgtttggtttttgcttgttaattcgtttaagttccttatagattctggatattcgagctttgttggatgcataatttgcaaatattttcttccattccacaggttgtctgtttactctgctgatagtttattttgctgtgcagaagctccttaatttaattaggtcctacttgtcaatttttgtttttgttgcaattgcttttggagtctttgtcatgaaatctttgccagggcctacgtctagaatctcatttcccaggttttcttctagggtttttatagttatacrtttcacgtttaagtctttaatccatcttgtgttgcttttttatatggtgaaaggaaggagtccagtttcaatcttctgcatatggctagccagttatctcagcaccacttatcgaatagggagt

SEQ ID NO: 904902 - DNA, 598 bp, Homo sapiens
tctggcaaagagtcataagaataatttataygaggatataaagaaatgacaaaggaacagagaatacagaatgttgagaactaatggtggtcttgggagatataaaataattaaaattgatagcttggaaaccaggaagaatgacactgctattatagagtgtaacttgctaagacaaaagtcttagtttcacttattcactcaacacatatgtaattgctcacccactattttccaggcactctaacaggcattgggattgcagaggtagacaaggaggagaagacttaacctcacagagctcacattctgctggagaagatacaagctaaacaagtaagcaaatgtagagatgacatgatttcatatagtggtaaaaactatgaggaaattaaagcaaatcatggtagagagagatgggggagtttagaataagaatggtggaaagtggaggaggtaacttcaagtggagccaagaaggagtagagacgtagagaagaacctttcaagagaaagagaaaatgtctagtgttcattatggacagcatgaaatgaaacaagcactttttctatattaacttttacttgttcgtggcac

SEQ ID NO: 904903 - DNA, 537 bp, Homo sapiens
ttaagattatttccttcatcgtgactttagataacctgatgattatgtgcctaggtgatctttttgcgatgaatttctcaagtgttctttgagcttcttgtatttggatgtytagatccctggcaaggccagggaagttttccttgattattccctcaaatatgttttccaaacttttggatttctcttcttcctcgggaacaccaattattcttagatttggtcatttaacatcagctcaaacttcttggaggctttgtccagttttaaagaattcttttttctttgtttttgtcagattgggttaatttgaaagccctatcttcgagttctgaagttctttctcctacttgtttgattctcttgttgagactttccagtggattttgcatttctttgtgtctttcatttccagaagctgtgattgttttttatttatgctatttctctggagatttttttatccatatcttgtattatttaaagaatttttttaagttggttttcacctttctttggtgcctccttgagtagctc

SEQ ID NO: 904904 - DNA, 626 bp, Homo sapiens
ataacaatagcttatactcactattggccaggcattgtcccaagggcrtaagtattttatcatcctcataacagtccttcgaagctgggccagttgtgatttttatttcacaaatgaaaaaacagatgtacagtataggttatttcttccccaaagtcacatgtttaatggcaagaaaaaggggcttgaagaatgcctgtctggctttggagtctgtcctcttagcatgcagaaagcctgttctcagggagcttacagtctgttctcaggatggtgttttgtcacatgtgacacagccatttgtttcatcttgttttatctattataaaatctacttctgtagacatgagactgtgaacttttctgtattgtttactttctgctttggtagatacatttgctcattgcacatacgtggtgatgcaagtttttcatctgataaaatcttcacttttcattgatttttgttctcaatttttattaatttattataatatataaactttgttttaattcgaattggttaatttggacaggaaaaaaagttcagtaaatataatttttagccttttctcaacctgccttcaccataagagtgccaggtgtctgagttcaaccctttctct

SEQ ID NO: 904905 - DNA, 730 bp, Homo sapiens
caatttgtatcgatttaatgtaacaacaaatatctattgagcataaataatgctgttaacattgaatattttggaatgcaaaggcaattacaactgtattaataaatcaagagtcaagataatacaacagttaataataaagtaggtaatgaagggttaaattgtatgtttttgggccacttacagcataatatacagaattgattgctaaaagatggattttgatcccacctttagtaataattagaaatctgattttgaaaaaagaaatctatttctttgagtgaaagttacattacctttgaaaggacgatatgttgatatctagggtgccttatagccataagatgctacagttcaaatggcaccatgtgttagagtaatacacacatatatgcagagacatataatgggcagatgctcacatatatcacatgtaagtgagtcagaaaacaaggtcatcatgaggaaagagctctaaaaagatctgggtcttgttccaactctgtggtgccactcaaagcccatgtgactctctgagtctgtatttacctcagatagagacaatagatgcatcctgccctcctcctcctctctttgggakgcaatgagataatggcccctctattcttgggtagagtattgaatatcttacgtggattaaggaaatgtggaggactccctagggccctacacaggaagagcattatcaggagcggaaagttacctg

SEQ ID NO: 904906 - DNA, 552 bp, Homo sapiens
ctatgaaagtgtgttgaaaagtaattaccatcatataaatatgagggctattatcatcaggaattcaatgttttcatttactyatttaataggtggtacctactgtgtgccctgtactacactatttactggagaaagcagtcatcacttttcaaattccagttacaccaatgctgtgagtgtacacatattttaaagcaattaaatgattttatttcttttcagatgaaatctgaatggctaatcacggttacttttcagcttctaaaacctagacagcagacacgaccagtcctgagtgagacctctaagaaatacacagcatgctacagaaagtacatcgctaattcaatgaagtggcatatattgctttatgtcagtgctgaacagatgccctagtacagcatcaggaaaccctgctgctgacagtactatatttcaaaggtattttaaaactcacttcacagtcccctcctggctcccagatactccgtggctcatatattaaagcaagggtaggtagataatgagcgaatctttttgtatatatac

SEQ ID NO: 904907 - DNA, 552 bp, Homo sapiens
ctatgaaagtgtgttgaaaagtaattaccatcatataaatatgagggctattatcatcaggaattcaatgttttcatttacttatttaataggtggtacctactgtgtgccmtgtactacactatttactggagaaagcagtcatcacttttcaaattccagttacaccaatgctgtgagtgtacacatattttaaagcaattaaatgattttatttcttttcagatgaaatctgaatggctaatcacggttacttttcagcttctaaaacctagacagcagacacgaccagtcctgagtgagacctctaagaaatacacagcatgctacagaaagtacatcgctaattcaatgaagtggcatatattgctttatgtcagtgctgaacagatgccctagtacagcatcaggaaaccctgctgctgacagtactatatttcaaaggtattttaaaactcacttcacagtcccctcctggctcccagatactccgtggctcatatattaaagcaagggtaggtagataatgagcgaatctttttgtatatatac

SEQ ID NO: 904908 - DNA, 328 bp, Homo sapiens
acatgggtatgaggaattcactagtgctttttctggtagggggtgatctgaaagcatcaagaattacctgctagctggaaatgaagagacctacttaaaaaaaagagctaaggtkggccaggcacagtggctcacatctgtgatcccagcactttgggaggcaaaggcaggtggatcacttgaggtcaggagttcgagaccagcctggccaacatggtgaaacactgtctctattaaaaatacaaaaaattagctgggcgtagtggtgcatgcctgtaatctcagctactcaggaggctgaggcaggagaatcgcttgaacctgggag

SEQ ID NO: 904909 - DNA, 673 bp, Homo sapiens
ggagttcgagaccagcctggtcaacatggtgaaaacccgtctctactaaaagtacaaaaattagccaggtgtgttggcgggcrcctgtaatcccagctactcaggaggctgaggcaggagaagcttgaacctgggaggcggaggttgcagtaagccaagattgcgccactgcactctagcctgggcaacaagagctagacttcatctaaaaaaaaaaaaaagagtagagaaataaaggacgtggcagtggcggtgggtgtatgtttttggggaggtgagggaatgaggaaggcagggaaacagagttctctgcttcctttgcaagcctgatgaatagaaaggtatcaacagggtaacaactcaatgaagttattgctatgagctgccttggtttcctcccccagacacacggagctaaatgggacttcagtgggagtctgcaagttctaattgctctcctggcagaagctctcagatctggctcaaacacatcaagaaggacaatttcctagaaatggaacagtcaggtctcaatttcatgcaagtttattcttttcaataaggcagttaaatcacattttacatctggtactaaattaatgggttgtatgttgttacggacttttcatagaaccatcttcacaaggattacatatgcatagaggttaaaatc

SEQ ID NO: 904910 - DNA, 634 bp, Homo sapiens
tgggggagagaggtgactcgctcacctagatggctcctgggcyttggaggagcccccttcgatcactggttccatgccctcacttcttttgttaggtgttctggtccatgggctccctcaggcagggaccacatttagtagacaggtcatatccttgccaggctggccctgtggaacaaggcacaccccaatcctctgccagcccatgaacctgggtatctccacttctctcagtgatctgagaacgagggctcacccttgcttggccaccaccaagtcctgatcatctaagagctgtgggatggggtggggtcacttaatcccctgtctaggtgctttccgggggttcaagaagttgtggccacacacagagttcaggcagatgtgggaatgctgggctggaagctctatcagacatggatttcctggctatgagtggcgggtttgggtgcagttgcctgacctgctgttgggttatattctagaggctgttcctgccatcagagttcagacagaagtgggactgctgggctggaagttctagctgcctggctatgagtggtggtgggggttgtggaatcacctatcctgcagtttttctgtttccctggataacaggaggctgtgtccactg

SEQ ID NO: 904911 - DNA, 650 bp, Homo sapiens
aaataataaacttgccattcaactaaagagaatgattaactccttcaaaaagtaacatcttatmttgatacccataaacatttatgaatatctttatgtagtcatatactattttagaattttttacagtaagaaatgtataagggaaatatagtgcctcaggttgtttgaatgaatgaagaaaattgtcatctattaaagatacagaaattcagtcatcaatgttagaataattttttcatacatgttttaagtagcctttcaaaagccagcaggaaattgaaaactgacatcctgaaatatccacttatactgctgcacacatatacacacatgcatatacacacataatatgaagtgataaaaaaagacacccaagtgtgataattttctaaagtcaaacaatagtaacaatagatatatctatagaccgtttaatacatgctgaatattgttttaagcacttcatatgtacaggtatacctcagagatactgagttcagttccagaccactacaatgaagcaaatatcacaataaagcgagttacatgatttttttggtttccccttgcatataaaagttatatttacactgtactatagtctactaagagtgaaatagactattttttggtctaaaaatgtacgt

SEQ ID NO: 904912 - DNA, 630 bp, Homo sapiens
catggtgtgccagtattcctgatgtcccaatttctcagtgacagatgttccttctggctgtatctagtcagccatctgggatattctttaaaaaaaaaaaaaaaaaaaaaaagactacattcatccttcagtattcactggggattggttcctgggcctcctgtgtattccaaaatctagagatgcttaagtaccttatagaaaatggcatagtatttgcatataacctatgcacatctttatgaacactttaaatcatctcttggttacttataatacctaacacaatgtaaatgctatgtaaattgttgttatactgtattttaattttaattttattgttgtattttttttttcttttttaaatatttttcatctttagttggttgaatctatgagtgtggaacccaaggttatggaggactggctgtggatacctgaagaggtaaagatagtatttgccagaaaattcagttgaaacatttgttcaatgtttacaataaatatctacaggtatcatcctggggactttttaaataaaaattgaayaaaaattctccaagtatagctcaaaagaaggcttactatattcatggtttagtaattaatcaggatattcatatcctaaat

SEQ ID NO: 904913 - DNA, 602 bp, Homo sapiens
tacccattctatgcatgtaaaaaatactratatgtgccccatgaatatgtaaaatattatacatcaataaaataataactacaaaatgtaatatgagttactttttttgtagatatataaaatgttattctaaaattcatatgaaatatcaaaggacccctgtagccaaaacaacttggaaaaaaccaagtttagtggcttcatgcacttcctgatttcaaaacttactacaaacccatggtaatcataacagtgtggtaatggtataaagacagatacataggccagtagaatagaataaagagcccagaaacaaaccctcacataaatgtcaggaaacacacaacctcgattttattacacatttttcattcattacacacatattaatatttatacattacctcacattatcacaatgattttctacaaggatatcatgaccatttaatggggaaaggacaatttctttgacaaatggttttgggaaaactggatatccacagaacacatgcaaaaagaaattgggcccttaccttacaccatgtacaaaaattaactccaaattgatcagagacctaaacataaaagttaaaactaga

SEQ ID NO: 904914 - DNA, 602 bp, Homo sapiens
tacccattctatgcatgtaaaaaatactaatatgtgccccatgaatatgtaaaatattatacatcaataaaataataactacaaaatgtaatatgagttactttttttgtagatatataaaatgttattctaaaattcatatgaaatatcaaaggacccctgtagccaaaacaacttggaaaaaaccaagtttagtggcttcatgcacttcctgatttcaaaacttactacaaacccatggtaatcataacagtgtggtaatggtataaagacagatacataggccagtagaatagaataaagagcccagaaacaaaccctcacataaatgtcaggaaacacacaacctcgattttattacacatttttcattcattacacacatattaatatttatacattacctcacattatcacaatgattttctacaaggatatcatgaccatttaatggggaaaggacaatttctttgacaaatggttttgggaaaactggatatccacagaacacaygcaaaaagaaattgggcccttaccttacaccatgtacaaaaattaactccaaattgatcagagacctaaacataaaagttaaaactaga

SEQ ID NO: 904915 - DNA, 641 bp, Homo sapiens
aggcagtctgtgggatggaaaaaatacttgcaaatttaatatatgataagagattgatatytacaatacataaagaatttctgtaactggacaacaacaaaaaacaatcaacccaattaagaattggacaaaggactcaaacatatctccaacatatatatattcaaatgattaataagcgcatgaaaagattcttactgtccctagtcactagggaaaagcaaatcaaaacaaaatgagatatcacttcactctgttaagatgcctactgaagagcaaggtgcctggttaaaaacctatgtgtaatttttcaggccagactgtagacaacaacctgacaggcatcacaggggaaaattgccctctctacaccagatttaaggcagagccattttattacagtctctagagagagttgcaatcaagttctcagcctctcttgtctagtcatgctcatcacatatgtacactcctagccctggtgccttcattcttcaatctctttgtctgagaccttttgcaaaggttctcttcaagcccttctgccaaggcctcctaatgggagtaaggaggagaaaaatttgaaagcacttttccactctgactcagtacccagttcttttccacttctagctttccct

SEQ ID NO: 904916 - DNA, 585 bp, Homo sapiens
tttgtgagaatttgttacagcggcccataaaggtggggaaaaaggaagaaaggcatctatgtcaaagaagaaagcatgaactcacattctgtgcactttgcaaacaaatggtagctctttgtccaatagaaaacaataatgctgaagataataataggaacaactaataataataatgagcttaacacactttaaagtatttttaaagcttttaaatgatttgaagatgcagaatctcaatcattttctctttgtatatgtcagtaaattgacactgaagctagttacctctacccaatccaaaaattctgtagatagttaactggggggaggggaaagccaaacaatgccagacaatgcttagtaacatattaaaaaaaaaaaaaaaaaaaaaaacaaagctagccacacaaacacaagtaaactaaccaacgtgtctcggtgtattagtttcctagggctgccattctcaagttattttatacgcttgcattttacygtgctttctctgtatttcctttgctaatgaattctctcttcctttcatcccacttgccccctcctaactcctattcatgctttatt

SEQ ID NO: 904917 - DNA, 697 bp, Homo sapiens
catggattaaacagagcctcaccgtaacacacaactactttcatgaatgttagaaatagaatgatgacagggaaaaaaagggaagtcctagaagatatgcagtatggtattcaaaacgtgagctacctctggaaggggaggccagaacacatatgtagacacaagttacaggtaatgttctcattcttcatttggctgaggtcatgagtctttattatatttaatgctttatagctaaaatttatgttgtatatatttcttcataaaaattcaatattataggaaaagaaaatgctcaagaactattagacatcatgatgacagcttcctacataggatgttctgttactttccagctctctttgaatcctggctaaaatccatagcattactttaggggatgatacacaatgcaacacctacagatttgagccactgtctcattgtcttctgaacaatccacatcttccttctgccacacagcttcttagtgtcttatcatgctcccttctgcttcaagacattaacagatgatgttctctttcaccagccatgctttctgtcccccgaccctgagtcctcctggctttacttaattcctacttaacctttagatctcagctcaaccatatcttcctcagagtcatcctctctaacckcaccaagtcaattctcattaagtcctcttataatagca

SEQ ID NO: 904918 - DNA, 499 bp, Homo sapiens
  misc_feature 127: n = A,T,C or G
tgaatattcatgaagacaatcttggcacatgtatattgaacaaacatgtatgtaacatatgacctatgttcactttagggtggaggctgaacatttcaatgcattatagttaggccttatatatcanaaggtcttttcagggcgtgaaggcaggcaagtgcacagtctctgtaaactggtcaggagcagtccgtggtggggtggtcttctcatcaggaaaaagatactgaaatcagtttcttgtccaatcagagctgtacttttggctaatggaacagggcattagtcagcatccgggaacggatgagttataattgttttaatattgctgatcttgaggccagtgcttgtttagctaccagggaaaaagaaaaagtttgtggccattagaacatagtttatgctctaagtctaggggtgcatgactwaacctttgcctgacacggcctttttataatttcacatctgtcctgtttatactttcacatcttattgccac

SEQ ID NO: 904919 - DNA, 611 bp, Homo sapiens
gcgtgaaggcaggcaagtgcacagtctctgtaaactggtcaggagcagtccgtggtggggtggtcttctcatcaggaaaaagatactgaaatcagtttcttgtccaatcagagctgtacttttggctaatggaacagggcattagtcagcatccgggaacggatgagttataattgttttaatattgctgatcttgaggccagtgcttgtttagctaccagggaaaaagaaaaagtttgtggccattagaacatagtttatgctctaagtctaggggtgcatgacttaacctttgcctgacacggcctttttataatttcacatctgtcctgtttatactttcacatcttattgccacaaagagtctggtcagccttatgatctctattttaatattaatgctagtcagttgtgtctaaactccaaaaggaaagggtataacgaggcatgtctgacctcctgccatgtttttaaggtttttctggggtcctcttggccaagaggggggtctgttcagctggtcrggggcttaggattttattttactttacagtttgaagaatgattaaggctctacttataaaatatatgaaagggaagcactgtagaag

SEQ ID NO: 904920 - DNA, 568 bp, Homo sapiens
tgtgattggggcagggggagcactaagtgggagggacttcctgtctcmggtccctgccatcttgactgacatgctgcagcccttgccaaaacccatgggtcagaatgaaagtaaagtgccgttgaaaaccttgcaatccacctttaaaactgccgggtgtagtaaaacaattgcttgccccaaataaatgacttatcattgctgttggttgtctgcgtttctctttaattataggccctctttgaacgctcaaacacacagggcctttgtaagcttgaactccctgtctcacacacagtcctcccatacccatacactctctttcatttgcagagtataaacacccatctctcactcattcacataatgaatttcagctccttgtgtcccaatcaaggagaggcctcactggaattatgggcatctgagccatcttcatgttccaaggccccagggggcgcttccaagagtggatcctttatggggagaagataatgggcaaaaagtgctcttcactgatggaccagtcccagccttttctctccttggacaatagagttcttccctt

SEQ ID NO: 904921 - DNA, 581 bp, Homo sapiens
gaagtggaaaagatgacttcttaaggctgctctattaatwtcattttctataaaagacaatatagtaaaaactaggaattatgtataaggatttaaaaaggaaattttgagaaaaataaaatgtgagtaatgataatatttagataaaattctttttctgctcataaaaatttttgcactattttctgcatcgaatggtagctcagaaagtaatttgttttccctctaccgtctttaagggtatattattgtcaaattttaatttgaatttgtattacttattcaataaataatcttggatattcactctgtcagaaagcatggtatagactgggccaatacgctcacattatttaataaaagtgttatcaattaaggatctgaaacagtgcctgaacactgatagctgcttgataaatatttttaagttacgttaagaataaatgaacggaactaagtatttacagaaatatatggtcaatttctttttttttaaattttattattattatactttaagttttagggtacatgtgcaaaatgtgcaggtttgttacatatgtatacatgtgccatgttgg

SEQ ID NO: 904922 - DNA, 582 bp, Homo sapiens
ccttaaccatctgtgattgcagcccagtaggtcttaacctcattttacccagcccttattcaagactgagttactctggttcagacgcctctgacaaaactagataaagtgattgagaggcatgatgatggctgagatgctttagagaatgtggtctgggaggctgtctccggagatgacattgaagctaagaccgaaaagaggctgtcactgagatctggagggatggtcccaggaaggaataatggtgagaacacaggtcctgagctgtgtgagaagcagaaaggcagccagggtcactggactatagagagtttggggccagtgctaggaaataagtcagagagagaggccaaatctggcttgtacatgtggtggggaaaacactttgtgcttaagaagtaattaccactaaaaaaaacaagaaaacaaaaaaagatggtgaaaccccatctctgctaaaaataaaaaawttagccagctgtggtggcacagacctgtaatcccagcttctcgggaggcagaggctcaagaatcgcttgaacctgcaaggcggaggttgcgtgagccaagatggcgcca

SEQ ID NO: 904923 - DNA, 624 bp, Homo sapiens
caaagatctgcaggagaagcatggttacyggaggccaacacaatcactcaccgcttcccttggctggggtttggggttcccttggctccaggtggctccccggtgggccatcaccccattcaacttttcttcaatctctgtgggttcagttgttttcctgatcagtcccaatgtaagtaccaagatacttcagttgcagatgctgtattaactcacccctttcgttcctcttcatgagtgctacagaccacagctacttctaatcagccatcttcaccccctcagctatatttatatcagattaaaaatactttaagtttaaaacttaaagagaaaaaatatatgatgatatgagagtgaattcatcaagagagtatatcacttctaagtatgtatgtacccaacattggaacacataaatatataaagtaaacattaacagataagaaggaagagctagagtataatgcaataatagtagaggattcaataacccactttcagcaatagacagattgtccagtcagaaaatgattgagaaaacattaaacttaaactacacttgataccattagaacctaaaagacatatacagaatatccccaccgatagcagcagagtaca

SEQ ID NO: 904924 - DNA, 608 bp, Homo sapiens
tggggagactcaggcatggggagctgcaggtcccgagccctgccccacagggaggcagctaaggcccagcgagaaatcaagtgcagtgccctgctgggggacctggcgcaccctctgcagctgctggcctgggtgctaagcccctcactgcctggggccagcagggtcagctggccactccaagtgtggggcccgccaagcccacacccacccggaactctagctggccagcaagtgcagtacacagccctggttcccacccatgcctctccctccacacctccctgcaagccgagggagctggctctgaccttggccagcccagagaagggctcccacagtgcagcagcaggctgaagttctcctcaagcacggccagagtggacactgaggccgaggaggcaccgagagtgagcgagggctgcaagggctgccagcacactgtcacctctcacttcctccagaagctttgtccctaargggcacccacctatatgaagtgtctgttggccactactgggaggtacctcccagttaggctacatgggggtcagggacccacttgaggaggcagtctgtctgttctcagagctcaaacgccatgctgg

SEQ ID NO: 904925 - DNA, 594 bp, Homo sapiens
aaatgcttaatcaataacagtcactcatgtgtgacctgtagttcttccagagcactaggtagttaaacccttttgaccttctcttttaattaattctaacctttattaagaagaacctttctagcctgcaagctgcaaaattgcaactttcaagaaggaagtttaccctctttttgtcttcctgaaatcagagtgaagccaaaggcacaggaagcacagctggaatggggacataggaacgcgggggctcccatgagttgaccggacaactgagagatggcaacctagacctgggggtaagtcactgtctaatgtgctctacctctgctacttggctcagggcagattacaggaatgactagttggtattgcttctgacttcattgcttttacccagaagcaaatgtcactgaaacaggaaaaaataatttgggttcccataaggagcacctgtaattctacatagtgtgcacaattagaagtcaagaaaacttactgccaataatgagaatgtataatttttgccaagttgcttcttccacatgaacctcagtttcttcatcrctccaatgacaggctcttttaggacagtct

SEQ ID NO: 904926 - DNA, 611 bp, Homo sapiens
agttaccaaaaagataaagaggtgaagaaaaaccttctgcagcatgatttcttattcttatgagatgccttcttaaatttcctggaagtcaaacctaatgaaaatggtacttgaatttaatcagayacaagaaaaatgtgtacagaattgtgactgtacaccatgttatagagaaatacagacaaggaaaatattacattgagcatggagtacatgacctttagtaacagcatgggaaatttcctggttacatgaaactattcagacatatcaagaaaagccacgaatatagaatcaagttatactggagaaaagcattccatttctaggcctttaagataaacatttcattatctgaccacaacaaaagttggcaccagagaaaaatagttacaggagctgatgaaaaggttgaagaagagagttagcaccccaaccaagcaaaaagatacatgatttcaagagaagaaaaagaagacaataatgtataatttgcaaattacatgcagtaaagtagaacaaaagttgaatttctgagatacatgtgagaaatttcaaaaagaaacatttccaaattaaaaattaatacctcgtgcaatataactaaaagt

SEQ ID NO: 904927 - DNA, 612 bp, Homo sapiens
gcattgtaatgataataaactatgaycaagtggaatttatctcaggcatgcaaggttgttcaacatatgatatcaatcaatgttttatactacatcaatagaatgaacacacacacacaaacatatacatacagacacagaatcatctcaatatatgcagaaaggcatctaacagaatttaacactcttttataataaaaacactcatcaaactaggaatagaacagaacttaacatcttgaaaggcatttaccaaaaatcctattaccctcattgatgaaagactgaaagccttcttttaagatcagaaacaagattaaatgcccattatccccactacaacattacactggaagtcctagctaaaacaataagacaattgtatgaacaccactgcaatcaagatagagaatatttccatcacctttcaaattcccttgtgcccttttacaataaatccattaccacaaaagccatgtcctgacaaacactgatttattttctgtcctttaattttgcctttttcagagtgtcatataacttgaatcatacaggatgtagccttgagtttggcattatgactgggcaaaatgtatttaagattcatccaca

SEQ ID NO: 904928 - DNA, 565 bp, Homo sapiens
aaagaggcaagagcaccttagggaatacaattttagatcaaaatattttcaaagcactcgattccgagacagagctcagagaggcttccagagcctccagcctgagcctgcttggtggcagggcttgcctcatcacccttcactttcagagcctctgaaagttcatctccttgtaaaatcaacatgacagcaaatgtgtctgctctgactgggaaaccctgagtaacttgttggaacccaggtggccataaatctctgtcctgagttatggccggagatgcaggaaacacgtggatgtggaggtccagtgcaagtcattctgctatttttagctcccactttctctcagagaaaactgggggctgacagccaggggctcggaagccatcagaagagccacgctgggcaggacagctcccctggggcacccggccggcctctgcagacataaactgggacaccttccccaaccctaagccagacacttctgctgtacacacactgtatttcctttgcaggaaytactgcctcatgatagcatcttgtatactttatactcgcttct

SEQ ID NO: 904929 - DNA, 628 bp, Homo sapiens
aagtctaaaggtatttttacagaaatgaaaaaaaaaaccctaaaattcatatggaactagaaaagatctcaaatagccaaagcaatgttgaagaatgaagtgggagaaatcacacttcctgatttcaaattacgttacaaactccagtaaacaaaacagtttgatactggcataaaaataggcatatggatcaatagaaaagaataaaaagcccagaaataaacccaggtatacatagctaatggattcttgatgaggatgccaagaatacacaatggggacaggtcagtctcttaaataaatggtgttgggaaaactgaatatccacgtgcaaaataatgaaattgtatgctttcttatatgaaacacaaaaattaactcaaaatagattaatgatttgaatgtaatagctgaaaccatacaacttctagaagaaaacatgagggaaaagcttaagtgggacagcaaaggaaactatcaacagcgtaaaaagccaacttataggatggaagaaaatatttgcaaaccatatatctgataacgggttaatttccaaaatacataaagagattctaaactcaatagcaaaaacaraaacaaaacagaagcaaacaaaaaacctggttaa

SEQ ID NO: 904930 - DNA, 659 bp, Homo sapiens
caggcggtgccccacaatggaatttcaaagctcaacctaatgaaaattgctgmtgtaatctgttcactcatatctggacttctcaattctttaatgaaaccctcacaatcttgagaaggacacttgtcagaatgtgcactcccacccaccccccaacactagctgttatataattctttgtctctcaactagtatgctgctctttcactggtttctggctgtctctgagattaagactatattattcaagccattgctagccaagttcatgggattaattgcagatacactatttcagcatctgaattgccacctaggacttgggtaatgtgtgagatgcagaagaatttgatgaggttccttcctatctacctaaggtatggagagatgatccatgagttggaacaaagaatgaaaactgaaaaaggacacaatttaaaatcagctctagggctttaaaccagtattttctgtaccgcaatagtgaaaatgagaggtatgggaaaacaggaggtaatttccaggttgtttctaaaatacagttctatctgaacacaggatagaatattttatggaattggataacaaaatggccattactttaagacctaaagtatgatttcagtgcttggctcaaagaactggtaaaggtgccattt

SEQ ID NO: 904931 - DNA, 612 bp, Homo sapiens
accattaaacattctgggcagagcttgaagagcagagagatactaaatagaaacaatgacaaagagaatccgtataggaatttgcttattcctctgaacaagaaggttgctcttccctaatctgtataatcaacaataatgaatgatcagggaaagccagaagaggattttattagtctattttcttactattatgaagaaatacccaagactgggtaatttataaagaaaaagaggtttataatctgtatatcaacaataatgaaaaatcaaggaaagccagaagaggattgtattagtctattttcttactggtatgaagaaatacccaagactgggtaatttataaagaaaaagaggtttaatggactcacaatcccacaaggctggggaggcttcacaatcatggtggaaagggaagggggagcaaatgcacatcttacattacggcaggcaagagagcatgtgcaaaggaactgtcctttatagaaccatcggatctcatragactgacttactatcatgagaatagcacaggaaaacctgtccccacgattcagttacctcccacggggtccctctcacaacaaatggggattatgggaactacaa

SEQ ID NO: 904932 - DNA, 626 bp, Homo sapiens
gtattttgttatagcagctgagcagacccaagtgtgccacataaagctgatgccctgaaagtattgcacttttaatctaagagtgcactacgaaataaatttgatccctagccaagaaagacaacagatacatttatttgtttctgccagggttctgggtgaagaaatcaaagcaaagagttacccccgataatctaataccacagatctgtgcctcaaataggtttagagcttgaatttagtctactcaagtaggttaaaccttcaatcccaggttgagaaattaatataaagttgttacattaatccctaggccaataataccccaagctcctgactgaaaccaaacactctggagggacactctcacatgcaggccagaaggaatttgaatagaaggaaacaggctaaagaagagagctcatggcaaaaattacaaaccatacaaggaaggcattcaccacagtgagagtgagtaaaaacagcagaattacaacctaaaacttgagataayatgacgacagtctgaagcagaatataacagaagtatgcttaaactaagtaagacgtgaaagaattgaaaccctaaaaaggaataagaaaatatgaaaaaaaagagaaacatg

SEQ ID NO: 904933 - DNA, 612 bp, Homo sapiens
ggcctcccaaactgctgggattacaggtataagccactgtgccaggctcaaaattaggtttctattgctgcattaatatatacacagggccatctctttctcttctaattattttacaaatataaagagcatctgtaacacaatgaagctgttttccactttaggaaaagacagttttgaaaatgtgattaattatttgttgcaggttaggcttcatacagtcatattcccagtgcacattgtcctcaagatctccccagtttggcactgaagccttattgactctgtctctgaaagaggccttaaatgatcccccttccttctaatcctcactgaaattcccttaggttaagcccaatttatccaagggctatggtcttctacttgatgttctgtttttaatccttgatgctatccttctccttccatacaaacagtagatacacatattttcaaaacacagactttcttgtgttctctacttaaaaatctgtctagctttcagatacataaaggaaaagcaacctggttttaagagcatgcaatgyttcttcttaaatttccgatccctgtccttgtctgcagatttatcacttaacattcctctccttg

SEQ ID NO: 904934 - DNA, 609 bp, Homo sapiens
tatagatcaatttgaggagaacttatatctttacastattaagtctctcaatcaatgaacatgctatatcttcatttattgaatcttcctttattttactcaaaaatagttttatagtttttcatgtagaggtctctcatatctttaaatgagtttgttcctagttatttgatcatttaatgctattgcaaatgatatgttttttaattctatgttgtcagtgttgctgttatatataaataaaatctttttttgaacactgattctgtaacatagcaagctgataactaatttattaattttagtaatttatcctttgttctcttagattttctacatacatattcatatcatcactaatccgtaacttttgtttcattctttccaattcctaaatacttttttctgattttttttcttggactacagagtctagcacaactccaattcaatgctgaatagaaatgttagcaatttgtgtcctttaagacagtcaaaaatttttattttattagtatgtatgatacttgatatagattttcttaaagtactctttataaaaataatgaacactttttaaagtttccaatttgctggttatttctaggt

SEQ ID NO: 904935 - DNA, 639 bp, Homo sapiens
agtttgaatcagctagggttgccagaaattgaaaagggaaacacaagaaggaggatgccacagaggagtgagccccaaaatctgtgtataaactttctaaaatccttagctgacccctaaactgcacatatatgggagagatcctaggaaaattagcaaagagtaatggctagaaggctaaacgtgctaaagaggggattacaactgttgcctatgacagggaagatacagattgaattttgagttcctttaagtcagaagggcttgaggagaaccacaggctttccccagaaactccagaaggttatatcttagaaatatgtggactacgaaaaccaagggatttgccctagggaccaagattacatcaaatagacctgccttaacaatgtttaaagctaaatctccacaaattcaagagaacagatagtgatttaactatccactgaagcaaaaatcaatccttttcagaatatacaatttcagagacataatcccaagtcttaacaatgtatcaaccacraagtccaatatataatcaaatgtaaccagaaatgtgaggaaccaggaaaatgcaatgtattctgagatgataagatgttgaaattttagcaaacaaggactttaaagaagccatta

SEQ ID NO: 904936 - DNA, 652 bp, Homo sapiens
cactttctccaatctagtccacagtaacctgaggtctgtgatacagaaacatcctgctagatatgggttcataaatgatatagatgtgtacaaaccttagaagaggctaaaatgtgatgtttagaagaatttatctgtataatagaatattaagagagtcatcaattaatattaggagactcaccatagtccttgttttcagttcctcttataatctatctcttgagggtttagacagaacagctggtaatgataaacaaatactcaaaacatttcttttgacttccaagcaaaatattaaatgagtaaggtatatatttcctttgatattgatgtactgaatcttacaggctattaactaaagccctttgggaaatactttacctaatgctgttatagttttgtctgttcttattgttttattctgtttaaataaacttggatgtttgtttaattataactatattaattatatctatattaagttcctcctaactagttgtccacatttgataccgttgtagctatcttctaatacactaacttgagggtagatctgtttaaaggtgaagactgctataaaagagaatcttctctkttgtcttgagaatatctgaatgcttaatagctgttatgttcccttgtcacactg

SEQ ID NO: 904937 - DNA, 608 bp, Homo sapiens
tgtctctaaaacaaacgaaaaaaaaaatattcttttaaatgattaaatcgcctacttcttccaacttgtttacttgatgactttaataaaccaaattttttaacctgatcagatggtacttcttatgaaatgtgaataaattaagtgtgagttgatgacgtgccctgatgctgaatttacccatcagtatgtgtctgaacaagatgtaatgccacttttccagccttagaagtcaatgtttgattatgcagctgattccaatgacttctaaataaaagatggaaacaaacttcatcagttaaaaattagagtagtattactgagatgcttaccacatattcttgtgtataaagcactgaaaaaggtacaagtgggaggatgactttttataaatttttaatagttgatgtcatagtcattgaactttatattttgaccatgatattattttatttaaaaaatagattaggtaaactatgcataaagctagaaatgaaaagggaatctgtaaaccccaaggtcttatgaaaaggagtcataactctcagcaaatgtgtaagttaatatatatacatgtataggctrcaattacccaagcattacaaaga

SEQ ID NO: 904938 - DNA, 605 bp, Homo sapiens
aattactctactgattctttgaaaatcttagaggaataggaagaatcactaaaaaatgaaaaccattttccttggttactgctcaagctttttttctggctttgactgtgacttcaactgtggaaacggaagcttatttattggtataataaatgatccttgttacatttctgtgcttttctatttgggttccttttatgacctttaaaaaaattgaaatatttttctttgggtgctatagcagcagaaagttcttagaagaacttaagatataattatttacagaaatgcttatggaaataagtctgccataaatgtgggtagaataaaggggatgcttgttctaatatgttagaatgatactagtattaagtgggacacccaccttcaatgatccctcaaagacacaaccagaacagggaagagtaggtttgattgagaatctctaaggcttgtttatttgatctctgtacttgtactagccattttctagagtgaaccttttgataattccacagtgttctccttttctgaatggtgaatctatttcaagccatcagagtccctttgctkcctttttaaagccttcctaagaatatttatat

SEQ ID NO: 904939 - DNA, 648 bp, Homo sapiens
acaagtgctgttttgttacatggatatattttgtagtgatgaaatctgggcttttagtgtacccatgacctgaatattgtagattgtacccattaactaatttctcatccttcaccccttccaacccttctgagtctttaatgtctattattccacactctatgtccatgtgtatacattatttaactcccacttataagtgagaacatgtatttgactttctgtttttgagttatttaacttaggataatggcctccagttccatccatgttgctgcaaaagacaggattttattcttttttatggctgagtagtattctatggtgcatatgtaccacattttctttatccaatcatccatcgatggatatttaggttgattccaaatctttgctattgtgaatagggctgcgattgtgatgcaagtgtatctggtttcaaagcaggaaaggaatacaaacttttggcaacttagcatgggttaatctgtttgaaggggcaggaaagaaatggggcacaggaaagatgtgcttaattggggagaggaggtaagaaaagaagcagaggatggagagctacmtgggaggagaggtctgggagaagccacaggggagcctcacagacaccatggcaaataatgaggaagg

SEQ ID NO: 904940 - DNA, 566 bp, Homo sapiens
acaggcctaaaaggaataaatatttaggtcatactgcctttggtayagtaggtagatagccaggcaccagcagggcaggagagggtcccctcagcctcaccaggaatgtcagttgacatcaggtgatggtcaggcagttgtcacactgcccctctaaaataataattggttgcagccagggccaggaaaagacagtttgccaatggataaaaatacctgtagctggtgatcagcagcttcccaataagatctcaggaactaagtgagtggccttgagcatgcaaattaagaggcaaaatggtggagtttaactggtatatgaccttcccggggcatttcactggaaaagggaaaaatgcctcagataagcatgtgtacaacatcagtaaacacactgtgcatgctcacctcccaagtgctagcaggccaccgtacacacaggcagtccaccctaagggaagaatgaagggaaaggggactcttgatgctggaagtaggccagcatacaaaaactgaagtccaagatcaaatggggcacttgatctccaagatgcccacttgggcct

SEQ ID NO: 904941 - DNA, 584 bp, Homo sapiens
ctcttctctgctctaacaggagaaacagaggcaaagtgttgtaacagtactttttctagttaaattatctggagccgctagcctacggtaggtgttgaaaggcactgaatcaaataagagagtgaaatattaattgttttttaattttaattttattttagattcatgagacacatatacaggtttgttacatgagtatattgcatgatgctgaggttttggcttctgattatcctgtcgtccatgtagtgaacatagtatttgatagtcagctttttgacccctgccctcctccctcccctcttttggaatccccagtgtctattgtttccatctttgtgtctgtgtgtacccaatgtttagctcctacttataactgagaacatgtggtattttgttttgttttttctaggttaatttgcctaggataatggccttcagctgcatccatgttgctgcaaaggacgtgatgttattcttttcgtaactgcatagtattccatggtgcctatgtaccayattttcgttatccagtgcaccattgatgagcacctgggttgatcccctgtctttgctgttgtgaa

SEQ ID NO: 904942 - DNA, 624 bp, Homo sapiens
gccaacagtctggcctttaagggtattagaatctgactgatgctgctatagtttgcaggaagcccttgactttgcagatmcaaaaatctactggacgttgatttgtttctaagggactgacacgtgataacccaatttcaaatcattaacgtgtaaaccatgctttcaaagcatttctgtacaaagaaagaattgtttctgttaactttgtttaagcccaagatagcttgggtgtataaattaggtctaggggaagaaatggtgataaggaattttcttcctggtccccatgatattagcatttacttcttttccccttcaggtgcagtgcagattatcaagaagtgagcaggtaaacactacatttttttctctttgaggttttttttactatatttcaccaatactatacacttatattaatattgtctttctataatacaattactatttcagcttctcattagtcagcttcagctatttcactctaaagcattagtttacacttcattgtgttacacctccagtgatataacagaactgagaacatgaggaaatggtccttgtccaggctctgcctccgattgccatgctgccttggacaaataatttaatctttctgag

SEQ ID NO: 904943 - DNA, 612 bp, Homo sapiens
cgtaaagtcctagctttgtctgtgtgcttgtttttgtttcctttcaggacacccggttcctagaatctcaaagggaagggagggtctctccattttcttcccrtctgcctccatataattttttggatttgattagctgagtagagggaataacattcaagtcctaaatgcaaatggatgttcctgggagggagaggggagcaatgaatgacaccacattggatcaattggggtttcagtaggagacacataatgggaggaagatgtgtttataaagggatgttttcataggtgtgggagggtgtaggaagaccatgtgagtggtgcaggaacccagggcagttagtggctcgctgtcaccccccttaggcctggagacaagaagggaaggagaggcggccataattggggaagagaagaagtcacatggagtaggtcaccttgagaagagcagtgaccaaggctacagacagccccagataacctcaccagtgtggagccaaggaagcagatacttagatcttattttccttttgcccttcaatctcctgccaaggatttccataggctgaagccaaccagcagccagaaggcacaggagtgcactgatgt

SEQ ID NO: 904944 - DNA, 587 bp, Homo sapiens
atctagagaaactttccaccgtgtctgtctattttaagttgtttrtttttctttgagaacccaaacaagaaataccattagtgggagcaccaattatgaagccccagtgaagaaaaagggattcaataaaataatagtcattctgaacatttacttccattagaccactgtctctccaaactgtgttctttaattgaggtcaaataagagatctgttgttttagttagcccaatgagcaggattaataaaaaataaaaagtagataaacaagacctgaatacttttttgaatggctgatcatagaattcagtgtctttactggtaagtaagaggacaatgctttgactatggatcggtctccttctttataaaaaaaaatgcactcattaaatcattcacaaaatatataaagagcactgccacacttctcataccaaggaatgggcacagaatatattttttaattactcagactgtgtctcagggagtacaccaataggaaagaaaactgacaagagaaaaattaagtcaaaagtagaacttctaaaagtgttttaataaaggtataggcaggcttatacaggag

SEQ ID NO: 904945 - DNA, 701 bp, Homo sapiens
caaagaagaatggctacaaagagacagaatgaggcctattcataagaaaacagaaaactgaaaaaacaaaaaacatagagctgcacaagtctgggaaataatgagcagactgttactcctgagagctaggtcaacccctggacttctgatgtctaagccagcaatccccatgtcttactgaagcacacggacgttgggtttctaccacttacaacctagttttaactatggcagccttaaagaatgagaaggattttgaggggaaggatacttgcaaaagagggaagaaaaggagtaaagagaagacagcagagtgctcagggccattccagagaacaaaacaccttgctttagcatcagtgtaagttggtggggtggaggggtaggagtgacagctgaagaaacaaaagtcagggggtgacactggaagttgcaagttgagtcctcaggaaatgtcactgttaatactgagtgtgtgaaaatggaggttagactaagacataacccagaggacttaggaatgttgttggaattcagtgatgagcccatagcattttcatccacaaaacgcttttttaatgtattttgtatttacatgcctttagaacaggcacacacaattttcagcawtccctaacactcatcttttcacacacagtctaccttctccatgtatggtgtctactgtccctggaaaaaac

SEQ ID NO: 904946 - DNA, 569 bp, Homo sapiens
tcattctatggtacatatcaaacaattcaactttttattggaatgtcgtgactttttctctgctttttgggagcacttccagcatcactagtggcatttcatatgagtccttttggtgttattctaggtttacggtatggcgctaaacacggggaaatatacctaaggaatttttattgcaataaacaatttactggagagaggaactgctcaagcagagatgattagcgtcacattgtgttttaagtagatacgtgcaacacttgagctcagcagaacagcaacaggaggtagctacaaaattgttacagtagtacagtatggactacagttaattttatgcatttatgatttaatactgtatctttatgtttgtttacgtttctctcaactgtgaatattgccatgtaaggtcttgtgtttgtatgccaaagttttgttaaattttaactttttataatagatttgtatatattttatggtattaaatgataaaacattagtatctacatatattttgtgcattcatgacatacataacygtttcttttttttaaatatatttttgg

SEQ ID NO: 904947 - DNA, 652 bp, Homo sapiens
gagatgctaatgcccaaagaaagactacttctaaaagagtcatggtcctagtgaattggaagctgaagctgcctctggccattctgagctccttatgtagctggaccattgtatagaaaaggggtcactgcattcagtgaggtgactggtcctgattaccaggggataatgaggttatcccctaacgaattcaggcccttcataaatcaagactgtggttaatttttcagtaaggaacaccatccagttgagaaatgggcagaggatagggcaaacaaggaatagtggtggaagaaggctggctgctatgctcatcaccttaggtcttatgctcgtatgcgaagccacaggaactgttatggaaatgccaggtgttcggtctaggtcctgtcattgactgctcagaaagccaatcactgaaacaatgagttttgccaggggataaggctttgttatattgcaggtgacatcggccgggaagatggcagccaagcctcaactctgttctttctaaccagctaaaatggggttgggggtgtatatagcaggaaggaatttagaaaacagaaattaagaaagagtaaggaagcagtcaggaggaataatgggtctgrcatctcaccgatctggtgagtttcagtttccttgatac

SEQ ID NO: 904948 - DNA, 654 bp, Homo sapiens
aagagtaaggaagcagtcaggaggaataatgggtctggcatctcaccgatctggtgagtttcagtttccttgatactatctgggaagcctgagggtcgatttcctgagaaaggaaagtttgtcggataagacaaatgtaagtttcaagctttaataccaggagggccaatttctatgtttattcaagaaccataaacatcattctatgagacaatttggttggtttcagaaatataacagttaaattttatgttaactagttatctcctcactttttactctcatattttcatgaaaaaagatcgttttatgaaaaccatcttttggtggttgctcatgttttgggtttctgttgggaagttgactgaactgatatcatttcatcctgttttggcatttttgcaatttttgaattaaaaataacagtaaatgatgggggagggttcctgggggagtgttgctgggggagggatggactgtgctgaatgtcttctgtttcccttccagatccacttttcacccttccctaccctgctttatgccccaggaggctcattctgttgggtttcrtcagtgggatcccttgtgctctggttccaattgtgtttagacaatggagcaggaagggaggcagaagcagtagatcagacagcg

SEQ ID NO: 904949 - DNA, 617 bp, Homo sapiens
tcataagcaagggagaaataaaatcctttacagacaagcaaatgctgagagattttgtcaacactaggcctgccctaaaagagctcctgaaggaagcactgaacatggaaaggaaaaaccagtaccagccactgcaaaacattccaaattgtaacgaccattgacactgtgaagaaactgtatcaagcaatgggcaaaataaccagctagcatcataatgacaggatcaaattcacacataacaatattaatcttaaatgtaaatgggctaaatgccccaattaaaaggcacagactggcaaattggatgaagagtcaagacccatcagtgtgctgtattcaggagacctatctcatgtgcaaaaacacacataggctcaaaataaagggatggaggactatttaccacgcaaatggaaagcaaaaaaagcaggggttgcaatcctagtctctgataaaacagacttgaagccaacaaagatcaaaaacgacaaagaagkgcattacataatggtaaagggatcaatgcagcaagaagagctaactatcctaaatacttatgcacccaatacaggagcatccagattcataaagcaaggtgttagagacctacaaag

SEQ ID NO: 904950 - DNA, 617 bp, Homo sapiens
tcataagcaagggagaaataaaatcctttacagacaagcaaatgctgagagattttgtcaacactaggcctgccctaaaagagctcctgaaggaagcactgaacatggaaaggaaaaaccagtaccagccactgcaaaacattccaaattgtaacgaccattgacactgtgaagaaactgtatcaagcaatgggcaaaataaccagctagcatcataatgacaggatcaaattcacacataacaatattaatcttaaatgtaaatgggctaaatgccccaattaaaaggcacagactggcaaattggatgaagagtcaagacccatcagtgtgctgtattcaggagacctatctcatgtgcaaaaacacacataggctcaaaataaagggatggaggactatttaccacgcaaatggaaagcaaaaaaagcaggggttgcaatcctagtctctgataaaacagacttgaagccaacaaagatcaaaaacgacaaagaagtgcattacataatggtaaagggatcaatgcagcaagaagagctaactatcctaaatayttatgcacccaatacaggagcatccagattcataaagcaaggtgttagagacctacaaag

SEQ ID NO: 904951 - DNA, 624 bp, Homo sapiens
aactggttagctactataattttctatttgtatctattcaaatctcactgcttctgcaagtctcctaacaaaaagttttgccaaaatttattttgccattgaaagtaatggcaaaagccrcaattttgcacaaaccaagaagccttctctgcttatcttccagtccaagattatctcctcttcctagtattcttattttgtgacttttatagaatcacttggttggtctgggtttatgtttaaagttcctgactacaggtgaaatactcttggagaaagagacctaaacttctagcgtaacgctgagacacatcttcatagaatagaattgttattttatgtccccaattaaagggattttatttttgtggatgttttcttgggttgagtgttctactgatttattgaatggtctactgatttctcattatgtgaaaactccagagtcctaggtgtgtttcttccaagagcctaattaattcaggctgctaaggctgccacatggactctggtttaaagactaggctatttggtgagcaattctaagtcctattttggaacactaaggtcatatacctttggaatgccaaattacaagatgctttgaaggaacttttagggtaa

SEQ ID NO: 904952 - DNA, 499 bp, Homo sapiens
tgaggaagcatctgttccatgcctctcgcctagcttcttctggtggtttgctgacagtctttggtgtttcctgacttggtttcccagtctctgccttcatcttcacatgggcattctccctgcatgtctgtcttggtgtccaaatttccccttctatttattttttgagatggagtctcgttctgtctcctaggctggagtgcaatggcatgatctcagctcactgcaaactccgtctcccgggttcaagagattcttctgcctcagcctcccaagtagctgggattacaggtgcatgccaccacgctcagctaatttttgtatttttagtagagatggtgtttcaccatgttggtcaggctggtctcgaactcctgaccttgtggtccgccccctctcggcctcccaaagtgctgggattacaggcrtgagccactgcacccggcctcaaatttccccttcttataatgacacaagttatactggattaggggctacc

SEQ ID NO: 904953 - DNA, 657 bp, Homo sapiens
aaaaggtataaaactgaatctatttctttgggttgccagcttttaaccaatgacctgtcttttcatgccctagtaacactgtgttttaaatatttcagctttaaaatatgtttcataatctggggccaggagcaatggctcagccctgtaatcccaacactttgggaaccctaggggggcggatcacttgacgtcaggaggtcaagaccagcctgggcaacatggcaaaaccccatctctactaaaagtacaaaaattagccaagacatggggcgaaaccccatctctactaaaaatacaaaaattagccaaggctgaggctgaggcaggagaatcacttgaaccttggaggcggaggttgcactgagctgagatcttgctgctgcgctccagcctgggcgacagagacaaaaatgaataaatacaataataaaatctgtatgccttgttccttttattattcttattttcataatgattttggctattctggcatgtttaactttccttttcaattttcaaatcaagttatttaatccccatccccacccctcacagaaaagaaggtgaaggaggaggaagtggagaaggaagaagactcctgttattaattctaactracttgcatgaagtgtagagattaatttaggaatgagt

SEQ ID NO: 904954 - DNA, 676 bp, Homo sapiens
ggatgcaaggctggttcaacatatgcaaatcaataaacataatccatcacataaacagaaccaatgccaaaaacaacatgattatctcaatagatgcagaaaaggtcttcaataaaaytcaacatcccttcatgctaaaaactaaattaactaggtattggtgggatgcatcgcaaaataataagagctatttatgacaaacccacagccaatatcatactgaatgggcaaaagctgaaagcattccttttgaaaaccagcacaaggcaaggatgccctctctcaccacccctattcaacatagtattgaaagttctggccagggcaatcaggcaagagaaagaaataaaggtattcaaataggaagacaggaagtcaaatcgtctctgtttgcagatgacatgattgtatatttagaaaaccccatagtctcagcccaaaatctccttaagctgataagcaacttcagaaaagtctcaggatacaaaatcaatgtgcaaaaatcacaagcattcctatacaccaataacagacagagagccaaatcatgagtcaattcccgttcacaattgctactaagagaaaaaaatacctaggaatacaactcataaggaatgtgaaggacctcttccaggagaactacaaaccactgtttaaggaaataagagaggtcaca

SEQ ID NO: 904955 - DNA, 632 bp, Homo sapiens
gtaagttgatttttacatcttgtactttacaaaggaactatatatttgaataaaatttactwtttatttgagtattgccatgtattcatactatgatacaattgccttgaataaataccttactcccagtaagtaaataaaccctaaatgttaaaaatctgaacaatttaaacatggctagaaaatgcaccttctatattattcctaaaataaaagaaataaaggctctaaaatgcaatattgaattcccccaaccatgctgatgtaggtaaactgtatttcagatattgggaaatagcctcataaactgagaagaacacggcttttagattcaagtacatatggattcaacttccacctttacccctacagctctgtgaccagtgggaagttatgtagctttgttcagccttggtttcttcatctgcgaaattaggaaaataatactccttcaaaagtgagagagcgtaacctgcagtggatgaatggataaacaaaatgtgctatgtacatataatggaatattattcagccttaaaaaggaaggaaattctgacacacgctataacatggattaaccttgagaacattatgctaagtgaaataaaccagtcatcaatagacagatactg

SEQ ID NO: 904956 - DNA, 632 bp, Homo sapiens
gtaagttgatttttacatcttgtactttacaaaggaactatatatttgaataaaatttactttttatttgagtattgccatgtattcatactaygatacaattgccttgaataaataccttactcccagtaagtaaataaaccctaaatgttaaaaatctgaacaatttaaacatggctagaaaatgcaccttctatattattcctaaaataaaagaaataaaggctctaaaatgcaatattgaattcccccaaccatgctgatgtaggtaaactgtatttcagatattgggaaatagcctcataaactgagaagaacacggcttttagattcaagtacatatggattcaacttccacctttacccctacagctctgtgaccagtgggaagttatgtagctttgttcagccttggtttcttcatctgcgaaattaggaaaataatactccttcaaaagtgagagagcgtaacctgcagtggatgaatggataaacaaaatgtgctatgtacatataatggaatattattcagccttaaaaaggaaggaaattctgacacacgctataacatggattaaccttgagaacattatgctaagtgaaataaaccagtcatcaatagacagatactg

SEQ ID NO: 904957 - DNA, 637 bp, Homo sapiens
actgtctgtgcaacattgtacctgcagtcaacaatactgtactgtacctctaaaaacttgttcagggggtatatctcacattaaatattcttaccacaattaaaaaaaaacagaaagaaaagaaagagagctacctatatccaagtttgatcattaaaatatctatttgctttcctggattttgcaccatttgattcttaaatattccttcttgctatagcattacatagcaatatgaaaattccctaaatacagtagcatctaggattcataccttgtgttactctaccaaactatttttgaaggggtgggctatatcccacccctgaaacctcctgctaagactctggtagaaaacaaattgtttcatgcaccaggagcccagagttattttgggcctgccacttaccagcaatgtggtcttgtgtgggtcatttaacatctctggtattttcttttgttatctataagtctatgaggctgggctaaataatctgccagactgttcctgccscaatattctctgattcaacatatgaactgataacaaggatttccaaattaaaacaaattcagtgttgcatccaattcggaatgcactgacgtgatgttaccagatttagcatatctgtggaga

SEQ ID NO: 904958 - DNA, 671 bp, Homo sapiens
acagattataccatttttaagtgtagaatttagtggtagtaagtatagagagaaycttaaaagcagcaagagaaaagtgacttctcatgtgcaagggagcctctagaagattatcagtggatatttcagcagaaaccctgcaggccagaaggtggtgggatgatacattgaaagtactgaaagagtaaagcctgccaactgagaatactatatttgacaaaactgtccttcaaaagtgaaggagaaattaagacattcccagataaataaaagctgaaggagtttattaccactagacctgaccaataagaaataataaaggggccaggcacagtggctcatgtctgtaatcccagcactttcgggggccgaggcaggtggatcacctgaggtcaggtgttcaagaccagcttgaccaacatggcgaaaccccatctctaataaaaatacaaaaattagctgggtgtggtggcacgcacctgtaatcctagctactcaggaggctgaggcaggagaatcacttgtacccgggaggtagaggttgcagtgagctgagatcacaccactgcactccagtctgggcaacggagcgagacttcatctcaaaaaaaaaaaaagaaacaataaagggagtccttcaagttgatatgaagggatactagacagttgct

SEQ ID NO: 904959 - DNA, 665 bp, Homo sapiens
acagattataccatttttaagtgtagaatttagtggtagtaagtatagagagaaycttaaaagcagcaagagaaaagtgacttctcatgtgcaagggagcctctagaagattatcagtggatatttcagcagaaaccctgcaggccagaaggtggtgggatgatacattgaaagtactgaaagagtaaagcctgccaactgagaatactatatttgacaaaactgtccttcaaaagtgaaggagaaattaagacattcccagataaataaaagctgaaggagtttattaccactagacctgaccaataagaaataataaaggggccgggcacagtggctcatgtctgtaatcccagcactttcgggagccgaggcaggtggatcacctgaggtcaggtgttcaagaccagcttgaccaacatggcgaaaccccatctctaataaaaatacaaaaattagctgggtgtggtggcacgcacctgtaatcctagctactcaggaggctgaggcaggagaatcacttgtacccgggaggtagaggttgcagtgagctgagatcacaccactgcactccagtctgggcaacggagcgagacttcatctcaaaaaaaaaaaaagaaacaataaagggagtccttcaagttgatatgaagggatactagaca

SEQ ID NO: 904960 - DNA, 627 bp, Homo sapiens
gggtggatgaggctgtccattgtaccatttgtttgaattctcaggcatggtttggcagtgcaagaactctgtaacgttaacaaattcaataaaaagtaaatatatggaaaaaaaagtatagacaaaatagrttttaagtaaaaaactattacaagagagggttctgggaagaaagtggagtaggaagcactgggaattcatctccccacctagaaaataatcacactggcagaatctgcctgatataactattttggaactctagactctatcaaaggaggcttgtaacctccaaatgaaggcttaaactataatttttacttaattttggtcaatttcagctcttagctcagcagtggctacccaatccccatgccccagcttcacggcaagaagctttgcatgtgttcctgaagcagcttgtaccaagcttgtgggaacaatcatgggcaataagcactctgtcctccaagtgttagcatctgcgttctggttgttgattgctacttttgattatggaagggcaaacacagaggccggcagccattattgctcacaactccccactccactgctgcaagcccttaccagactgaagcaacttctaggagatagaaaaggccagaa

SEQ ID NO: 904961 - DNA, 619 bp, Homo sapiens
tacatgctccatttgaaagtcattccttatggcatttatatatagttttaaccattatatttttggtttatgtatatttttcagtacatgtatgctttcaggtattgtttctaatttctaggaaytgaaccaaatttaacattgaaagaggttaggttttaccttgtttcttgtttagaattggtgatcctgacttttaataatcgccattctgactggtgtgagatggcatctcactgtggttttgatttgcatttctctaatgaccagtgatgataagctttttttcatatatttgttggctgcataaatgtcttattttgagaagtgtctgtttatatcctttgcccactttttgatggggttgtttttttcttgtacatttatttaagatccttgtagattctggatattacatctttgtcagatgagtagattgaaaaaattttctcccattctgtaggttgcctgttcactctgatgctggtttcttttgctgtgcagaagctctttagtttaattagatcccatttgtcaattttggcttttgttgcaattgtttttagtgatttagtcatgaagtctttgcccatgcctatgtcctgaatggtattgttta

SEQ ID NO: 904962 - DNA, 643 bp, Homo sapiens
aactgacatatggaggcaaacaggataaccagggggtcaaaaagctgacataaaagaaacagtggaagaaacacagaatcatagaaaatataaggaaaaatgtaacttacttcattgtttaaagggctgtcacatggagcaggagaaatggatttatttcctgagggcaatacaaacctaatgaatattactagaaaactggtttcctctcattcaaaagagcctcctaataactggaattgtccaataatgaaaccagtatgctttgcattatcaagctttctgcttcctgaagtatttgtgcagattcaatgtctaccttctaggaatactgtaaaaaagtattactggtaagtggactggagacctgcagggtccttgcttacacaaggatctgaatctttagaattgagctataacaacactgaacagatgttaaaacagctgacattgatagacttattttaacaaatgcaatattgttatttaaatctataatcctttactaattaataaaaaataaatgaaggtaaaataacttatcctttgtgtttgsttgcaaaaattttaaattatgttaatcctttatttctttccattaacaagacagaattctgtgatatgtcctttggaaaaaatgtta

SEQ ID NO: 904963 - DNA, 614 bp, Homo sapiens
attgctcttgtatctggaaactttgctgcattcttttatcagttgtaggagctttctggaggagtctttggggttttcaaggtaaatgatcacatcgtcagcagacagtgacaatttgatttcctctttaccgrtttggatgtcctttatttctttctcttgtctgactgctctggctaagacttccagtagtctgttgaagaggaatggtgatagtgggcatccttgtcttattccagttctcagagggggtgctttcaacttctccccattcagaattatgttggctgtgggtttgtgtatgagagcaatatgatgatagtcctatctctttgagctcagagagcggaccaagtgatatctagtaattgattaattcagcaacacattcattcataaaaacttttagtaagggtgtattttgtgcaatctgctggggtatacaagatggattaaggcaatctttgccctgacgaactcacagtcctatagaggagacagatatttaaacagaaatattacaggacaatatgatagctactgagaaatgaacagaatgctctgggaacacaatgacggaatcactcattctgtctgacagtcaaagtagccac

SEQ ID NO: 904964 - DNA, 638 bp, Homo sapiens
tcttctccatcaccctggtccaygtcaccatcatctctcacctgggtaatcacggttacctcctcactgggcttagagctactacctgctcctcctccagccctttctcgtcacagcagcttgaataatcctttcaaaacggaattggagatctgttctatgccaaaactgcccattagcgacacatctcacccaagccagcgtcctcgaagtgacccaggggtcacaactcatgttctcttagacctcatctcctctcctctccatcccccttccctgttcactctgccccagccccaccatgaaatgtagaccggccttttccagctcttgaatctgggcccatttaggaagcatgtctaccacaaaactaaaagccaccatcctcagtgaggttgctcctgttttcatgattctccccatggttgcaagatggctgccatgactccaagaataacattacactgcagcccccaatgtaagaggcaagaaggggcgctccccatatccacctctctctcctcatcagagaaggaaatccttcccagaagctttcctatgactttcatcatccaaacccagcacacatgaccacctttagtttcaagggagcctgggaaagggcatgttagggtctt

SEQ ID NO: 904965 - DNA, 638 bp, Homo sapiens
acctgaacatcagccgtagcctctcccttgctttacttttatatccagtccctcctcaagttagattgcttttaattccttatcatctctcctataagctccttctagtggccctggttgcttytgccttgggtaggtcctgatcttgtctacactggacttctagcacttcactgagcagcccattcatcaggtggctgccagaatactctttccaaatgcaaatttcttcacattaggttcctactgaaggccttttatgagctctcctttacccataggagacattttaaagtcttcagagtggcattcagagctgtccacaatctggcccctgcatctctccagcctcagatctttacaccctcctagcatgcctcactccagctatacctgaccacttggagtgcttggaatcctgttttgcttcatgcctttcactttcactcacattagaattctctcccaccctttttgggggaggatctattaataattatctttcaatatttagttcaacaaacctggaagcatcacattacctgacttcaaagtatactacagggctacaataaccaaaacagcgtggtactggtacagaaacaggcacatagaccaatggaacagataagagagac

SEQ ID NO: 904966 - DNA, 677 bp, Homo sapiens
gtttttaaaattatttttaattttgtagagactgggtctctgttacccaggctgtagagccgtggctattcacaggtgtgatcatagcacattgcggcctcaaactcctaggttcaagtgatcctcctgcctcagcctcccaagtagctgggattaccacacctggctcagtttgtatacttttaattaaaatacatttttttttgatatggtgccccctctgtcacccaggctggagtgcagtggcacaatctcggctcactggaacctccacctcccaggctcaggtgatcctcccacctcagcttcctcaatagctaggatcacaggcacatgccactatgcccagctaatcttttgtatttttggtagagatggggtttccccatgttgcccaggctggtcacaaactcctgagctaaagtaatccacccaacacagcctcccaaagtgctggaattactggtgtgagccaatgtatctaatatattaaagtagttttaatatccatccctttagacagccaaccaatatttattgaatttctgctaagtgctaagccctgtgcaaatactggggatacaatgatgaagaaaacartatcctgaaactcgtagtctgtggaagatacagctatgaacaagtaagccactagagctattaggttaaatttagga

SEQ ID NO: 904967 - DNA, 643 bp, Homo sapiens
tagtgggcatgaatcactgcccccagcctgttttcattttaataataacacatgcttattgtatggtttcatagatgaaataaaaattatgtcctcccctataccccaccattactcatgcctgtttccacttccaaggtcagctctatgaatcattttgagttaactgctttttgaaaagttttagtagctggttgaatagaaacttcctttaccagtatgagaatttttaaatttctttcctaagaacatactaaactgtaatctatttgaaaactgttaatctgattaattttagcacagttgttgctggtagagaattcttctgaaaagccagatttctttgaagacaatgtggtggatttatgccagttcacaactctgggtggagtataccacttggatattttggagcttcctccacagtgtaaaccagtgaagggatggatgattgtggaagtaggttgattcttgaatcaaaacttataagtaaaataattgctcacgcttttactttatttcatattatctaacatctaataagctttaaccytattaaacacaaaggaaaaaatgtaattttaaactgtcttaaatgtattggtattgaaaatttgaatcagatgctaaaagaatctaaaat

SEQ ID NO: 904968 - DNA, 588 bp, Homo sapiens
acttctacttgtcttcattcaagacttaccttaaattttacctccagagaatcctccgtctcctcagattaaatcagatgtccctccactatgctcttgtcattctgtttaattattataattgttgccttaaacactaaattatgatcttgagggcaagaatttcttgagagacttcatatttaagcagagagcatagagctcatgataagggctcaatgaatgtttattgaatgaaggaaggaagaagtgaatgaatggatgtttaaatgatgaaaagcaggccctgacttgggtctgatttgttgtgagcagcctacataaattgggcaatccaaccactatgctcctcaaagttatcctgtcttttgagagatacttaagatcctcttcattacagttgggtgtgctggagatcacttctgctacctttacggattctgcaagctggttactggggattcttgggactctctcctctgcagttctgatcctccacccctttagtgatcmggcatagtatgtggtaataggaagactcttgctgtcactacttcagccttaggaaaggtgtgctcctcccattcc

SEQ ID NO: 904969 - DNA, 502 bp, Homo sapiens
tgtcttccttgctgtgttcaagaagccaagaatttggttccattattgttgccattttacacataaatataggcacagagatgtgaaaacatttgcagaagatcatgcagttgcaggtaggggagcaagatcagaactcaaacactctggtttgaattcgtgattttcaccaccatgtgacctgactacatcagaggcttttgtgagaattaaaatttcaaactatatgtaaaatactaagaacaagtcctgcccttagtgagcagctatcaaagaataaaacaaagaaaactgaaattaaaggagacccaatccaagtttattaacctgtcggggaaaggaaaacacaccatgaagccatttattgactagttgcactgagggacaaaacgctgatyaagcgctagaaaacagaggagggtgtgtgtgtgtatgtgtgtgtgtgtgtgtgtgagctcatggtgttatcttaaataaagattgaatactagtggcctgaaaa

SEQ ID NO: 904970 - DNA, 620 bp, Homo sapiens
taagcttgttgcaaaccagaaacttcaaggatcccatgcaaacaatattactaccacttgcagcacgtactcatgcaggtatctaaagttagtactaagaygattaaaaacagccaatgctgctgtaattatattttctgaatccctagttgggacataagggccaatacattatagcacaatgaagctactgaaacagaatatttgacatcgaggctgtcttggaaaattgggaatataccaccttgcaataatagtaataataaaaaataacatttcttgaaaacttacattttgcaggagaatttcctaagtgctttacttgtattaatacatcaatcctcaatataaccctatgatgtgggtactactattgtccatattttacagagggaaaactgaggcactgagttgtcagtaacttgcctgagatcccacagctagtaactatgtaagtagagtcaaattgaagcttaggccatgctgaaccagaacccttgctcttaaccatcaatactctactacctctctcccattcttggcagcaaaatctctgttttaaccctcctaggaggatacttgaacttcaaatactatttccagaaatacaaatacatcaa

SEQ ID NO: 904971 - DNA, 658 bp, Homo sapiens
tcctagctactcttttcttgtctattctaacataaggcagaaatagagggaaggaagaaaaaaaggaaggagagatgaagagagggagagagagggaggtcataagaagctgagctcgcttctccaggcatcacaggctgcactaggtgatgctggacattgaaaacacacagggacaaggacacacacacacacacacacacacacacacacacacacgactcatggggacccgggaatctgtgaccatggtccccatggcaataaggagtggaagatgtttcaagtgtttgtgcagcaactgctacttctgattttctcagtgagggtggctggcagtgaggaggtccaggagctcctaggcttctatggactatgctgatggagggcctcactggctcctaatacacatggaattgagagaaaacaaagttaagtagaacataaggattccaaaaaagaatagccgtaccctgccccaccactggtcctgatcccaggaagcaaccattgttatattttagctcttttttttccttcagatattggcctcygtgtttctagataatgtgattatattaaaatttcctgatttttcaattatagacattattaacttcctactaaaaagcataagacttaatcttttttaagtgag

SEQ ID NO: 904972 - DNA, 568 bp, Homo sapiens
acaaacaaccacactagttctctattaatggatgataaccaaaatgaaaactttgaaatgacacataaagaattgaaaatatggattgtaaggagctcaaagagaaccaagagaaagttgaaaatcatcacaaagaaatcagaagagtaatgcaggagatgaaagatgagatagctatattaaaaaatagaccaaacagaacttttaaaaataaaaaattcactgaagaaatttcaaacacagttgaaagctttaacaacagactagaccaagcagaggaaagaatttcaaaggctgtagcccagaatttaaagttaaccccatcatacaaaaatgaagacaaataattttttaaatgaacaaagcttttgaaaaatttgagattatgctaatggatcaaacttataactcactggcatttctgagaaagaagaaggaaatgtggaaaagatatttggggaaataatttagaaaatatccctaatcttgctagagaggtagacattcagatataagaaatttggaraacacctgtaagatactatacaaaattagcatcaccaaggca

SEQ ID NO: 904973 - DNA, 640 bp, Homo sapiens
gaatcaatatctttatatgtgaaagctagtttggagtatacatgtgatatctccttctcctggkaaactatagaactctcctcttgaggaattactctgctctggagaagagttttcaggatgctgacatgtgggtgtgcccccactgaaaaagacttgcttgtagatcagtaaggtatctatgggttacagtaatctattgcacatttcaaaatagctaggagagaagaataggaatggttttagcagaaagaaaatataaatatttatggtgatgcatatcccaattacgctggtttaatctttgcaaattatatgaatgtattaaattatcacaaatggcctgaaactatatacatttgttatgcatcaattttaaaaaaattaaggcttacttgcaacccagtcaccctctgttgacaagtcgtgccagtccacttagagccatttcactcttataccaacagccacacatcaccaaacatttgacagtctccaacataaaaaagacaacacaaacaggatcacataaacatgaaagaaaatcaaaacctataataaacatcttcacagaaataaaaagaataatgagaaagagctcttggaaatggaaaataatatggctttaattttttagaga

SEQ ID NO: 904974 - DNA, 630 bp, Homo sapiens
aacgctccgtggatcttcttcagtccctcaattctggtcagggggaatctcactagttctctaatgaaggattccaccccagggccatcaggtaccccttccccttatccactagccctagyttatagctcctactgcctgagaagaaagtaagctcaaacagtaccaccaggagtggggtcccacatcagtgtctaaaatcgaacctgtgtcgattgcaggaggtagctgatggaaataaagtaacacttggaatatatgtccaattttctaagtgtgatttggctttctccagtcaaaatatgggcgattttcagaggatccaaaaaagttcatagagatgtttgttaaggtgaccatgtgctttaatttgtcaagacttgcaagtattgtcacatacttactgtgttgtaggaaaaaaaagttaagccagttaattatgacaaggttaaagaaattaagtcagggaaaagacaaaaatcctgctctgtttcagggtcatttggttgaggcattcagaaatatatgaatacagacccagactacccctaagggaaagctctccttggtatgtattttattattcattctacccctggtattagaaggaagctttagaaagcagcaatg

SEQ ID NO: 904975 - DNA, 596 bp, Homo sapiens
tctattgcttgcttgggggtagatatcaagagaaggtcaaaaagtccttggctctgaggatgcttttaaggccttttaattctctttaattcaaagtgctcagcatttcaaaatgccatactttgcagtatctttcatgaactccaacaacatcctctttggtaaagtgtctagtcagattcttcccctattttttaatttgtttgtttgttttcttattaagttttagagttgtttgtatattttggatagaaattctttaatagatatgtgtttttgaaaatatttcctaacagtctgtgtttttcttttcatttttataatagtttttatcatagagtagatgttttaaattttgacaaagaccaacttaatttttttaatggatcatggttttggtatggtatataaagtcttcatcaaacccaaggtcacctaaatttctatatatcctgtgttttcttcttgacgttttatagtttgcattttacatttagatccattattcatttggagttaacttttgtgaaaggtmtaaagtctgtgtctagattctttctcctttgtgtttgcatataaatgtctcattgttttca

SEQ ID NO: 904976 - DNA, 543 bp, Homo sapiens
ggaacaaagccaacatttccaatacctgagggtgatgggggattgacagtgtcctccccagcaagcctatccttcttatcttttttttttttttgcaatggagtctcactctgtcacccagsctggagtgcagtggcgcagtctcagctcactgcaagctccacctcctgtggtcacgccattcttctgccttagcctcctgagtagctgggactataggcgcccgccaccatgcccagataattttttgtatttttagtagagagggggtttcaccatgttagccaggatgatctcgatcttctgacctcgtgatctgcctgccttggcctcccaaagtgctgggattacaggcgtgagccactgcgcccggcctcctccttatcttaagtctggcggccacactacttgcttttaactggctgacagaggcccggtatttttctttcattttagctattgtgaagtttaagaactctgaaaaaaggaccaaaaggacagattctcttttactcacccttctgcagattctggatgagcccc

SEQ ID NO: 904977 - DNA, 328 bp, Homo sapiens
acctgcttccaggtctggagcctctgctgctccagaaccttgtcstgtgtcaccactcttgcccactgctgctgtagggagggcacagggaggaggtggagctgagcccagggtggcggccatgctccatggagctggcaggaggcagggacaagtgggagccccccctggagcccactgccctgggagccacggcaatggggttgggccaagctacccatggacaggggagcagcatggtttagctctgagggttggacagaggggcccagcaaggacccagagcccccaaccccagatatgaacaggtgtggctggggctgcctac

SEQ ID NO: 904978 - DNA, 596 bp, Homo sapiens
ataatgagccatattgttaacagaactagcataacatgaaaaaagatattaaatacttaagcgtcctagataaacagaaaactaatttgcagatattttacaatgataaaataatgcataaaattagaagtataagatttacacagtacaatatttacaaaatggaaatgtaaccttagcactgaggagaacaggaaattataaaatgaaattgaaaggaatcaagggaatggaaccaactcttcatttgtctcaaaagaaatttctcttttggctttctaaaaacctgtttattaaaacaacacatgaacagacaataaactaaactaaaacaaccccaaacgaaacaaagatttgtattatctgaagtacttcaattaattagaaattttgggatttcattgcatttatatctatttatcttaaatagctaaatagatctatatattagccatatctacatatatgccagcatatatctgtatgtagatgtacctgagctatatattagtttaaggatagctaataaaacaacaattcttcctcttttgcacctgcrgtttgaatgactgttatattgttatcctgctatatct

SEQ ID NO: 904979 - DNA, 618 bp, Homo sapiens
cttcatttatggctcttttttcaggcaggaattcaacaacttttgtgaaaatatttattgtatctttcttctcctaacaaactgtaaattccattagaacaggatacacatctgccttgtttatccttaatgctgtagcagccagcactgttatcttaccacatcctagttgcaataagtatttgttaatgtgaattactgaaacttagcaaagctgaaaaatgaggacattaactaaatgaatgggatataaggaaagtggctgcagttattacaaaggaacatgtgaagagcattgattccaatttttttcatctgtgttttaatatagacacagctgtttaccaatttattcaataaacttaaaatacatttatagaagtatttttaaatttacttaaatttatacttaaagaacttttttttatttctaacgttttggtaactatatgctcattttataatttttactgtggaaagtcttgttaaaagaggaataagaaccaactggtattttaattatcttgctgacatatttcacaattcataagtgaaaatgygaatgatattacatctagtgtatggtgtttctggttttcattttctaattattcatca

SEQ ID NO: 904980 - DNA, 618 bp, Homo sapiens
cttcatttatggctcttttttcaggcaggaattcaacaacttttgtgaaaatatttattgtatctttcttctcctaacaaactgtaaattccattagaacaggatacacatctgccttgtttatccttaatgctgtagcagccagcactgttatcttaccacatcctagttgcaataagtatttgttaatgtgaattactgaaacttagcaaagctgaaaaatgaggacattaactaaatgaatgggatataaggaaagtggctgcagttattacaaaggaacatgtgaagagcattgattccaatttttttcatctgtgttttaatatagacacagctgtttaccaatttattcaataaacttaaaatacatttatagaagtatttttaaatttacttaaatttatacttaaagaacttttttttatttctaacgttttggtaactatatgctcattttataatttttactgtggaaagtcttgttaaaagaggaataagaaccaactggtattttaattatcttgctgacatatttcacaattcataagtgaaaatgcgaatgatattayatctagtgtatggtgtttctggttttcattttctaattattcatca

SEQ ID NO: 904981 - DNA, 660 bp, Homo sapiens
tagcccacaattttccttgctrtatcacacttcacatcttaaatcgtcagcttcaccaacatgatgctcgggatcgataaggtcaggtaagagcttgttcttttttaatgttattttaatctggtacagactaaagcatttttgccaccatcatgaagcaaaagaaacctgtctgctgtgatgttttatgtatttagacaaatgcagattcagatatattcactgattcattaagtaacaaatgaattaccgtatattaaattatttaatgagcaggtactatgtaccagacaaattgttaagcagggaaggtgcagtaacaaaaggacccttgtgttatctaccttcacacacatagagtgtataatacatttttaaataaggatgtaatgaaaatcagaagccaatataatcctttcattccgaccatattccctaagtttccatgcacaatgatattcactggtttcaacagcctcctgaatagtgacaacgaaaatgaaattaaaacatggctttcactgatggcaaaatttaacatgctgaaatttatttcagattgaatcagaattattaaataattagaaaattttttccttaccaggaaatgaaaaatagggataattagaactaccacctgggctggaatcccaagatggg

SEQ ID NO: 904982 - DNA, 629 bp, Homo sapiens
acgtcatactgatcaatttatcatgacaccttctcttctaaatgttctgtcctgcttctcagaaatgttgacctcaatctttgactctgtgtgttggtgttccctgccctggctttcaagtcagtgttttctgtaagattagtcacatttcaatggtgcgtgttatgcttcaattctcacaggggatttataacacttttctcagatttgttgaaagatttttcatgagattcaggatttagaaaatcataaatttcccagtaaatatgaagaaggaaatcctccatggaaacactatccaaatgagataagagaagttgtaactggatttccaactgtcgattttatcatgtataaaagaacgtagttacctaaatcagtgagagaaatagtaaggatggatacatgaaatatgacattagatctatgtttttcaaagtagggttccatatcagcaacttcagcatcaccttggaacttagtaaaaaggcacatttctgggcatctacccagacctatggaagcagaaaactctgagtatggagcctcgyaatctgtgtttcaacaagtcccacaggcgattttgatgcacattgaagtttgaaggtacctttattagattttctttc

SEQ ID NO: 904983 - DNA, 543 bp, Homo sapiens
agtctgcagattgagtcatggaatgaaaaatgttgagtgaggtaaaagcccaaggcaaaaagataatgaactcaactttctgcaacttcttttcccagcaggaacccctaaatgaattgccaggtctctttaagactggctcttcatggccttttaatgcctgcagctgctgtggggaggaaggcgttcaattatcaattcattcctcaagtcagcaaatacttatggagctcctactatgcgccagacacttttctgggtactgggatgttgtggtgaacaggataaacaagatccctgctcttacagatggtacaggcaagttggagagagaatgtatactgaagccaaaacaggataactccagctggcaagaagtgccaggaacagagtggacgaagcagggttacctggtggagagcgactggggctctttaaggtaatcaggacaggcttctctgaggagkggggatttcagctgagctatgaaggatgtctgggtttcttttgaaccaaagtctgcctctccttctgaagctataa

SEQ ID NO: 904984 - DNA, 598 bp, Homo sapiens
aatcaccataattatgggtgtagaatgtactaactggttcatacccttcagagggctgtctgtggagctgatagtcaggtccctttcaccctaaccacatggcttggaatattgtgrtatataataaaagctggactatgaggaacaaacacaaggtaagcaacaaataataaatacttcctaccagggcgactaggtttctatttgaaaataatcttcatacctgtaattaaccttcttaagagaatggcattcaagcattcttacaaacctcacaagctcatcacaagatacatctagcatttaaagaaatggaatctatgaagaagcaccaccgactaaactttgcagaaaaatctgtttttatcacagttggtgggaaaaaaatttcattaagtattcaaaagatgttcaccagtttagactagtttataaggttcttcataatcaagccccatatgcctttctagctttatctcaagacgctatgctcacttcacactttttatacagtcaacatctttaccagacttctcaccatttcccccaaagcatcatgatttttacatgtccatgcttttatttttatttacttatt

SEQ ID NO: 904985 - DNA, 663 bp, Homo sapiens
ctccagccttatgcaagcaatcattgtcttgcttatgctaccatgtatctgatctccctggttctactggtgcatctctttctcttcttttttgtagttataaacaatttttattattgttattatactttaagttctgggatacatgtgcagaatgtgcaggtttgttacataggtacacatatatcatggtggtttgctgcacccatctacccatcatctacattaggtatttctcctgatgctatccctcccctagctcctcacctgccaacaggccctggtgtgtgatgttcccctacctgtgtccatatgttcttattgttcaactcccacttatgagtgagaacatgcaatgtttggttttctgttgtgttagtttgctgagaatgatggtttccagcttcatcagtgtccctgcaaaggacatgaactcatccttttttatggctgcattgaattccatggtgtgtatacgccacattatctttatccagtctatcactgatgggcatttggattggttccaactctttgctattgtgactagtgctgcaataaayagatgtgtgcatgtgcctttatagcagaatgatttataatcctttgggtatatacccagtactggtgcctctttacagattcttttgtacacattagtca

SEQ ID NO: 904986 - DNA, 632 bp, Homo sapiens
tctttaagagatgtgatatttgatctgtatttttgttaaaaatcttgtgaattctgcagtgaattttttccagagtagttatcattgtcctaccaattagaaattttaatgttgattaaaaagcaaaacggtccaaatgtctgcagttttactttctaaaacagagaaatgaaatggatcagcactacagaaaattatcaaaattagcttttaatagcagtagctaacgttatgcagtgcttattatgtgccatccctttgagatagatatccccacttttagatgagaaaattgaggcatggataggggattaaatttgtctaaatttgcagagcatgaggatttgtttctaggaatctgtttaaagattatacaatgctttgcgatggttatagtcttgttttatagattaagtgcttttaatcgcttggctccaccctctttcagtttgcgctctctcagacatacgtgacagccaccactgaatttcacaaaggtctttttttcagacattgtaagaatgtgcaggagtccaatgttttttgggctttggggacattctgtatgaaacttaaggatttatagtcatatgtattktaataacagacaaaaccaaaattcattaatatga

SEQ ID NO: 904987 - DNA, 615 bp, Homo sapiens
ctgtgagatgaaaaaggcaggaattcatgtcatgtgctacagcagagcagccgtagcaacggcagtaacagcagtagcacggcrgcagcagcagcagcagcagcagagtcctttagcgagactgcaccattttcttctcaccctgcatagaggtgtggttggaagcagcaataaactacccaccccctagcagtttcacagaggtggcctcttcctggctccagtcagaagacacagtctgtctggaggagtccccaaagactgttccaattggtgatgtgtgtctaaggatggctttttcaactagtaggatgcttctctgcacttgcagccacccaactgctgaagagctggaagtctagtgctccgccttcccccgggaccatttctgagtgtgggtgcacacctatgcctgtgtgcgtgcaggtgtgtgctgctggaggtctcggtttgggaccttagttcattgtagtgagttgtgggtgctgcagaggctggagcaagattatgacctagctcgggggcggagtggattatcttgtgagtgttctggctgccagccattgccctggtggggaaaatcacatctccatagagctctgaaatcacctggat

SEQ ID NO: 904988 - DNA, 628 bp, Homo sapiens
gaaatgaaagaggtgaatttttgtgtgtgtgcaggaagaactgtttctcagaacatgttaaatcaggcccatttgccaatcagacatcagcccccttgcctgtatatgatgctggcctgcaagtaactttcacctatttataattaggtttgcaagttattcttgagagtattgtgcttggtaataagctaagtgcccccagatgggtgcttgaatcttgattactgcttcatggttccaataaccaacatcaaatttgaagccaagcatattaggaagcttttcaattcattatatattaacttaaaaaaagttttaaaaattaacatagaaatggtgattttaaaaatgaattactagtttttgcctaacaagttggcagagatttgaaaagcactaaaaagtggtgttgacagtgtgagggaactgacactttctggttgatgttttaacttcacaaagtttaaagatgtgcacatactatgaataatctagtccaattctaggaatttagcctcataaaatataatttttttcaacatttttcatttccaacattttccaataaatttgaaacatatggaaaaattgaaakaattttgcagtgaatatctatatacttaccacc

SEQ ID NO: 904989 - DNA, 621 bp, Homo sapiens
aagaggctgggcgcagtggctcacatctgtaatcccagcactttgggaggctgatgcaggaggattgcttgagctcaggagttcaagaccagcatgggaaacatggtaaaacctcatctctagaaaaaatttaaaaactagccaggcatggtagtgcacacctataatctcagctactccaaaagctgaggtgggaggatcacttaagcctgggaggtggaggctgcagcaagctgagatcgcaccattgcactccaacctggatgacagagccagaccttgtctcaaaaagaaaaaaaaaaaagaagagacagacacacagggagaacaccacgtgatgatgtgatggagtcagagactggagtgattcattgacaagtcaagggctgccatggattgacagctgccaccagaagatagaaagaggcatggaagcattctttcctacaggttttgcagggatcacagccctactgacactttgatttcagaattatayatccttcagaactgtgaaacaaaacattcatattgtttcacagcagccctaggaaagtagtacacatttcctcatcaccctgcagctccctatataagccaccagttatagcttgcaatttt

SEQ ID NO: 904990 - DNA, 612 bp, Homo sapiens
cttagggttagtcaaaggattaaatgagataatatggttccaaagtggcagcaaggaagcaakctggcttcacaccccccaatggaaaacccaaaactaatattcaacactgaaattatcaccagcaatatccgagaactcaaatatgaggatgagacatttgctggggccacagagaagtttaaaaaactctgagcagatggtaagagaatcagacttccatatctgtaatcccctccccacaatctgccaggcaccaactgcatgaaaatttcccccaactcacagtctgtacactgtaaaaagtgagatcaaggcatagacaaccagcttctccacaatcttgggttcccttgcaggagacttgtcccagcctcaaccactagaagcatcagcagtccctagaggagaaatatccctgagaacagccagagacaaaggggagaggtgagactaccatcccagctctggaaactctgctgtgtaacttgacaaaaagagatggagacaccaaatcatagtggctgttcagcagcaccacactgtaggaggttgggtccataggtcccttggacactgaacccctagctagccttcccaaactactgggat

SEQ ID NO: 904991 - DNA, 566 bp, Homo sapiens
tctctaggggaaaaatttctttygcaaaggacagtttaatccatgaaactggctgttacggtccctgttaggggacaagattttctacttaatttgactatatgattgaatatgttttgcagcattttgcaaatttctctgtagaagttttcatttttttccttttgttaactgaaaatgaggaggtatacatgagaacatcatgaaagaaaatgcattgttttcagtaattggttaatttgaggaggctcagatggtatgttttcctgaaaactgctaaaaaatgagactgatccatcctgaaaagcctgtcgaggtggaaaacctcatcagtttgaaggcctctttggtgcactgtgtttagagtttatggtgagaaggaggaaatacattaacacgtcggtgttttcaggtgatatcaacaccagctgtctagagaatgacgagactcagtgtgccgtatgaagagaccagtcctctgatgacaggactcccaagcagaaatgtatcataataaggacaaatgggtgtgagtcacataaatggtctgggacaggtgctccatg

SEQ ID NO: 904992 - DNA, 533 bp, Homo sapiens
atgtatatgacttgctttaattmtgtattctcagtggctggtacacagtgggcactgaaaaaatagttttgaataaaaaattaaggaaaaaaagaatgattattagctatagctagtgcttttaaggcagctatagtcattcacgtatttataactgagagcagagtgtggcttgccctctagtggtctgttttagcgaactttaatcctggcctttgaaagataaatatttacttgataatagtaaagtatttatagtaaaatatttacaaatggatggtaaaataattttcatttttaataaacatatgtctaataaagctttcttttgtccattttaaaattttatggtgaaacatcaaagagaatttggaaaactagaaataaaaggactttaccttttagaaaaatgaaaatatttaatatatgacattgatattttaagccatatattattgttttttagttatacttccaatttctgtgccttacgtaaaatacggagaggactttaaattgtttttcctgtcttc

SEQ ID NO: 904993 - DNA, 534 bp, Homo sapiens
tatcttgatatctttctctagatttgggaagttctctgatattacatctttcaataaactttctcccctatctctttctctgtctcctgtttaaagccaatagctcttygatttgcccttttgaggctattttctatatcttattggtgtgctttattgtttttattcttttttcttctttatcttctgaatagcctgtcttcaagctcactaattctttcctctgctgaatcaattctgctattaagtttctctgatgcatttttcagtatgtcaattgcatttttcaactcttgaatttctgcttgattcttttcaattatttcaatccctttgttaagtttatctgctaaaatactgaatactttctctgtcttagcttgaatttctttgagtttccttaaaacaggtattttgaattatctgtccgaaagggcatatgtctctgtttttctaggattggtccctggtactttatttagttcatttggtgaggttatgttttcctggatgattgtgatgattgtagacatt

SEQ ID NO: 904994 - DNA, 588 bp, Homo sapiens
agggtttggtaagcagtgtatagttgttktttttttttttatttttaatctgctgtatcagtgtttatcttttaattgggaaatttaaaccatttacattcaaggtttttaattgatagatgaggacttactcttgccatttttaataattgttttctgattgttttctatatcctttgttcctttcttcgcctcttattgtttatctttgcaatctgttgtttatctttagtaatattttatttcttgttctttctcactcgcatatctgctctaccaatgagttttatactttcatatattctcatgatggtagatgttatcctttagttccagatgtaggtctctgctaaacatctcttatagggtcaatatagttgtgatgaattcccttggtttttgcttgtcttggaaatactttatttcatctttgtttctgaaagataactttgttgggtaaagtatttttaagtagcatttttttcttttgatgtgactatataatcccattttctcctggcctataaggcttctggtgagaaatctgctgttaatatgttgggaattcccttatatgtgattttatgc

SEQ ID NO: 904995 - DNA, 663 bp, Homo sapiens
agtatatcgttctctagaatgatgattttggttaagatcatcagaggaagagaggtctcawgatggtttggtacatattatcattattctcagtctcactgctgtccagaacaattaagataaatgggaaattcagaagaagtgggtggaatttttggatattagtgagggacaaaagaatccctcctccacagccctgcctcttttccaaaatgagaacatctcagacaatgaaacttggattgagctaatgtggacctggagggctaggaatatttgttaatacctctcaaggttgtttcagaatggattgttttgctagtggaatgctgaaatagatcagaggtcttctaattttcataagtactaaaaataatatgtatcagcctgaaaaagcgtgactgagaaattaagcctgatttcttttcccacttccttctacgattgcccttctcttacacttcacaaaaaaggggcacccttttcttctatcttgtgttgcaaccattgttgaattgtcttatagtgtagaaaccctactctcagtattaaataaaatgacaattacaaacgtgagtgtttgctttgaggaagtacataagtctaataacaataccaaatccatttgcacgtcatgatttcgaattttttgctttcaacaaa

SEQ ID NO: 904996 - DNA, 644 bp, Homo sapiens
agtaaaaaaggagggattgcaatcctaatttcagaataaaaasactttaaacaaataaagatcaaaaaagaaaaaaagggcattacataatggcaagtggttcaattcattaagaactaattatcccaaatatatgtgcatgcaacacaggagcacccagattcataaagcaagttcttagaaatcttcaaagagacttagactcccacacaataacagcttgagacttcaacaccccactgacagtattagacatatcatcaagacagaaaactaacaaagatatccaggacctgacctcagcactgggtcaaatggacctgatagacatcttcagaactctccatccaaaaacaacagaatatagattcttctctctgccacttggcacatgctgtaaaatcgatcaaataatcagacaaaaacactcctcagcaaatgcaaaaggactgaagtaataacaaccactctcttggaaaacagtacaatcaaatttgaaatcaagactaagaaattatctcaaaaccataaacaattacatggaaattgaataacctgcccctaaatgacttttgggtaaataataaaattaaggcaaaaatctagaagttctttgaaactaatgaaaaaaaaaaaaaagatac

SEQ ID NO: 904997 - DNA, 685 bp, Homo sapiens
gagtcagagccaccggagtaattacctctcagcttgttgggtattcatcctcagtaagtggcttagctaatgtacgtttcacacatttagttgaaatgggtattgtgcatacacagaaagttttgtgcagacttagcttcctattatttctcattttctttgacatctttggggaatgattggggcctccaccctcaccttcaacacacataaattattttgtgtgttgcttctcccagtaattcagatattaaataagaaagataatagaaggcaaaaactagtcagtgagttattcaaggtggttaaaagaattatttcctaaatataatattccttgtacttatgagaccttgaactccaaggtgaattggaaggtgtttagcagctctataataagaatatgataatgatacttaaccagtgctgttctaggtaccatctcacacgtgttatcttccttaatcatcatgacacagccttcataggaagaaaattgtttcattggaagaaaattgtttgaggagcaaggcacgcacttgaaatttttatgtctgatcatgaaaatggacacagatcccttaatggttatctagtagccatagtgtttcagtttagatgggaaagatttccaggtccaggaagaggttcagttcagggrgtgggggagaggtgaggatgtgta

SEQ ID NO: 904998 - DNA, 603 bp, Homo sapiens
actaggagaagagattgatggcacaaaggcatttgcgatagagaatgcttttgatgatcagtagaggtggagggctggggactacggaagtgatgttgactartgaaagaggcacagccatgagtagacggccagggcttcactgcaggtactgagtgatgaagacaaggaaatgatgtacagtaggtttcactttcaacctactctgactggagtggattcttgagttgggcatgtcttttagttgcaaagcaaaggcatgcttccgtgatatggtttggctctgtgtccccacccaaatctcaccttgaattataatccccacgtgtcaagggagggacctagtgggaggtgattggatcatggaggcagtttccctcatgttgttctcatgatagtgaggaagttctcacgagagctgatggtttaaaagtggcagtttcctctgcgctctctctcccttctggtaccacgtaagatgtgcctggcttcccctttgccttctgctatgattaagtttcctgaggcctcccagccatgtggaactgttagccaattaaacttcttttgtttataaattacccagtgtcaggtagtatcttt

SEQ ID NO: 904999 - DNA, 599 bp, Homo sapiens
tgggaggcacgtggtagcaagtgattagatcatgcaagtggttccctcatgctgttcttgtgatagtgggtgagttctcatgagatctgatggttttataaggggaattttctccctttcctttggtacttcctctccgtgcactcaggtgaataaggatgtgtttgcttcccctttggccatgattataagtttcctgaggcctccacagccatgtggaactgtgagtcaattaaagctctttctttataaattacccagtctgaggtatgtcttcatagcagtgtgaaaattgactgatgctctgtctattgttgaaaataaaatattaaaatctcatgctattgttgtgttgcagtctatgtctctctttagatctcttaatgtttgctttatatatttatgtgttctgattttgatgcatatatatttataatttacatatcctcttagcaattgaccctttcatcactgcatcartaatcttctttgtctctttttacagtcttgaactaaagtcaatttttttctgaaataggaatagctatccctgtctcttttggtttccatttgcatggaataatctttttatcccttaa

SEQ ID NO: 905000 - DNA, 543 bp, Homo sapiens
tgcctagaaatctcttctatgctcttcaggggacagttctttcaactctgtacttggctgtcagtttcccagagcagacccctgacattgtagaggtgtgtgtgtacacacacttatcactgtctgatatgatatcacaattgcttaactattcatacatatgacatttgtatctattacctctgttcccccatcttgcactagaatgttttcatgagagcatgaaatgttttttgtttactgcagtatcctatagacagactaaagtagccaaagctttatccaagaaaccttacatttacatgatatgtgctaagtactaggaattttaagatgactatgagactatcccggagcctctgctatgaacaggcattgtgagcattgccaaggatacaaccttgaagaaagtgaggtgaggcagggtgatgcagatagataattagaaaaatacacatctatctakgtggtgcagatagataattagaaaaatacaaatcgttaaataattacagttttgataagtgctgcaaaggaagtccc

SEQ ID NO: 905001 - DNA, 603 bp, Homo sapiens
tacaagagtgaaattaatcatttttaaaggatggacctctgtttacccttaaaacaaatgattatataatactgaatacacatatttaagaaaaatagagcagacatctatatagctactacacatttaaatctccttatgtgtctcttcccaattaactatgctgttcatcatcttccaactaacctgtacttgatatttattttactaacatacttcttttggttgtctaaatctatctctaagcaatatatattatttttgcatttttaaagtttggtgtaaatgatattttattgtatttattctttggcaatttgtttttatctcattattatgcttgtgacatttattctcgttcatttttgcttctgtataatattccacgttctgaataaacaatacttcactgatccattttcctgttgatgtaggtttatatgttttgttgttgttattattgttattacaaacagtgctaacccaggtattttatacatgattattactgcatatttttgaaagcttacactttagtatatccctagcatgaaattgctaagcaatagcaastttaatcctcaactcaacattgtagaactg

SEQ ID NO: 905002 - DNA, 650 bp, Homo sapiens
gtaaggcaggtagagtgtgggcatgaagtttgacacatatagagtgctcagtaagctsttcaaaaggaaggagtaggaagagaaatcatagctacagctcactaaatacacaagaaaaatcacattcgatgagcacctgctctgtaaaaggagttcatccttgtctacactgtattgtcacttcagcatccaatgagctctccaaatgctcaacaacaggctggaggaaggaaaaggcaccatggcaatgagaaccagcttttctaagacacaggggtttagaggtgagcagattttagacagtgaattgactattctgagcagaggaaatgcaaggaagaagccaccccagggagagggaatgggccagcctggccacagggatagctgaagcagcccttttaattattctacctctatgacccaatggccagaatagagaatatgttcagggctttggcattagactggctggagttacaatcctggtctgccacttcagacaatggggcctagagcaagttactcagcttcctcatctgtaaaacaggatggccttatttatagggaccatgctgagcacatgctagacatagagtaaatgctcagttaatggtagtttgttactaatatgagcagggtctataaaa

SEQ ID NO: 905003 - DNA, 627 bp, Homo sapiens
ttacaaaaaaggaattcccacagactattaattgcatttgcttttcctactcactagggactactgcagagtttgacaagctttttttcccaagggtcagattgtaaatgtttttaggctttgtaggccacatactgtctcttttacttcttcttcatcctccttttcttctccttgcaatcctttacataggtgaacaccatttttagctcataggccatatcaaaacaggcctcaggctgaatatggtttggctggccagttttctgagctctggtttagtgaagttaagtaaggatccaggtctgagccattttgaaacagagcatgctacagtatcttaggatccagtcaactacacactgggaatgttcaaacctgtagctaaattcattaagtgaaataaggtagatgctttagtgagcaaggcaagaggaaactaacattggagtgcctaattggtgtgaagtgtcatgctaggcattttatataacataatctcattgagtcttcacgatawatttgtgaatcagatactattattattcttgtctgagagatgaggaaactgagactgagagaaaagttacttgtttaaagtccacctagccagtaagtgccatagcc

SEQ ID NO: 905004 - DNA, 627 bp, Homo sapiens
ttacaaaaaaggaattcccacagactattaattgcatttgcttttcctactcactagggactactgcagagtttgacaagctttttttcccaagggtcagattgtaaatgtttttaggctttgtaggccacatactgtctcttttacttcttcttcatcctccttttcttctccttgcaatcctttacataggtgaacaccatttttagctcataggccatatcaaaacaggcctcaggctgaatatggtttggctggccagttttctgagctctggtttagtgaagttaagtaaggatccaggtctgagccattttgaaacagagcatgctacagtatcttaggatccagtcaactacacactgggaatgttcaaacctgtagctaaattcattaagtgaaataaggtagatgctttagtgagcaaggcaagaggaaactaacattggagtgcctaattggtgtgaagtgtcatgctaggcattttatataacataatctcattgagtcttcacgatatwtttgtgaatcagatactattattattcttgtctgagagatgaggaaactgagactgagagaaaagttacttgtttaaagtccacctagccagtaagtgccatagcc

SEQ ID NO: 905005 - DNA, 636 bp, Homo sapiens
tattttctccagatatattattatagagtagttttttttcttcagctctttatttatttaatgagatggagtcttgctctgtcacccaggctggggtacagtggtgtggtctcagctcactgcaacctgtgcttcgtgggtttaagtgattctcatgtctcagcctccatagtagctgggattacaggtgcctgcccccatgtctagctaatttttttttttttttcagtggagacggggttttgccatgtttaccaggctggtcttgaactcctgacctcaggtggtctaccttcctcagcctcccaaaatgctggaattacaggcatgagtcaccacacccagcgtccttcagcactttaaatatgtcattctactctcctagtctgtaaggtttccactgaaaaggctgttgccaaccttattggagctccattgtatgttacttgtttcttttctcttgttgcttttaggatcctttctttatacttgatatttgggagtttgattattaaatgacttgaggtagtcttgtttgggytatatctgcttggtgttctaaaacctccttggacttagacattaatatctttctccaggtttaggtatttctcttttactatatatttgaattaa

SEQ ID NO: 905006 - DNA, 594 bp, Homo sapiens
gcaagactgagtgattcctaaatagaagatttctataaccccactttcttccccagacttaatgaagtaagagggaaaaaaaccaaagcaataccaaaggcaaaagagaaggagaatctacacccctagtctgatgatgcagtgaacgtccttgtgcttgaccaatgcacttgagaactcctgcgcagaggaggcagcctgtggtgctagagaggtgtgatgagctccccctaggagccagtagtgggctctgctgcttctcaccaggtaaatgtggtggcagcagaccaaagtgttacctacatctagctcagcaacttgaatggagctggaggctatttttctaagtgaagtaactcaggaatggaacaccaaatactgtatgttctaacttgtgagtgggagctaagctatgaggacacaaagacatacagagtgatataatgaactttgaggacttggagcggggaagttgggaagagggtgagagataaaagacarcatattgggtacaatatacactgcttgggtgacaggtgaacaaaaatctcagaattcactactaaagaactcatccatgtaaccaaaaactac

SEQ ID NO: 905007 - DNA, 594 bp, Homo sapiens
gcaagactgagtgattcctaaatagaagatttctataaccccactttcttccccagacttaatgaagtaagagggaaaaaaaccaaagcaataccaaaggcaaaagagaaggagaatctacacccctagtctgatgatgcagtgaacgtccttgtgcttgaccaatgcacttgagaactcctgcgcagaggaggcagcctgtggtgctagagaggtgtgatgagctccccctaggagccagtagtgggctctgctgcttctcaccaggtaaatgtggtggcagcagaccaaagtgttacctacatctagctcagcaacttgaatggagctggaggctatttttctaagtgaagtaactcaggaatggaacaccaaatactgtatgttctaacttgtgagtgggagctaagctatgaggacacaaagacatacagagtgatataatgaactttgaggacttggagcggggaagttgggaagagggtgagagataaaagacagcatattgggtacratatacactgcttgggtgacaggtgaacaaaaatctcagaattcactactaaagaactcatccatgtaaccaaaaactac

SEQ ID NO: 905008 - DNA, 580 bp, Homo sapiens
gacaattcttcacatgcaagcaaagcatgagttcattaacattaaaagttttgctgtacgaaaacactattaagaaaataaaaagtcaagctacagactgggagaaaatattagaaaatcacatagctgacaaatgatttgtctctggagtgttaaaagaactctcaaaactcaacggtaagaaaataaacaaacttcattagaaaatgggtaagacttgaacagacaaagaccaaagaccatatatggaagtcaaattagtatagtataagatgtttaagatcatttgccattagggaaatgccaattaaagccacaatgagatatgactatgtacctttaggagggcaaaaaaaaaaagcccagaaaaaaacaaaagtggacattattaataatgccaatgcttcagatgtgaaacaactggaaacacttgtgcatggctggtaggaatataaagtagtcaaaacactgtggaaaacattttgacagtttcttataaaatttacttataaagttaaatgctcccaataatcctacttmtaggctatcctagagacattaaaacttatgttcatacaaa

SEQ ID NO: 905009 - DNA, 598 bp, Homo sapiens
ggacataaaaacggaaacaatagacattggggactactagaggagggagagaggaagagggcaaaagactgaaaaactacctatttggtactacgctcattatctgggtgatgggatcattcataccccaaatctcagcatcatgcaatatacccatgtaacaaacctgcacaggtaccccctgaatccaaaatagaagctgaaattaaaaaaaaaaaaaaatgccagcaaggctgggagcagtggctcatgcctgtaatcccagtactttgggaggccgaggcaggtggattacaaggtcaggagatcaaaaccatcctggccaacatggtgaaaccccgtctctactaaaaatacacaaattagctgggcatggtggcacaggcctgtagtcccagctactcaaggaggctgaggcaggagaatcacttgaacctgggaggcggaggttgcagtgagctgagatttcgccactgcactctakcctagcaacagaacaagactccatctcaaaaaaaaaataagataaaataaaataaaaaataaaaaatatgccagcaaaagttgcttaaaaaaaaaggagctaggtgatttggtt

SEQ ID NO: 905010 - DNA, 615 bp, Homo sapiens
aggagagagagaagaaaggcaagtgacaatatcctagacttctgtgttgtccaaagaaggtttggcaaggcagtcaggagtcttccagccacagccggccatcagaagaatgtgtgtctcctagaaaggggcctgccttagtaagtaacactgccacattctgtcactggtggggagcccagacggtgcaatggatttcagggcacggcagtcaaggcccttggtcaattgcactcattgtagttggaggtctgtaaggtaccttctcatggctgtcacagaagtgtaaagtaataatccacgaagatgatttaatcggactaactagacataaactacgtcaccagcagtgcagcaaagggatatgagagacattggaaggtatgatcaattggaattagtaattgattgatgattattacagggctgttaagtaccactgtgcaagttgtgcactgcacaacgttatcttaaggaggagtgatgagtaaaacaattaaaatataaagtggctcatgcttatagcaggagagagactgggctctgaagtttatgcasctacctggtggctgtttggtgactagaattgtctatcctgtctcctgagccagacta

SEQ ID NO: 905011 - DNA, 627 bp, Homo sapiens
ataattttttgatacagggtagcaaatactatgcctatagtggcaaggaagtgtgtactctgctgaggaagtcacctctgcagccaccagaatgacatttstgaagccagtgagagcaatatcagagagcatcaatattgtaaatacgttttgatcttatagataacctgaattttgctgtgtgcactattaataactaatatttgtaagaatctcaacaattttcaaaatgctctcttatatgttaacaaatgtagccctactacaatcctgtaacatagtatccttacccacccccccacacacgcacacatacaaagaccaccacctccaccccatttttcagatgaggataatggggcttagagtatttgggtgacaaggctaagctcacataataagttttacaggctagcaggaataacaccaaagtttcactttatttgcccactccaaagaactgataatgacagccagccaggaagctacttggaggctgtgtctgggttcagtgggtaaagagtctttgagagattagcaatgtctgccgggtaagaccagatacactggatacccttggatagattccaatccaggtagcctaatttccttttccacatcctttag

SEQ ID NO: 905012 - DNA, 627 bp, Homo sapiens
ataattttttgatacagggtagcaaatactatgcctatagtggcaaggaagtgtgtactctgctgaggaagtcacctctgcagccaccagaatgacatttgtgaagccagtgagagcaatatcagagagcatsaatattgtaaatacgttttgatcttatagataacctgaattttgctgtgtgcactattaataactaatatttgtaagaatctcaacaattttcaaaatgctctcttatatgttaacaaatgtagccctactacaatcctgtaacatagtatccttacccacccccccacacacgcacacatacaaagaccaccacctccaccccatttttcagatgaggataatggggcttagagtatttgggtgacaaggctaagctcacataataagttttacaggctagcaggaataacaccaaagtttcactttatttgcccactccaaagaactgataatgacagccagccaggaagctacttggaggctgtgtctgggttcagtgggtaaagagtctttgagagattagcaatgtctgccgggtaagaccagatacactggatacccttggatagattccaatccaggtagcctaatttccttttccacatcctttag

SEQ ID NO: 905013 - DNA, 640 bp, Homo sapiens
gttagtgactgcctgtcctgtgttctttccactgtgtcaattgaccgcttatgccaagttagaacaccacaatccggctgggaacrgtggctcacgcctgtaatcccagcactttgggaggccaaggcgggtggatcacctgaggtcaggagttcgagaccagcctggccaacatggtgaaacagcgtctctactaaaaatacaaaaattagccaggtgtgctgacgtgcgcctgtagtcccagctacttgggaagctgaggcagaagaatcgcttgaacctgggaggcagaggttgcagtgagccaagatcatgccactgcactccagcctgggcaacagagtaagagtctgtctcaaaaaataaaaaaagaacaccgcaatccatgtaagggctgctgagtatccacgcttactgctctgggatcatggttgagaagggccactgtgaagcctgcatctcagccataatccctctctgacctcccactgaattccagacacaccttgtccatggtcactgacatctgcctgccatcctgactctgaactgcacttaatccagcacaagctttctcttctaagactatctgtgtttttgtctttgtttcttctttttaattttagcctgactcatcact

SEQ ID NO: 905014 - DNA, 636 bp, Homo sapiens
gagatctaagccaggccaaggttaaggatacttttamgagaatgttatcattttaataatgttcttagtggcaaagactttctactaaataacaaaggcccaaaataggggttatatataagaggctcactttccttaatctctatagaggtaaataattgaggccctaaaactgtagtgttggtttttatcataaagtgtcaacttacaaatatttatctaaatggttggattattactattgggaaaattatgtgataaattctttgaggatttgttcacttatccacaatctcacctccaatgtatattatctaagaaaggctgggcaccgtgccaagaactatagaataaatagcctgagccacgagtagtttctgctcgtggggttatagtttgaggatataagaaatataaatatcaaaatatcacattatattggtgccagaactgtacagtcatgttattcagccacatgcaaggttgtttgtagagcctgtgaggcagatgagctgagtgcctgaagacagacaggtctgaggctaggaataacttcctggtgtttccaggattaaacaccctggcaatctgagaactagagtacctcctatccataaagtcattttctttatgacc

SEQ ID NO: 905015 - DNA, 580 bp, Homo sapiens
cattcagaaaagaaccttgatatttcagaaggaaaagttagccctggacacttgagcatttctaagaaaataggttttttttttctttttaaattgtgtamctgctgccctgaattctctagatgttctgagcactctgtatattcttactcatagcttagtaataaattatgtttataaattggagactggtattgtataatttagttcattgaaataatttgatctggtgacttcatagccagacagagtcaatggattcatataaatgagaatccagggttaatcaccatcaaacattttcaacataaagtgacatttttttccttagaatgggatttttactacattcaaattttactaatgctgtaaacatgaaaattttgagtcaggtaatgaatttgagaatggatagctaatctttaaaaatctagtaacaaatgtttctgggaattgtggctattgttcccttttggaatgatgaccaacatttttggaaatgaaaatattgataaatttgtgtggacttaaatatggagtccacacaagattggggtcataggacagaaacaatatttgt

SEQ ID NO: 905016 - DNA, 580 bp, Homo sapiens
cattcagaaaagaaccttgatatttcagaaggaaaagttagccctggacacttgagcatttctaagaaaataggttttttttttctttttaaattgtgtacctgctgccctgaattctctagatgttctgagcactctgtatattcttactcatagcttagtaataaattatgtttataaattggagactggtattgtataatttagttcattgaaataatttgatctggtgacttcatagccagacagagtcaatggattcatataaatgagaatccagggttaatcaccatcaaacattttcaacataaagtgacatttttttccttagaatgggatttttactacattcaaattttactaatgctgtaaacatgaaaattttgagtcaggtaatgaatttgagaatggatagctaatctttaaaaatctagtaacaaatgtttctgggaattgtggctattgttcccttttggaatgatgaccaacatttttggaaaygaaaatattgataaatttgtgtggacttaaatatggagtccacacaagattggggtcataggacagaaacaatatttgt

SEQ ID NO: 905017 - DNA, 619 bp, Homo sapiens
tttacaacttacaagttagtgttaacaaaatgtataaagatgktgatatgccattttgaaacatattaagcattttcatctttagaacagccttcaagagagttattatgaaacacatttaagcttaagaaagctgagaatcagaatgataattaataattatttgagggtggatgaaaaagtaaagaacatttacacagttttagtgagaatgtaaattagttcaaccctaaggaaaacaatatgaaaatttctcaaagaactaaaaatagaactacagtttgacccagcaaccccattactggtatgcgggtggtactatataagaggaaaagaaacatcctgtcaaacagacatctgcactcatgtttatcgcagcactatttttaatagcaaagtcatggaatcagcctaagttcctatcagcgggggactggatacagaaaatgtggtacatacacaccatggaatactatgcgtccgtaaaaggatgaaatgatgtgctttgcagcaacatggactctgctggaggccgttttcctaagtgaattaacacagaaacagaaaatcaaatacttcatgttctcacttatacgggagctaaacagtggtcatgtaa

SEQ ID NO: 905018 - DNA, 539 bp, Homo sapiens
ctataatatttgtggcaggcagcttctaagatggttgccaataatctccacctcctagtattcccactcttgtggagtcccctcgaatgttataccaaggctgaagtgttgcagcagagagtagaagaaatggcaagtcactcccaagattcaggtataagactttggcttctatcttgagcattgttgctcactcactttcattctctttcttaaatcacttgctttggggacacccctgctctgggctgttctgtttaaaacaattcatatggttcaccttctaccagcagccacatgagttagctgaaagtggatgtgttatcaacagtcaagttcagagattgcagacgcagctgagagtttgactgcaatcccatgtgaggccctgagccagaaccattccactaaccctctctgggattcctgacccatcaaaactatgggataaagaaaaagtatactgttttaagccacttcgttttaggataatttggttacacaatacaatattattygtatatgtattgccctttcgc

SEQ ID NO: 905019 - DNA, 603 bp, Homo sapiens
ttgcaataacatacttgtgaaactttgttttaaggtggcacctcctaaacttgtttatattttagattctctccagataaaagcaacaaactcctttggaataatagtaatattagtagctatcactgagaatctactatatgctgaacgtaccgtttgctgtggactgaatgtttgtgtcctccacttccaaatttatgtagaaacactaacctccaatgtgatggtatttataggtggggtctttgggaggaaattagggtcagatgagtcataaagatggggtgcccatgatgggattactgcccttacaaaaaaaagagaggagaagcaagtatctttttcacttcgtgcatgcaccatggaaaggccatgtggagacacaacaaggaagaggaccctcgccgagaaccaaaccatgctggcaccctgatctctaatggcccatctagtctctagaaccattaaaaaaaccaaacaaaaagtttcttgtttaagccatccaatctatggtaattggttaagcagccctaactgacttagatgctwttctaagcagtttaattctcacaatgaaataggtaaggaacctgaaacagaagc

SEQ ID NO: 905020 - DNA, 604 bp, Homo sapiens
gagaaagaaaggaacactttggagtggtgttctcattgatacctcactcttaccaaaattcctccaattctcctcattgttctcattgatacctcattcttatcaaaattcctccaattctcctcattgttcttatttgatacttcattcttatcaaaatttctccaattctggcccaggccaccagcaccagaattttctggacaaaagagtccactcattttaaagatgcagattcctgagtgcactccagacttggccaaaaatcactgggtattgaaagcaggggatctacatgttcaccacacccactagtcaaaacgtatgtccaggcaagtctgaaatataccacaaaactctgtgccatgattcttttcagaaggtgcagagagtagatggaaatcgaaatatccctgcaagtttccacactcccgcttccaaaggcaaataactactccatgtcctagacaaatgggtaacccacaatttgttctgatatctgattgaaaccccaaatcctggacttttgacttygataaagatgacactctagggggagaaatagagaagccattaactggaggacattaaggccatggtaaca

SEQ ID NO: 905021 - DNA, 554 bp, Homo sapiens
caattatgtcatggcttctctggagaacccaataaacaaattatcttgaagagaatktcacctgttgggttctgcagcttaataaggctgcagtgccatcagcacagagtcctaacgcgcctcacaggagaatgtcttggacacactcctataaattaattttctaattctggctctgccaccagctaatttggtttctctggattaatgatgccacacctaaaaatgctgggattagactagatgttccctggcatctcttacatctctcacattttttagttctctaatttttattctgtttcaaaatgaaattaaaatattctacatccacaaagtcatcttatgtgtgatttataacagtgtgcattggggaaaaaaaaaggctatagcagaattctcagaataagttgcagttaaaataaggcattattaatgtccttagtacaccatacaatatatcctcagacaagataagaaagtataagttttcaattgttattaattactgcatactacgcacctgcaagaaatgttcaaaaactgcagaaata

SEQ ID NO: 905022 - DNA, 660 bp, Homo sapiens
gaacttgtttggcatttaatagtctctctcccttccttccttccttccttccttccttccccccttcctttcttccttccttccctccttcctttcttttttctttcctcctacctgtatcatctatgtgtktgtgtatgcatcatttatgtgtgtatatatacatatacacataatatatatacatatacctttttttaaccactttaatttcagaatatagatatttctaaattatccaataaggcttttcttggaaagagccacaaatgggttttaatttgattattcaatgtattagaccatatgcaagtgtgctaatagaaaaagccaggataaattcatccatttgcattaatacacgcatttaagatattttttctggtatagtgagcacactatagggaagcaaggatggaaacaacaaaaactgaaagaaggatgtttagcaataatccacatggaagatgtgggtaggttgaatgagaatggaagtggtcaaaatgataagaagcagttggattctaagtagattctgcaggcaagagtgcaacgataagaagtgtgagagaagagaggagtcaagaatgactcagaagtttttgtttgactaactggaaaaatcaagttgctgaaagtcttcctgaagaataagtaggc

SEQ ID NO: 905023 - DNA, 695 bp, Homo sapiens
gggtccctttcagaagcagatgagtgatctgattaattaattcacactgaggagttacagatgmccatgaattactacattattgagtgtagctagcatatttaaattttcttagacgtgatccagtatcttggcttccatttggaccatttaaagggtgggatgatccccatgcctttctttgaacatctttccaacattgctttcttctagattagcaatatccaataaaaatacaatgtaagccatatatataaattacattttgagtccttggcaaatgtccgtctaccctagcttaccttcatttccttacacacctttactatggcctagttattagtatgactataaatctctaatacatttcacactgtatagaaacaatctgtacttgtcagtcagatatagtcctttcctcctccaaaaagtccccgaaatgcaattttaccaagccttctctgaaaacgaatagttctctgtttcactgatatccagagacaaacaaaacactacattcaaaacctgactttatttaatgaacttttatcttgttttctctggccatttttcttacctaatctgctagctttcttgccatttaaaaatgtgcatcccaggacatatagataagcaaatatgaagtacattaaatttaatatttttccttaaccttcatggggacttgaaatgga

SEQ ID NO: 905024 - DNA, 640 bp, Homo sapiens
taaagaacccacagtcagacattttgaaattctgattctaaaagaaygccttaagtttggttctccttattgtatgcaggagagtatagtctggagataagtaggagcatacttggagtatctcacacatctttttcctttaccaataactgaagcaggacataagtgctgtctggataccagagaagctcttgaactgagtaattctatgcagaagggaaaggttttacctatcagcttaataaaacttggcctttccctatgtttggtacatgccaaatctaccaaagtgaacaagacaaaagatagagtcatggacctgcgaaaccatagtcccagtcttccttcccttttaaaagcccattttctgcctacattttgggagtacgggcctggaccaaatgttattggtcacctcttctcacctttaggttagttgttttcaacagtgctccagtgtctaggctgctccctgttccttaacttaatcacagaattcctgtatttattagatttacataatttggatctcaggtaaggttttattaaaataaagggttatgcatctaaagatttgaaaagcattgtagaagtgtaagctcaagtttttcttctatcctcatttatacccccttgaact

SEQ ID NO: 905025 - DNA, 529 bp, Homo sapiens
aacaaggctctgtcattcgcatcaaattcagcagtcttactgccggttctgcttgtattctttggttcattcatgaatgtattcattcaagatacttattgagtctctatccttgagaaacttctcttctagtagggagtattatcaacaaataagataacttcatagaatggcaagtgctatgaagaaaaataaagggagcaagggtggctggggtgaggagactgttggattatgtggtcagggaaggcttttttcagcaggtggtgttttagcaaagatctgaatgaagatatggagccatccaggaagacattttagaaaaacattgtaagtacaggagacggtggagataaaaggatagacacaggaaagactttggcatttgagtttcagggagtcagaattaatactggtatatttgaattggtactgatccacatgcttccaagatgagaaggggtaggcaaggctgggagggtagatcatakaggctctaaaggctgtggtaaggagtttggataattta

SEQ ID NO: 905026 - DNA, 577 bp, Homo sapiens
aagttaaatatttttcatactatatggccatttgcaatatgtgagtcagccggcatttgctaagaatggtttaacatttttctgatgctgggtaactttctttggctttcagcctcaacagcaacactattcactacattttaaaaatcagttgtcatctcatgagtccacaaatatagccattttcccatagctttatcacacaccatagacgttactttagtactttatggagtggcctcacgtagatatcaaagaatttattcttcccttttctagatatacagtattattgattattaatattgaactgatgaccaaccccactatacccataccttaatgaagcttatctaatgcccatatttgcctccataaagaatattacagtaaacttgtgctttggaacaccagatagcactttagcattacacttgggggccattttaaaaagtgaaatcacaaacaaaaagccccaaaatgcaaaaaacagggcattcaatagacctggaaaaggttacttatatacagtatgagaactgaaacaagaaggyagagtctcactttgttcaacctc

SEQ ID NO: 905027 - DNA, 624 bp, Homo sapiens
tccaggagacacaaaaaacagaagacacagacttttaaaaatttgtccaggaaagctactaaacaaaaaggcaacaaggacaacaaaaataacaaacaccaaaaacagtaaaccctggagagtaaaggggatttgatttctggaactgccacattataatattcaaaatatttagcattcaacaaaaatgtattagatattttttaaaaatctgggaaattatggtgatatgtcaaccaataagtccatatttagcaaatgaaggggaaaagagatattccaaaatgaaggggaaataagagattctcagataaacaaaaacctgagaggatgcattaccagcagatttgccctgttttaaacactaaagggagtcccttccagtgaaaaggcaaatattggcaacaacaacaacattattcaactttatgctgcctacaagagacaaattatagattttaagacacaataggttgaaaataaaaggagagggaacctaccatgaaattagtacccaaaggtgagttgaagtgactatactgctatcaaaactgacctttaacaagaagcgttaytaaagccgaagaaagacatttgaaaagataaaagcatcaaaaaatatgt

SEQ ID NO: 905028 - DNA, 556 bp, Homo sapiens
cccacgtagaggggaacaacacacattggggcctattgaaaggtggagggtgggaggggagaggggatcaggaaaaatagctaatggatactaggcttaatacctggawgatgaaatagtctgtataacaaagccttgtgacactagtttacctatacctatataacgaacctgcccatgagtccctgaacttaacataaagttttaaaaacagacacacacacacacacacacacacacacacacacacacacacacaaacctgacagtaatcctttctctcacagttctggagtccagaagttcaacctcagcttcactgcaccaaaatcagggtgtagccaggaccatgctccctccgaaggctctaggggagaatttgttcttccttcctccctctgccagggtgtgggcattccttggcttgtggccacatcactccaatctgcctcagaggctgcatggcctccccctcttctacacatcaatctccctctgtccctttcttgtaagcaggcacgtgatgtctcctagggcctgtgttagtttcctgagg

SEQ ID NO: 905029 - DNA, 591 bp, Homo sapiens
tgaatttaatgccattgtttttgtttgtttgatgggagggaactcctgaatgtttctgaaggtggaaattgatgataaaacaacaatcctacccccttkagagaaactatggaaaaaatgaactcatggacaacttataatactaatatttttgtgtagacggcataccagtaaataaggctctgcttttggagcacagtcatttagttacttactcatgaatattggttttgagggctgggctgtgccatggattgagcctcagttgtattacttagtttttaataagaattctgatgcaagtcatggccaaatgtgcaaggcaccctttcaaacaaccatcacatcagacacttgggacagctgacccattcgtaattgagcatataattctatatcttgtctgcaatatagatcctacgatggctgcatgcagaaaactttctcagatggcttgcctacaggctcttaggtgcaatctgtattgtccatctcttgaaacaaaatattctgtaggtgaaaaagaaaacaaacaatcctatccttcattccacttattaacttataaccattcagtagatgaatcataaa

SEQ ID NO: 905030 - DNA, 565 bp, Homo sapiens
tccgtacttccaaaaagctgcccattcttctccagctgtgcacctgattagatagtttccactccaagacccatgattggatgtagttcaattccctaccctgccgcctcagaccatgagtgacatatgtgatttgacactgggttgaataaagcaagaattataggtttttcctggatccttttctggcagggcttcctctgtgaactagaaactggccctgcctgtaaaatatttgcatttacatttgtatgtaagattatttgtattaatgaataatatatatgtgttattcatatatggaatcaatataatgacaattgttttaaaatttcagatgttttactttcctggcacatcccaggttttagagcaggcagcctgagatttcaaaagggaggcaattctctaagaaataatatgagaggcacaagtgaattttaaatattttggtaactacwttttaataagtacaccgggcatgcttccctgtgcctgtaggtcgaactattagggagactgaggtgggaggatcacttgagaccaggagtttgagaccagccca

SEQ ID NO: 905031 - DNA, 625 bp, Homo sapiens
tctagaacttcctgcaggtgtcattgtgacaaacatacacatttgtccagcacctgagtgagtagactctcctgtttaagcccatctcacaaataaaattgggacatatcattggacctagarcgtaggtgatgtggctctattctctcgacttgtgctgcccacagggagcattgtaacatatcactgaacttaacacctaggagattgggggctcctgcctgaactctgcccacagggaggcagagcatatttctgccttgtagcatatttctgcctccatcaccagatgatgtgactctcctttctgcctgcaccttgcccacaggaaagattctgacatatcactgggcctagtaatcagtaatcaggtgatgtgtctctcctgccatggctttacccacagggagtgtggtgacatatcactgagctcaatattcaggtgatttgactctgctgcttgtactctgatttcaggaggggattgtaacatatcccgggtgagcacacaagtgatgggactcccttcctagcctccgacctcataaaagattgttacatatccctggcccagccttaggtatgtgactctcctacctggtccctgccatcaggggagatattg

SEQ ID NO: 905032 - DNA, 670 bp, Homo sapiens
  misc_feature 347: n = A,T,C or G
cacaaaaagagaagaccttccagaccaaaactaggaagtttggaaaaatgagaatcatgaaaatatgcgtattacacatacagccaggttgaagaagacagaaagcattagaatgtggaggaaccttatgagctagaatgcttagtacttaaagaaatgtctttgggatcagccatgctcctgggatgaatcctgacctggccatgatctaactgtcaccttaaccatgtcaccgagaggcttaacctgcacttacttctttcatctgtaaaatggatggcataatagtgcctgcttcacagaggcatggtgagggttgaataagatcatgcacattaagtacctangacccagtaactctctgtaattatgctgtgtttgagatcataaagctcttaatcattataaaagtacctgagaaattctggaatgctataacaggaaaacttctgaaaatatagactacccctaggcaagccctttgttttacacagcaagaaagtgagacctaatcagttagaggcaagatgcttctcgagtcagtatagtgagtttttattgtgcactgaattacacatctacagagcttcgtgtagcaggaaactgtgctcagtttgcccaktgctcattcctaacacctttttctcgtgcgtgttcccatcccatggcc

SEQ ID NO: 905033 - DNA, 626 bp, Homo sapiens
cacagtaaatatgcgtagaacagctcaratccctttggatttaaatgcagaggacttctattgttgttttccctacgagtgaaggataatttcacagagaataatgtgtttgtgcagaaaatttaatgtgtgagcaatgaacgaaacatggatttctcacatgacctagctgacctcttctttgtatatttcccaaaatatgttcattagagcagttgactgtgatgatgctcagcaaaattcgaagatgaagagaccctagtgaagaatgtgtgggaaatgttgcattcttggtctctttcctgcactgccacaggctgcattggcatctgaaaggctcccagaaatctggcagcaaataaacaactttagctttgtttaactctagcatctctcaaaagcatttgacagcaagcgcttttgttcacagagcgtgttttagcatctagcagcgttgagtgcttgtggaaacacactttggcacatgctgacctatactggtatcttctaggcttatgtaactaatggacttaatggggagtaatggattaaaagtgctgagatgccatttctgtgagtctctggggaggatagagaacttgatataaaaccacagaattaccact

SEQ ID NO: 905034 - DNA, 572 bp, Homo sapiens
tagtaatagccattctgaatggkgtgagatggtgtcttattgagtttttgatttgcatttctctaatgattagtgatgttgagcattttttcatctgcttgttggcctcatgtatgtcttcttttgagaagtatctgttcatgtcctttgccaacttttaaatagggttgtttttgcttgttaatttatttaaattccttatagagtctgaatcttatactcttgtcagatgcatagtttgcaaatattttctcccattctctaggttgtctgtttactctgttgatagtttcttttgctatgcataagctctttagcttaattaggttccatttgtctttttttttttttggtcacaattgcttttggcatctttgtcatgaaatattttccagagaccgtgtacagaatggtatttcctaagttatcttccagagtttttacatttaagtcttcagtagttttaggttttacatttaagtctttaatccatcttgagtttatttttgcatacattaaaaggaaggggtccagtttcagtcttctgcatatggctagtcagttattcaagc

SEQ ID NO: 905035 - DNA, 572 bp, Homo sapiens
tagtaatagccattctgaatgggrtgagatggtgtcttattgagtttttgatttgcatttctctaatgattagtgatgttgagcattttttcatctgcttgttggcctcatgtatgtcttcttttgagaagtatctgttcatgtcctttgccaacttttaaatagggttgtttttgcttgttaatttatttaaattccttatagagtctgaatcttatactcttgtcagatgcatagtttgcaaatattttctcccattctctaggttgtctgtttactctgttgatagtttcttttgctatgcataagctctttagcttaattaggttccatttgtctttttttttttttggtcacaattgcttttggcatctttgtcatgaaatattttccagagaccgtgtacagaatggtatttcctaagttatcttccagagtttttacatttaagtcttcagtagttttaggttttacatttaagtctttaatccatcttgagtttatttttgcatacattaaaaggaaggggtccagtttcagtcttctgcatatggctagtcagttattcaagc

SEQ ID NO: 905036 - DNA, 703 bp, Homo sapiens
aggtggtctcgaactcctgacctcgtgatctgcccgcctctgcctcccaaagtgctgggattacagatgtgagccaccaygcccagccagcctggccacgcttctttgaaattgttcagcaagaaacaggaagagaagaaagtgtccttttgtgctagatgcattttgagaacacctttctaataccactgtacaaaagtattagtcaaggagtccagttatcttgattacataagctagaaaatcttccaaacctgtttgaacagaagaaaggagctgagacatagcccccagtggatgcccctggccgaggtgtcactcatcactctcacagtttgatctcaggacatcatttcctccctccttttcttctgttctgtgggattctttgaagagtgttgagaagcctttacatctgattttgctccacaagccaaggctcctcttcagaccaggtgggttttcttttcatcctgctttgatccttcccagggagggcagagaaggaattctgctgcctggaactgctgctctccttctctgcccgtgggcccctgggcccctgctggatgcttggggatgtttcctattagtgggcagagcttcccctccgccctttgaacttcatttccttaggagccgggaggacctgccctggctgcctgtgcggtgcatttgcattgactgcacagtgcagaggttg

SEQ ID NO: 905037 - DNA, 608 bp, Homo sapiens
tgtctttaaacacaaactacacaaagcaaaggcaatatatataacragttgaccccatccatgttaaatgaaccatcaattaattccgcaaactatatcattctaattctctcttatgccttgcttttttttctcagtatgcctatgagcagcacatttgatcacctgggagtatttaaagaacaatttttcatgggtagggcatcagggtgagcacagtgattgcaaacaagagttaaaactgcacatcgtcataatgggaagagtctagacttggatttcattttttgaaaaattacgaagatgtttaggacaaaaactttttttatttccacatagaatacttaagaaggctctgctgtctataatcagattttagtggaagttttaaagtaagaaaaataccaacacattactaaataggaaaaaaatattaagatgtgatactaagatactgctactaaaaattctcaagaataggcgttctatctcagaagtagctcatacagaaataagagtacgttaaattttttatgtatattattttttccagtagggaaaatttactctatatttcaatacagactttagtcagaagcctaaaagaa

SEQ ID NO: 905038 - DNA, 636 bp, Homo sapiens
ctgaataatcttgggcaaattacttaaactgtttatgcctcaatttcttaatcttttaaattgggatgacagcagtaccctcctgatgggatacaaatttgaggattaaatacttaacacatgtaaagtgcttaaacagggtgtggcatatgggaaacattgtaaaaacgtttattctgtaggagatatttgaggagtagtagtgatagtagtggttttattgatgctattcatggaaaaagatgcttctaaaaactactgatatactttgaccaaaacttcttacttgattctcaagggtaaaccctattatatatcatgtgtcaaacataacaatatgtaacaatatgtttttatatataaatatttaaggaagttgtaacagagatccaatcctttttaattctggcattttttatgaatatagataggatatatgttaatggaaatagtataaattccatcagataaaacccacaattatccggaactctcattgacttcagtctcctatttggggcaatttagcacgttttcacatctcastataactacttctagtcttttaccacctgcttcatttattagatgataagatcacttgctgtgtgcaccccaagatctcagtgacttaac

SEQ ID NO: 905039 - DNA, 606 bp, Homo sapiens
tgttttgattttatatttattttatatgttatttatttcagaatatctagaaagtattaatttgtgtaagtagttgtgattttaaatactaccatgtttgttttatatatgaatatcaaaaaaactccacaaattttccaaatggaaatattgaaataaaacaaaaacccacatggttatccaagataagaatgaattgggtgattatggttcatttttatttgataataatccaagtatccaagcagttgctaaagatagtggcactatcaatataagaaagctattgctgttgagggaaaactattctaaaaatcatttccttgattgtcttccttatgaacctcaagttatttgactgtaggagttagtttttccccaagtaaaattgcaagcagccattttactggattgtgttgggttctgtgttttgcaagtaagatgtatcttcttaatgtgtttattgtatgaaaaggcaagacatagattttacaacaaacataaaatctaacagagccttccttatctgttgtttcccaygagggttcatttgacatctacttgaactatagtaagctatttttataatgaggctcagataatcaa

SEQ ID NO: 905040 - DNA, 570 bp, Homo sapiens
catagactctgagttagacgaacacagatgggtaagggatggggtggtggagggcttctgaacctgaatgctccagcccatcccttaagatcccgccctggtaccaccttctcagggagcttttctcaggtgctragtcactccatcttccaactctgcatccacatgtcttggcactcacctccccagcagctcttaccaataactgttagtttgtttggattccctgaatagactgtgaagctcctagggggcacagcttgtagtaggtgttcagtcagcaccatggagctgactgggcttcagaggatgagcgaggtttgagaagtaagacagagacttgatatgagggcagccacaggataagcccaaatgcctttgggaattgagcctaacaaggaagagagggctgcatgatgggtgggagcccgctgagcccggcaggagggtttggatttgtacaagggctgtagggagccctgagagatttatgaacaggataaaggtgaagctggtgagttgggaagggggagatcagtgaggaggcccatggtagctcaggtcaaagct

SEQ ID NO: 905041 - DNA, 640 bp, Homo sapiens
ccgatgccaacctcctcaacgaccgggtgctgcggkccatgctgaaggcggaggagacctgcgcgccctcggtgtgctactttaaatgtgtgcagaaggaggtgctgccgtccatgcggaagatcgtcgccacctggatgctggaggtgcggggctgggggcggctctcttaagacttccctgcaacttgttgcccagacccacgtttctttgctactcacccccctcccttctctcccgctagaactttgaagtttgccgtggtgtttctagggatccgtattttcaaaataaaaattgcgggtattttctgaaggaggaaggggtgggggtgggggtgctagaagtagcgtttcgtgggaggggagaagggggtccgggaggggtgccttcgggagaagccagtgccaggggcaccccaatgggcccgagggtgcgggctggcaggctgggtgcgctttgtgtcccccgcctgcgccccagcccggctgcgcctcagcggccgggagccgccaactccggggggagggggcatagatttgatttttaaattaatatccatggacacgtatgcaagggccgctcgtgccagtattatgcgccatctttgctcttttattgcaaagcaaaagtgtttatt

SEQ ID NO: 905042 - DNA, 616 bp, Homo sapiens
tatttataactacttagaacaatgaatggcacttaataaacatttagtaagttttagttactgctggttgtactttgtaattaatcataatacttattgtttcagtattatcagtgggatggtggtggtaccgctaactagaataggtaaatgaagaggaaaagaaagttggaaagctaaggtagtagtacttcaattttagatttactgagtctgagggccactcgtgtatctaagtagcagtatacagcaagctataactggagctctagtgcgacactggctagaagaaagtgagaatgcaagattgccttctaaaaggctggggtactaagtagaaaccagtgcattcaggaatacatgaagtgagactatggggataggatgtttagcctattctatcaagaaattgtagaatgagatggcaaataggtatgacaatagccagataaaaggagattacttaaaaataatttttaaaaatttaaataaaatgggatagatttaatatctacagactgaatttatacaaakccagaagaggggtaggagaggcataaacaaaaatcacaatgaaaactaataaatactaatgatttactaatagaaaaacatg

SEQ ID NO: 905043 - DNA, 606 bp, Homo sapiens
ttgaagagtttgaggattggcattaattcttggcatgtttggtagaatttactagtgaagtcagctagtctgggcttttcttttttgggagggttttcattactgattccatcttcttattagtaataggcctgttcagattttctatttcttcaagatttagtcttggtaaattgtatatgtctaggaatttatccctttcttctaggttatccaatttattggtatataattgttcataatagtctcttatgatcttttttatttctgtggcgttagttgtaatgtctccttttttatttctgactttatttacctgagtcttgtcttgttttattagttagtctagctaaaggtttgtcaaccttgtttatattttcaaaaactaaactcaattttttttattttttctattgtttttctgtactctatttcatttgtttctactctgatctttattctttccttctgccaactttaggcttagtttttcttyttctagttcctttaagtggaacactaatttatatatttgagatctttcttttttgatgtaggagcaactttcattgctataagttctcccttagtactagttttgccgca

SEQ ID NO: 905044 - DNA, 629 bp, Homo sapiens
ccaaattcaggttttctgactccaagtacagtgattttttttccattaattaaaaaacgtcattgactataaagaaatttaaatttatttttactaacaccaaatgttagggtttatattcaatgttttgactayattcatctgccagtctctgtttaccattatttttaatgataacattgatatttaaaagttttgtagtctcctaaatttttaataatataaaatctgcctcttctctttctctaggaagtcttttaatagtcgattattgtgtaaatcaatatgacaataaataaaaggacattttaaatggtcaggttaaaaattaaaagatggctgaatcacacacaaaatgcataaattcaccacacataaatcaaccaagttgactgtagagcgatttcaactatgttctttcaaaataagaaacactgaacctgtaagagagtatactcggataagatagtgatgcttcttttaaataataagatgaaaacattctctaaagcacacaggtgctctaaatatgagacccactctaaaatttttcttcttttgtgtagatttgccattctgagcttttgtgaccctctcttttcattttcttaccttccaaatggcctagc

SEQ ID NO: 905045 - DNA, 643 bp, Homo sapiens
cacaaaagatgttagtgattgctatttattaagtgtgtaggctaactctccgctagttttatttagctataagattcaatggttataagagactttctgcaatataaagaaagtaggaaaatgtaacatgaacataagcccgagcaggattataggttggatttagctgaatttaagctattactctgaatcagtttcccaattgtaggagtagataagccaatagcacatttcggggagttaaaggtggctatgatggttagaggggaaaagtggtaagaggtataaaaagaaaacataaaataatgatatagaaatgtatgggataaatttttagacactggtcatatgtctgatcccagagaacatttaacttatagcataaataagaattgtaggacatgatattttaattttctaggatttccaaattgatgccgctgactggtacagcaagaagcaaaacataattcaggaatatcattcatcagatagagaggtgggtgaagatatcgagacacataggatgaactcaatggaaagtcataaagagtaatttgctcaacataattttattgtgagaacagcaaaaagaaaaaaatgacacagagagagagcragaaaaaacaatatagaatcatac

SEQ ID NO: 905046 - DNA, 623 bp, Homo sapiens
tttacatactttttttttttaacagagtcttgctgtgtcacccaagctggagtgcagtggcccaatcctggtacactgcaacctctgccttctgggctcaggtgatcctcccacctcagcctccacagtagctgggaccacaggagtgtgcctccatgcctggctatgagtttttttatttgtttgtttgtttgtttttgttttttgtatttttagtagagacggggtttctccatgttgcccaggctggtcttgaactcttgagctcaaacagtggctccaccttggcctcccaaagtgctgggattacacacatgagccaccacacccagccatcgtttacatacttaaactgacacaaaagatatatgctataaagaaatccttttaggttgatatttaattattgattaaagtctgaaagtttattagacaagagagtaaccagaaaacacaatgatttctctaaggaaaataattatttttccgagtgttaattgaccaacattttacttgtttaatatatatccttaattttttcttcctattaaatgatataatattcatgataaacatgtgttttgttaaatttaaatgattayatatttagctgctactatatc

SEQ ID NO: 905047 - DNA, 641 bp, Homo sapiens
agtaatttgccatttcatatacattataactttgattttctcaccaatttaattctttctgatgtagttagcatctaaattgttttttaaataataaaatagattttattttaaacatgttctayataaatttattattttcatctgcaaatggtacataaagtacttttagttgatataaccttaaaaaataaaaatttcaatgtatacattatatatactctctctctctccatatatatatatatacacacacacacatacacatacatatgtagaatccaatcttaagtggcaaacattcttatatttaaccattgcatgacaactgaaatataaacaaaacagaaatagtgattttggcattgccaacatagaagattggaatttaaataacataatgtcaaaaataaagtaatttgattcttttaaggactaaagtaactttttaaaatgcacttgtagattctgtctgattgattttctgtttctgaagaataaaaagacagacatagaattgtagctaccaccaaaggatccaagattataactaaaaaacaaatcaatacttaattttaaaacgtccccatggaaagttttagaaatataacataaactttctatactagcccctgctgaga

SEQ ID NO: 905048 - DNA, 617 bp, Homo sapiens
ccttaagaacctgttgcattgtaacaactgcaacaccccctaaaaccaaatgacaagaccattcctcttccaatgattagccgtaaaagaagtatttttactccctcagataaccctgtytcttcaggtgcttaggtcacgtaagctactaaataataaagttaaattactacctcacatatttttcatcatatgctctcttaattagaatagcattcttgaaatagaataagcactaacattagaaaaaaacagacttaaatcaatgcaacagtttaatgctccctaaataaaaacacatctacatgtatcatgggctagagacgttaaaaatttctaggaagaaaagcaatatttgccttataaacactgcaactctttcctctcaacattaaaacccaaacatagaaaccagtaagttagctgcatttacagccccttacaggttttaaatgtcacatctcagtgcctaaaaaagttactccatcgtttcgagataagtttctgagaacaaagaaaactctttaaactactgaactgcattttattctttccttttccgtgtgaccatctgcaaaagcaacagttgtcagttaaacagaatcaacctctttccc

SEQ ID NO: 905049 - DNA, 616 bp, Homo sapiens
gagatcgcaaactatttgtctttacatgcctaggttatttcactcaacataatgtccttcaggttcatccatgttgttgcaaatgacagaattttttcttttttaaggctgaataatattcctttgtgtatatataccatattttctttatccattcatctgttcatagatacttgggtcaacttttaaagaaatgcatatttcctttcagtttattttgaatatacagtacacggtttggatttttcaactcttttaaagaggagcaagaacagtcagcttgtttgtagtaaatcttgtacagatgtgagaaggtcctgattgctctatgccaagaatttgtttgactacaggtctgtggattagaacgggaaaatggggatagggacaggagtccaaattaagtgtcagaaaataatcagtttaatggcatgctcaggcagttgacaaaggcatagcataaacacaggcaaggtccaaagtacyagtcaggaaccagaactgaagtcaaataatattggcaaggtagcattctaaaacatctaaaaggctgttgtcaagccaacagagtttcctgattcctcacctcctttgaggaggaaaaacagtggcttgg

SEQ ID NO: 905050 - DNA, 671 bp, Homo sapiens
tgacctcatcctatatgtctttgttggcacttcatttgtaaaatattcactgggttcaaagtgaaattctaagacaaaactcataggctggccagcatccragaacttcactttaataaatttaaagtgcttcagaataggttcatcatgttcctgaagcatatcactaagcaagtcaacattcttaaaaatagttaaccaaaattcaggaattcctatgggctcttctttttcttcatccttcttctcttcttcaatcttggccttttctttcaactcctccgaaatcttgccttcttcatctggtttccattcacattcttcttctgtgggttcataaattgcattaataatctcaaatcgcttatcaaatagaggctgatagagaacagcatagagaagtgataactttcaaaccaatctaaaatattcaacttgtgaatagaaataaacaaagaaaagtaaattaaacaaagaaaagtaaattattaaattaaaatattggctcttagattttagtggtaaataaattttttccctgggttatcagtcagtaacattagcttttggttataaatcagtttggacaagtattgtctccttgggttctagtggcttttacccaagcccataggaaagcaatcttcctgatccagattccctactaataa

SEQ ID NO: 905051 - DNA, 606 bp, Homo sapiens
acatctggtaggttttgaaacaagaatttggactaatctcaatcttactccaaagttctttcctcacgctagtagttttctgttgaggacccagagaaatccctttataaaggtgttttatattagaaaagttaattatgacaaattcgagtattaggttaaaacaaaacagaaaaaaatggaaaatatctcttcaggaatttggatactagaactaaaaagacatttgagagttcatgggcactgagtactagaaatggaagactttgggaacggcaagctaatgggaggttcttatctcacaagaaatctcagtataatttgaaatacattaacagagtcgcaggggagtaccccatcaaaattgaagaaaatcagttatcaataactaattagatgtagtaaggcagtattaatttgctgagaaaggctgtagtctgagtgactatcagaacagctggaaggagaatttggatggagggagaatgatgacataatacttaccataaggtggggctggcaattgtttacattagcaaatgcgaacatttccattgtgcrtgctgtgagcttctaggtcctggcatgagcaacctaatttgtcac

SEQ ID NO: 905052 - DNA, 602 bp, Homo sapiens
aaacatataccatggtggtttgctgcacctatcaacccatccctaggtattaagcccagcatacattagctctttttcctgatgctttccctccccctgcttcccccagcagcagaccccagtgtgtattsttcccctccctgtgtccatgtgttctcattgttcagctcccgcttataagcgagaacatgcagagtttggttttctgttactgcattagtttgcagtaacagaggataatggcttccagctccatccatgtccctgcaaaggacatgatctcattcctttttatggctgcatagtattctgtggtgtatatgaaccatattttctttacccagtctataattgatgggaatttgggttgattccatgtctttgctatggcgaatagtgctgcaatgaacatatgtgtgcatgtatctttaaaatagaatgatttatactcctttgggtatatacccagtaatgtaactgttgggtcaaatggtatttctggttctaggtctttgaagaatcaccacacacagtcttccacaattgttgaactaatttacattccaaccaacagtataaaagcattcctatttctccacagc

SEQ ID NO: 905053 - DNA, 432 bp, Homo sapiens
ttggaagaggccactttagctactgtgtttagtagagagttctatgggttgggagtagatgagcagtgaactctgagagacagattagttggctgttacagtggctctagtaagagatatcagaagcctrtactaggctggggaaaacacagatggaggaacatgcacaaattatatagatatcaaagagtaagaacataaaggaacttaacaatcaattggacataaagtttgaggaataggcattgtcaaggatgattccatttctgacttactccacaggctgaataatgttgcctttcaattttttccagaatgaaactttgttaaagatggatatatctttccattagcagaaaaacttgagataaacttttgacagtttagcatctgaactcatcaaaggatctcaaattccaccagtaattgtac

SEQ ID NO: 905054 - DNA, 639 bp, Homo sapiens
tttcagagaccttcaggccagcccctcctatcacaggcccagagtgctaagaggactgaatggtttcttgtaccaggcccagggccctgccaccctgtgcagtctcaggacattgctycttgcatcccagtcactccagctccagtccaggctcaaaggggtccaggtgcctctcaggccactgcttcagaaagtgcaagacataagccttggcagcttccacgtggtattaagcttgtgggtgcatagaatacaagagatgaggtttgggagccttcacctagattttagaggatgtatgaaaaatactgggtgcccaggcagaagcctgctgcaggagcagagccctcatggagaacctctactagagcagtgaagaggggaaatatgggatttgagcccctacacagagttcccactggggcactgcctagtggagctatgagaagaaggcactgtcctgcagaccacaaagtggtagattcactgacagtttgcattcctgcacctggaaaagccacaggcactctagatcaggccttaaaattagcaccaggggctgaaccctacaaagccataggggcagagctgcacaaggctttggaaacccaccctttgcaccagcattctctggatgtg

SEQ ID NO: 905055 - DNA, 719 bp, Homo sapiens
agcatgagagtaaccacctccatgattcaattatctcccaccgggtctctctcatgaaatgtgaggattatggtaactacaaatcaagatgagatttgggtgaggatacacacaaaccatatcacctggacacasagagcgtatgtagtaaaaagggcatttaagtaaataatataacagaattgcagaggacacaatgcactctgaaaacactcacaatttgatctgtaattgtaactagctttaataggacataccaaaaatagacatcacatattgaaagagaaagaaagagagagggaggagagagagagaaagaaagagagagggaaagaaagaagaaaggaaggaaggaaggaaggagtctacatgctctctatccaatcaaataacagtatccagaaaacatgaacacgaatgtgcttccgagtaaactatgtaaatattctcctttccatcttgtcctgcattctaatgcaggccaatggcatgaatccacattgtccagtgacatagtctgactctatttcgtcctcacacactgtgtttgtgtgtcagagctcatttgtccagctgagggctttaatctcgtgctccatccctttctccccattgcaccttgctattttacgtggcgaagcaccaaacccaaacttctcaccaagaggagcttcagttatttgatttctactaatatgtgagattaatgtgtagtgttc

SEQ ID NO: 905056 - DNA, 650 bp, Homo sapiens
caacataaagaaagcaagttgattaattggttgatatgcaaatacaagaataaaagaagaggcctatgaataagayttcatatttcacagagtgggtgaaaatgttactaccaactctcattagaacttaacaaatgcttggtaagaaaatcagtaaggagatgcttgaagagtattctaatgagatagtgataagggcagtagatggaaaatacagagacaggttagtttagcttgcatcacaaagtttaatgaaccatataaactttcttcctctcagtttctccatctgtaaaaggaaagtagttaacgtgtattaaaatgattcatctgtatgcagttgactactgcaaatcatagagacgatgtatctacttttcataagttttacattcaatcttttagccttttccctccctctacaattattaacctgttcaaatgagtttactttaatacacattttattttgtaacctgtactgctgacactttcattacattggacaaaaactgagtaaacattgaaaaaatgagaactatttaatatttcccttctgattgaggtgacaatattattttttaaatctagaatagtctagaatccttaatatccataatattcataatcaaaagactgaagcaagttat

SEQ ID NO: 905057 - DNA, 640 bp, Homo sapiens
aaaatagccagttagcatcatgatgacaggatcaaattcacacataacgacattaaacttaaatgtaaatgggctaatgccccaattagasacagactggcaaattggataaagagtcaagacccattggtgtgctatattcaggagacccatctcatgtgcaaagacatacataggctcaaaataaaggggtggaggaaagtttattaagcaaatgcaaagcaaaaagaagcagggttcgcaatcctagtcactgacaaaacagactttaaatcaacaaagatctaaaaagacaaagaagagcattacataatggtaaagggatcaatgcaacaagaagagctaactatcctaaatatatatgcacccaatacaggagcacccagattcataaagcaagttcttagagacctacaaagagacttagactcccacataataatagtgggagactttaacaccccactgtgaatattagccagatcaacaagacagaaaattaacacggatattcatgatttgaactcagctctggatcaagtagacctaatagacatctgcaggactctccaccccccaaatcaacagcatatacattcctctcagtgccacatggcacttattctaaaatcaaccacat

SEQ ID NO: 905058 - DNA, 627 bp, Homo sapiens
agctactgatttctgtacattaattttgtatctggaaactttgctgaattcttttatcagttctaggagctttctgggggagacttcaggattttctaygtaaacagtcatatcatcagcaaacagcaacagtttgacttcccctttacccatttggttgccctttatttatttatcttgtctgatggccctggctaggacttccagtactatgctgaagagaagtggtgagagtaggaatccttgtcttattcctgttctcagaaggaatgctgtcagcttttccccatttagtattatgttggctgtggtggtgctaagaggaaagttcgtagccttaaacacctagatcaaaacatctgaaagagcacaaacagacaatctaaagtcgcctttcaaggaactagagaagcaagaacaaaccaaacccaaacccagcagaagaaaggaaataaccaaaatcagagcagaactaaatgaaatttaatttaaaaaaataaaagagataaatgaaacaaaaagctggttctttgaaaagataaataaaaatgactgctagaccattatcaatattaaccaagaaaagaagatagaaaatccaaataagctcaattagaaatgaaacca

SEQ ID NO: 905059 - DNA, 620 bp, Homo sapiens
ttccctttctgtaaaagcaggagggaaggtgagaccaaatgatccctaaccctttctcctttttggagactcagattagtatccagagtgcactttccagagggagacaccaggcatgtcgtccactccacattggtctagcccttcctagaccactgtggaaacacctagaccctttcctgaggttgtctgggggaggggacagggaaggagtttccagtagggaagggcttagtggcagccagcctcccactctcatcagcaacttcttctcctccaccatcccacactgccctgctccctcccagttcccacatccttgaccagaggagaaacacaaattagttgctcagtaggaaaaggcaggagcccctgccccttctacccatcccatctgcaatgggagaggggaagtggggaagagggctgggttcacagtcaaaactggcctcctcattttacagatgagcaaacccacacctagagagaggcaytgagtacccactcaagggcatacagcaagacagtgggagtgccaggattgaacccagcgtcctataagcctttccatatcatcaggctgcccctctgaggagggtctctaactaattcccacatcc

SEQ ID NO: 905060 - DNA, 620 bp, Homo sapiens
ttccctttctgtaaaagcaggagggaaggtgagaccaaatgatccctaaccctttctcctttttggagactcagattagtatccagagtgcactttccagagggagacaccaggcatgtcgtccactccacattggtctagcccttcctagaccactgtggaaacacctagaccctttcctgaggttgtctgggggaggggacagggaaggagtttccagtagggaagggcttagtggcagccagcctcccactctcatcagcaacttcttctcctccaccatcccacactgccctgctccctcccagttcccacatccttgaccagaggagaaacacaaattagttgctcagtaggaaaaggcaggagcccctgccccttctacccatcccatctgcaatgggagaggggaagtggggaagagggctgggttcacagtcaaaactggcctcctcattttacagatgagcaaacccacacctagagagaggcactgagtacccactcaagggcatacagcaagacagtgggagtgccaggattgaacccagcgtcctataarcctttccatatcatcaggctgcccctctgaggagggtctctaactaattcccacatcc

SEQ ID NO: 905061 - DNA, 651 bp, Homo sapiens
tcctgaggcacccctaggcaccagcctgcctcccttggatcactcattaaaaaaaaaaaaaaaaaaagaagccaggtcacctcaactctgtacacwgaaggggacagatggaaccacaacacaggttacgagagacagagactagaagaaacttggttggcacctcacatcccaggaagcttatgacaacctttgctctttgacaaaacccagtgatgttctgacccaactctactaagaatccaccgtgtcagagtcctgtgccggggcattgagagagaggaagcacaggctctgcccagggcaactttcagtctgaggtgggtaacagagacgctgtataagataagtcccctgtctggtggggagcgggtaatctcctgcttgagaggctccagcctattggcagagacatagcacttaaccagagggatgcaccggtcctagctctctgatgagataagggcttggggttcgtttgggagacccctgcagaaggtagggtttggggagggctctgagcaggggaagagacacacgccttggtccagagaaggcaaggcacaaaaggttatcaaagcccctgccccctcaacccctttactatagaaagagaaagtacagcccagaaagggcaagagattactccgt

SEQ ID NO: 905062 - DNA, 562 bp, Homo sapiens
ctctgcatacaagttaacatttaaaaaattaaaattctacatctacaaagcacaatagttgaattgaaaattttacccgataggcttaacagcagtttagataggacagaagaaagattagtgggttttgggatagggtaatagaaattaaaacagagaaagaaaaatcactaaaaacaaaaaacatatgttcaatgtcatgtggtataacatacatgtgattggagtgccagaaaaagaggagagaaaaattggggtagaaaaagatatttgaaaagataatgcctgaaaaattttaaatttactgaaaaaaatattaacctagagatctaagaagtaggataaacacaaagcaaactgtattattttagattgattcaaaagcaaaaacagaaaatttaaaaagtagtgaagtaaaaagaacacattgatgtaggataataacaataaaaataacggctaaactttcatcattataaatgcagtccaaaaaaattgaatgatgcctttaaaatgctgtamgaggaaaatagttattaacatagaattctatatctagaaa

SEQ ID NO: 905063 - DNA, 220 bp, Homo sapiens
gagaacacatggacacatggaggggaacaacagayactgggacctattggaggatgaggatcaggaaaaataatgaatggctactaggcttaatacctgggtgatgaaataatctatacaacaaacccccatgacacaagtttacctatgtaacaaacctgcacttgcacccctgaacttacaataaaagttaaacaataaaaaacctctgactattttt

SEQ ID NO: 905064 - DNA, 546 bp, Homo sapiens
gccctgcagtacagtttgaagtctggtagcatgatgcctccagctttttttttttttttttttttggcggagtctcaytccattgcccagactggagcgcagtggcatcatctttgctcactgcaagctccacctcccgggttcacgccattctcctgcctcaacctcccgagcagctgggactacaggcgcccaccactgcgcctggctaagttttttgaatttttagtagagacagcgtttcaccatgttagccaggatggtctcaatctcctgacctcaagatccgcccatctaggcctcccaaagtgctgggattacaggcgtgagccaccacaccaggcctgatgcctctagttttgttatttttgcttaggattgtcctggctatttgggctttttttttttttttggttgcatatgaattttaaaatagttttttctagttctgtaaagaatgctgttgatagtttaagaagaatagcattcaatctataaattgtttggtcagtatggccatttaacaatattgattcttactattcc

SEQ ID NO: 905065 - DNA, 546 bp, Homo sapiens
gccctgcagtacagtttgaagtctggtagcatgatgcctccagctttttttttttttttttttttggcggagtctcactccattgcccagactggagygcagtggcatcatctttgctcactgcaagctccacctcccgggttcacgccattctcctgcctcaacctcccgagcagctgggactacaggcgcccaccactgcgcctggctaagttttttgaatttttagtagagacagcgtttcaccatgttagccaggatggtctcaatctcctgacctcaagatccgcccatctaggcctcccaaagtgctgggattacaggcgtgagccaccacaccaggcctgatgcctctagttttgttatttttgcttaggattgtcctggctatttgggctttttttttttttttggttgcatatgaattttaaaatagttttttctagttctgtaaagaatgctgttgatagtttaagaagaatagcattcaatctataaattgtttggtcagtatggccatttaacaatattgattcttactattcc

SEQ ID NO: 905066 - DNA, 628 bp, Homo sapiens
tctaggttgctgtcttctgggataaatgaagcaaaagaaacccagggaacttcatcatgtcttttcctggtcacatgggggagcagtaatgaggcactcctgtttttctcaagtggtagggtatcagtgtaagtcttgaattgagctgaaactctgatccccaccgataatgaggacccaaccctgggttcaagacagcaagtagagagccagacattccacctggagctgatagaaatcaggaaaattcctcaccctttccctgtaggagtggtgtcaaaaagtttaggatccagggttgggttgtgaaccttacccgatcttccttcttctccccacctttctttctttcttcctatgtctcttttatatataatatccaggatttggggttatacttagttaaaggaatagggaaaagatatctaattgatctttctataatcagatgccccaatattttaaaaattaatttctaataaacttataggaatatgtttctagaagagacaagtaagtcaaaagtcaaatattatacagcatcttcttattcaactcataatgttactccacatgactgaaaacctgaataggatttcaatagytttttcttaagaccatgcacaaa

SEQ ID NO: 905067 - DNA, 577 bp, Homo sapiens
tgcaaatgacataaactcatccattttttatgtctgcatagtatttcatggtgtatatgtgccacattttctttatccagtctttcattggtgaacatttgtgttggttccaagtctttgctattgtgaatagtgccacaataatcatacacatgcatgtgtctttaaagtagaatgatttataatcctttgggtatatagccagcaaagggattgctcggtcaaatagtatttctagatctagatcctagaggaatcgctgcactgtcttccacaatggttgaactaatttacactcccaccaacaatgtaaaagcattcctatttctccacatcctctccagcatctgttgtttcctgactttttaatgattgtcattctagctggcatcacatcccttgtaagctgtattcctaggtattttattcttttagtagcaattgtgaatgggagtccaytcatgatttggctttctgtttatctgttactggtgtataggaatgcttgtgatttttgcacattgattttgtatcctgagactttgctcaagttgcttatcagcttaaggagattttg

SEQ ID NO: 905068 - DNA, 619 bp, Homo sapiens
aaggctgacagtaattttccaagtgtttcagtttatctacaaatttaaaatgaacacttttacagcaaaatcataaatgctgaaaatattttattgttcaaatcattttaaaatatttcccaagttgattttatacacatattttaaataattataatgtccactttggacatggcttgctgaattttactatgcagataaatcttcttttactaaggagatacccatcagtagccttgctgttgacatttgcgtaaagacattttgagatcacaagcagttaccaacatacgatctaatagtctccttattagcttagaaatcactatacttccagggggctgtaagggagtaagatagtctcctatttctcaggaaacactgaatgctaatgtgaagccttaaaatttgcaatgaatagagaataagagaagaattagaaaagatgcttaagaaaactgaaagtacatacacttaaaattgtacatattyaaagattttaaggaaaataaatactaataaattactaaggaggaaaattaaattaaatacagttatcttaaattattgggggtgagggtggtagggaggagtacaaaagtagatagacaaatataaa

SEQ ID NO: 905069 - DNA, 677 bp, Homo sapiens
aggcaaattcaggctgcgcaggaggcaggcaccattcccctgagggatggtgtcaacatccttaattgggcaccggcacctcctacaattattctgctaatgatctgcaacaaaagaaaagaaagggccctgatgcacttctccatgtgtcccagaaaagcaagctttcagaggtgaacattacttatagaatgcttaaaggaacagatgacaggcttgacgcaatcattgttattatttctgattctctgtgtaattctgccatttataatgtgatttgagagggttgctataaagcaacaccttcctgtaacacatataatattcctctagtccagggtacagcaaatgataaatgtgatgcccagtgttttcccctttcagaagggctccttacctgccgttgtccatgccctgtgggtttagagcttggcatttaaaaaccaggtggaagtaatttctctctctaccctcttagcatgttatctagccctctactaaattctcatgactttgcactctttattatagttactttttttttttttttgctcttgttcctgtaccttctstcttcttacagtttggacttgtggaaagcaaggaccatgtctgatttatctttgattctctggtatttaccacagtgcctgaaacccacagatgcttaataaatg

SEQ ID NO: 905070 - DNA, 565 bp, Homo sapiens; identical to SEQ ID NO: 904163

SEQ ID NO: 905071 - DNA, 723 bp, Homo sapiens
tatcgatttaatgtaacaacaaatatctattgagcataaataatgctgttgacattgaatattttggaatgcaaaggcaattacaactgtattaataaatcaagagtcaagataatacaacagttaataataaagtaggtaatgaagggttaaattgtatgtttttgggccacttacagcataatatacagaattgattgctaaaagatggattttgatcccacctttagtaataattagaaatctgattttgaaaaaagaaatctatttctttgagtgaaagttacattacctttgaaaggacgatatgttgatatctagggtgccttatagccataagatgctacagttcaaatggcaccatgtgttagagtaatacacacatatatgcagagacatataatgggcagatgctcacatatatcacatgtaagtgagtcagaaaacaaggtcatcatgaggaaagagctctaaaaagatctgggtcttgttccaactctgtggtgccactcaaagcccatgtgactctctgagtctgtatttacctcagatagagacaatagatgcatcctgccctcctcctcctctctttgggakgcaatgagataatggcccctctattcttgggtagagtattgaatatcttacgtggattaaggaaatgtggaggactccctagggccctacacaggaagagcattatcaggagcggaaagttacctg

SEQ ID NO: 905072 - DNA, 632 bp, Homo sapiens
  misc_feature 610, 611, 612, 613, 614, 615, 616, 617, 618, 619, 620, 621,622, 623, 624, 625, 626, 627, 628, 629, 630, 631, 632: n = A,T,C or G
gaataataacaatagcttatactcactattggccaggcattgtcccaagggcrtaagtattttatcatcctcataacagtccttcgaagctgggccagttgtgatttttatttcacaaatgaaaaaacagatgtacagtataggttatttcttccccaaagtcacatgtttaatggcaagaaaaaggggcttgaagaatgcctgtctggctttggagtctgtcctcttagcatgcagaaagcctgttctcagggagcttacagtctgttctcaggatggtgttttgtcacatgtgacacagccatttgtttcatcttgttttatctattataaaatctacttctgtagacatgagactgtgaacttttctgtattgtttactttctgctttggtagacacatttgctcattgcacatacgtggtgatgcaagtttttcatctgataaaatcttcacttttcattgatttttgttctcaatttttattaatttattataatatataaactttgtttaaattcgaattggttaatttggacaggaaaaaaaagttcagtaaatataatttttagccttttctcaacctgccttcaccataagagtgccaggnnnnnnnnnnnnnnnnnnnnnnn

SEQ ID NO: 905073 - DNA, 688 bp, Homo sapiens
cttctatgaatgatttgttgagctgtgaagggatttccatagyagtgaaatcttgtgtgtggaatttccacatatatgtatacaaattttatctacaccacacttcaaatacagccatatttactgcttgatgttaatgaacaataaaaattctctgcagcactgttcctgtcagagaggcatggagagatcttctagagagtgtgccatctgtcacatatggacaaaaccttgatccaggtgctatttattaactctactaaataagttgcattattttcattttaaagtgaatagactcaaaaagattaagtaatttatccaagtggcagaaagtagcactctttgtcaagtaagtcggtattcaacttcagaatttttgtgaatagaaaaaacagaaatacagaagaaaatgcttagggaactactctctaaaatgaaatgtctctcctaggcagttgcagttaacagtatccaattttctaagcttctctggcagccacttgttacctcccgcaaaagaaaaattaaactaatctgagggacagatttttgtacctcagtcatttgagtacaaatttccatctacttttgcctgctactgaggttaactaagttcaacttatacaagtgcaaacacccatgaagtcctcaagatttatctgaccacaattcagcaaaatagaac

SEQ ID NO: 905074 - DNA, 571 bp, Homo sapiens
aactaaaggtgaagtagacgttacatggattttttttattattatactttgttttagggtacatgtgcacaatgtgcaggttagttacacatgtatacatgtgccatgctagtgtgctgcacccattaactcgtcatttagcattaggtatatctcctaatgctatccctcccccctccccccaccccacaacagtccccagagggtgatgttccccttcctgtgtccatgtgttctcattgttcaattcccacctatgagtgagaacatgcagtgtttggtttttttgtccttgcgatagtttactgagaatgatgatttccatcttaaaaaagaaagaaagaaagaaagaatgtatgttatgaaattatgcaaatatctttttttccaaatatttcttcttagcacagcatctactgatctgtagaatgaaggatgtagcaaattccattaatccctgaaatagaattctagactcacaccctacagcytacagagctctataaagtcaaagtcaaacctgatatactgtttaactctcctaggagctgcccttttctcagtgagagtt

SEQ ID NO: 905075 - DNA, 607 bp, Homo sapiens
ttgttctcttttatcttttcattttatcttgttcttgttttacaggcattaatattcttcttatctaagagatgagagttttaagattctctgtgctatccctgattcctctggatttatttctcccttaagcaaattttctacccttctttactgtttcttagtcacctgttcatattgacatgaggcagacacacacataaaatgattgaaagtcctgtgtatacgaacagtgttttaatcaatggatttcactttgtgatgggtaggcaaggagatgccgaggggggatggtctgggagaaactctacggccagcatgtggaagcctgagacagttcaatttcttcagagtaaaaacctcctatctgccaccggagggtaggcacctactgtcagtgttacacaatcagtctgttttaggtcctacatctcacctctactcttttttttttaaacctggcatctctgaacctgaagtctcataaagttctgtggggtcaaatcaaatttttataatgctattgtcttcttctgaaaatgctcagtggtrgaattctaccacatagctgtatcagtcacctctatttcaacttctttctgattcc

SEQ ID NO: 905076 - DNA, 397 bp, Homo sapiens
ctactaaaaatacaaaaattagccaggcgtcgtggtgtgtgcctgtagacccagctactcaggaggctgaggcaggagaatcgcttcaacctgggaggtggatgttgcagtgagccgagatcgtgccactgcactccagcctgggcaacaagagtgaaactccgtctccaaaaacaaaaaataaaataaaaataaaaagaatatatgttaaatactttttaaatggaaagttatctatgattagaaaataacattttattcattatttcaaatattttagagagagttctatttccaagaaacagacaacctgctgaataataaagtttgttcatcttacatgacagcactcyattctcagtaaatatgcagtttactgaattctcatttgttttaa

SEQ ID NO: 905077 - DNA, 655 bp, Homo sapiens
aaataatagagtgtgttcaaatatggaaacccgcgtgttcstgttgttaaaatatgttataattaggccgaaactgaataccatcttgaaaacacacagaatattgacatggtcataaatatgaaacattttcatggatgattattagaagtaagaaaatataagctttaatgatccccagattaaggtttctagaaaattgaacctctaaaaattcaatagtattatatgtgaatgtgtagggaataatatatgttatttttagatcttcccacttttcttcaatatttaatcagttttatggtctctgtattaaatttttcttctttgaaagtttgaactctgtgctgtttgtttttcctgcacctaacataatgtcctctgtataatacatacttagcatttattggttgaattaatatatcatacatttcctgcttctccaccaggtctgctctctgctcttcccaccatactctttatcctaggaggctgatctatctatctggtttacatcacttaagaaatttatacatttgagcttctgaattctcatagagttggacctacaggcagaagattaaaggataaggtcatcatatttactcctgtctttgcaagatcaccaggctggcactgtctgtcatctgaaggt

SEQ ID NO: 905078 - DNA, 695 bp, Homo sapiens
acattagcaattattatcactgtcattttaktactatttttacaaacctatgctttgacatataaattagctccagtcatcacagcagtgctgtaagattgcagacagttgtatagattgttcaaggtcagctagctaatggatagaagaataattttctgaccaaatggtgatttgttatatttggatggaatgcatgtttcctagcaatttacctgctgggttgcacttcatctgccttatatcccttagctttcttccaccttctgcttatatattgaagaattgcaggcttatcattatatatttgcctactgattaaatgtattttaatcctttatggaattaccataagagatgctatggataggctagaacaaactttgaaagagaggtggtgtcttcgtttcctagagctgctgtgttagggttcttcagggagagagaactgataggatatatatatatataatctattatatgtgtatgtgtgtatatatatatgatctattatatgtgtatgtatatatatatatatacacatatatatatatagagagagagagatgagatgagatgggatttttttaggggaattagctcccatgacaggctttctgcaacctggaaacactgaaatgctgatagcatcgcttagtccaactctgaaaacctcagaaccaggtaaacaaatg

SEQ ID NO: 905079 - DNA, 531 bp, Homo sapiens
aagtgaaaaatttagcatcgacatcaaattcaatcttgctagtcagtctccaccttgcaacaaacatatcaggctaaaaacagcacctttgtcaaagtgaaatcattaataaaacacttcccagcaaaacagtttaaaggaaattcatttttatcatgctatgtactatcacaggcagggaggaagagaagcatatgctacaggaatttataaaatctgtaagaaatttataaaaacaatttgaagcattctttgagaaaaaagctgctgtcagattggtctgtttagcaagattacatgcttctagttaatgatggcaaaagtgggcatttctgtcacactgtcttccctaaaaccaggaaaacaaatacagaaaaataaaaatagaacacaaaataggaaacagccacattcccaaaccacaatttatgaactaaatgcactgaaacttgtactcaattgagaaagctcagtaagagyaggcaaatacatcttgcagatatatattgcacatatattgcagatcttcag

SEQ ID NO: 905080 - DNA, 593 bp, Homo sapiens
atctgtgatatggtttggctctgtgtccccacccaaatctcatctaaaattgtaattcccatgtgttgagggagggacctgtaatccccacatgtagagggagggaagtgactggattatgggggtggttcccccatgctgttctcgtgatagtgagtgaattctcacaagatcttatggttttataaatggccctctttcctgccctctcacatgctctctctctctcctgccaccatgtaggatatgactgtttccccttccaccatgattctaagttttctgaggccttcccagccatgtggaactgtgagtcaattagacctctttcctttataaattacccagtctcatttctttatagcagtgtgaaaacagactaatacaatttgccagttggatttaggtcagtcagttcatatgtgtgatatatacacttactctagagtagatttggaagtgtcatgagaggctcctctgataggagagcaacaatttgactagtcagagatttttctatattaaacatgagtttaatatagaaattttttttaasccatgaagagatgtgttttgaaaggaaaaaaggaaaa

SEQ ID NO: 905081 - DNA, 625 bp, Homo sapiens
gaacaccattttgtgtttagtagactgtaaggattcctagggacttgctgtcaagcactagaactgtaaagatagaaaggacattgagggaagtcgccgaccagaaggcatgaaaacacagaaggaacaacgctcctttgtattgagtggaaacaagtcagactcaaagctaatttaagatcggaaggaaaggcctacatggctttttaaaggtaaaaagtaattgtgtctacctcaagaaacaaaacccaagcaaagtctgatgtaaaaaatagcctggattgattctggcagccaaaatcaatgaagacatctctaattactgaagacaagacaagtttgagatgtttagtataaatgaggaagggttggaaagcgcacattatctgggaatgtatgctcctgctactcaactcaagcaatgaaaattcgattattttagaaaagctaaaataaggacaagatcaaagtgaaaataacaggagttgcttggaaaggctgcagaataaaacattaacttaaactcttayggaggaaggtacaaaaattatattccagaaaagtgttcatcagacattaaaggaggcagttctccactaaagactgatttcgtctgagaacaggt

SEQ ID NO: 905082 - DNA, 600 bp, Homo sapiens
gcctccaagtgttcaagactgcttggatttgaggcaagcaagaccacttgcttaggtaaattttatgaagcaacaaaactaatatggtgaagaattttaacccaaggtgtaacttaggtttcccatgtcttcaagagagctgacattgcatgttaccatctagctgatgttacgctctgctttcttgctactgcctgcctctgcctctgtttgttttttttttttttttttgtcttacattttttcttacagcaatcttttgagaaaagaatagagaatgtttaccaggtagaaaaaacctgattccttaacaagacttctcagtcacttgtttctctttccctttcacttttcctttgtgcttttgaaaacaaaggctaaagcaggtgttataaatttattcattcctgtgctagagagcatggaacacatctctgaagtcaactcttcttttggtgtatcacgagttgaatccttaataaatgactgccacaaagaaaatttctaacagcaaatctttttaggaactgctcaggttttgccttygtcttgacacttcattttaaaatcttggtttctactgatgtgttttcaaaaaag

SEQ ID NO: 905083 - DNA, 620 bp, Homo sapiens
actgagtacctactatatgtcagccatgggggatacaaagatctataaggcacaagaccctcagtcttgtagtcgcctgacagccagccagctacaacataatgtggaaaggacaatggtgggaaatgcactcaggtcttcctaatgcacagagtatgctcaggctgtgacatcaggaagaaaacagatatttaccttaacacggacttggaggaccttcaaaaaacagtgatgggaggaaatccagttttaaaagtcttgatttaaaaaaaagaaaacactttctgtggataaagataggctgcaggaaatgtaacctatgaaattttctcaaattagctttcaaacacacacaaaaaattgcatttgtttgaggagcagaatgtaacttatattaaagaataaactactatttagtatctgagtgaagtacaaaaggaggcactaaaatcattgaggaaaatcccatgttatatggcttacattaatrtttttctaggtaaggtaaggtaagttactactaccaagttatgaaacaccatttgatgattgcaattcattttctctggcatgaagaaacaatcactcttgtaacacattgatactacaaactacattat

SEQ ID NO: 905084 - DNA, 336 bp, Homo sapiens
tacccagtctcaggtagttcgttacagcagtgtgagaacagactactacatatccttttggcttctataatcttacttttaaaaatgctctttctgagaactttggtaatggtttcccatcttaccccaaaattgtgtgtttgggcttctctttcagtcactttcaggtttgaatgcacatattttgtcaccatttcaattttgatgagttgcatttctgcttttgcctcctagagtttccttcctcagtgaaagcttcatgatcatgtctgccaaacaccyccacttagatctttataccaattcaatagagttcaatttttctcagcctagtga

SEQ ID NO: 905085 - DNA, 693 bp, Homo sapiens
caattcatgttttacaagtacttcaagtactggtgttgatcacagactagtcaccttcatcctcaaatgattacttacaccaattcattgtcttttcatgaataaaactgtgatttcactgaaaatggtcacagtgctttaagacaatgaataagatctaacactaggcagaaagagaggaagagagctttatgattgggtctgtttctatgcttaggagtcattatttttttctatgtttcaattatcccttctagcctgaaaagcaatctaaattctgtgctactgttaagagtattttattatgaactgttatacaaaaaaaggtaactgcactcatatgtttatcacagccctgtccacaacaacaaagacatggaatcaacccaggtgaccatcaatggtggactgaataaagaaaatgtgatacatataaaccatggaatactatgcagccataaaaaagaatgaactcatgtcatttgtagcaacacagctgcagctggagtctctctatcctaaatgaattaacacagaaacagaaaaccaaaatatcacacgtccgcacttataagtgagagctaagcattaggtacatatagacacaaagatgggaacaataaacactagggattccaaaagagsgggaggggaaaagtgtttagaaatactacctatagtgtactacgttca

SEQ ID NO: 905086 - DNA, 609 bp, Homo sapiens
ctgttctggtgcagatatgcattargttctacttaataaagcaatcttgattgttttaggagatggacagtcacattgctgtctagcaaacaaggcatgctgaacttgacaaattattttaaaaagaaatgatacagaactctgagaacaagaaactatgacctcaatttaagagctaggaatacccatttttcaggatagactcccatccactgatgcaatttgtccctctgaggcatctgtacttcctcctcttgttctctgtatgctcaaacgaagggaatttaagattatgttggcaacactactggagctgttttgtttttttttttttaagctaaataaaaagaaaatttaagactctcatttgaacaacctgggtcctaaaaccctgctgttgaaaaataggtggtggttttgttttattttaaactgtttgcaattgtcatcttaatagaatgcattaactagacaattgcttggctttcaaagtacatttttcaagcccctgtcaactcaactttttataaaaagaatgcaacaaaaaaatagaaaagagaaatactgaatattaaatctttcttcaacccactgtctgattctcttaag

SEQ ID NO: 905087 - DNA, 659 bp, Homo sapiens
ataatcaataaatagacaacctacagaatgggagaaaatattcacaagctacacatctgaccaaggtctaatatggaatctatagggaacttcaatagctgaacaaacaaaaaacaaattrccctgtttgaaaaatgggcaaaagacatgaacatacacttctcaaaagaggacatacaagtggccaacaaacatgaaaaaatgcttcacatttttttattatactttaagttttagggtacatgtgcacaacatgcaggtttgttacatatgtacacatgtgccatgttggtgtgctacacccattaactcgtgatttacattaggtatatctcctaatgctatccctcccccatccccccaccccacaacaggccctggtgtgtgatgttccccttcctgtgtccaagtgttctcattgttcaattctgctccacattattaatcatcagagaaatgcaaatcaaaaccacaatgagataccatctcacactactaagaatggccattatgaaaaagtcaaaaaacaacgcatgctggagaggctggaaagaaaagtgaatgtttatacactgttgatagaaatgtaaattagttcagccactggggaaagcagtttggagatttcccaccaaacttaaaacagaactactatttga

SEQ ID NO: 905088 - DNA, 652 bp, Homo sapiens
gggccctcattgagaacctctgctagggcagtgcagaagggaaatgtggcgttggagcacccacacagagtccctactagggtactgcctagcagagctgtgagaagagggccatcgtcctccagaccccagaatggtagatccaccaacagctttgcaccacgtgctttggaaaagctgcagacactctgtgccagctcttgaaagcagataggagggaggctgtaccctgcaaagctacaggggcaaagctgcccaagaccatgggaaccccaccttttacatcagcgtaacctgaatgtgaaacctggagtcaaagggacatcattttggagctttaaaatttgactgccctgctggattttggacttgcatgggcccagtaacccctttgttttggccaatttctcccatttggaatggctgtatttacctaatacttgtacccccattgtatctagaaagtaactagcttccttttgactttacaggctcataggtgaaagggatttgccttgtctcagatgagactttgagctgtggacttttggcttaacactgaaataagactttggggtrctgttgggaaggcatgattggttttgaaatgtgaggacatgaggtttggagggaccaggggcagaatgatatg

SEQ ID NO: 905089 - DNA, 496 bp, Homo sapiens
ggggaagccagatctcaatgaaaaatgattcttggcagttcccagtgagcagcagcaaaagaaacatttttaaagacacagattttttttttctcttccaaagagtagcgtacaccacaagcatcttttttacaaagagagaacatcttgcgtgttgtgaccgatttctcgtccgcatggctgtccttccccaatggaagtaattgggggagaaaggtctgtggagcacatgctttgatgtttgggggatggggggaccttttcagcaaatgtccatggcagacacagtgattgagaaaggcacatccgttttggaaaatgcctgctaattaaatgaatgttttcaactggaaagcatgtctgagctgttgagatacatccctgatgaaggtggaaggaatgctttagatgttggcctgaaacgggtgtttccatgagctttccatatgccttggcctcgtcaagtctcaratatcacatctcattcattaattca

SEQ ID NO: 905090 - DNA, 272 bp, Homo sapiens
tttctctttttttttttttttaacttaaatacatttatttagaaagagattattagaactctaccaaaattaaaagatctgccttctttgccaaaaagagacaaagaccatcaaaacaacttctagaggaaggccttgagctggaggcctgctctttctctttgttaaaaaggtagattaataagggccaggagaaggtaagtacctaacagtgacaaattgakacactctgtgtcaggtaactgacactgggccctggcaccctgcctgga

SEQ ID NO: 905091 - DNA, 658 bp, Homo sapiens
aaactctgcctaagccaatgtctagaagagttttactgatgttatcttctaagacttttgtggtttcatgtcttagatttaagtctttgatccatcttgagttgatttttgtataaggtgagagatgaggatccagtttcattcttctacatgtgacatgttatcccattcatgttattattcatttgccagttatcccagcaccatttgttaaatagggtgtcttttcccactttatgtttttgtttgctttttcggagatcagttggctgtatgtatttggccttatttctgggttctctattctgttccattggtctatgtgcctattttgatacagtaccatgttgtttggggtaaccatagccttgtagtgtagtttgaagtctggtaatgtggtgcctccagatttggttttgttttggggggtttttgtttttgtttttgcttggtcttgcttttggttatatggggtctttttggttccatgtgaattttaagattgctttttctagttccatgaagtggctactcttaaaagattttaaaaaaccacacagaaaataacaagtgttagtgaagatatctagaaattggaaacatgttcattgctggtagaaaygtaaagtggtgcaactgcttaggaaaacagaataga

SEQ ID NO: 905092 - DNA, 590 bp, Homo sapiens
tgtatttttagtagagacatggtttcactaagttggccaggcaggtcttgaactccygacctcaggtgatccgcccacctcggcctcccaaagggctgggattacgggcatgagccaccgcgcctggccaacgattcctattctttctaaatcaccctggataagcattttgttatagcagcagaactagactaagacacttccaatagggacataattcatgacagtcatcacggtagccaagtcagaccagaatcaccacatggcttcatttggttctaaaccccattcatccaccaacatgtaagggtgcagctcagccagagcatcaggtttggcagtgtctgtcaaaatgaaaggcatgtttcctttgacctaacaatttcacctctaagaatgtatcctacagacatgtgtgggaagtggtggcggttgaagatattccatgtagcgcttcaaaaatggaaacaacataaatatccatcaaaaggaggccaattaaataatgtaagcatgtgcaatggaatactatatatccattaacaaaggtggagcagaaaaaatacacgtgcgtgtgcacacacacacac

SEQ ID NO: 905093 - DNA, 634 bp, Homo sapiens
tgttatacttttccattagggacaagacatgagagtttgcaaaggtaaaaccacatgctytttcatttttaagaaggatattgtaaagaaaaagtaagtggcttggaaatttatccataaaattatataatgaatcatagaataaaagagtgtcagaacgaaataacagtgtagagatcatctagttaaaaccactcattttagaccaacaaactgagacctaaggaggggagtcactgccacgtggttggtagactaccaggacaaactcttcccacactagaataaaaataaatcacgaatacattcttatttgggagattgctatcctctgaatatgagttagaaactctgcactttggaatagtaacatcataatttggtgtcttaataactttaagatcctaaactcactcagatgaaaatttaatacacttgcagtattagtgaatgggcatcactggtaactgatacggccaatcaaaggcaaaaattgcactagaaccctcccccacccaccaacaaaacaaaacaaaacaagttacactgatgattgtaaggactgtatttcgttcagccactctgaaatgcctcaggctgcatagcttcacattttgaatcctggggtctttcc

SEQ ID NO: 905094 - DNA, 606 bp, Homo sapiens
gacactacagcaaattgctaaaagcccatttctattatttcmaccttctataatacagaggaatttttacatttatttgaatatgtattctaccaaaggaattttcaaaaaggccttcgttttcctaacttttcagtaattcttactgttggtaaataggctatcgcagtattttaattaaatacatactaattacatgagtatgatgtacatctgctacagaggcaagaataatagggaatattacaagatgtaatcaatcataattcaaataagtttcaaggagaagaaaccagtaaacaatgcggtactaccacagtataacttttaagggaaaatttttttaactgaatgaccacaaaactggaaaatgtgtacatgccagcaatattttcataaaaaattaattatacctttaatttctatttggaagaaatatatttactagctttagaacttatgatttttattcattttcatgctctttggagcctttacaaagagagcattttcaaattccctttttctttgtagtcataatctatttttccatagcttttagatatttttagtggagccaggaaatgtattatttagagttgtcta

SEQ ID NO: 905095 - DNA, 587 bp, Homo sapiens
caatgaccagaatcatagattttttgaggtgaaaggtactattgcagacagagtccagtcctctttcctttatcartgaagagtcagagacttgcccaaaggcagagcttggttagtgacaacttaggacttcagtgcggtttcaggcaactccttctctaatgttgtttccatgacttacaaactgaatgagactttaaactgttagcaacaaagattttttaaatgataaatcatgtcatcaacaactttttaacatatgagagtcctacatgttgttcctcattttgtccactcatttaacaatccgtaaaaaggagacctcctgaaggaccaacactttctattttatataggtccttgacatgctattgtgacttccaaaaagaaaggatggagaattgtcttaggtgtaggattttaagaaagtttttttttaatcttaaagctaagaagaaaatctgaaaaagaaaatcttaggctaaacaacaaattagtctctgaaaaaagtgttttctctgtctaaatatttcatcactgtaacgccttttttctataattctttttattagtatacctaatttcat

SEQ ID NO: 905096 - DNA, 513 bp, Homo sapiens
tccttttcgtatatgccactgttgtgttggtgttgtaggaatgtagttaaaggttacttagatataaatttttggttgttattagttaaaatcttgtgtcaattagataaaggcccaccaacagtgcattgtactaattggccatgagcgagatccttgaatcatcaaaagtcagtggtattttaaaataatacatgcagcatttcctttaacgtaaatatgaagtagaatttcttctgcttttttaggttattttttgttttctatttgttctcaaattactcatttcaaacaagtaaaaatatgacattctttgcgctgatgatgaaaactagaatttgttgttcttccagaaaatgtttttttgttagtttgtgatttacaaaacatttctagaaaagcataggatctaaacatgtgttcatatcttaccagtgaagttttcagttttttagccgtaaaacaaacatwgatataattgaattaaaaatcttttcataatagaaatgctta

SEQ ID NO: 905097 - DNA, 542 bp, Homo sapiens
gtcatccgtctttcagttctctaagaagataagacaatctatagataagacagctggaaagatcaggtacatgtacatatagctttaactttaatatcacctcactttgctttttgctttttctcaaggttaaaaatgtgtcatcagaatgaatatgtttacctttggaaaaatttgtcccaaagtaaatatctatccagtactactttgtaactttaaatttattactaattcaaaacataaatagacttacagattttattcaacagtacttcagaaatccatgctgctattgcttatttctgattcctataattaaaatttaaaatgtaatgaaacagtatttgaacatggtttgtgaattgtaatattccacacaaatataattctatattgcttatatattgaaataatatattttatcagcatttgatgagtaccaagaagccattaaattttttcaaaaacaatttsaaaagcaccatttaaaaattaaagtattcttaaaaacagtctatttaacttaaagcaatctgttttaa

SEQ ID NO: 905098 - DNA, 542 bp, Homo sapiens
gtcatccgtctttcagttctctaagaagataagacaatctatagataagacagctggaaagatcaggtacatgtacatatagctttaactttaatatcacctcactttgctttttgctttttctcaaggttaaaaatgtgtcatcagaatgaatatgtttacctttggaaaaatttgtcccaaagtaaatatctatccagtactactttgtaactttaaatttattactaattcaaaacataaatagacttacagattttattcaacagtacttcagaaatccatgctgctattgcttatttctgattcctataattaaaatttaaaatgtaatgaaacagtatttgaacatggtttgtgaattgtaatattccacacaaatataattctatattgcttatatattgaaataatatattttatcagcatttgatgagtaccaagaagccattaaattttttcaaaaacaatttcaaaagcaccatttraaaattaaagtattcttaaaaacagtctatttaacttaaagcaatctgttttaa

SEQ ID NO: 905099 - DNA, 571 bp, Homo sapiens
agattaggttaatcaagagtggtgtatatccaatattatattttctcctcttggttgaggtsatgagtggtcgtgtgacgtgttttgttaatgaaatgtgaaagtgacatttgtgactcctggctagaagatttaagagccaataaataattcaccacactctatctacttccttctgctaaggtaattagcaatatgtgcaagagagtagctgttcaatcagtgtgggctccagaattaggagaaatcaagtatattctccagacaacccaaaatggacaactagagagagcaagaaaaacaaaacaaaaagctctgttgttataagtcactgcaatttaaaattctttgttattgcagtataatctactctgacagaaacaaagtgtaacatggaaggaattactccatgggacatatcaagtctgataaaaataaagtaattaagaccatgactatggtttggctgtgtccccacccaaaatctcatgttgaattgtaatccccatgatccccataatttccacgtgtcaagagtgggaccaggtagaggtaattgtatcatgagggt

SEQ ID NO: 905100 - DNA, 630 bp, Homo sapiens
cagtgcaaaatgccaacatcaataattctgaaagatcacaaattgacagcctaacaatacatctgaaggaaccagagaaataagaaaaaaacatacctaaagctagcagaagaaaaggaataataaaaatcagagcagaactaaataaaattgaaacaaaaaaaatccaaaggaccaatgaaacaaaaaatagctccttcgaaaagataaaattgttagaacactaggtagattaaaaccaagacaagaagagagaagatccaaataagactaattataaatgaaaatggagatattacaactgatactacagatatacaaaagattatttgggactactgtgaagagctctatgcacacaaactagaaaatttagaggaaatgaattaattcctggaaacatacaacccctgctagcttgaatcaggaagaactagaaatcctgaagaggccaataagaagcagtgagatttaatcagtaatttagaaaaacaacaacaacaacaacaacaacaaaaaccaaaacactgcaaacaaacaaaaacagtccaaggccaaatgaattcacagccaaattctaccagacatccaaagaattggtamtaattcaattgaatctattccaaaaga

SEQ ID NO: 905101 - DNA, 635 bp, Homo sapiens
taactcatgaattttaacaataaatccttgagtatcatgggtacaatgactagcctcattttacagatgaggaaattgagtcrcaaaaggttaaacactttgccagctaataagtggcaaagtaaagatttggagccagggagtctgtttcctggttcatgctcctgaacaccatgctctgtttcttgtttcacatatggtacagtgtcccagttagcatccttcttgaacccaagggcccatgtggaatttggacactgatgccagcctggactgaacctgaatattcagtgaccccatctggacattgagatctgaattctggattttcccattcaagaatctgttctccaggcagactacaggcccgactccagacctgcactttctgagcttcctccatcacccctcctcagccccgtcccattgctgagacccagcatgacttgcagcctggtgctcacagctgtgacacctttggggcccccatacccccaaacactagggcacttgcccaaagccacaaagtcagcaagtagttaggtttggattcaaactgaagtctgtctccaaaaccacatcctttcaactattccctgtggcttcccccattctccccaaaggtctacatttaa

SEQ ID NO: 905102 - DNA, 635 bp, Homo sapiens
taactcatgaattttaacaataaatccttgagtatcatgggtacaatgactagcctcattttacagatgaggaaattgagtcgcaaaaggttaaacactttgccagctaataagtggcaaagtaargatttggagccagggagtctgtttcctggttcatgctcctgaacaccatgctctgtttcttgtttcacatatggtacagtgtcccagttagcatccttcttgaacccaagggcccatgtggaatttggacactgatgccagcctggactgaacctgaatattcagtgaccccatctggacattgagatctgaattctggattttcccattcaagaatctgttctccaggcagactacaggcccgactccagacctgcactttctgagcttcctccatcacccctcctcagccccgtcccattgctgagacccagcatgacttgcagcctggtgctcacagctgtgacacctttggggcccccatacccccaaacactagggcacttgcccaaagccacaaagtcagcaagtagttaggtttggattcaaactgaagtctgtctccaaaaccacatcctttcaactattccctgtggcttcccccattctccccaaaggtctacatttaa

SEQ ID NO: 905103 - DNA, 601 bp, Homo sapiens
ccattcttggttctggataatgacagtccccttcccaaagctccattaggcagtgccttagtgggtattctgtgtgggggctccaaccccacatttcctctcagggctgccctagcagaggctctctgccagggctctgaccctggggcagacttctgccctagcacctaggctctgaaattgaagtggaagctgctaagcctccttcactcttacattctgcatgcctacaggcttaacactgtgtggaagttgccaaggcttacagctttcaccctctgaagcagcagcctgagctatacctgggcccctttgagctgaggctggagctggagcagctgggatgtggggagcagtgttctgaggctgagcaggacagtgaggccttgggcctggcctctgaaaccattttttccacctaggcctctgagcctgtgatgggaggagctgtctctaagatctctaaagtgactttgaggccttttgctcattgtcttggatattagcccttggcacccttttagtcacrctaatccccctagcaagtggttgctccacagcctgtttatattcctctctcaataatgcttttttattctct

SEQ ID NO: 905104 - DNA, 633 bp, Homo sapiens
aagttgcctcagtttgccagtaaatctgagaacagaccaactttgctgggatatagattacagcaggtagaaactgattttgtcaccctctggcaatttaagcccctgatctttccctcaattcctgccccatatcagggagctagtcatgccattgggcttttcatgccagtatttctcaaactaagcccactggacattttctctgagttcatgagattctgatattgtttttttaatttgttttcatattgatgaaaatataaaaataatcaatattcatatcttgtgggtcaactgaatgaccaactcaaaccacagaatttctatgtccacatgtagatttgtgtttatgacagcataagggtcaaatagaactgctttaattctctcagactagtgaaaaatgagtgtgatggacttcaacacaaacaatgtgatcattgacaagtgaggaacaaatgacctcacagcatcctgtagaaacaaaagtgtcatgatatttaggatagaggaagatggaagacacactgagtcatcatgcggcatgcagcacattcagcagagtcgtggccaactcacacaaacctgtgccakagccccaggaccatatccacatggcaagaaatgatt

SEQ ID NO: 905105 - DNA, 661 bp, Homo sapiens
aaacacagattgccacaggtcctccctacccttagggtttctggtttgtaggtcttgggtgaggcatgagattttgcatttcttttatgttcccagtgatgctgatgctgctggttcgggaaccacactctgataattactcatctgggtaacacgaagccactggaaagggttagataggagaagcagagccaagccacaggtaaaaggggtgttttctaggattaaggtttctgatagcccttgtgaacaagttagggcagctgatatatggagagtaggtacacactatcccccatcttgtcctgtcaggtgaggtttaacagccctattcattcaagtgggacttctatcccagggtcttccagtttaaggagattttgcccacagatgatttcaggaatggctgtatcattacatgaagctcactcttggagcatttaaatagtgagttcccaaatgatttaaatgtttgtttgtgctttattaattactctcttgagaagctggggacaagagaaacctaaagctaccaactaaaagatgagtcacacatggtgataaaacttctttgaaaactcttttatcagttcaataaataccygatttcaaaattgtaagtgtgtgtgtgtgtgtgtgtgtttggagagggaggggagaa

SEQ ID NO: 905106 - DNA, 615 bp, Homo sapiens
cctatcttgtcagattctagggaaatgccacacattttttagtgatggccagggacagatttggaaggctattgagttcatatgggtgttgtcttgtatgggatgtcccattctttgaagcttataggtttttgaaaccttggcttagtaatataccttctaccagagtataggagctctttgagtgtcttctataagctcatgaaattttaagacttgttaaataatttattccttggtgttttttttttttttttttgagatggagtttcgctcttgttgcccaggctggagtgcaatggtgcaacctcggctcaccgcaacctccgcctcccgggttcaagtgattctcctgcctcagcctcctgagtagctgggattacaggcatgcacagccacacccagctaattttgtatttttagtagagacggggtttctccgtgttggtcaggctggtctctaactcccgacctcaggtgatccgcccgcctcagcctcccaaagtsctggaattacaggcgtgagccactgtgcccagcattattcctagtgtattaaagaaccaaataggctctgagttattttttggtgtttatagggtatgataagtctgt

SEQ ID NO: 905107 - DNA, 541 bp, Homo sapiens
tgcagcccacggaccatgagccaaagcagggcgaggcatcatctcacccgggaagcacaagggtttggggaattccccttcctagccaagggaagccatgacagatgacacctggragatcaggtcactcccaccctaatactgcacttttccaatggtcatagcaaacgacacaccaggagattatatcctgcacctggctcggagggtcccacacccacggagcttggctcactgctagcacagcagtctgagatcaaactgcaaggtggcagcgaggctgggggagaggcgcccaccactgctgaggcttgagtaggtaaacaaagtggccaggaagctcaaactgagtagagcccaccacagttcatggaggcctgcctgcctctgtagactccacctctgggggcagggcatagatgaacaaaaggcatcagaaacctctgcagaattaaatgtccctgtccgacagctttgaagagagtagtcgttctcccagcacggagtttgagaatggacagactgcatcaagtgggtccct

SEQ ID NO: 905108 - DNA, 630 bp, Homo sapiens
actagtttgagaaatatttgagacaaagctaatctggagaattaagacytaatgagagcgagtgaagaaagaagcaagttatgctgaggttttgggaattttgtggctttctttcgttttcttttcttttagccacatttcgttttcatttttccagctacataaacattgcaggtataagttgaaaatgagaagtctgttttggccactgtaaataaaagcatctgttttaatagtaaatatgagtgacaactaaatattttaaaattcacacttttaggttagatcagtgtgatttgtttcttttgctctttgtattcagaattttgtaggatagtatttaccttttagtgtgaaagaggaagctaaatagttatgaaaaatgccattaaatgtgtttttcgatctaagtcctggtgtgtttagataaatacagtttctaaaatggaggctaggtagcctgcagtctcaatttcctgaaatttcccattgccatagcaacgacatgcacttaggttttcgtttttcaggttccctagcttataacgtggaagatgttattggaggttggcagagatgaggcaaaataggagcgttctattgcatagtctgtaagactgtagatttcat

SEQ ID NO: 905109 - DNA, 545 bp, Homo sapiens
cttgaaactctacacctatttttttgttttcttttgttttgttttgagacagagtctcactctgtcaccccggctggagtgcagtggcgcaatcttagctcactgcaacctctgcmcccccaggttctagcgattctcctgcctcagcctcctgagtagctgggattacacgcgcgtgccaccacgcccagataatttttgtatttttagtagagatggggtttcatcatgttggtcaggctggtctcgaattcctgacctcgtgatccgcctgcctcagcctcacaaagtgctgggtttacaggcgtgagccacctcacccggccaaaactctatacctattaaacacctctccgctcactcctcccaccagcccccagtaaccactgttctactttctcttgaactcatctatttttggattgttgagagagacttaagccacggtattttgggatgtactgctcagatttcccctttttaggaccaaaccactcattttctcagctactgagagtattggcaaatgacagactaagttcagt

SEQ ID NO: 905110 - DNA, 577 bp, Homo sapiens
ttctcattgtggtcttcatttacatttctctaataatcagtgatattgagctttttttatttcatatgctggttggccagatgtatgtcttcttttgaaaagtgtctgttcatgccctttgcccastttttaatggggttgttcatttttttcttgtaaatttgtttaatttccttatagatgctagatatatttgtcagatgcatagtttgcaaacattttgtatcattctatatgaaaaactcctctgggtatacccagtaatgggatttctgggtcaaatgtttactctgttgatagtttccgttgctgtgcaaaagctctttagtttaattagttctcatttgtcattttttgctttcattgcaattgcttttggtgtctttgtcatgaagtctttacccatttctatgcccagaatgctatggtatgggttgtctttcagaggttttatagctttgggttttacatttaagtctttaaaccatcctaagttcatttttgtagatggtataaaggaaggatttagtttcaattttctgcatatggctagccagttatctcagcaccattcatt

SEQ ID NO: 905111 - DNA, 476 bp, Homo sapiens
tgacttaagagtgattttgtattgattcaatytactacaatgttacgtctaaacaaatattgtcctgcaatacctaaaccattaagcaaataattttggaattgatctcaaaaaaaaaatttgagccaaccagaaaatctgtccaattattttacttcttatttcctgcctgcactcttagcttctgctccgttttgctctatactttgccctatgaagcttgagcaagcaaaaacaaacaaacaaacaaacaaaacccatgtaaggatctgcaggtaggtattcattactaagagctgtgcccaacagatggcagagatgataaggtcttagtgaactgggcactaaacccagtcaaaaatgaagatgatgagtaatgtcagcaagatggctgactaaaggtgcctaatgcttgtcacctcataaaaaggaccaaaacaataaataagcaactacatttcagctagagtctaaag

SEQ ID NO: 905112 - DNA, 691 bp, Homo sapiens
gacatggttctttgtcccaccayttgcaatggcagattctaccttctaatgggttagtctacctgttaagatactgacttctgatacaacatggatgaacctcataaacatatcctatgttgtattaactaaggttctccagaaaaacgacaaaaaatagaatatatacgaacagataattgagagaggatttattaggtgaagtggctcacatgattttggaggcagagaagtcccatgatgtgccatttgcaagctgaagaaccaaagaagatggtagggtggctgagtccacttttcaagtcaaccaggggagctgatggtgtgattctcagtttgagaccaaaagctggtggggaagggtagtggctagtgcgagtcccagagtcaaaaggccagagaacctgaagttctaatgtccatgtgatatagtttggccatgtccccacccaaatctcatcttgagttgtaactcccataattcccacatgtcatgggaggaacccagtgggaggtaattgaatcatgaaggcaggtgtttcccgtgctgttctcgtgatagtgaataagtctcacgagatctgatggttttaaaaatgggagtttccctgtatagtctctctctctctctttgcctgcctccatccatgtaagatgtgacttgctcctccttgccttctgccatgattgt

SEQ ID NO: 905113 - DNA, 594 bp, Homo sapiens
gggtctagaaattatcacagttgcctaatatagtcaaatttctgtatttgatggaaatttatttatcttggggattgttataaagttgatttagttctttgtattttgtattctacaattgttacatacaaattgacttgagtaatagtttcctgttttaaaaaaattatttatttctacttagcactgaaaggaagttaaattaaagattgttgattacgtattctttgttaggattaattgtctttgggtgtttgagcacctccctcaaataatgactaaatagaacttaaaaataaaaacttcaaaaattcacaaaattaggtgttctggactgcctttacttgcttttaggaggtgcacacattggaacatggaaatgaattttatacaaatatctgttctttctctgtgtatgttctttggccaatattacatttgtgtgatatttataagatagaggaaattgattaactatcaaaaaaagattaaaaaaggaaatgacacactttctakaacactctgtgatgacctgtgagttgcagaacatcaagcttgttttcacaatggaaactttcatttcctgtattaaaa

SEQ ID NO: 905114 - DNA, 638 bp, Homo sapiens
cactccacaatccccaaggccacctggccatagcattcatatttatttcagccatggccctgtcatgttgattacatagttaaaaccaagattgttttgcataggttttctggggcagctcagctgcttagctactcacaagcactaatgacctggaatcagagtgacaggatagtctcaggccccattcctctactgtgagctcctgccaatgtctttttttcttcaaaagagcaactagaaaataggaaatttgtcttaatgttgtcttttgtgtacattttgtctttaataataaaatgtgtatactgctcgagggcttactctgtgctagaagccctgtgtacatgatcttcaattcttacaaccctgctagatattttggtttccattttgaaggtgagaaaaccaaggctccaagagtttaaggaatttcccaaggccacaaagctaaagctgctaaagccaagatttgattccagtctgcctgatgacatgagttgggcttgtcctccctgaaaacacttcccacagtctccwttcgcagcttccatgagagcagtgggtgtatcttgtccagtgttagtgaccagcatgatagaaggaagcacagagagtaggggttcaggctaagaatg

SEQ ID NO: 905115 - DNA, 617 bp, Homo sapiens
tgaccttgcttgtgacatgtgccaatagatatcacctgggatgagatctattttaggagaagaaggagaagtaaagacatggccacaagaggaatcacttaggtctttgcctagtgccccacaccacccctctaacaagtgacagcaccaggcctcaaacccagtctgtctgttgaaactggactccatcaattactttctgaatcacattggacaaattgttctcttggatcttcagttttttaattattaaatggggagaataatataaattatttcacacactagtcaactggcctctgtaagataatatatacaagatccttggaaaaatgcctgacagaaataggagctctaaatcatttccacccccatcgaggtcaatgaataaaacttctcttgagctgaggatattgacataagaaagaagaagagccagccctgagccacaaagtgagcaggggacaacaatcaatcacatccctccacagttccatgctgtttgtctgtaaycatgtccttaaagaaaacaaacatatccaaaagtggataaagaaagtccagtgcctgatgtaattgtgtcatttgtaatttgggttttgagaacactttccttt

SEQ ID NO: 905116 - DNA, 610 bp, Homo sapiens
tcaacaatcctaacaaaaacaagccattggaaaagaatctcctattcagtaaatggtgctgggaaaattggctagctatatgaagaaaactgaaaccggaccccttccttacaccttatacaaaaattaactcaagatggattaaaaacttaaatgtaaaactcaaagccataaaaatcctggaagaaaacttaggcaataccttttaggatgtaggcatggacaaagacttcatgacaaaaatgccaaaagtaactgcaacaaaagccaagattgacaaatgggatctaattaaactaaagagcttctgcacagcaaaagaaattatcatcagagtgagcaggcaacctacagaatgggagaaatgcaatgggagattttgcaatttacccatctgacaaaggtctaatatccagaatttacaaggaacttaaacatatttataagaaaaaaacaaacaatcccataaaaagtgggcaaaggatatgaacaaactcttctcaaaagaagacatttacatggccaacaaacatatgaaaaaaagctcaacatcactgattatcagagaaatgcaaatcaaamccacaatgagataccatctcacgtgagt

SEQ ID NO: 905117 - DNA, 623 bp, Homo sapiens
agaatgtatattctgttgagttggggtggagaattttgtagattatctattaggtcttcttggtccagagctgcgttcaagtcctgagtatctttgttaattttctgtttcgttgatctgtctrttattgtgtgggagtctaagtctttttgtaggcctctaagaacttgctttatgaatttgggtgctcctgtattgggtgcatatatatttaggatagttatctcctcttgttgcattgatccctttaccattatgtaatgcccttctttgtcttttttggtctttattggtttaaagtctgttttatcagatattagaattgcaaacccctactgttttttctttccatttgcttggtaaatattcctccatccctttattctgaacctatgtgtgtctttgcatgtgagatgggtctcctgaatacagcacaccgattggtcttgactctttatccaatttggcagtctgtgtcttttaattggggcatttatcccatttacatttaaggttgatattgttatgtgtgaattttatcctgtcattatgatgctagctgattattttgcccattagttgatacagtttcttcatagtgttgatgatctttacaatttgat

SEQ ID NO: 905118 - DNA, 611 bp, Homo sapiens
gaaatatctccgtaaggaaactactaaaactaatgagagaaattgtagattatgcaaactaatggaaaagtatttcaacctcatggacaggaagaatcaaattgttaaaatggcaatagtgtacaaagcaatttacaaattcaataatatttttatcaaactaccaagatcattcttcacagaattagaaaatactgttttaacatttatatggaaccaaaaagaagagttggaacaaccaaagcaatcctaaacaagaagaacaaagtggaaggcatcgtattacctgatctcaaattataacacaggctatagtaattaaaacagcatggtactggtgtaaaaatagatagaacaatggagaagagaaaactcagaaataaaggtacatatccacagcaaactaatgttgacagagtcaattagagcatacacagcagaaaggacaaacttttcaataaatggtgctgggaaaaattggagtgtcatatgcagaaaaatgaaactatgtatctcaccatatataaaaattgactcaagatagattaaagacttaaatrtaaaacctgtaactattaaaatcctaggaaagaaatccaggaaaactcctt

SEQ ID NO: 905119 - DNA, 552 bp, Homo sapiens
aattgtaaggcacacattttcacactctgatgttggtcttacaatcagtggtctgacattaagtgaccacatttattctccctctcaatggtacatcgaataatggagtggtatctaatcaatgatcttaaggattctatgaaatacaccagcacgacagtaacagatggcactctcaaatgaagatcatttgaggaggttgtaataaaggaacacacaggtgtggctggggtgtagggaaatcgcaggtgatagtaaaggacctgggactgggaagagaggctgctatgactccggcctcaggaggaggtggtgggcgtggttactagaacccttttttttttttttttaattcttttcagtcctgctccttctgtaactagaaccttgaaggagagagttgagagagagaggagctgcttgagagagagcaatgaccttcagtggaaagacacagcccgtccaaggtaggctccaccatctatcagtggcatggcyttgggcaagttatttaacttacctgtacctcagtttactcatctgcaaagtggg

SEQ ID NO: 905120 - DNA, 552 bp, Homo sapiens
aattgtaaggcacacattttcacactctgatgttggtcttacaatcagtggtctgacattaagtgaccacatttattctccctctcaatggtacatcgaataatggagtggtatctaatcaatgatcttaaggattctatgaaatacaccagcacgacagtaacagatggcactctcaaatgaagatcatttgaggaggttgtaataaaggaacacacaggtgtggctggggtgtagggaaatcgcaggtgatagtaaaggacctgggactgggaagagaggctgctatgactccggcctcaggaggaggtggtgggcgtggttactagaacccttttttttttttttttaattcttttcagtcctgctccttctgtaactagaaccttgaaggagagagttgagagagagaggagctgcttgagagagagcaatgaccttcagtggaaagacacagcccgtccaaggtaggctccaccatctatcagtggcatggccttgggcaagttatttaacttayctgtacctcagtttactcatctgcaaagtggg

SEQ ID NO: 905121 - DNA, 582 bp, Homo sapiens
cagtctagtgaagctatgggaacaggactgctatcctccagacccaagaagggtagagccaccagcagcttgcaccctcagcattgaaaaggcacagacaccagactccaacctgtgagagccacagggatggagcttcccaaggcattgggagcccaccccttgcaccagtgtgccttggatgcgggacacagagtcaaagattatgttggagctttaaactttaatgtctgccctgctaggtttcagacttgtgtggggcctatttccctttcttttggccaattcctcccttttggattgggaatgtttacctaatacctgcaccactgttgtatcttggaagttaagaatttgtttttgattttacgggctaataggtggaaagaaatgtgtcttgagtctcagataagactttagactttggatttttgagttgatggtggaatgagttaagactytggatactactgggaagagatgattgtattgtactacgcaagaggaacatgtgatgtggcgggagaaaggggaccactcgtacactgctggtgggaatataaattagtatggctactaagg

SEQ ID NO: 905122 - DNA, 597 bp, Homo sapiens
gttggtaataatgatttatgtaaatagccctaaatttacatatttatcaaacttcaatatatatcagggattttatggcctctggatttaaacctattacayagccatggtcaacatgtcactacaaagccaaaaaatgcaaaagcatcccaattatcttatatgctgcctaaggaatgtcttctgctcttatgtgggagggccccagctggctgacttcagcctgccaacacagcttccaaatctaaagtcatatgacatttcaatacagaaaaatccacaatagtgcagaaacccttcttggtactccctttactattagatttcacatctagaaaccagcaagaagaggaaaatacttattttctagcagataagtcagttgcttctcacatactcctgaagatgagcctgaaatgactaaaagctatgtgtaacagatcagagtccattaaaaagaaattcccaggcactaattttatctgtaatattacttgaagtaggccatcacctaatattgctgaagttttatgcttgcagcagactttggcctattctgtgtattcccacttctgtcaaaaatcaacttttaacagt

SEQ ID NO: 905123 - DNA, 614 bp, Homo sapiens
ataaaacacaacaaaaaaaccccactgaaacagagagataataagaaaggaagacagaaacaaaggatayataaagtaatcaggaaccaactaatcaggaacaaaatgatgggagtcatttttcacccattaataacaacctttaatgtaaatagtttaaattctataattaaaaaaaatagactggctaattggatttaaaaaaagacccaactatatagttacaaatgaaatcacagaaatacaaaggatcattagagactgttattaacactataggccaaaaaactaggaaacttagtggaaatgataaattcctgtacacatataacctaccaagattgaatgagaaaaaaaattaaaaatctgaatagaccaataacaaatgagattgaatcagtaagaaaaagcctccaagaaaggaaatctcagaacaggttgtatttactgctaattctaccaaaatttaaggaaaagccatcatacttttttaaacgatttcaaataattagagaggaggaatttcttccgtactcattctataaggcccacattaccctgatatcaaaagcagacaaggatacaacaagaagagaaaactataggcctggtaa

SEQ ID NO: 905124 - DNA, 590 bp, Homo sapiens
ttaggcaacatacatggcatggcagctagattgttacattcttggcatgaacttcagataactgtcttgaaacaaatcaaccagctaggccctctgtgtcttccacagagcacctctagcagcttggtctagtatagtcctaagcaatttctcacaacaagctctggagaggaggtttacaatcagaatatgtctaatttcatgaagtgccaggaataattaacactttgaagagagggacatttatataagaatggtttgtagtcagttactaccaagttatttacatccagcaaacacattagatacagaggtttctccatacagaagttccctgctttcagggtacatggtaaaaagagggtctaggaccacagggaactggaaagagggaacataattaagaagtctaaacatatcccaaatctatcatttaataatgacagggattattcccattttccaagggaaaatggggcttagagacagtaagtacttgcccaagtatatgaagacaaaaagtgaaagagaatttgaawccattcatcaataaattttcattgagcacataaaatatgtcagacaccatg

SEQ ID NO: 905125 - DNA, 620 bp, Homo sapiens
tcataaattaattttattaaattataattatttctgtgaattttttatgtatcccagttctggtttgtgatttactttcctaacatgagagraaaaaagtacatttactacttatgaaggaaaacatttacatcaaattatctttgtatccaggaaatacaaggtgtcaaatgttggatctgaatgataagaatataggtaattttcttttgattactttttgctgccctttttaacatatcacagtggaaagtatataattcactatatgtttttaaaatcccataaaattacagcattaattaaaataagaccaaactgcaccaaactgcccctgagaagcactttctgtggctacaggatcaccagggcttgtccgtataccaccccaacttgcaaagacccttcagtgccttccttaccatgcctcaggccataacagagccagaatgtagggatgccaacatgttgttggtttgtccaagattattatccaatgatggtccaaagaacagaattcaggcatcccgatttgctgctgtcttacttgttaattatatcctaaataagcctgcttcctgaaattttctttatagagatttcatcacatgcagtttcct

SEQ ID NO: 905126 - DNA, 582 bp, Homo sapiens
atggttgctaccttaagctgtaagttttagagtaatttgttatgtagttaacagataaccagaataggccccaacaacaacaaaacaaaaacaaacaaacaaaagtctatgcccttatggaaggtctcaattaataatgtgtttgactgtaaataacagaaaaccccgtttagtggcttaaccagataacagacctccagagctgggcagcctagaattggtacagcttccccacgttgcccccagagactcaatctccttctgtcttcctgcctgcatcctcaggggatgactactctgcctgtagccaggcagcagggttgaagacagtaaaaagaggcaagggcaagacagtacttcttttgaaaagtttttctagaggtttcagtcaattactttcccttacatttcattggcaagatttgggtaacaagggccacctctagctgcaaaggagtctgagaagacaggtgcttttagcacagcacatcgtcacccacatggtaactgggattctgttagaaaggaagaatggctattacctaagcaattagtgtctgckgcaggaattcttcctgtcct

SEQ ID NO: 905127 - DNA, 635 bp, Homo sapiens
aattatgttttgttgaaacatacctcaaaataatraaagccatttatgacaatcctgcagccaatatcatactgaataggcaaaagctggaagcattccccttgaaaactggcactagacaaggatgccctctctcaccacccctattcaaattagtattggaaattctggccagggcaatcagtcaagagaaataaatacagcgtattgaaataggaagagaggaagtcaaattgtctttgcagatgacatgatccaatatctagaaaaccccattgactcagcccaaaaacttcttaagcaatgtcagcaatgtctctacaaaatcaatatgcagaaatcacaagtgttcctatacaccttgtctaagcagggagccaaatcatgaatgaactcccattcacaattgctacaaagacaataaaatacctaaaaatacagctaacgagggaagtgaaggacctcttcaaggagaactacaaaccactgctgaaggaaatgagaggacacaagcagacagaaaaacattccatgcacatggataggaataattaatattgtgaaaatggccatactgtccaaagaaatttatattttcaatgctattcccattaaactaccattgacattcttca

SEQ ID NO: 905128 - DNA, 669 bp, Homo sapiens
tgagtgtatacccaaaggaatataaatccttccactataaagacacatgtacacatatgttaattgcagcactgtttacaatagcaaagacacagaaccaacccaaatgcccatcaatgatagactggataaacaaaatgtggtgcatatacgccatggaatactatgcagccataaaaaagaatgagatcatgtcctttgtagggacatggatgaagctggaagccatcatcctcagcaaactaacacaagaacagaaaaccaaacaccacatgttctcactcataagtgggagttgaacaatgagaacacatggacacaggaaggggaacaacacacaccggggaccgttgtagggggagcaacgggagggagtgcattaggacaaacacctaatgcatgaggtgcttaaatcctggatgacagtttgataggtgcagcaaaccaccatggcatatgtatacctatgtaacaaacctgcacattctgcccatgcatcctggaacttaaagtaaaataaaataaaataatagtaataataaaagatattcttggcttaaaaaaaatagtaaggggaagagagaatacatgccagaaaggcaacaaaaaatacccttcaaaatgatttccaggcaccatcctatamtatgatatcaaaatcactctcta

SEQ ID NO: 905129 - DNA, 646 bp, Homo sapiens
atatgtggaatcctaccagtcaagttgtgctgtgtacaattctgctatttctgaggcttagtattaagatgttatcatcccaaatataacacacttctgctaataacagtttggtcagtagtaaaggaattatttttgccttctgccttatgtgctttatttctttgtcttataattcttgtcaatttaaagattttaatttatcagacattgagatgtatcttgaaattgatgacatgtaaaagttttattagaggtattttctttcttagcaataaataatagttgatagtgtcttcgatctaatgaaatataatataattataattagtttagaaataaagttggagtcaggaagtgcaaatttttgtcatcatcagtgcaatgtcctggggttaataaaaacatacagcttctgtgatagcaagcattcacttggagcctggccacacttggaaatgagtttcacagtccagccaagattgccatgttttatatgaaatgataatgaagtggcttcacttttaagactgtattcttattgcttccaaatgaacactgccttgtgcccaccactcattcccaggyttttaactcataaaaatgctgtttgtacaaaagagagaaaaggcccaagggcttctaa

SEQ ID NO: 905130 - DNA, 553 bp, Homo sapiens; identical to SEQ ID NO: 903111

SEQ ID NO: 905131 - DNA, 650 bp, Homo sapiens
ttaattctactaagaactccacaggataggtgtattataacttttattcttcccattttacaggtgaaaaagctgaggtacagaggggttaaatcatttgcctaagatcatgcagctcagacgtatcaggggtaagaatgaaacccaggcagtattggctctagaggcagccctaaccactgcaccagatctataggcactttattcttgatcacctctttatgggcttcaaaaatgatttccattcctctttcactcctttattacatgagtttctgatactcgaattattcaaaataaggatggtaaaacacacacataaaataaatttttacagtatcatagtaaccctgtatgagatagtttttatttaggatatggatgaagcatttacataataaatatttcttaattattattattaaaatggttaaactatgtgtaaagtatgaagatattatttaaatatttaaggactacagatatttataattaaatataataaataaattgatacttaaaaggagacaaatatggtttatccattttcaatgggttagaaatataaacttgctatcagtttgtaaaacatatgaggtaaacacattaacaacaaygtggtcctcaagaacatcctaagagcagagcaa

SEQ ID NO: 905132 - DNA, 612 bp, Homo sapiens
ctgctgccactaccagggtatgagggaggggttgtgtaagccattcaaggctgtctttcctgtgctcttcagtgccccattcattaatatagtgttaataccaagtactgtgatcagtcacctgatttttagtccttatgaaggtgtttcatggaaagttcttcaattcagtgttcctgcagggttgacaatctttgtagggttctatactgctatcttgctccaccttcttctccaatcatcacctttttgaaaaaataaaattagagcctggctgtttaccagcagtgaagcctttcatttaaacaggctacaccatttgctcacaaattacaaatagaattcaggaatttcacagattagctactgagagatgagcaatcccatgttgaaaacaagaagctagagagcttttgggaatgtagctttatgacacatgactgttaaattgttaccattcattgtcttctgtctgttggccatggaccttatatatyattccataaactgtttcacaacactgaaactgtctgtattattgattccattctatagatgaagaaactaaagttcaaaaaattaactaacttgattctgttttcagtgataaca

SEQ ID NO: 905133 - DNA, 543 bp, Homo sapiens
attaaaatttctaatagtctttcttcaagcatttatgtgttatttatgattaagagtgagagaaaacaaagaaagtgttccactataatacttgagagaaaaaaaaaacwttctatagaataatcagctttcctatagtgcatgttgacacatagaaacagaatgtattgggttaaacgattttaaagatatttcttagaacagtaaagattctgatagaggaaaattgccctttttatttatggcattcaaatggcagtagtacttaaatttactttatttatgttttaaaaaacattgcacgtagagccaaccacaatgcttaataatcaatattcagcttaagtctcttaaatgcaggaaaatctcagaatactttgtgtgtgtgtgtgtgtgtgtgtgtgtgtgtgtgtgtgtgtgtgtgttttaatttgaaattagcattctcagcataaactgtatttgcataaacatttaaagtggagattataaaaactgtctggttaattttatcaggaaagacaggcaaactctgtaagtcag

SEQ ID NO: 905134 - DNA, 624 bp, Homo sapiens
cagccctgaaagcaactgggaggggtcttgtaccctgcaaagccacaggggtggaccagcccaagcccatgggcttgtatcagcatgacctggacgtgagacatggagtcaagggagatcattttggaactttaagatttgactgccctgctggatttcagacttgcatgggacctgtagcccctttgtttcggccaatttttcccatttggaatggctatatttacttacttaattcctagacccccattgtgtctaggaagtaactaatttgcttttgattttccaggctcataagcagaagggacttgctttgtctcagataagactttggactgtgaacttttgagttaatgctgaaatgagttaagcctttggaggactgctgggaagacatgattggttttgaaatgtgatgacatgagttgtgggaggggccaggagtggaataatatggtttggctgtgtgtccccacacaaatctcatcttgaattgtagctcccmtaatttccacatgttgtgggagggagctggtgggaggtaattgaatcatggacctcgtcttttccaggctgttctggtcatagtgaataagtctcatgaaatctgatagttttataaag

SEQ ID NO: 905135 - DNA, 642 bp, Homo sapiens
ccatgaaatctagggacattcctsctggttatttgcaatgtagagatagattttataatacctagaggaacaaacgaacagtataatcttcagacagtcctccttaaacattgttttctcagagccagttcaacatgtatagagggagcatctgcaactttgagaatctacttcctgaagagtagagcttagtggtagtctcttcctacaacaaacatgtggcctgcgtggaggtttttgatctgcataattgatgactatttagaaacattcctgaagaataataccttctctaagaagtgaggtttaagacattacataaaagggatgactgcagaaccaagtggatcccatccctcacattagcaagaggtattgaaataatttcaaggtattcaaataatttcagtaatttcatggtcctggcctttttgttgtgcatgatatttacagtaaagatgctcttgtaggcattgttaattatattaaaccttatcctctgttaggccccagagaaatgattctctggttttaataccaagagataattgtgcttctctaatgtgtctggtttgcctttttcttttgcacatcaagacattaaatattcacatttcctcctttctttgggcttccaaaaat

SEQ ID NO: 905136 - DNA, 621 bp, Homo sapiens
aattataaaatatagtttaataataatatcttrtaaggctattgtgaagattaagtgacaatgtaggcattccagaaatcccaaatcttattattgtgactctgttgctttgtgggatgaagaaataataatagttaggaatcataaagtattatacatattgttttaagaaagacagttttgatttctatgccagtaaaattgcgtaaacatattaaattacaatgttatattttgttatgccaaggagtagtagatgagttcttaagaaataaaccccattcttgtggaagaatatgttgtaaccacatattctccttggacaagggtattgatataaccactttctcctctgtccctagacaaggtaattggtctcctgcctaagagcttatgtgttaaagtttgacaattgtttcctaattacgctggtgatggattgataagacctgacatacgctattccaattactgggcattgaaccttttcaaagagctggatattagagtaggaggtaagcttgggcaagtcacagagtttagattgatcaatcaaatgaccaattctgtgtttgaactccctcaacacaccagtaaatgaatagcatatgaatttggtgt

SEQ ID NO: 905137 - DNA, 440 bp, Homo sapiens
cagcttgcaccatgcacctgtaaaagccacagacamtcaatgccagcccatgaaagcagccaggagggaggctataccctgcaaagccacaagggcagagctgcccaagaccatgggaacccacttcttgcatcagcatgacctatatgtgagacatggagtcaaaggagatcattttggagctttaagatttgattgccccactggatttcagacttgcctgggtcctgtaacccctttgttttggccaatttctcccatttggaacagctgtatttatgcaatgcctgtacctccattgtatctaggaagtaactaacttgaattgattttacaggcttataagcagaagggacttgcctcgccttagacaagactttggaatgtagattttttagttaatgctgaaatgagttaagattttgagggactgttggtat

SEQ ID NO: 905138 - DNA, 645 bp, Homo sapiens
cacacacacacacacgtacatacactttttaaaaagtaaaacattatttttgtaacccagaagaatgcctccaaagtacaaaatacaaaatttaataacatgagtatcatgttagaccatatctttttttttttttttaattttagaagcagagtcttggtctgtcactcaggctggagtgcagtggtgctatcctagctcactgcagcctcaaactcctgggctcaagtgatcctcctgcctcagcctcctgagtagctgggactacaggcatacctcactatgcctggccatttaaaatttttttttagagacagtttggctgtgtccccacccaaatcccatcgtaattatagttcccataatccccatgtgtcatgggagggacccagtgggaggtaactgaatcatgggggcagttacctcatcctgttcttgtgatagtaagtgagttctcacaaaatctgatggttttataaggggttttcttccccttcgctctgcacttctccttgctgycaccatgtgaagaaaagaggtgtttgcttccccttctgctatgattgtaagtgtcctgaggcctccctagccatgccaaactgtaagtcaattaaacccctttcctttataaattacccattctca

SEQ ID NO: 905139 - DNA, 582 bp, Homo sapiens
tgatggaggcatgaatctctgctactgtcccaggaaactgtatttattatttgaggaggaaggagtttccaggaacttccatktgggatcttctgaccataatagtccttactccaatggtaagaagacttgttgggattctgaccattgttaaatatatttacagcctccaggactttggaaacaaccacaagataatccagtggcccaacaggaccttctgtgaaatagattcatgccgtgagcccatctaactcctgctgctttaaacatctctttggcagcaagccacaatgatattttgtgtctgtagggatttgcattcctatcagagctattatctaatatctcctagagaaaatgaatatttcccactccgcaaagcacagttgtcttgttaatagctcacaggtccttcgcgggaaggcttggaggaatagccatggtctaccttggcactgagtggcaaggtttcctcaaacatctggtgaaagcaggtagatgaaggtgctctttcttgaactatggaagtttacaggggggtagttctggcacaaggtgaatgcatggaaatccagtgtt

SEQ ID NO: 905140 - DNA, 618 bp, Homo sapiens
aaagtgaataacattatctttttatctttttatttttattatatttctttacatttatagtgtaccaaacagttgaataatggactgatttccatcaagatgtttgtcattgaattgacaaagactcaatattaaagtaggagaaggtgttgaagataagatgtcttatctagagacgaataaccttttttatctttaacaagctgtcttatctttactaccctgccttggaaactcaagagagtagcagccttgaatacacactgttatttcctccttcatggcctgagactgattcagagaggaaatgccccatcagaaggatggatgtagttcgggctaatgaggcagcaggtagacccatgaggagctgaccttgaatggatgaagaactttctattctggatcaattatcgtaattattctaactccatcctcaattgtacattggatgctaaagagagctagttagaattcttttagccacctccagttcatgagataaaaagagataggggtgaaggctttagttgattgacagtttttaatggtagttttgagggtcgaattgaatagtatayactgcaagactttttgaacattaagtatactcccagt

SEQ ID NO: 905141 - DNA, 453 bp, Homo sapiens
atcctgcacccaacatataggaatcaaggttacttaccaaagaggacttaggagctgatatgttattgtttgaaaaatctatcwttgattgacaggccaagagattgcatttctgcctgaataataagagtttaagttcacagaacactctcagaaatgatatcttatttgatcgacacaatgcctataaactaggtattaatagtattctccatctgatagatatttccaaataaaggattaaggaacttaccttatttcatttaaaccacataaaactgtgtaaagcagttgttattttctttcatacatcaggatttttgctaatagtgttggttaggagaaagacgagccaaaatgcctaggttccattcccagttttgccacttaatgactgtgtgatcttgagcaagttgcttaacttctctgtgcctgagtttctgtacatgtaaa

SEQ ID NO: 905142 - DNA, 615 bp, Homo sapiens
atagcaatatatcctggatttactcaatacccaactcccaattcatgcccactgaatagagtcatatttggaaataaggcctttgcagatgtaatcaagtttcgatgagatcatactgcattatggtgagccctaaattcaacatgacttgtatctttataagaagagggaaatgtagacacggagacacagacacagagagaatcatgtcatttgaaaagagagagagacatatattgacaacaatcatgacaacctaggaaaagaagggaagaaatttttcctagggccttcaaagaaagagcataacccttccaacagtgattttaaacttcttgccttgagaactgtgagaaaataaatctccgttgctttaagtcatcaagtttgtagcaatttatgacagcagccctaccaaactaatacagcatatgtgaagatacagaaaaagacattaacttgccatctaaagatgatacamttttgactattaaaggcagaaattaattagtattcattgagcactgaccaagtgggagcctaactcaaatttcaaaaactttattcccctgaaaagattttcactgtaataaaacaaatagtctctgttaagtt

SEQ ID NO: 905143 - DNA, 654 bp, Homo sapiens
aaatatttttatggtaaggagtatactttatctcttccccacttttattgtaatattgtaattcttaaatcatctattagttacatatttgtatgttgtctgttaacccaaatttataattaatgctgggattgaattaaagtttggaattacaaaatattgatagttttgttttcttatccaatacacacgaacacaagtgcttgcttttagctttattaacttcagttagaaattctagatttagtgattttcaaaatgctctgtgtattgcgccagtgtcacagtgatccaggcagtgacatgtccatccaaggtctacacataagaaggcagttatctattgggtttaatttttttttaagatgaaaaacaactggctccccagatatccctgtggagataaagccttcttcctatgtctcttagatgactgaaaatcaagcattttggtacttagaatcccattttcatatatattataattaaatgtttttacctgaaaatgacttatttctcagtatataaaatatgttttaaaggagaaaawctttcatgtttttccaaatatgtaatggggttgaaattctgtattacaattaaaaataaaaataaaaacaagggctatacatttatttgtaggaaaatggtaag

SEQ ID NO: 905144 - DNA, 710 bp, Homo sapiens
tgacacgcagagaccagggactcctcgttcagctcagcgtggaaagctccctgagagtcagcacgagggtgagagggaagctggagcaactctgggtttcctctttctctctaccacgtggcctgtgtaatccatactgcggtcttcaggctctggctcaggacaagctctgaggtgaacttctccctctatgggtccttgcaagttattctgacacaatgagtagcccctccaggctgagacagaggaggacggctgccaacaatacgcggagtcctgtcctcacccactccacagggacgggagacggcaaacattcgatcaatcccacttccgacagtgaaccctgagggaagggtcatggaaacgtacagatgatcaggaactgaaaccctgatcaaagaagaaaactgagagcagtttcattgtggaacaagagggagcaggttatagaaattgttacgggttgagttattgtcccccaaaagatatgttgaagttcaaacccccagtacctcagaacgggacctaatttagaaatagggcctagcagatgtgatttgctaagacgaggtcctcctggagtaggacgagtccaacaagcagtagtgagagaaggatattatagccagaagcgtagaggtaagtgaaggtcagagatgtgaagcaggttaaaaaaaattagattrtgtagaaaatgatcttaggag

SEQ ID NO: 905145 - DNA, 613 bp, Homo sapiens
ttaatggactctttctatccttaaaggctgtgtgtgaatatgataatttatttattatggcataaaatttaacatgtagagaccaaaactatgtggcacactggatggcagatttgtggtctgtgctgtttctcttctctaaaatatgtccaaattttgtcaaagaaattttgaaagttgctcaaacattgtagcagcagtgcaattggcaaaataacaataataattaaacaaattgaagtcaagttagatatattcaaaattttaaacatacttacctatttattagtacattccaattctgtgaatcccactactacagaaatagttgctatagcacattagcatataaggatatatttataaatatatttatgaaagtattttttgggaaaactacctgaggcaacctaaaggtacattagattggagactctttaatgaaagttttcttttgtgttattttgtttatatcacacttagcaaatgctgcctatgatcctcttacttcagtaataaacattattaagaaaataaatccaaggctaaatgtgtaaagtgaagtaagtttccmcatgaaatcttgagcaaagtcctagtaatgctcatactc

SEQ ID NO: 905146 - DNA, 646 bp, Homo sapiens
acataaatatcttgttttgagaaatgtctgttcatatacttcacccactttttgatgggtttttttttcttgtaaatttgttaattccttgtagattctgaatattakccctttgtcagaaggatagaattcaaaaattttctcccattctgtaggttgcctgttcactctgatgatagtttattttgctgtgcacaaactctttggtttaattagatcccatttgtcaatttcagcttttgttgccattgcttttggtgttttagtcacgaagtctttgcccatgcctatgtcctaatggtattgcctcggttttcttctaacttttttatggttttaggtcttacattcaagtctttaatccatcttgagttaatttttgtataaggtgtaaggaaggggtccagtttcagttttctgcatatggctagccagttttcccaacaccatttattaaaatggaatcctttcccattgcttgtttttgtcaggttggtcaaagaacaggtggttgtagatgtgtggcattatttctgaggcctctgttctgttccattggtctatatatctgttttggtaccagtaccatgctgttttcgttactgtagacttgtagtatagtttgaagtcaggtaacatgatgcct

SEQ ID NO: 905147 - DNA, 637 bp, Homo sapiens
atttattcttatcatagcagtgccaaggcgggacttccaggtgtttcctgtgactgagatagggactgcctgctgcctattcccatcttacttccttttggtcctataaacaacttcatgcccttccaataaattattaatattatgattcctaggctgactagctagtagtaatttctgctgctggtgtatacagataatatgtcagctattatttcagctctgatggtgatgttaggtttgtgttcagaacagtatttgtgcaattatttgaatattttattctattttatcctcactattgtccaaaaatatgttagagaatgcaaacaggaaaatgcttatacgagtaataaaaaataaaactctcaaatgaagatagttgagataaaatgaaaatttggcatgtagacaagagagaatcattagactcaatagaattaagctaattgattgcaaattcatttatgagaaaaaagaagaaaaccaaagcacacctattaaatgcttaaaatatactaccaaagtttgtgtctctaaggagaaagaaaatagaacagatttttaaaaataaataatattttatctctttaggaacttcccyatatatttttaagtcaattttgttttctgttgg

SEQ ID NO: 905148 - DNA, 642 bp, Homo sapiens
ggtccacactatatttatgtacatttagtctatatttatgtacatattaagcagattttttacaggataagtacttttgcaataaattaaggttttagtaaattaaattgttatatttaattcaagttttctttatttaactaataatactctgttcctttattttattggatgagatatagaccataacaacaacaaactgaagagaagaaaaaaataacagacatgagttcaagggacatcagcgccagccaatggttttcctctccataatagctacaaagctatatttctaacccaaccacatttctaaatcatttcacttccctacagcctttatcagttctcactcagcttgaaatagtttttccctatatgaggtaattttgcacaatagacagactcactatttaatatattattttttcttttatttagaaacactatatatatatatatagagagagagagagagagcgctatatacttagtaaatgtagacacgaaaaaataaggaaaatgtactctcattacacatcacaatagatagttgctattaactttctcttgtatgcatacataagttgtaaaaatgacatgatatrgtacaatctgttttgctatttaccgtggtcacttgac

SEQ ID NO: 905149 - DNA, 612 bp, Homo sapiens
ccaacattataccaaatgagcaaaagctgaaaacattctccttgaaaactagaacaaamcaagaatgccctctctcaccactcctattcaacatagtattggaagtcctggccagagcaattaagtaggagaaagaaataaaaagcatccaaataggaaaagaggaagccaaggtttccctctttgcaggtgacaattattctgtatctagaaaacccaaagtcactcccaaaagatcctagatttgataaacaactttgccaaagtttcaggatataaaataaatttacaaaaatcagtaacattcctatacaccaatactatctaaattaagagccaaatcaggaacgcaatccctttcagaattgccacaaaaagaataaaatacctaggaatacagctaaccagagaagaaaaagatctctacaatgagaattttataaagcagtactcagaaatcagagatgacaaacaaatgataaccattttttgctcatggataggaagaatcagtggccatactgcccaaagcaattgacagattcaatgctattcctatgaaactaccaatgacattcttcccagaatttgaaaaaaaaaaaactgttttaa

SEQ ID NO: 905150 - DNA, 515 bp, Homo sapiens
tcagaacttggcctgataatttcatgaattctgactttaccaaatataaactaatagataatcacaattcagctatcgaaaaaaggcatcattaattagtctgcatagataaagccatttaaaaaaacaaaattattaacagtgcacaaaatgtcaattctcaatggctgtcaaactggaatgtttcagaaactgacaatccactgggaaaaggactatcaaggagatagacaaatatctttctgcctttaactttagtaagcttctcatcatggagatatttccccccccaaattataaagcacatacagtccaccaatagcaagctgatacaggtatgcgttgacttagagatgatatgtctattttatattcccatgaaagcagacacagaataatcaataacatcagaaagagcagtttactttatatggaatggaggaaggccttatacgaacaatgaagtgagcaaatgtatgaaagtgtraaaggagcaagttttttttaatcaataa

SEQ ID NO: 905151 - DNA, 676 bp, Homo sapiens
ctataaagtgagagatgaagtatgatttgaytttacagatagagtttcagagaggttgattaatttgagccaggtcacataattaatgaactgaaaagttaaaattcaaacttttgtctgtatgtgtatgatttccaagctatttctatttctaggatgctgttaaatgatttgaatgtgttaaaaaatacctattgattgaatagtctatgaaaatttggaggaggaggaaggatagctatgagaactgcaatactatctggtgccacagctgtgaaagccctagagctaggcctttaaaattgtgtttgacataagtgtgttgactactaccagctggaagctctggaataaaaggagtacaaacaatagctatcaaattgaatcagggcaaagaaaattagcagaactaatgactatatagatttagttattgcggtagtctattgttacaaatacataaaccatccacttgcatcagttttctgaagcctcaatttctattgctgtactttctaaaaaaaaaaaaaatctgttctgttaaactgaaagatccacttgctaaaaacaaaataaaacaaaagtagaaggaaatataccaaagtgttaaaactgatttggtattttaaaaaactttataattattttctccgactcccctcacaatatttaatga

SEQ ID NO: 905152 - DNA, 606 bp, Homo sapiens
ctaatagatatctcagatacaatatatccaatatctgatcttcctcccaaacttatccttgacattatctgcactatatcaatcagtaaatggcaactaaatgcttctaatttttcaggccaaacaactcagagtcatccttaattcatctttctttatcaaataccacaaccaatccattagcaaattctgcatttctaactcaaaactatctccaaaatctgaccatttctaattgtctcatttactactactttgaccaatccaccaccaccaccaccatctcccttgtaaatttataataattcctactaagttcccctttttccactcttgttcctctatccctttgccctcttctccccacctgctttctgcttgccacaaagcagctaaggtgatcctgtcttgtcttgtcaagtcaaatcactccttagtcaaatgcctaaaatgacttcccattacactcacactaaatccataccttcccacggccttcggtgacatacatgtgctcctctttcacctatttgacattatttcttatgtagtttatcttcattcrctcagtttgtggcctcctttctgttattaaaatatgacaag

SEQ ID NO: 905153 - DNA, 599 bp, Homo sapiens
ccatgcaaagtggccaggcatggtggctcacgcctgtaatctcagcactctgggaggccaaggtgggtggatcacttgaggtcaggagttcaagaccagcctggccaacatggcgaaaccttgtctctactaaaaatacaaaaattagccaggcatggtagcgcacgcctgtaatcccagctactcaggaggctgaggcatgagaattgcttgaacccaggaggcagaggttgcagtgagctgagatcatgcccctgcactctagcctgggcaacaaagcaagatcctgtctcaaaaaaaaaaaaaaaaaaaaaaaagagagagagaggaggaaaaaaaaccatgcaaactttaacataaaaaatacaagtgcagtaagaatctttgtgtcaatatgattctcaggatttctctcatggcagccaccccaagaccaggcctaactagaacaccctgctgcaggctgcctttrcgtctcctccctaaaattctacttatgccataagctcttgggacatgagctcctaaaatcaaccataacctgggcacagtctgcatctgtgccaaatgagggctggaacgcctgtctacttgcctgc

SEQ ID NO: 905154 - DNA, 590 bp, Homo sapiens
aattaaaaataacaatgattcacagttgwgcaattatttgtcattcatcaggattttgaaggtggctccaggtagcagtgggtggtgaaagaggctcaacccattgttagtggggactgaaacaccactgttcacacaagcacacacaagcccacgtgcccatgtgcctgtatatgctgcttatgcatgcacactactgcgtaagtgcgcacacacaggtccgcatccacccacaagcacactcacacacagacacacaatacacacacaaacacagtgctcacatggatgcattaacacatacatgtgtgcacacatgcacacacacacttgtatgcatgaatatgaacacatggatgtgcatgcaaggcatgcacacaaacacatgtgttatatgtatgtaacacgatacacatgtacacaacaaacgtatgtgtgcatacatgaacagagtacttgcatatacatgtataaagatgtgcagacatacacatgcacatacatgcacactcacacaggcatgccaatttctccctatttcaaagagaataggaagctgcctccctctcacaaggtgacctaaagcatgg

SEQ ID NO: 905155 - DNA, 617 bp, Homo sapiens
ggttattttgcctgttagttgatgcagtttcttcatagtgtcaatggtccttacaawttggtatgtttttgtggtggctgttaccagtttttcctttccatatttagtgcttccttcaggagctcttgtaaggcagacctggtggtggcaaaacctctcagcatttgtttgtctgtaaaggattctatttctccttcacttatgaagcttagtttggctggatatgtaattctgggttgaaaattcttttctttaagagtgttgaatattggcccccaatctcttctggcttgtagggtttctgcagagaattcctctgttagtcttggactttcttgaagaaatgggcttctctttgtgggcaacttgacctttctctctggctgcccttaacattttttcctttatttcaaccttggtgaatctgacgattgtgtgtcttggggttgctcttcttgaggattatctttatggtgttctctgtatttcctgaatttgaatgttggcctctcttgccaggttggggaagttctcctggataatatcctgaagagtgttttccaacttggttccattctccccgtgactttcaggtacactaatcaaatgtaagtttg

SEQ ID NO: 905156 - DNA, 617 bp, Homo sapiens
ggttattttgcctgttagttgatgcagtttcttcatagtgtcaatggtccttacaatttggtatgtttttgtggtggctgttaccaktttttcctttccatatttagtgcttccttcaggagctcttgtaaggcagacctggtggtggcaaaacctctcagcatttgtttgtctgtaaaggattctatttctccttcacttatgaagcttagtttggctggatatgtaattctgggttgaaaattcttttctttaagagtgttgaatattggcccccaatctcttctggcttgtagggtttctgcagagaattcctctgttagtcttggactttcttgaagaaatgggcttctctttgtgggcaacttgacctttctctctggctgcccttaacattttttcctttatttcaaccttggtgaatctgacgattgtgtgtcttggggttgctcttcttgaggattatctttatggtgttctctgtatttcctgaatttgaatgttggcctctcttgccaggttggggaagttctcctggataatatcctgaagagtgttttccaacttggttccattctccccgtgactttcaggtacactaatcaaatgtaagtttg

SEQ ID NO: 905157 - DNA, 613 bp, Homo sapiens
tccagaactgtaggaaaataaacatgttgttttaaactactatgtttgtggtaatttgtcacagcagcaaaaggaaacaaataaaggagaytgaaggaagcttaggacactggagataaattagcagaatattcagaggaggtaccagggaggaggtggacaaggtgcttaccaatggcagctcacttgataaatctagggggagctagtggccactctcagagcttaagatggaatagaagttctaatcaaagagtctgtgctctaatactttaagtggatggggaactttatatgctttgtttgccctctgaagaaaataagagcaaaagaaaacaagagacgttcatgtttaattgtctgctaccttcaatagcggcaggactgggcaggaagtggcgagagacagcattttaatattttgacactcagccaggggaacaagctatagtgaatgaaacctactactgtcttcaggctacttcagatccaccataatccatgaggtaggaatgaatgctaaacatatacccatgacactagtgaccatcaactacaggacacagagacagttctccagcagtgctaatggatttgcacaggtattacaaca

SEQ ID NO: 905158 - DNA, 613 bp, Homo sapiens
tccagaactgtaggaaaataaacatgttgttttaaactactatgtttgtggtaatttgtcacagcagcaaaaggaaacaaataaaggagattgaaggaagcttaggacactggagayaaattagcagaatattcagaggaggtaccagggaggaggtggacaaggtgcttaccaatggcagctcacttgataaatctagggggagctagtggccactctcagagcttaagatggaatagaagttctaatcaaagagtctgtgctctaatactttaagtggatggggaactttatatgctttgtttgccctctgaagaaaataagagcaaaagaaaacaagagacgttcatgtttaattgtctgctaccttcaatagcggcaggactgggcaggaagtggcgagagacagcattttaatattttgacactcagccaggggaacaagctatagtgaatgaaacctactactgtcttcaggctacttcagatccaccataatccatgaggtaggaatgaatgctaaacatatacccatgacactagtgaccatcaactacaggacacagagacagttctccagcagtgctaatggatttgcacaggtattacaaca

SEQ ID NO: 905159 - DNA, 526 bp, Homo sapiens
gagatagtatctcacagtggttttggtttgcacttctmtaaggaccagtgatgatgagctttttttcatatatttgttggccacataactgccttcttttgagaagtgtctgttcatatcctttgcccactttttgatggggttgtttgttttttccttgtaaatttgtttaagttccctgtagattctgagtatttccctttgtaagatggatagattgcaaaaattttctcctattctgtaggttgcctgtttactctgatgatagtttcttttgctgtgcagaagccctttagtttaattagatcccatttgtctattttggcttttgttgccattgcttttggtgttttagtcatgaagactttgcccatacctatgtcctgaatggtattgcctaggttttcttctagggtttttatggttttaggtcttatgtttaagtctttaagccctcttgagttaatttttgtataaggtgtaagaaaggggtgcagtttcagctttctgcatatggctagccagt

SEQ ID NO: 905160 - DNA, 585 bp, Homo sapiens
gagactaggattggaaccactgcttttttttgctttccatttgcttagtaaatattcctccatccctttattttgagcctatgtgtgtctttgcacgtgagatgtgtctctgaatgcagcacaccgatgggtcttgactctttatccaatttgccagtctgtgtcttttaattggggcatttagcttgtttacatttaaggttaatatttttatgtgtgaatttgatcctgtcattatgatgctagctggttatgttgcccattagttgatgcagtttcttcatagtgttgatggtctttacaatttggtatgtttttgcaggggctggtacatgttgttcatttccatgtttagtgcttccttcaggagctcttgtaaggcaggcctcgtggtgacataatctctcagcatttgcttgtctgtaaagaattttatttctccttcgcttatgaaacttagtttggttggatatgaaaakctgggttgaaaattcttttctttaagaatgttgaatattgtttcccactttcttctggcttctagggtttctgcagagagatctactattagtctgatgggcttcc

SEQ ID NO: 905161 - DNA, 581 bp, Homo sapiens
aaatccacttttataataaaccaatatggaaatgtaaaaaaagaaattgatggttgtcagggtctgaaggctgaggagaaggactgtaaaggagcatgagtcactttttgtggtaatgcaaatatgtatcttgaatttagtggtggttacacatttgacacaactcacccaattatccacataaaaagggtgatttttattgtatgtaaagaatatctccaaatacttaagaaaagttgaggcaaaccttggaaagaaaaggaacacagttccaggagagctattccaaggagtttgacatatgctagtgaaaaggtaaaggctttcccagtatattaaaactgaagacctctgaaaaattaaaagagatttacgtggtaaaggaggggagtgaagttatatgcatagagtataccaaacaaaagagcagctcacacaaaggattggcagtagcaagaaatacagtgygcgccgatctgggaaaatgaaagtaagctgcgatggcaggatatagaaagcaatgctagaggcatagagaatagatagggatcaaatttcacagggtcattttaacaattagg

SEQ ID NO: 905162 - DNA, 568 bp, Homo sapiens
gccagtctatctgctaaggcatagcaagagtgacctttcctttagttcccgataagtaccttatctccatctgagaccacatcagcctgtayttcattgtccatatcactatcagcattttgatcaaaaccattcaaccagtctctaggaagttccaaattttcccacattttcctttcttcttctgagccctccaaactgctccaatctctgcccattacccaattccaaagttgcttccacatttttatgtatttttataaaagtgccctgctctgctggtaccaattttctgtattagtctgttttcacagtgctataaagatactacctgagactagataatttatacagaaaaaatgtttaattgactcacagttctgcatgactggggaagcctcagaaaacttaacaatcatggcagaatgtgaaagggaagcaaagacctgcttcacatggtggcaggagagagagagagagatcaagggggggagtgccacactttaaaatcatcagctcttgtgagaactcactcactatcatgagaacagcatgggggaaactgccc

SEQ ID NO: 905163 - DNA, 568 bp, Homo sapiens
gccagtctatctgctaaggcatagcaagagtgacctttcctttagttcccgataagtaccttatctccatctgagaccacatcagcctgtacttcattgtccatatcactatcagcattttgatcaaaacyattcaaccagtctctaggaagttccaaattttcccacattttcctttcttcttctgagccctccaaactgctccaatctctgcccattacccaattccaaagttgcttccacatttttatgtatttttataaaagtgccctgctctgctggtaccaattttctgtattagtctgttttcacagtgctataaagatactacctgagactagataatttatacagaaaaaatgtttaattgactcacagttctgcatgactggggaagcctcagaaaacttaacaatcatggcagaatgtgaaagggaagcaaagacctgcttcacatggtggcaggagagagagagagagatcaagggggggagtgccacactttaaaatcatcagctcttgtgagaactcactcactatcatgagaacagcatgggggaaactgccc

SEQ ID NO: 905164 - DNA, 437 bp, Homo sapiens
taactaaatagcttccgcacagcaaaagaaactatcatcagagtgatcaggcaacctacaggatgggagaaaatttttgtgatctatttatctgataaagggctaatatccagattctacaaagaacttaaacaaatttacaagaaaaaaacaaacaaccccatcaaaaagtgggcgaaggatatgaacagacacttcttaaaagaagacatttatgtggccaacaaacacatgaaaaaaaagctcctcatataaaaaaggatgagttaatgtcctttgcagggacatggatgaagctggaaaccatcattctcagcaaactaacacaggaacagaaaaccaaatactgcatrttctcactcataagcaggagttaaacaatgagaacacatggacacagtgaggggagcatcgcacaccggggcccgtcctagggt

SEQ ID NO: 905165 - DNA, 602 bp, Homo sapiens
atgaggaaagacttctctccaaaggggaaaaataacataaaataaatggcaagatattaatcttgagaccatttacgggaaggtgttaagtggccccactggcattaacagcaatgagcttcgaatatcacttgtacagcaagctgcttagctctgcagataacaagtcacagcaggccttcttgggttgcaaatgtagtcactctgtttgccaattaactctttcccccattgccttttatataaccagccaagaagctttgctgagacagcatcatctgctggaaaacagcactggcctgggagttagaagaaatgatgtgcagaagcagtagtggaagtagtaacagatagtagcaataacagtagtaggaacattattgggaagccagagcccttggaggctctctattttctgaaataaatgtctacgttttctaagcttagtatcagccaatgtcgttgacaaggcattgttcttttatctcaagaaatttaaatttgtctcagttgttctgtgcatgctaaaacgaaatactccatggcctttccatgtacaccrcacaccgtccttaattcatctgtgatgctatagcctagat

SEQ ID NO: 905166 - DNA, 651 bp, Homo sapiens
ctcttctgggatgccatgaatataatttcttaatcctctattaatgaaatgtggaagacaataatagcaagtatactttcagtgcaagtggggcagaatatttgaaatcacatctagcccagaaaattgtggacatgctataatcttatatttggcatgtgtaaattgtcatatattatatcttcacattttacatattctcactttaaattgtagacacttgaggccttaacctatattacctacagtttcaagctttgacacagaccgtactgtggagtaatgtctgaataatatgtatattcaaaatacaggttcattctttcaaatacaatatgttttcaaatgtaaaattgatgcaaaattcaagtgctcacctagcataagtttagtcagtgagattgtcctatttctttctctaccacaactgaagtaatggcaatgtgactagagaaatggaatagataagacagtgacaaaatataaaaatacttgaaataaataaggttgggttcgctcaaaagttactgaacaagctggaaaattactaattttaaagtttgcmagtgattctgaatatatggtattttctatagcctttcttctgtggggggtataattataggtcatagtatgcattaagttgaacca

SEQ ID NO: 905167 - DNA, 591 bp, Homo sapiens
gtctaaaagtgtagaacaatgataacttcacatgattcaatataacaccttatgcagtatttagtgggaaacaactgaacacacggcttataattggaaatacaaaaatacaccyttaaacaatctttaaaaatgaccaatagacttgagtttactcatttagaatattgaatttaagaattatatgaaattataggaattttaaaaatatgtaactttgttttctctagatacatgcattttaaaggaaattatttgaatgatgttaaacgagctaaacatcagtttttcagtctctgaggagaagaaaatatgtcacttttgtttgtcaaatgccagtattttagttcagtaaacctatttaaggtactatgattttatagttttaattaaggacacaattaagcataaaccattaaaatttgtccttgcaaatcttccaaagagagagctgctttcaaacaaccgaatgttcataatcatcaatatggagaacaacaacgatttgttcatgtcttttgaattttgcatgtaactaaaagaacaagataattacctccaacctattccatttattctccactgtaactt

SEQ ID NO: 905168 - DNA, 641 bp, Homo sapiens
tgaaaatctttagagacaccatttgagtttktttggatagaaaaataacttgattttttttgtgtgactgctacaaataaattatctttaagcaaaggaaggcacttagctgtatttaactttgctctgaagttagaaagtgaggatacattgaattttaataaatcaacgattataattcaaccaagaaacagttttataaagggatgaatatttgttatgatggaaagaatccctttgtagtacaaattacgacacatggcgtgtgttttgcaaattaaaatttacaaagttttttagaagcgtagaacatcagtactcaaaaaccatttttttttcaataattcactctggaacaccaaaggaatgcatgtaaatttattatttgagagtcacttttatggataggtacagtgttgtgtttgagaagggaaactgctcctttggaagaggaataaggatgaacaggacatagcacttacctttcagtggttcacaaagtaagtgaagacatagacacgtacataaacaacaataccaccaccaggctatgaaaagaatcataagaatattttgtttgctggaagggagaagagaataaattaatgttggctaattcattaactttgcatctgaaagtg

SEQ ID NO: 905169 - DNA, 595 bp, Homo sapiens
ctattgtgtacatctttttgtacaaaatgctgcacttctacaagactcccagagtgccaagataaaaaagataaggtttgtactctccagctgagtcacttagccagtagtattagagaaagaatctgcaaacggtgggaaattttttcataagtaaaggtggcaatgactgtaggagagaatcccaaacagctgttgaagaaggagatgaaatagggaagccacaggcatttgggcagaagatggtcctagcacaacacaaaacaatttcacatagtcatggatgtttggaaagtgaaagcagcagacagaccaccctgtgtgtgatcatctgagatgcattggctcaatttcagcaaaactgtcatgcagcctcggggacagatccataaaacagaaagctgaaattgggcagtaggttatagttttgcacatcctgtttgagaagaaagaaaaaaggcttagaaaaacccatatattggtatrtataaagtggcatccaatatgttttaatcaaatgcctattaaaaatgatagtatcagcaccttctaagaaaaggaaagactagataagttctctacacagaaaagtgtt

SEQ ID NO: 905170 - DNA, 601 bp, Homo sapiens
ggttcttatgaaggcgctttttcatgtagatggttgctgaatttagtggtcctgtagggggtgtaggggggtaaaatagatggaaacttttgtctgcccatcttgctccagccctgtctcctaatcccccatttcctaaatgaaatttcaatctttattttgtaaataaggaaaactgaagataaacattttgctttaggtcacatggctgcttaatgcaaatctgtgatttgtgcctaggcagtctgtattcccttagctactcatactacttcagagataacacattgtgatacaaaagaaaagaaaagtggaggaaacgtgaaagagaagaatgactgagaagagagatggatgagtgagaagaataatatcagggaaagatgagaagaaatttgaggaaaatatgggtgagttatattgggagaagtatataaggtaagagaaaagaataaaattctggccttgagagagaagaaataaggaagagagtagaataaaagaagaatgagaagcagagtgtcttagttcattctcatactactataacggcatatytgagactgggaattctataaaggaaagaggtttaattgactca

SEQ ID NO: 905171 - DNA, 622 bp, Homo sapiens
tgatacttcctcatgctctgataatagctaccaaatcttgcttaacttttaacaatctgtcatcagatcctgttcatcagarcatattcaactttaaaaaatgttctcccgacattttattcattcatttattcagtaattaagtgtcataggtactgtgacacagcagtgaacaaaataaatatgaatcgtgacctcatagccttgtggggagaacggtaggtaaatgatatggtttggctctgtgtccccacccaaatctcatcttgaattgtactcccataattcccatgtgttgtgggagggacccggtgggagataatttgaatcatgggcgtggtttcccccatactgttctcgtggtagtgaataagcctcacaagatctgatggttttatcaggggtttctgcttttgcatctctctcactttctcttgctgccaccatgtgagaagtgcctttcacctcctaccatgattcttaggcctcccaagccatgtggaattgtaagcccagttaaacctcttttttcttcccagtctcaggtatgtctttatcagtagcatgaaaacagactaacacagtaaacaagtaatctcacaagtaaatacataattaccaa

SEQ ID NO: 905172 - DNA, 596 bp, Homo sapiens
taataatcagaagtaaaaatattaacatatcagtcactgttctattagcttaaagcagcaaagggtaaattatgttgtttgccaatgttttacaatacttctcataacagctttaaagccacaaattcttggctaagtcctgctgattctacaaatattaaggtcctaggtattacagttttgaattagtcagaattctttgggctacaagttacagataactaacttgaatcagtttaaggtcagcagaggcatattggaaagattttaggacaagccactatctgtgggaagagctgacatgtgatgcctgctttggggcttagagtcttgatcactaataaccttcaagacttgctctttttcacccctggtttctctcctgtggcagagtgatttgtcaacatggaggtaaaaatggtgaccaacggttcctgagcctcactctccttgattatacttctacacaatgacttgattatattaggttggtgaaaaacgaattgcggttttgccactaaaagtaatgrcaaattagaagtaatggcaatgccattaaaagtaatgacaaaaactgcattacttttgcaccaacc

SEQ ID NO: 905173 - DNA, 563 bp, Homo sapiens
tccgaagtgtgttatagaacattatctgtggctgataagatttgtgtgctcttccttctttgtkttgagaaaaaattgagcacataccactttttaattaaagaattgtgttccacacatatttcctcaatcttcaaatattcctttagttctgtccccattagtgagagctattttcatccagtctaatcaatactcgcccctttcattgttctcattttgagtttagatcataaacatacatctgtcagtagcaaaagtattctaaagctccccctctgcacttggtcgcagatactcatactgttagggtgtaaaagggaaactggaatccataaaacagggtgaactctactatatatgacactatgcggttttcctgagctgtgcagcacagggacctgctagtaaggcagtatagtatagtgggtaattcagagtgcaggttttggggttaacttacctgggtttatacccaggctctgtcacttactggctggatgaggttaaagagaagattattcataacacttgttaaagaatggtaaggaagactttatgca

SEQ ID NO: 905174 - DNA, 590 bp, Homo sapiens
caggatctaagaaaaggaacctaatacaatctgaaagtgttagctgagargtcaacataatgaacatttttaccaaaatgagccattcagggatgagtccaacatagccctgttgcgagcttatcctccaaccttattctggctgagacacattgacctgggaaggcctttgagggggcaattttccagattaaagaagcaaactatgtgcatgatttatgtgaagctgggaggtcccctcacacacacacccacacacccctattttttaaaagttcctttaacccagcccattatggagcctgaaattccttaattcaattactccttaagatcctttagagtctggtgcagtggcttacaattataatcccatcactttgggaggccgaggcaggaggattgtttgaggccagagttcaagactagcctgggcaacatagtgagacctgtgtctctacaaaatatgaaaaattagccagatatggtggcacacacctgtagtcccagcaactcaagaggctgaggtgggaggatcacttgagcctgggaggtggaggctgcagtgacccatgagcatgacactgcac

SEQ ID NO: 905175 - DNA, 598 bp, Homo sapiens
tcagagaatatcaaattgttttarttgctatagattcaaaaaaattttgataactagtagaataaattcttctatcttgttttactcttattaagaatgccttgactatttttgaccatttgcatttccaaataaatgttaaaattaatgtattttctgttaaatagataataagtggaatatcatttgagattgcctggcatttatagatcagtatggtaaataattacaattgcttcaacatagccttctcatgcataaaaattacatatgactttatttgtttaggtcttccttaatttctctcgataatattttatagatttttctataaacattgtgtatcttttctcttagaattatttttatgaattgaatatttgttgttttataaatgccatctttttgtgtttcattttggaattgtttattccttgtgtagagaaatattgttaatttttggatattgaatctgtgtccagaaaacttgctaggctaattcattgatgctaataatttatctgtaactctttcagattttctacatatacaatcatatcataagcaaataatgaccattttattttttccttcaaaa

SEQ ID NO: 905176 - DNA, 654 bp, Homo sapiens
ctgttagttagtggtaagtcaagaatttagggattctctacaaggaggagctggtaccattccttctgaaactattccaatcaatagaaaaagagggaatcctcactaactcattttatgaggccagcatcatcctgataccaaagcctggcagagacacaacaaaaaagagaattttagaccaatatccctgatgaacgtcaatgcaaaaatcctcaataaaatactggcaaaccgaatccagaagcaaatcaaaaaacttatccaccatgatcaagtgggcttcatccctgggatgcaaggctggttcaacatatgcaaatcaataaacgtaatccagcatataacagaaccaaagacaaaaagcacattattttctcaatagattcagaaaaggccttcaacaaaattcaacagcgcttcatgctaaaaactctcaataaattgggtactgatggggcgtatctcaaaataataagagctatttatgacaaacccacagccaatataatactgaatgggcaaaaactggaagcattcctggcacaagacagggatgccctctctcactrctcctattcaacatagtgttggaagttctggccagggcaatcaggcaggagaaagaaataaagggtattcaccaatggaaca

SEQ ID NO: 905177 - DNA, 610 bp, Homo sapiens
aaagcactgaatagcaatgcaaaagcataaggaagcataaaccttattgagaaargtaaatatataaatacagaataatgtaaaactgtgaaggtgatgcatgaattactttgaaccttaatatgaaagtaaaagataaaaatttgttaataaacacacaatataaaaagaagcaaaccctgactacaggtactcaaagtgggtggttatgggagaagtcaaagtaaagttttcgtttgcagttgaagttaccaacttaaaataggtggttataactacaagatattttacacaagctgggagctaaccacaaaggaaatatcctacaatagatataaaagataaagagaaatgagtcaaagcaaatcactacaggaaatcatcaaataacaatggaagacagaaagagagggaaaagaataaaacaaccacaacacaggcagaataagttctcacctttcagtaattaacttgaatgtaaatgcattaaattctccaaccaaaaacagagtggctgaacaattatctaaaaaagatccatcaatatgctgtctaaaatagactcacttcaaattggctagaagtaaagggacggaaaaatatatttcat

SEQ ID NO: 905178 - DNA, 610 bp, Homo sapiens
aaagcactgaatagcaatgcaaaagcataaggaagcataaaccttattgagaaaggtaaatatataaatacagaataatgtaaaactgtgaaggtgatgcatgaattactttgaaccttaatatgaaagtaaaagataaaaatttgttaataaacacacaatataaaaagaagcaaaccctgactacaggtactcaaagtgggtggttatgggagaagtcaaagtaaagttttcgtttgcagttgaagttaccaacttaaaataggtggttataactacaagatattttacacaagctgggagctaaccacaaaggaaatatcctacaatagatataaaagataaagagaaatgagtcaaagcaaatcactacaggaaatcatcaaataacaatggaagacagaaagagagggaaaagaataaaacaaccacaacacaggcagaataagttctcacctttcagtaattaacttgaatgtaaatgcattaaattctcmaaccaaaaacagagtggctgaacaattatctaaaaaagatccatcaatatgctgtctaaaatagactcacttcaaattggctagaagtaaagggacggaaaaatatatttcat

SEQ ID NO: 905179 - DNA, 512 bp, Homo sapiens
tagaacaccttggcactcgttgccaattaaacttagaaatcctatcatttatcactttgtaatgtgtcttcaataggtttggatagtctttggcttatcagtagagagtatttctccctcattagataggacgttctcaaataatgaattgtgtcttggcaaaattacaatctctcttggaaattcgaagttttgtttcttctaaggttgagcctgagaaattggaatcatttttagagacttcactgtcctatgagcaaagtaagagctcatctacccgttacatcagagttgaactaaaagggatatttagctgtgttaagttttcattggggagctgagaaaaataggaaggaattttggtgaagcccaggccatgatgttccaggtatattattttccccaggaggaagccaaagggataataactgttctgatctagaggtacatggaaaaaacagaggaaaggatgactacaragcaacaagatgcttttagctggagttgctacc

SEQ ID NO: 905180 - DNA, 611 bp, Homo sapiens
gtaattatatttcaaaaggttgactactttactaaaacactcattttaaaggtrtcttaaatttactcctttgtactgaggttctcaaggctgtttgtctatcagaatccccactagaacatttataaaatgtctgccatcagactacacccctgatgattctgattcagcaggttacaggtgagactcaggaattcttttttttttttttttttttttgtcagatggagtctcgcactgtcgcccaggctggagtgcaatggtgggatctcggctcactgcaaactctgcctcccaggttcacacgattcttctgcctcagcctccctagtagctgggattacaggcgcccgccaccacgcccagctaatgtttcctatttttagtagagacggggtctccctgtgttggccaggctggtctcgaactcctgacctcgtgatccgccggccttggcctcccatagtgctaggattatagacatgagccaccgcacccagcctcaggaattcttaaaaaaaaaaaaaaaactaaaaaactccccaactaaactgttacatattaaaagagatgcaagagatttttcaacaatgtgaagactttgtttttat

SEQ ID NO: 905181 - DNA, 621 bp, Homo sapiens
ataatctctatcaatctatcttcaagctcaattctttcttctgtyaatttacgtcaccaaattcaatgatacaatgttataaatattaagcaccactagttaatttttcatttcagttattgtactctcagctccagcattttatttccatttggttctttctataaatcatttttatctctttatttttattctctattttataccacattgtcttcatagcttcttctatttatcattttttaaatttctttgaacatattcataatgattattttgaaatctttgtgtgttaaaatctgatatctggttactctcgcaggtagttttaaatgcctgctttttttggtgtttgagtcatacttttctgtctctttttatgtctcaaatttttttgttgaaaactgggcattttaaataaattataacaacactaggtactggccatccctcttcagaacttattactgctatttgcttattaatttgtttaatgactgtctagattatttttgtgaagtatcctggaacataaactgttccacagataaagatattcaaatctgggctcctttgagaggtagttccggaggccagtggttaagattttttgtgactcag

SEQ ID NO: 905182 - DNA, 623 bp, Homo sapiens
caagttacctgtatagtctgccttctctctatttttccaaatattcctatatttatgttatatatattcttatatttatgttatatataatgcccagggggtttgttgtacttaatggaaggaacagaaaaaactacctctgctctaccttcccagaagtgcaagtcctgccatttgcattttaaaaataatttttacatatacaatacatttatatacatccatataaagtcataacaaatttccttttgttataactttatatttgtatagatataatttatatagatataatatatactatactaataatatataaatataaatatatgaaaaactatattttcataggttatcactgaaagagtacacatgaaacttatagcagaaattattgctgaagaaatgttacaaaatactgtgtactatttaaaacattattcacactttaaatttagcctttcagttagaacctccttcttccagtaatccaccaaagtgatgaacacaaaggtaaagaggaggagaagcacccaatatatgttctctaggctttttagaaaatatggaggtgctcctttggccatatacatrtgaacctgtaagaatggtgatactgcaga

SEQ ID NO: 905183 - DNA, 587 bp, Homo sapiens
taatttttaatgtttgtatttctctttagtaattagtttcatcaaatwttcttaggttcatttggttgtttttttaaaactatcttcttgaattaagtatgtaattaatttgcgttcattttttgtttttagaaatgaaaatatttaaaacaaatttccactgcagtgctgtagttgtatcccatgttttcataacattctctataacttctgttttgtcctttctttgaagttatgtaagtgtaacactttaaaaattatctcatttttagacactccaaaattctgataaatcacagtatagacactattctatgactataacacacaaagctagaatatagcaaaagaaaactaaaaacaaagttagagacacttagaatctctctttctttctctctctatttatctctctcagatatacacacacatacacacataaatacttatgttaactccaaacaaggacttaaaagtatcaaactaatgaaatgttacaaatatttcttatgaatcaattaatactttaaaaatcctttaaaaagcaaagcccacatattttaacacaaaagagaaaaaggaactat

SEQ ID NO: 905184 - DNA, 606 bp, Homo sapiens
ttgagagacaatagtggtctgtgttggacacrgagaaactgataagattcacgatcttcaggaggtagaacccattaagtgtggggagatgaatgaagagttaagcctgactcccagacttctggcttcaatgctaacagattagtggtaccatctattgagattaaaatttaccaagatggcaaaggaagtctgtttctggatatattaaatttggggcagctaccaaattttcgagaaagagccagtggttagttaaataaagatctgtatcttagggaagagatgtaagctggagaaaaagatgccacacaggtgaccatcaaagtcaaagatgctgatgagattacataaggaaaagcacatgaaattggagattagaagaatgagagcaacaaccttgaagaacaccaacatttagaagcatttaaaaagacagagcaagaagaaatgtaggatgtggtatcagagaagccaaggaagaaataatttcaaaaagtgaagtgttaagttttaactgccaaaaaacaataaactggccggttgtggtggctcacaccaataatcccagcatgttgggaggccaaggcaagagcactgtttgag

SEQ ID NO: 905185 - DNA, 682 bp, Homo sapiens
tgtattcatgtaaaagctagtttctccttaatttacatgtacaatttaaccttcaaactgagtgtaaagtgtcttaaaggataaaacaaatgtatacatatcagggtttgttggtcttagtcttttctacaatggcacaggagtatagagctttttaaagtattttatagcattcattacttggttgttaattataaacagggaataggaaaatgggaaccatggataaagaaattgaaagaagctcctccaattcctaaagatgtaatgtttaatgaaatcattgtgccaactctggacacaattcgatactctgcattaatggaattgctgaccacccatcaaaagccttcaatatttgtaggaccaacaggaactgggaaaagtgtttacattacggtaagtactgcagaaatctgcgtattaaactgtgcataatcttcctaagaatgtttttgaaatagcagacaaataattttttaaaaatactcaagtactttgatgtttgaactgcagagaatttttgaaaaattgccacttatttttttttgttttagccaaaaggccaagaagtgataattgcctatttattttcaaaagttgattaatgatacrttgccattttataccattaaattgttgtcccatttattttgatattttaataagaattgcttgttcc

SEQ ID NO: 905186 - DNA, 636 bp, Homo sapiens
gttggaattgccaacgcttgtggagggagtgcttttggaggatcaaaaaaaacttgcatcagcmtttgtcaaaatttatcttctgtatatatgtaaggttggcaggtaaaataagcttattaagaaccactctaaatcataacaaagtgaattactggcaattcacaaatatttagttaagaattcacagttagtaacaaccgttccaaaagctgattaataagatattgcaatgtacttaaagtatatttttcaaaaacatatatattactgttagctcactttcaacttggaagaaaggaaacatttataagacaatattgatactttccatggaaatgtgagttcagggattgcataaaagtgaattttaatggaatattagttttgacatagttcaaaaataaatattgtaatcagagtaaaaactaatatctgcaatagaaaaattagtaggaacttgctattgtgtcccctaaaattcatatgttgaagtcctaagctctagtgtgactatatttgaaatatggcctttaagaggttattaaagttaaatgaagtcataaggatggaaaactaattctatgagatcaaagtccttacaagaggagaaggaaaaaacagagtgctttctct

SEQ ID NO: 905187 - DNA, 586 bp, Homo sapiens
aaggggagggcttggaatgtaacttcattttacctatggacatgataggcccttgctttcccagcatgtcaaagacaaatgaggagggatccaagaggacttcttggaagaagaggaccacctgcatcttgacctctgcctggatgcttgctgcacgacagaatccataaggtctctgggttgcttttatagtaaagtgtgccaagagatttcttgccagaacagcagtaataaataccattcatcaagaggttgttgtgtacgagcatattgctggtacacaatttatgacccacaaaaaaaccttctgtggtagacatgatgttctgttttgtagagatgagaaacctgatgctttgtgaagctaagttactcttggtgaccaacctgtaaatggcgaaggagatcactctgttctagggctgctgaagtaaacttcatccactttctactatgccaggccacagagtttacagggtaggaggaaaaagacctggtcatttttaaagatatgccaattatatcaaagtaatgaaactaaaactgagacwaaataggcaatccagaattattaccttttgcaatt

SEQ ID NO: 905188 - DNA, 621 bp, Homo sapiens
tctgtacgtggtgccttccccgctagtattgtgttttcttcttgactgcatagttcgagtacaagacacaatgtcctgtgtgcaggtagcttttctatttaaagttcatcttacgtattacgtatgaaggatttaagactctgttatgcattgggaaacttccctttctgttccaaagttaaatggcctgctgaaggctcagcagtgacttgataaatgtttgaggagcacccccctggctcattttatctacataacagggataggcaaattaccctctctgtctccttttttaatgattgtttatcacagggggacacccttcctctactagtaaaccttccagagtcttattgttacaatttaacagtagaaacgtattttgtatctagtgtaacaatattttttattaaagcaagaaggtcattttctcatgccaccttactagaatggtgaaagtttatcaacagctgcctgatgagaaatggttactttgtagaaacagattatcctgaaggccactcttgaattcgtggcaagtctggattgtataattcagatattatgcatataggaattagaaatayatgcacagttagaagccttcttttggaatatagg

SEQ ID NO: 905189 - DNA, 608 bp, Homo sapiens
cttgtgatgcagataaaacctcacaagtagcagccttcagaaaaaaagagatggtaaatgtttctttcagacttttgaaggtgtcagactctcagttaatctttcctagatccacacaaaaaaagggcctcagagaaagcctggctgcatcggtgcaaagtctctacagatgcaaatctcccttacacgagtcatcttttcagggatacttctgtttgctggctctctaaacagcgatctcaaaatatatcaaagaagtatatttggggatgaaatattatgatatccttcagtttggtactatcagcagtttcaggcatccagtaggggtcttagagtgtaatccctacagataagggaagatgctctagcttgttttttgtttgacctctctaaatctcatgttgaaatttgatccccaatcttagaggttgatacctatgggagatatttgagttattagggcagatccctcatgtagagattaatgcctttccccagagtgggacagtgagtgwattatcactccattagttctctctagagctggccggctgttaaaaagagcctggcacctactctctgtctcttgcttcctctcttgccat

SEQ ID NO: 905190 - DNA, 586 bp, Homo sapiens
tcaaagcctatcttaaaagtgcacacctgggcgcataacagatattcacaaaatgatagttatgatgaccatgaagatgtttgtcactggtgtttctcatccttttttccttgcattcctcagactgccaccattgaggcatctctagcctccttactttctctataggcaaaatttgccatcctatcaccttgtttcctttaatccaagtgtatgcatcccattcatggctgctgtagtccctatggggtgcccgaataggtaatatatgtctaaacatgcatagtatgccatcagctgcaggccagcttttgctcagggtattacaaagaaataataattgtgaggatttcaaacccagtgccatgtcagcaggatgtgttgtaatagactagagtcttgctactgaaattgtgctctgtggacggacaccaataacatcacttctaagtgcaataaaattcagaacttcagccccatcctagaagactgaaggtgattyttatgcacataaaactttggtaagtcctcctttagattttaggcattaagagatcctggcccaaagtaggcacttggtttgtgt

SEQ ID NO: 905191 - DNA, 571 bp, Homo sapiens
tccttctcagcaaactaacacagaaacaaagccaaacaccacatgttctcactcataagtgggaactgaacawtgagaacacatggacatggacataggatcagaacatcacacactggggcctgtcaggaggtggggatctaggggagggatagcattaggagaagtacctaatgtagatgatgggttgatgggtgcagcaaacccccatagcacggtatacctatataacaaacctgcaagttctgcacatgtatcctagaacttaaagtataatttttaaaaagatattcagatggcaaataagcatataaaaagatgctccccatcatatgtcatcaggaaaaagcaaattaaaatttattatccttattatttatgtattgatttggtaagatattgctttaaaaaaagttattagactataagtgcccccaacacttatatatgttgcctcaatgttcaaagcttatcttttttttagcaagttgatttgtgtcttaactttaattctatgctaattagaaaatctaagaaaataactaaaagaaaggacaatttacccagtcca

SEQ ID NO: 905192 - DNA, 468 bp, Homo sapiens
ctttatcaccttcctctcactcaatccccattcttcacttctagatgggttttcccgcagctctaaaccttgaagccatgccttygttcatgggctgtgtaaacaatggttatagtcaattgtcattcgctgggctgtttgcatctcagaatacatttaaaaagacataattatggcctggtacggtggctcatgcctgtaatcccagcattttggaggccgaggtgggcggatcatgagatcaggagttcgagaccagcctgaccaacatggtaaaaccccgtctctactaaaaatacaaaaactggcagggcgtgcctgtaatcccagctactcaggaggctgagtcaggagaatcgcttgagcctacgaggcagatgttgcagtgagctgagatcgtgccactgcactcgagcctgggcgacagagtgagactccatctcgggggtgggggggggaaagacataa

SEQ ID NO: 905193 - DNA, 588 bp, Homo sapiens
attgagagtcatggcctctcctctaaactccagactcaagtatctagctgccaactccacatcaaccttggatgtcttgtgagcatctcaaacatagcatatgcaaacctgaactcttgatgtagttctaacacctgcttcttctccagtttctctggctcaataaatggcatctgtattgctcgaaaaacatgggaatttttctctactttctcctcttttactgcccttggctagtccatcatttcctgtagatccttcatccaaaaatcattctttgatttgtccccttatctccacctttagcaccacaataagccaccatgtttcatctgttctgtaatagtttcctaactggattccttctgcccattgtcctgccaatatttttcttgtaacagcaagagtgacctcttaaaatgttaggcaaatcagattacctcctgtttaaatctctcaatgttttacaatatgtaacaaccaaaagaagacagatatgatcctactatgtcaartggactaagagtatttttcatctataaactggaataaaaatacctacatcaaagagtggttgtatcaaatgag

SEQ ID NO: 905194 - DNA, 567 bp, Homo sapiens
caaaaaaaaaaaaaaaaaagatggagaatgtcaaatgacatagcagacatccaaaagccattcccattagccaaatctggggcagccgtggattgtaactcactgaaaacttcatgagccaatcctrataataacagagataagttttaaaaaatcaataaatgggacagaaaaggtggaacaacacaaatgtccatcaatggataacacatttttaaaatgtggtatacacacacaatggattattagccctaaaaacggaggaaattctagcacgtgctacatcatgaattaaccttgaagccacataccaagtgaaacaagccagacataaaaggacaaatattgtataattccactcgtacgaggtacctagagtagtcaaattcatagaaacagaaagtcgaatggtggttatcaggcactgggagaaggaggagtgggaagttattgtttaataggcacagagtttcagtttgggaagatgaaaaagttgtggagatggataatagtgatggttgcacaacaatgtgaatatgcttaatgccactgaaccatatacttgaa

SEQ ID NO: 905195 - DNA, 588 bp, Homo sapiens
gcaaaatactcccttaaaaayggtaaattacagctagagacacaaggagtttttgcaactttggtggggcgatctgttccctcagtttacttttgctatatgactgctttcttaaggcaccatggagctgtaggcaattctgtttaaataaagcctgggttggtaggggaacaagtgcaatactaagaacacacatcatcaaaggaaaaatagccaatgaatatttatatatattaaaattaaaataatttctataaatgatagtgaggacacacataaatgacaagatatataacaatataactgataaaagcttgatctcacacacgtgcatacaagtatacaaagttacaggccttctcctgctgagcaaatgatcattataaattaaaagctcacctataaggaaatagaaatcataagccatatgctgaaaaaaaatgtacagaaacaaaaataaaaacaattttgtttttattacattttgcaattaaaacttcaaaaataaatttcagtaacgcacaatgctgcctaagcctacagcactatgaactggctcatttcaacttcagagcaacctggtcaagt

SEQ ID NO: 905196 - DNA, 588 bp, Homo sapiens
gcaaaatactcccttaaaaatggtaaattacagctagagacacaaggagtttttgcaactttggtggggcgatctgttccctcagtttacttttgctatatgactgctttcttaaggcaccatggagctgtaggcaattctgtttaaataaagcctgggttggtaggggaacaagtgcaatactaagaacacacatcatcaaaggaaaaatagccaatgaatatttatatatattaaaattaaaataatttctataaatgatagtgaggacacacataaatgacaagatatataacaatataactgataaaagcttgatctcacacacgtgcatacaagtatacaaagttacaggccttctcctgctgagcaaatgatcattataaattaaaagctcacctataaggaaatagaaatcataagccatatgctgaaaaaaaatgtacagaaacaaaaataaaaacaattttgtttttattacattttgcaattaaaacttcaaaaataaatttcagtaacgcacaatgctgcctaagcctacagcactatgarctggctcatttcaacttcagagcaacctggtcaagt

SEQ ID NO: 905197 - DNA, 610 bp, Homo sapiens
atatttcccattaggcgaaaggcagcttaacattcataatttgattgagaaaaatggagctattttataggccagtaggctccaaattgttattctactcagatctttattgcttggcctttcttaatttaataagcaacctgtatctctcgtactgaagacaaatagattctataagtgaagatctaaaatctgaagtgttaataacagaactaaaaatatagttttgtttatttttctccatgtcagattctgttttctgtacaagcaaaccaatatgttcttgctctgagggacatacttgaaatgacagaatcatggggtctccattcatggcactgccatagtaacagattgggaccacgatgatttaacattaccaggagttactgttggaacaggtcaacacaacgtgaaacctctgctacacatcccacacacacttggccccaagacgttgcttctactttggaaaaatcacttttccaaaatgacatttaatttaaaaaatctgtcccagtaaacaactttacactgaacaatatctgcattaataagagttaaggccstgaagaacaactctttggcattcttttctttgacaaggtct

SEQ ID NO: 905198 - DNA, 610 bp, Homo sapiens
ctcccacagctggaggtggccaagggtcacaattcttgccaatgaaaaagtctctaagttgggcttctattaaagctcttcaaaaggcaagcagacttagcacatgcttttgcccttccccttcttcttgcctgaaacatgggcataatgttagaagttagagtagcaatttcacggctaggagtgacaagtgcacgctaaggatggctcagaaggaataaggaagtgacctggattctagaagtgattagaaagtttcccaagacccattgactgcctacctctggacttctcattttgggaggcaaataaaacccttatttttgggccaatattttgctgttttctgttacctgtaactgaatgcagttattaagctttatagatagatacatatttttctttcaatatagcatcttcctcatcttctgaaaatctctattttttaggggagtgggttttcccactgctttagttgtatggtccttttctttcatgttcttccttgaagatagtgattggttgaggactgaatataagatctaaacttgtctcttcaatagtatggttcaatagtatagttgytcaccccccagggcaagtgactggg

SEQ ID NO: 905199 - DNA, 611 bp, Homo sapiens
ctgttctggtgcagatatgcattargttctacttaataaagcaatcttgattgttttaggagatggacagtcacattgctgtctagcaaacaaggcatgctgaacttgacaaattattttaaaaagaaatgatacagaactctgagaacaagaaactatgacctcaatttaagagctaggaatacccatttttcaggatagactcccatccactgatgcaatttgtccctctgaggcatctgtacttcctcctcttgttctctgtatgctcaaacgaagggaatttaagattatgttggcaacactactggagctgttttgtttttttttttttaagctaaataaaaagaaaatttaagactctcatttgaacaacctgggtcctaaaaccctgctgttgaaaaataggtggtggttttgttttattttaaactgtttgcaattgtcatcttaatagaatgcattaactagacaattgcttggctttcaaagtacatttttcaagcccctgtcaactcaactttttataaaaagaatgcaacaaaaaaatagaaaagagaaatactgaatattaaatctttcttcaacccactgtctgattctcttaaggt

SEQ ID NO: 905200 - DNA, 714 bp, Homo sapiens
caaatcccaactcataaatggcttgtaaataattgattcagaaatctgttcagttcccacaacataaacaaaataaatgcacctcattttgaaagcaaaatgttttcttatgttccacaaaaggctaaacatttaagctgtgtaatggatcaccatgggaagctttattcagggatgcataaaatgaatgcatttttatcaaaatggtgtttatgagatctcatttagccggagtgtacatctgctgaggctattaaaaagtcaaaatgtctaatgggcaactggcaccacagttaagctttagtcagcattttctgttctgtgtcccataaatcacaataaatccagaaagaagtcaattgttaacaactctaaactgtactgttgcataatgggaacagagaaatgcaataactaaagagtctcacatttaggtgagtgaattaaaaaggtttagtttagataggatttagatttaacagctctttccaccaagctgaaacttatcacactatctcagacttcattctgcagtattagaaacttcatttcagcaggtttagtgatgggctcttggcagattacaaagatttgttatagccaagttgctgagcagtgagaaacagaaacaagaaaactggaaayttaatggttctctgatactattttgattaaggttgcaaatatttagctatcattcatttagaggtttgc

SEQ ID NO: 905201 - DNA, 592 bp, Homo sapiens
gctcttactgccttgatgaatttgacatgattgcttaaataattggcttgcagagtcagtgctcactggccattttgttttgtctctatgaaagtggcatacatgagttgcttctagtctgccattttgacccaacctcatccaattgttttcttaagctattacaaaaaatagaaagaagaagaaaagaaaaacaaaaatgtcagagaaagccttcagaagatgggcaaagctccctaattgtacaggtatataggtgtagttacctcttgatactcttgcgatcactcttgtgatcaaaaccactgtacgaccctgcacaaaagaaaaggtaagcaaatcttcttttattcttttagcacactatatttgagtttaattttattaaggatatattaacctatcttgactcataccaaaattgactatcattcctcaatgtcatgggggatttgttctaagacctcttgtggatgccaaaatcttcagatattcaagtgtatggtataaaaatcaagtaattgcacaagacctgtgtatatcctcctgtatatcttawatcatctttagattacttataatagctaataaa

SEQ ID NO: 905202 - DNA, 604 bp, Homo sapiens
taaaatcacaacctgatatcagacagacaggtttggaagaatgcttactgtaccagtgtatctcacctgagagamtgtttcttacattgagattgaggaggcaaagaatttagagggcaaggaaagtgtcagtggtcaatcaaagtctttagaaacctgagattaaagggaatgagtgcctgcttcacctctggacgtttgggaagcagcagtttcactgtggtcccagtgttattatcacaggaagcagtaaagcaaagtgcctcctggaaaagctgtttgaaacgctgaggacaggaggaggaggggttgtcccactgaataccctgggagcacagagtagttttagagaacaatcaaacttccccaatttttggaggaaagtataggaagtaatttaaaaggaagaaagtgcttatagcctagaggcatctcacaattatggcaagggaaacaaccaagtccatctgggccatatacccagaggctgatagtgaacagaagtatctcaatgcatgctaactggagttgtatgaatggctaataattaaacttcttgccagcataatgccataaagctatcttagaccaacagaccttaaaa

SEQ ID NO: 905203 - DNA, 694 bp, Homo sapiens
tgtgtgtgcatgcacatgtgtatgtgcatatgggtatttatggagttgcagaatcttttttggtgttaatgctaaatgtaaggctcttcagaacttcagatcaattttatgctttgagatgttcaacataaataaaattgattacttgagggctgcaaagacaaatacaatgggaaaggaaacaatgtacttttgttcagtggctctttcactttaccatatggaaacaccattttttattaagctaaactctttatacagaatattttccaaagctatattagcccttaagatgaaacctgtttgctcaaggatgtatttgccctttcaaatctatatcattcaatagctatacaaggattgccatcattttaacttatcaatctgctttttatgtttggataaatatgttgacacacttaaaggttgcagtgtaaaagagcataggtgtcttagttggatttgagtcaacatttcagcaccccaacctttactaacttcatggaagaaataataagacttaagctttctcagcctgttttattttctgtcaaattctgtgcaaataaacgggaaggtacatgttaaggttgcaaaccacaataaatgttaattcttgccctttatcctcaaatggaatggtctagttacatttatttatttrtttgtttatttatttatttattttgagaca

SEQ ID NO: 905204 - DNA, 576 bp, Homo sapiens
tatacagcttttattataaggatgcaggcaggtctcatgcatctgagctttttatttatttgttaatgttcattcatgttgtctttttttcaattggaaccaccaaaacttaagaaaaaattatgggagaaataaattttagtttaatgattgaacatctgctatgtgcaggcactgagctaggtgttatgttacaactgtgagcaggactaaatccttgccttggaggagtttataacctagtaggggaaaaagagaagtaaacagagtgccaggtgttgtggtgtgagcctgtagtccttggagctgaggtgagaggatggctttagctcaggaatttgaggccatggtgcactatgatcaggattgagaatagtcactgcactccagcctgggtaacatagcaagacactgtctctgaaaaaaaaaacacaaaaaacaaaattaaaacaggtaatcaaaatacagtgactaggttgtagcatgactagattatggagtgcaaggkatgaaatttttgagataaaagagatagatcaagaaatgcctttcatgccacataaaagagttttgttt

SEQ ID NO: 905205 - DNA, 630 bp, Homo sapiens
ttcttcagggacgtagttctacrgattatcattatctgtatcattttcatattatcgataactgtttattccccttaagttgatgacttgagtcagacttgccccaaaataaaaactttcactccttacacaatattgctctgtcttctaggccagagtgcaatggcctgacctgggctcactgtaacctctgcctcctgggttcaggcaattctcatgcaccaccacacccagctattttttttttatttttaatagagatgggtttttgccatgttggccaggctggtctttaattcctggcctcgtgtgatctgaactccttggcctccaaaagtgctggcattcaaggcatgagccactgcgctgacctggttttatttttgttaggaaacctagcaaagtgacaatggtttttgttactgggttggtttgttagagctaccccctgctgcccacctcttaatttccctccttcctctagttcctctgtatctgtgaatttctcaaatcctgctggtactttcatataaataaatgtcttttttaagattgctcaaatgattacttaggagtaaatgttgagcacactatgctcctgatagagtgatatttcttgacccttgaatt

SEQ ID NO: 905206 - DNA, 665 bp, Homo sapiens
tagttctagtcttttgtaagccctccaatatgcacacctaaagtgtttcctctgccatttttccatttcatcactggggtcccatttaaggtcctccactggtactgctattcttcccattgggtaaggctcatctgcttccttggcactatatgagatacaaagctcatcctaataattctactgctttttagcagtagtcagggtttgattcaaaagtaatatccttccaggagagtttaaatacttgggttaaattctggaaagcctgtatattcctgtcagagtcatctgaaaacttgccgagatcacccttaatttgccttttaccttaagtcctgtagagaaaaggggacctgggaccgtaatgggaaaatattcaccaggtatttcttgcaggggaaggaatgagactgggacttgcctaaaatgaggatttctaggatgaggcaaacttgagagagaacctgaatagggatgatggagtgggccaggaggagcagggttggagggagatgactcctctgctgaaggcacctctgagatttgcttccctagtcccttccgattttcctttgcagmttataacctagccaaggctttgtgcacaggaatataaggcatattttttgcccagagtctgagggtcaaagagtcccagtgat

SEQ ID NO: 905207 - DNA, 611 bp, Homo sapiens
ctgaaagaaaaggggaaaggcatcccttagttcccttctctcttccagtgaaatcctggggtatgtgagsgagagaaaaaaaggcatccctttctttcttcccttctccgagtcctggaagccactaggtgcaccacccatggacacaagtgcaagtgccaaccatgaagtaggaaggcctagtcattagggatggtcacacttacctacgctgtgccttagccttccactgttggtaacctttgggttccctagacctcatctatgccacagatgcaagcaaattcttcacccatgaagcaggaaggcctagttggcagaaacaatcatactcacctgcgtggtaccgtagccttctgctgtctactgtctctgaatccctcagatcaagttttggttttagggctccatacctaagcttggaaaatacattggagtaatgtaaagtgaagctgtggaaccagatgcattaaggcacctttttagtactaccttgttctatgattcaagtcaatggaaaactatgaaaactcgatttaggcaggattgctaagggctcaaatacttcagaagtaaaggcttggtcatttcctaaagctaagtgccatgtt

SEQ ID NO: 905208 - DNA, 611 bp, Homo sapiens
ctgaaagaaaaggggaaaggcatcccttagttcccttctctcttccagtgaaatcctggggtatgtgagggagagaaaaaaaggcatccctttctttcttcccttytccgagtcctggaagccactaggtgcaccacccatggacacaagtgcaagtgccaaccatgaagtaggaaggcctagtcattagggatggtcacacttacctacgctgtgccttagccttccactgttggtaacctttgggttccctagacctcatctatgccacagatgcaagcaaattcttcacccatgaagcaggaaggcctagttggcagaaacaatcatactcacctgcgtggtaccgtagccttctgctgtctactgtctctgaatccctcagatcaagttttggttttagggctccatacctaagcttggaaaatacattggagtaatgtaaagtgaagctgtggaaccagatgcattaaggcacctttttagtactaccttgttctatgattcaagtcaatggaaaactatgaaaactcgatttaggcaggattgctaagggctcaaatacttcagaagtaaaggcttggtcatttcctaaagctaagtgccatgtt

SEQ ID NO: 905209 - DNA, 634 bp, Homo sapiens
tctccagtgtctattgtttccatctttatgtccatgtgtatttattgtttccctctcacttataagtgaaaacatgtgttatttgrttttctgtttctgtattatttcacttaagaaaatgtcctccagctgcatccatgtttctggaaaggacataatttcattctttttaatggctgtttagcattccttcatgtgtatgtaccgaattttcattatccatttttccattgatgaacatgtaggttgatttcatgtctttgctattataaatagtgctgtgataaacatacaagtttctttttctttggggacatacctaatagtgggattgctggatcaaatggtagctctatttttagttctttgagacatttccacactgttttccatagaggttgtactagtatgcatacccactaacagtgaataagcatccccattttcctgcatccacaaaaacatcttttttttttttacttttaaataatagccactttgagtggtatgagatggtatctaattgtggttttgatttgcatttctctgatgattagtgatgttgagcattttttttcttatatttcttgactgtgtatgctttcttttgagaagtgtcattttatgtcctttt

SEQ ID NO: 905210 - DNA, 634 bp, Homo sapiens
tctccagtgtctattgtttccatctttatgtccatgtgtatttattgtttccctctcacttataagtgaaaacatgtgttatttgattttctgtttctgtattatttcacttaagaaaatgtcctccagctgcatccatgtttctggaaaggacataatttcattctttttaatggctgtttagcattccttcatgtgtatgtaccgaattttcattatccatttttccattgatgaacatgtaggttgatttcatgtctttgctattataaatagtgctgtgataaacatacaagtttctttttctttggggacatacctaatagtgggattgctggatcaaatggtagctctatttttagttctttgagacatttccacactgttttccatagaggttgtactagtatgcatacccactaacagtgaataagcatccccattttcctgcatccacaaaaacatcttttttttttttacttttaaataatagccactttgagtggtatgagatggtatctawttgtggttttgatttgcatttctctgatgattagtgatgttgagcattttttttcttatatttcttgactgtgtatgctttcttttgagaagtgtcattttatgtcctttt

SEQ ID NO: 905211 - DNA, 585 bp, Homo sapiens
attgaccatttgtgtcatcttttttggagaaatatttatcaaggtcctttgcccaaattttaattgagttgtccttttgttatttagttgtacgtattctttacatattaaaatataaatcctttgtcaaatctgtgaccaaaaatattttgtgctattttgtaggctttttttaactttgtagtgtcctttgaagcacagaaatttttaattttgataaaatgcaatttatctaatttttccttttgtttcttgtgtttttcttgtcatacctaagaatctattgccaaatccaaggtcacaaagaatcacccctatgcttctactaaaagtttagttttagaacttacatttaggttttaagtctatttgttgaaaggattattttttccacattaatagtgttagcaccatttgggaaatagttttggcttgctaatggcccttagtggaaactgaatacttaaccatgaacctataagttttyatggaatctaagctatccatcataaactgtaaataatatatgcaggccctgaaggcataattaagttacataaaacatggtccaaatgtccatagtcc

SEQ ID NO: 905212 - DNA, 585 bp, Homo sapiens
attgaccatttgtgtcatcttttttggagaaatatttatcaaggtcctttgcccaaattttaattgagttgtccttttgttatttagttgtacgtattctttacatattaaaatataaatcctttgtcaaatctgtgaccaaaaatattttgtgctattttgtaggctttttttaactttgtagtgtcctttgaagcacagaaatttttaattttgataaaatgcaatttatctaatttttccttttgtttcttgtgtttttcttgtcatacctaagaatctattgccaaatccaaggtcacaaagaatcacccctatgcttctactaaaagtttagttttagaacttacatttaggttttaagtctatttgttgaaaggattattttttccacattaatagtgttagcaccatttgggaaatagttttggcttgctaatggcccttagtggaaactgaatacttaaccatgaacctataagttttcatggaatctaagctwtccatcataaactgtaaataatatatgcaggccctgaaggcataattaagttacataaaacatggtccaaatgtccatagtcc

SEQ ID NO: 905213 - DNA, 586 bp, Homo sapiens
attcttaacattattaggcattctggaaatgcattttaaaatgaaaatgggtttttttttttttaaatctgagtatgctgagtaactggaacactcatatattactggtaggaatgaggaagtgtgcatctaatatggaaaacattttggtcatttttttaaaaataaagtgcagcaaatactcgtcatttctagaaactacactcctaggtttttacccaagtgaaataaaaaatatattcatatataaacctatatgtcaatgtttatagtatcctttccttgtaatcaaccaaaactgaatacaagtaaaatgttcttcaactgtatacacaaataaacatttgtatatctacataattgaatacaatttggcaaaaaaaaaaatagtgatacaaacaataaaatgcctgaatttcaaatgcacgtggcagtagtcagactccaaaggctgttgtaatagttaactttaggcatcaacttaactgggctaagcgatgcccyaagagctggaaaaacataatttctgagtatgtctgtgagagtgtttctggaagatgctggcatttgaatcaatagactgagt

SEQ ID NO: 905214 - DNA, 586 bp, Homo sapiens
attcttaacattattaggcattctggaaatgcattttaaaatgaaaatgggtttttttttttttaaatctgagtatgctgagtaactggaacactcatatattactggtaggaatgaggaagtgtgcatctaatatggaaaacattttggtcatttttttaaaaataaagtgcagcaaatactcgtcatttctagaaactacactcctaggtttttacccaagtgaaataaaaaatatattcatatataaacctatatgtcaatgtttatagtatcctttccttgtaatcaaccaaaactgaatacaagtaaaatgttcttcaactgtatacacaaataaacatttgtatatctacataattgaatacaatttggcaaaaaaaaaaatagtgatacaaacaataaaatgcctgaatttcaaatgcacgtggcagtagtcagactccaaaggctgttgtaatagttaactttaggcatcaacttaactgggctaagcgatgccccragagctggaaaaacataatttctgagtatgtctgtgagagtgtttctggaagatgctggcatttgaatcaatagactgagt

SEQ ID NO: 905215 - DNA, 525 bp, Homo sapiens
tcctggacatttccagatcctacttcctggtatttctagacacaccctgggccagaagggaacctactttcttgaagggaaagacccagttctgggaaggattatcatctgttaaccaaagagcacttgggccctgaataatcagaggaaattcccaagtactatgtcaagggctttgggtgaaactctaacacttgctcacttcaggtgagactcagcacattcctagctgggatggctatgggatgagactctgtaaacttgagaaaagcagagaaaaaagtcttgcacctaacatgccaacatggccacagtggggtatagcaccaagcagacacctggggtcccaaatttcaggcctttactcttagacttcatttctggagttgtctggggccagakggcagcccactacgctgaaggataagtcacaggacaggtttttggctctagtctctgactcctgaacagcacctaaggacccacctggcactgaggagaagtcacctccctgaagggaaggac

SEQ ID NO: 905216 - DNA, 567 bp, Homo sapiens
ttcggagtaactactttgtgatgtgtgcattcaactcatagagctgaacctatcttttgatagagcagttttgaaaatctctttttgtagaatcagcaagtgcatatttggaaacctttgcaggctatkgtggaaaactaaatatcttcttataaaaacttcacagaagcattctgagaaacttttttgtgatgtatgcattcatctcatggagttgaacctctctttcaattgagaagtttggaaacactctttttgtggaatctgcaaatggatatatggagggcttgaggcctattgtggaaaaggaaatatcttcccatgaaaactacacagaggcattctgagaaacttccttgtgaggtgtacattcaactcaccgatttgaacctttctttggatttagcagtttggaaacactctttttgtagaatctgcaagtagttattttgatcgatttggagcctatgtgggaaaggaaatatcttcacataaaaactacacagaaatattctgagaaatttctttgtgatgtgtgcattcacctcacagagttgagcctatcct

SEQ ID NO: 905217 - DNA, 590 bp, Homo sapiens
ctaaaccaggaagaagatgaatctctgaatagaccaataacaggagctgaaattgtggcaataatcaatagcttaacaacgaaaaagagtccaagaccagakggattcacagccgaattctaccagaggtacaaggaggaactggtaccattccttctgattttattctaatcaataaaaaaagagggaatccttcctaactcattttatgaggccagcatcatcctgataccaaagccgggcagagacacaaccaaaaaagagaattttagaccaatatccttgatgaaccctgatgcaaaaatcctcaataaaatgctggcaaaccgaatccagcagcacatcaaaaagcttatccaccatgatcaagtgggcttcatccctgggatgcaaggctggttcaatatacccaaatcaataaatgtaatacagcatataaacagaaccaaagacaaaaaccacatgattatctcaatagatgcagaaaaggccttttacaaaattcaacaatgcttcatgctaaaaactctcaataaattaggtattgatgagacgtatctcaaaataataagagctatctatgacaaacc

SEQ ID NO: 905218 - DNA, 587 bp, Homo sapiens
tgtgggtgggaagaacttttggacactgacattctctgtaggatcatctggcatgacagttcaattgagggaatcctactttcagtacttctaggtcttcacttcttaagctatgcagattcaccagaggaaratttctctgttttctgcctggagggtttaacagaggtgacaaaattctgtgaactgaataggagaagtgggctggggtctgactatttgatatgtagaaaactccttaacttttgtgataattttatgtgtaaacttgactgggccacacagtagacatatatttagttatatatcattttgggtgtgtctgtgagaatgtatctggatgtgggtaccatttgaatcaggagactcagtaaggcagattgcactcccagtgtgggtaagcctcacctaatttgttgaaggcctgaatagaagaaaaatcctgagtgaggaaaatttgttctctctctgtctttgagttgggacattggtcttctcctgtattcagactcacaatggaaccataccatcagctctcttgggtccacagcttgtgcactcactctgcagatcttgggactcctcca

SEQ ID NO: 905219 - DNA, 582 bp, Homo sapiens
ccctatcacttcctgttacacaaattaaacgcagatttggtcttttcacatagtcccatatgttttggaggctttgttmatttctttttactcttttttctctaatcttgtcttctcacttcatttcattaatttgatcttcagtcagtgatatcctttcttccagatgactagggtacatctgttccttaggccctcctgccagacagctcttcccagggcccctgcctgcaaacaggaaggagggtgtgcatagcagcagcctccactgtccagcctgggtgctttactaacagatgcacttaagtactttgctgggggcctggatcattttggacctccaaatgtaaccagtaccttatcccaaggggccagaaaaaaataactatgagctggttcctgtgcctcagggttgcagtgcacagctccagagtactgagctaagatctgtgcctgacacttgagcaggaaaggagccctcactctcagaatactgacagggttgagaaacatgggcttatgggccaacaagggagcagggaagccatccctttgtagggctagtccagaagaagtgtggcc

SEQ ID NO: 905220 - DNA, 594 bp, Homo sapiens
actaagatttttctagttgtgttgtagagaatgaattaggagtgctcaagrctggggaaatggtattcagttaagaagacattttaatatattctgagtgagagatgatggaggtctgatctagaaacattgagaggaagtggagtgaagggggaagatactagtgatatgatggaagtaaaattaatagaattttgtgcttcaaagcatgtaaggagtgattgaaaataaaatgtactctccatgaattataaaatatatgtaatgtttctcttatgcaaatgttcaaaatagtagtcattattttaattccatttataccattatattttgcccttcattatagggatagaatttcctgtgattatataaaagtgtcttcctctagtctgaaattgctcttagtatatttttaagacaaatttttgctgaatttatagtgagctaaattcacataataatctatgttaatcgtctttatccaggttttactaatctgtcaatggcttttccttctagctcatagtcctagcttgttcctgcctttctgtctctaattacttttagcttatttcccaggtggtgataaaagga

SEQ ID NO: 905221 - DNA, 628 bp, Homo sapiens
ttaagcaggggcaggccttgatctcatttacctgttgtcaccactaatgtcctgggaccaaggtgcctaattgccttccaacacccctttctcccttctgtctcactatagtcctgagcaaggggctcagcttaaagaaaacaaaaagaaaatagaacaaaaaaaaccccctacattttccagcctctcttgcagctaggtgtggtcagtgcactgaattctggccaacgagacgtaagcaaatgtgtgtgggacttctgggcagactccttgagaaggaggagctagaccctctttgctcctccatttttccccttccagcctgacatcatgactggaagcccagcagtctttctgggccatgaggagaccttaggatagaggccacatgctaggaaggggcaacagataaacagaaggagcctgggtctctgatgcacacagtggtccatgagccctagacggccaacctcccaggcttgtgtgtgagaagaggtatgctctggaggggaagctgccactttcagctcaccctgactactgagtcrtctccaggggcggctgagttcttacatcagacccttggaatcattggtagtttgggggtgttggcttcacctgccagttc

SEQ ID NO: 905222 - DNA, 237 bp, Homo sapiens
agtgtgaaagagaagaggcccttgcgggaggggaggacccccgggaaagcrcacccacctccttgctgtgagaggggactccggagtcttctctttgctgtttcatgggaggagagtcacaatgagtgaaatgacaagtgttttctatgtttaaatttttatattccaccccttacttggcaaccggaacccccaggctacgttttttacacatatagaattccaagtccagagttg

SEQ ID NO: 905223 - DNA, 642 bp, Homo sapiens
actgcactaaaacagcttctaaggccacatcccatctcagtagggctactgtaattaattatggatrtttgccaaaggatgaaggaatgccagatggaaaccctgttatttgcgaacctacactaactcatgatgatactgtgctactttatatgacctggctcacttatattatgagctcttttaagatttgcggctcattaagtatttgaatttttaatcagatagcaacaagaaaatatggggaaaatttcaacgtagacactcccatttcttgaagactttgagagagtaaatatttttggttgattaaatgacatggtcatctttttgatacttaatggcattaactaaatgtcttaagtaaagttcttggtattcagtgatgaaaagcatatttactttagagtttaattttaattacggaaacaagctaataaacaaaattaatattatatcatagttatttgtaagagctttgtgcatttgctttgggaacatcaaaaaggtctagttcagaaaatcaggtcagagaaatcttcccgggggaatggtgtttaagctgattgctaaaggataaattggatttggcaaatacagggtgctgatgagggagagtttttgcaagaacagagaacactt

SEQ ID NO: 905224 - DNA, 561 bp, Homo sapiens
cttcattttacagctaagaaaacaccttcttggcaggtattattttcttaattaagattgtaaaatcaatgttaaaagtaattttttcaagtctacaaatgtagtaaatgacaaaacagattggaacctagatgttttataatctgcactttgcttttctgatgacaaacagaatgcatgtgtatgtgtatttatgtggggtctgccttcagttaagtattgtaatgaaaacaccttcgattagtaaaaaaaaaaaaagaaaatcattatctgagtgcctatctatgtgctgaaattgagttcatttctctaagagtatacacatagtatgaaagagagaataagccacaaaccatttggtataaaatggtaagttttaaaaataaattattaaagaataagattgccttgaacaacgtgctggttattgggtatgtatataaactcagcacagagattagggagaaygagcttaaagcagcccattagagcttaggttgggtcttgaaagatggaaaagaacaaggagaacatcagaaagagggagagagagaatagtgt

SEQ ID NO: 905225 - DNA, 618 bp, Homo sapiens
gtttatcaaatcctcactatgtttcagtcatggagttagatgaagagaataaaaagataaataatacacagtcctttccctcagtgagttccaatctgatctaatgaaggaggcagacacatggcagataatgtttgtttgtttgtttgtttgttttttgttttttgagatagagtctcgtactgtcacctgggctggagtgcagtggcgcgatctcggctcactgcaacctccacttcccaggttcaagcaattctccttcctcagcctcccgagtagctgggattacaggcgcctgccaccacacccagctatttttttttttttcgtatttttagtagagatgaggtttcgctatgttggccaggctggtctcgaacacctgacctcgtgatccacccgccttggcttcccaaattgctgggattataggcatgtgccactgtgcctggctggcagataatgttttaagtataggtacagtgctaaggaaaatgcaaaagagcacagggagtttaggtgaccccaaaactgaygcttaaaagaatgatgagggagaatccaccaggagggggaaggcagaggggaaagacaatcattttaggctgaggggacagc

SEQ ID NO: 905226 - DNA, 601 bp, Homo sapiens
cttatgctggaaacccttgaatcttcagcccaagaaagcctcagattttcacttcctcctgcccttgtagtctactaactgtgtctgtccctatccaggatttccccttcttctgtgtctgcctgtggttcaggaaaacctaactctctcttcttcatcaccaggggagttttgaagaaaaacatcctgtctccaccatttccataattccctgccttgacttgaacataggaaagaaaccagtaacatttctgaaaccacaatttgcttctctcttttttctccttggatcctgaagccttgtagacactggtgcccgagaaccagggaaaggacaggtcaggtttcacctctgaggtgggccactgcagtgaaggaacatatattagggtgcacttgttcatggcttcacatgaaagcccgcgatggaaggggtgttggggatatgagtgctggcttgtacagagcctggactcagagatgcagtgggtgtatrtgagggactctagaaaaagctgctggggcagaagagctgaaagtcccattctgctagagaggtaggaccaagatgcaaatggatttaatgtccttattgacgtct

SEQ ID NO: 905227 - DNA, 601 bp, Homo sapiens
cttatgctggaaacccttgaatcttcagcccaagaaagcctcagattttcacttcctcctgcccttgtagtctactaactgtgtctgtccctatccaggatttccccttcttctgtgtctgcctgtggttcaggaaaacctaactctctcttcttcatcaccaggggagttttgaagaaaaacatcctgtctccaccatttccataattccctgccttgacttgaacataggaaagaaaccagtaacatttctgaaaccacaatttgcttctctcttttttctccttggatcctgaagccttgtagacactggtgcccgagaaccagggaaaggacaggtcaggtttcacctctgaggtgggccactgcagtgaaggaacatatattagggtgcacttgttcatggcttcacatgaaagcccgcgatggaaggggtgttggggatatgagtgctggcttgtacagagcctggactcagagatgcagtgggtgtatatgagggactctagaaaaagctgctggggcagaagagctgaaagtcccattctgctrgagaggtaggaccaagatgcaaatggatttaatgtccttattgacgtct

SEQ ID NO: 905228 - DNA, 661 bp, Homo sapiens
ttccatttgatggagtgattcatttacttagaatattttaatacctttctagtgctgtaggataaaggacaataccacactccctttactttctgctccagttataatagattactttcactttgttaaatatgccatgatctcttttctccctgggccttttgaacacatgatcttctctgcccttctactagtacgcccctgcaaacaccctcatctctactgcccccagctgcccttcaccttactatcctctatgacctgaataacttcctacttatacttcttaaatgcttcgaggaggcttttttggctccccaatatgttaggtgtatttgatacaaattcctaaacaactccgtatttctcttttcaaaacacttatcatgcttgaaatgtataattaaagtccacctttcaaacaagattacaaattccctgtccacagggaatttgttttgaatttctgactcgacttaaagacattgcctggtatatagcaggtgcttaataaatattggctgaatgaacgaaataaagcattccattccatgtgcatattataaacatatttgatrtttttgcccttcaaccaagatcatagttctctgagggagggaccatgttttatacttgagtgtccttagcagtgcctacaaaa

SEQ ID NO: 905229 - DNA, 497 bp, Homo sapiens
gttctgaattgcagacactgcatagtgactgctctgttcatttgttgtttccaagtaattttagtatgccattgttattttccaaatatttctatagtgccacttataygtagaatttagacaactttcttttccaaagaagaatgccgaccttattattggcataaaaatctcagcaaaccagaaaaaagaaatgggcacaacttctgcaagagttagcaacagaactactctctctgcctcttaggttatatggggtgataagaaaggagagccactaaaagaaaaaaaaactggaaaaaaatattgtaatatttaatcttttaaaaaaaaacttggttaaagtttctccctaagcagaaattatggatgagaatcaagactgattcctatcatttactggatatctcacattcaataaaatctttaaagattcttttagcaaaactatctcttactccttataaataccccaggaatcccccaacatttattgc

SEQ ID NO: 905230 - DNA, 625 bp, Homo sapiens
agtttatagtgttttgcagttccatttgtctgacaaaatttttcataccgtttttatttattttcttgaataaatcatctgtaatgattgtaaatgcttctcctggtaagtcagtctccaraactcctgcagtctattacatcatttgttctttcacttaattttcagtcatgttacttgtttcctgtgtgactaattacacttttttttgtttgaatgctggagattgtatataaaatattatagaaataatttaagacttaggatgattttgcagggaaattttagtgtgcttcttgaaagagactaggggctctagcagttagcgatcaggggatttaaagctgggttttggtctctgtgaggacctgtctacttctggttcacctctatgttttggtattacccttatacctgtggtcatgttcccatctcaaagtggggagggctttctaaggtctttgccctaggaattcttaggctccagtttatgttctcttggccctggctgtcaaaaatgctgctcagcttctcaacctttccattaccttttctggagccagaagatgcccacaggataaaagcaccaccaagtttacttttcacttctcaggtttatcttctg

SEQ ID NO: 905231 - DNA, 618 bp, Homo sapiens
taggagtgttgagagagggcatccttgtcttgttccggctttcaagggaaatgtttccagcttttgcccatgcagtatgatgttgattrtggatttgtcataggtggctcttattattttgaaatatgttcattcaatgcctagcttgttgaggtttttaacatgaaaggatgttgaattttatcaaaagccttttctgcatcttttgagttaaccatgtggtttttgtttttagttctctttaggtgatgaatcacattaaaggcataaatgtataacctaaaactataaaaaactcaggaggataacctaagaaataccatttcagacataagactgggcaaagattttatgaggaagatgccaaaaacaattgcaacgaaaccaaaaattgacaaaggagatctaattaaactaaagatctgcacaccaaaagaaactatcaggagagtaaacagataagctccagaatggtagaaaatataaggtctaatatctggaatctgtaaagaacttaaacatatttccaagccaaaaacaaacaacttcattaaaaagtgggcaaaggacacaaacagacacttttcaaaagaagacatacacatggccaataagcat

SEQ ID NO: 905232 - DNA, 618 bp, Homo sapiens
taggagtgttgagagagggcatccttgtcttgttccggctttcaagggaaatgtttccagcttttgcccatgcagtatgatgttgattgtggatttgtcataggtggctcttattattttgaaatatgttcattcaatgcctagcttgttgaggtttttaacatgaaaggatgttgaattttatcaaaagccttttctgcatcttttgagttaaccatgtggtttttgtttttagttctctttaggtgatgaatcacattaaaggcataaatgtataacctaaaactataaaaaactcaggaggataacctaagaaataccatttcagacataagactgggcaaagattttatgaggaagatgccaaaaacaattgcaacgaaaccaaaaattgacaaaggagatctaattaaactaaagatctgcacaccaaaagaaactatcaggagagtaaacagataagctccagaatggtagaaaatataaggtctaatatctggaatctgtaaagaacttaaacatatttccaagccaaaaacaaacaacttcattaaaaagtgggcaaaggacacaaacagacacttttcaaaagamgacatacacatggccaataagcat

SEQ ID NO: 905233 - DNA, 590 bp, Homo sapiens
tttttgttgttgttgctcttaaaaagatagtatcttcctctctccacacaggactattggggatgtttttcttttatttatcttgatgaaatctaatatatgcattggctgaataacaactgtagaaattgactgtcatttttgaggagaaatgagaaaatatgaatggagccacagaaagtatcagtaaagcaaatagctagctttcttaacccagcattatctgacactgtgattaaatgcagtattcttgtgttttgaacagtccttcttccctcttcctccacccacattctgtcctccataactaatcaggaaacatctgaaacatactgggaatagagtgactctaattagatgttttttgcctgacccaaatagtttttggcttttatatattaaatgttattacacagttctctccccacaacataaggagttatgaaataagtctccttttccttgtcctatttggaaataggtaaatggcaaaggcagggcccccagtrccgtcaacttgctgaatctgggcctggaagagaaagccctagaccagggacatgtgccaccactgcttcctcgctcatctg

SEQ ID NO: 905234 - DNA, 634 bp, Homo sapiens
aaatagaaaccaatgtcaagaagatctctcaagactacacaatcacattaaattaaacaacttgctcttgaataattcctgsctgaacattgaaattaaggaataaataaaaaacactttgaaattaatgaaaatatggacacaatttatcaaaatccctggaatgcagctaaaggggcgttaagaggaaagtttataaccctaaacaccttcatcaagaaattagaataatcccaaactagtcaaataactttgcacttaaaggaaccaggaaaaacagaacaaaccaacctgaaagctagcagaagaataaaaataattaaatttagagaacttcatgaaactgacatgcaaaaatccatttaaaagatcagtgaaaccaagaattggttattcaaaataataaataacattgatggaatgctagctggactaacaaaaaaaaaaaaagagagaagatccaagtaagtaaaatcataaatggcaaatataacattacagctgatccaaagaaattcaaaagatcctcagaaactactatgaatgactttatgcacataaattaaaaatctagaagaaatgaatgcattactggaaatgcacaaccttgtaagactccattatcaggaagaga

SEQ ID NO: 905235 - DNA, 634 bp, Homo sapiens
aaatagaaaccaatgtcaagaagatctctcaagactacacaatcacattaaattaaacaacttgctcttgaataattcctggctgaacattgaaattaaggaataaataaaaaacactttgaaattaatgaaaatatggacacaatttatcaaaatccctggaatgcagctaaaggggcgttaagaggaaagtttataaccctaaacaccttcatcaagaaattagaataatcccaaactagtcaaataactttgcacttaaaggaaccaggaaaaacagaacaaaccaacctgaaagctagcagaagaataaaaataattaaatttagagaacttcatgaaactgacatgcaaaaatccatttaaaagatcagtgaaaccaagaattggttattcaaaataataaataacattgatggaatgctagctggactaacaaaaaaaaaaaaagagagaagatccaagtaagtaaaatcataaatggcaaatataacattacarctgatccaaagaaattcaaaagatcctcagaaactactatgaatgactttatgcacataaattaaaaatctagaagaaatgaatgcattactggaaatgcacaaccttgtaagactccattatcaggaagaga

SEQ ID NO: 905236 - DNA, 558 bp, Homo sapiens
cactgatcattacagaaatgcaaaccaaaaccacaatgagataccatctcatgctagtcagaatggcaattattaaaaagtcaagaaacaayagatgctggcaaggctgtgaagaaagaggaacgcctttacacttttggtgggaatataaattaattcaaccagtgaggaagacactatggcaattcctcaaggatctagaaccagaaataccatttgactcctcaatcccattactgagtatatacccaaaggaatataaatcattctgctataaagagacatgtacatgtatgcttattgtagcactatttacaatagcaaagacatggaaccaacccaaatgcccatcaatgatagactggataaagaaaatgtggtacatatacaccatgaaatactatgcagccataaaaatgaatgagatcatgtcttttgcaggatgagactggaagccatcatcctcagcaaactcacacaggaacagaaaaccaaacactgcatgttctcactcataagtggaatttgaacaatgagaatacttggaaacagagaggg

SEQ ID NO: 905237 - DNA, 603 bp, Homo sapiens
ctgcctgtcgtagtgtgctcaagctggccataacaaaatatcacygactggggtggcttaacaacagaaatgtatttcctctcggttctggagtctggaagttcaagagcaggatgccagcatagttgatttctggtggaggctctctttttgctgtgtcctcacatggtagagagaggaatctctctggtatttctctttataggggcattaatcccgttatgatagctccagccttatgacctgatctaacccttataacttcccaagagccccatcttcagataccatcacaaagtgtgtcacagcttcaacagataacatttgagggatcacaaacattcagtctctaccactgcctaatagtttaaataaaactagttaggattaatggaaataatagtgtaacctttgaagtgccatctgattccattttagtattactacttagtcattaatggatgcagaacacacacataccacacacacaaacacacatgcacacacacacacacacatatgtctgtatattagcttacaagcattattcatagagtagacttttctataggtcatcaagaagattggaactgtccatatttt

SEQ ID NO: 905238 - DNA, 584 bp, Homo sapiens
agcaatgagccgagactcaggtagttgtctgtttttcatccacatggttcacagatgacatatccccacgttgagccctgcaacagagctcgaggcagatagtcccatccacacaggagtcacacccaggccaactgaagcgtgattctggattccacgtttctttgccctctgtaaaggtgcctgttgctcaagtttctgccccccgaaagcgtgaccatgttgactgtttgtttcgcgagctctgtggggccccagaaacttccaggaatgcgtggaagaccagcatcgtgtcggtgctctcctttccagttttcaaacaggctatattggagactccacattgtacaggaaacaggaatccattgtcaggccgtgatgcacgggatgtttcttttctctgtggtttcgctctcgttgtctacgtgaaaatgaacgagatgaacacacctgcgtgtgtgagactatcacggcaactgtgacacccaggcgttggcaatagagttggcagcctgatcctgggacaaaggtactgatggacatccagacacaccccaccacartcactagcaaaccgactccca

SEQ ID NO: 905239 - DNA, 587 bp, Homo sapiens
gaaatcccaggggcagggtgttgggctaattcaaagaggcttagggttttgaagcagtgagtggtgagaggagaagaatgatagaagaaataactggatgtgtctgcagcattttyttcccatggcattgcttcttgtaagatacacacgcacactcacactcatacttttgttctacataacatatatattgtgtagtatgaagtttatgagttataacactgtcgtcagagttatacctttatcctatatccagaagcataagacggtaacttaaaatctgactgttttatctaaaaatgtgctttcttttgggtattgtcaggactcttggtttcagttttaatttctataaatccagagatttgaacaattcccctgctagcttctgtttctctttgtgtcccagatctgtttccctccatctatagccaggacaggagtaacttgattctgagaaccctgagcctaccccaaaaggtaaaggaatcacctttccctatgtccacagattaaaatgagaaaaacatttttgggtttgcttgagtcttaagtgttcttctgacctaggcacttctccagggggc

SEQ ID NO: 905240 - DNA, 586 bp, Homo sapiens
gtaactttaactgtttagtgtattaatgcctcactgggctcayggatgctacatattctccactacttgtttactagcttgtcaaaattattcaatatatgcagtgtcacaaagcacatggtcacatctcatatgtctgcttcaagggcaggaccaacgtgacctttactttttcttttacacgggataaaatcattctttaggaacaatgtctatttgcacagctacccaatctgctattgaagcagtctcaatcttcttcaatattgcttgttaaatgtttatagttaattttatagtaaagggctagatgtctgaatattttcaaatgcattctctattggagtgggttttaactgttcttctttcactatgttttataagatcgaaaacagacacatagaaaataatgaagtggcttaaaaaattctttcttggataatgaaaaacctgtatcatatagaagaatagaagactgcttccaaacatcctctgacttggaagacagttacacatttgtctgttacgtatttctcatccagaagcaaatattaaccagtcaacatcgaatgccatttgatttcat

SEQ ID NO: 905241 - DNA, 621 bp, Homo sapiens
tgatttcatcccctttggcttggraaacctatgactacccacactcaggggccatcggcatggaaagtattagttcctgtgcagcccaggagctctataggaagcggtggaatcccaaaggtgggttgaaaggttcaaatcatagccaagaaaaataacttcagtcactgtcaacggtcaatatcatttaaatctctagaaatcttatgaaaaaaagataaaaattaaaaataatggctttctttagggtccttcccacagcaatgattcagaatactacatttttagacaggggaggagaaaatcataatgcccggtagaggggagatgtaattttattatctggcaagatagcggcttcatcattaaaaaattcaaccaactagaatacagcgtcctttgacctagcagataaaaggtcagacagcaattttgaataataaatgagacctgttgacctgatgacccaaatctggcagggtgagtgtttcctctttcacagatgcagacacacacaccaagacagctcagctaatgagctgcctcaacccaggttgtgggtgctgcagtgttttcgtgttatgtagcacggggagaacaaatttctgaagctgttgtgtc

SEQ ID NO: 905242 - DNA, 615 bp, Homo sapiens
gtgatggctaatactgtgtcaacttgattggatggagggatacaaagtattaatcgtgggtgtgtctgtgtgggtgttgccaaaagatattaacattggagtcagtgggctggggaggcagatctacccttaatctgctgggcaaatctaatcagcttccagcgaatataaagcaggcagaaaaaggagagatgggcctagactcccagcctatatctttctcccatgctggatgatccctgccctcgaacatctataatataaaggagagtttattaagtattatatatattacatatttcatatatatataggtgtgtgtgtacatatatatgtatatatatatatatacaccctattagctctgtccccctaagataaccctgagtaatacacctcataaaaggaatttggaagcattctcttcagtattggggaagtgtttgaggattggtgttaattctttaaatgtttggtagaattcatcaataaattcatcaggttctagacttttctttgatggcagctttttaatttcagatgcaatcttcttacccattactggctcttcaaatttttcatttyttcatgattttctcttcttaggttttacgt

SEQ ID NO: 905243 - DNA, 656 bp, Homo sapiens
aggtcatacaggggtaggtaggtcattaatccagtatgattggtattcttataagagagaaatttggacataggtacataaggaagatggcactgtgtattagttcatttttacactgctataaagaactgactgagacagagtaatttataaaggaaagaggtttaattgactcacagttttgcatggctcgggaggtctcacaaaacttatagtcatgacagaaggcaaaggagaagcaagtaccttcttcacaaggaggcaggagagagagcaaaaggggaacagctacagacttttaaaccaccatatctcatgagaactcactcactaccatgaaacagcatgggggagccactcccatgatccaattacctcccaccaggtccctccctcaacacgtggggattacaattcgagatgagatttgggtggggacacagagccaaaccatattattccatccctggcccctcccaaacttcatctcctgctcacatttcaaaacacaatcatgccctcccagcagtccyccaaagtcttaactcattccagcattaattcaaaagtctaagttcaaagtctcacctgagacaaggaaatttccttccactgagcctgtaaaatcaaaaacaagttagttacttccaaggtac

SEQ ID NO: 905244 - DNA, 603 bp, Homo sapiens
tgacacacagacaatgctgcytacgcactgactttccttcttttggcaaataaaactctagagctgctataagcattctgacttaccaagaatggtgaacatatcttttctaacgatactgtaaatgctcccgtgaagataaactggaaacaagatcacatttattaatacccagtcattatgtttatgtataaacttaaaaagtaagagaattccggagcgttttaacataaagaatatgggaccattgagaaaatcattcaggatataattcaagggttttttttatttgtggagatgggagaaagccatgaaatctctggctactaatttaatatatgtattggaaatagaatctaagggcattctgaagtgactttatggaaaaaggagtttcagtgtttccttagtttttgtcaatcataatttattaagccaatatgtgaattagaagaaaatgcacccaattaatgaatttactactgggaaatgttatatcttggtgacttcatatgaaaatacttttaatataatgcttaaatattttattaatagaaaatatcattcataaaatattgatgcttcagtttacatatttaaata

SEQ ID NO: 905245 - DNA, 566 bp, Homo sapiens
gcatttgtattcatgaagtctgcaccaaacatcaggtagttactaaatatcttccccttatgtaccctgcactgtgcccagcactctggtagttaagaaatagaagccataactttccctcagagtttttgcaraaagatcccttattcaattatggggtgatgcttgtcacatgttgcacagatatagctgcacctaacccctcattaacttaatggattcctatagtcagttctccagggatgtggaattgaagctgctgagattcacagaaagtgtgggtgtatttataaatgcatctcccattactcccaggttctcaaaaggagagagctctgttcccatagcaggtaaggagaaagtgaacactgtagcaagaagctgtcatcatttgttcattcagttatgctttttatgacacctagttttgcatcccaagaagagaaagtctggtcatttttgtgttctttgtccatcttggagttcctgatggcccactttgtatgattttttatgtagtaaggactgaatattttactacacacggtcacttgtatgagccaatt

SEQ ID NO: 905246 - DNA, 609 bp, Homo sapiens
tgcaaggggtgggctcccaaggaattgggcagctctgtccttgtggctctgcagggtagatcacccacagctggtttcacaggtggacattgagtgcctgcggcttttccaagcacttggtgcaagatgttgacggatctaccattctggaatctttaggactatggccctcttctcacagcttcaccaagcagtgcaccaatgtgaactctgtgtgtggctccaaccacatatttcccctttgcactaccctagtagaggttctccatgagggctctgccccttccacattcttctgcctggacatccaggtgttttcatacatcctgtgaaatttgggcagaggctcccaagactcaagtcttgccctctgcacacatatggaagctgccaatgcttggggcttgcaccttctgatggctggacctggagtggctgcgatgcagggtgctatgtcgtgaggctgcccagagagaagggtcatgggcctggcccacaaaaccatggttttctcttaaacctcagggcytgtgatgggaggggctgccacaagttctctgaaaagcttttgaggcattttccccattgtcttggctactaccattaggc

SEQ ID NO: 905247 - DNA, 678 bp, Homo sapiens
caggaaattgttgcagaaaattaaaatggtaaattcaatataataagcattattttgtttaatatatttataaaattatatattaagactaaagttaaaatctttatgtttatcatctgtttgtgtatttmtctctctatgtctaaattcttgcacatagagcagtattagtaaattatttactacaatttgttacgtgaatagtgaaccaaaaggagaaaattataatttgtgtttttctgtaaaatgactcagtcattttttctcacagatgtaccttttttagcactataatattctattagccctcattcctttggacatgcttttaaattattttaacaaaacaaaacaaaaaaaccctcacagcttaaaagaattaaaagtttctactaattattgtttcttgttatggtgtgttttcaaatattgcctggagagaacaaacatttgggtaactattacctgcctctagagactgtctcatgtttttatacctcctcttctctgaaaactcttcattttgcattccccaaatttaagccccaaattcagaaaaataagaggatatggacaatgcagttaatttacagctggactttccacctgtaaactctttgtctctaggtctcctggatgacattttgacactcagacaagataagggcagttttatga

SEQ ID NO: 905248 - DNA, 624 bp, Homo sapiens
aaaaagtgagggcctgtaatcccagcactttgggaggctaaggcagaaggatcacttgagcccaggagtttgagaccagcttaggcaacatagggagaccccatctctaccaaaaccaaaaccaaaaccaaaacaaaccagaaaaaaaaattagctggatgtggcggcatgcacctgtggtcccagctactagggaggctgaggtggaaggaccgcttgaacccaggaggttgaggctgctgagccgtgattgtgccactgcactccagcctgaatgacagagcaggactctctctctctctgtctctctctctctctctctcacacacacacacacacacacacacacacactaatagagttataaatgagatgctatagtaagacaaagaagtatttaactctgaaaagatcagggtgagttaaaatctgaaataagtcctgaaggataagcaggcattttccacatgaacaatcgtggccccaacagaggccattccatgggtggtggtgtgtacgaaggtctggaggcgagaaaatgcaaacattatggaaatggcaaacagagcacctatatttagtccactcacaaccaaaartaaagggtagatcacagagcaatag

SEQ ID NO: 905249 - DNA, 619 bp, Homo sapiens
agccattcttgaccacctagcggtgtggccatgcaggcattttagtcttgggccagagattggagcacctgctctggagtagggtgggggcctgggcagccagaactgtggaaaacgacttagcagtcgatgctagaattgtgctctccctgctgcaagtctggaatgataagagagccgctacagctgcagtttcttctggacagagagacttacagccagagccagtttggtgatttgaaacctgtctgtgtgtgccatggctgggtgccccactcttctcccctgagatcagggtgcagcagggccctctctgatccaccctttcactcccaggtgaaaatccaggcatttagagcacccacttacctcaactagcagcctgagcggccccacccttcctagacatagattgtggtgcagtgaggccctttccattccatggccaagcaaatcttcaggcatttggagcatgagcttgcttggatcagcagcctgagctgccctaccattcctgtgcagagatcctggtgcaggggtaagggggcctttctgctacaggcttatgcagatcactaggcattcagagtacckgcttaattggttcagcagcctgagt

SEQ ID NO: 905250 - DNA, 601 bp, Homo sapiens
ccaactgtcaatggtgacaaggctgtgaaaccctggcctacaggacggctttatgttacctggcttcttcacaattagtcactcagatggtaagattacatttggaaggtgccaaagtctkttttactttttctgctgacaaacaccatccactagccccaggattgtcggagtgcttatattttacagtaaatagtgaaggtattattttctgagagttttatttaggacttaaaatttttatcaacaccattgccatcttagctctagtaaaaatgatagctattactaaattaatatccattttgggcaaggtactttttttttttaaaggcagagtcttgttgtgttgcccatgacaggcttgacctcgtggggctcaagcaatccttccgcctcagcctcctgagtagctgaatctacaggctcacattgcactttttatttaacattgcaaatcttcggaaatttaggtatgggttgagcatccttcatccaaaaatttgaaatccaaaatgctctaaaatccagaagtttttgagcatcagcatgataccataaatagaaaatttcatacctgccctcatgtaatgggttgtag

SEQ ID NO: 905251 - DNA, 622 bp, Homo sapiens
cccatgctggacttgaaggacaaygatggatcagggaaaacggtaagtcaatgaggacaatgataggtcaggtaaaagaaggagtggcaaggcagtgagattgccactgtgagtagtagcaaaaaggggcagagatgagcagagaagaccacctcaaccactgtatttcctggaaaaagctagcaaatggcttgaaactaagtcaagatatcactttttttggagatggggtcttgctatgttgcccaggctggtcttgaactcctgggctcaagcaattctcccaccttggcctcccaagtagctgagactacaagtgtgtgctaccatgcctggctaagatatcatctagaaatcacagggagacaacacaaagtgggatgaataggaaaagccatgacatgcccaactttagcaggattttgaatctaccaatcctgatttatcacatcccttcttgctaccaatcaggtgtctgccatcaatcccaacactatctccctttttatttatttagtcccatcccaatcctaccagaataagggttgctggccaggctaccatccctcccagtcagcggagtagtgggtgtgggaaatgggatgctgtagtaatcctagaa

SEQ ID NO: 905252 - DNA, 585 bp, Homo sapiens
tctatgttttgtgtgaatgcatgacatcaccttccaagttactgtaactatgtaggtaacaataattcaggggaggtctttatgcaagtttcacaggtcgcactgcaattgcaaagtggatagtcacactgtctgtaaaagtatgaaagtacttccaattggaatgaaaatctggtcattcagtgaacatcattaattttggtgagttggacttgtttaattaaactctcttgattaatcttatgtgattggaaggaatatggcaaatgctggtttggcagttggcaatttaaaaacaaaaagaagtgtccatgcataatgtccatattcttcagtaatactttctactaggctaatcataggataatagaacatagcacatttgccataattttgtccacatggtagataaaatacattaaaattaaataaaaaaatttgaggttttaggaaatgctaagaaaacttgctcagagaggaaaacttaaatayatatttcattgaagatattagtggttatgtctgaatgatgttacatttgatatattgtgtatcactgccttgaattgctaaacgtgttttaca

SEQ ID NO: 905253 - DNA, 644 bp, Homo sapiens
cctaaagacttatttatgttaatggtagaaaattttgctgtaatataaaataataatcagtttgttggcacccttagttaacaaaaatatgtttattaaaaatctaggtagaaatgaatagtttcagaatcatctactgcaacatttaaaaaaattcattgtcaattactttctttacaggatttattagtattggggtactcaatgacttaaagtctaaaccaaaactctttttgccttattgaattctaaccaagagcttctgaaagctataactgaaaaatgatttacgaatttgtttttaatcaaaatggagtttcctagaatgagtttgtttttttttttttttaaacactcctgggctccattattcctgtttgtaaacatcagtgtgtcccttcaaatatgtcttttctatttgtattaaaacctgatcatataattaaattgaatttggcaagtatatatcagccatccactatgtttagtttagttcttttagtttagtttagttctcttttctacygctaattctacaagctgagtgaggcctgctaatttccactgatgttcatacatgttagtttaaaaaaaaagttggcttttacaaagccacaaaggggaacaaatatagctgtattgcc

SEQ ID NO: 905254 - DNA, 438 bp, Homo sapiens
tagccatatttatgtgttatgtgtttacaaggcaattcatatgataatgttagtgactacttcaaatgctatgcttttaaagccagaagatccattttagagtcacaagaaacttaaatttacatcatagaattctctctgtatattaaaaagtgctcctgtgaatgatctacagaaagggaaatggactcaaaatgataaggatgtgcaccctcattttgtgtgtgcaaactgaggtttgtgaagtgatgaactcaataaagaataagggttaaagatttctgaaaatgactgatctctttataaaattactggtttggctctgctatagcagactttgccttctcccctcagaaagaggtagcaactgacaggmgtttgatttatcattgatctttcaatgatatttcttatgggctatagttttctaattggagg

SEQ ID NO: 905255 - DNA, 651 bp, Homo sapiens
tgtttatggataataggagagatatggctggcatcatytctttcagatatttttgtgttgattaggatgtgatggcttgagatacagtggtcatttttcaatgataaggaaaaagccaaaggattccaaaacattctcttgattcctctaaactgctgtactaactcttccaaaacattctcttgattcctctaaacttctgtactaactccagtaacctctagaaatgctgtcacatgaggaaaaacaatctctaatgtttaatccattatgattaatttcaccgttacttgtagatgaactcaattctgcttgatagaaaataaatatcataatggtcttcctatttcctatttttccatggattataccttgtgtgtacatctgcctcttctactatatttaaagctatctagggatatattcaaatcttattcacctttatggtcttcagagtgcaaagcagagaaaattgctatagtatacttgcagaggtggccttaagaataccacgagttatcccaaaatgtaatgaaaacaaaactaaacaaaacaacttcaaaaggactcactgtgcctagttctgagcatcattaaatcacaaaatacaatctctgccctcaagaagttcatggtcttctgaggagaaaa

SEQ ID NO: 905256 - DNA, 665 bp, Homo sapiens
tgtagtctctggatattctcaggtagcctttgtagggagagaatacaattcttaatactaagacctgaccgtayatttttgctaatttctcttctttcctcattgaacaccaggatggcttttctatgcagataacttgacacacagagcccaactttggtcctgaattctgagaaccacagttcagaatagacgctaaaacgtctcaatgttagcagccttcccctatgactttatgaagtgcagccctacaggagaactcaggaagccacatcttccatctgtcaccttctgactgttgatcctgtgagttcacaggccagggtgatgctggtgaggacccttttcactgggacccccaggagttcctgacagagacagacttggagacaccagtagtctggtgagaaaggggcttaatgtcatgaagtattaaaaaatcgaatatattcaaaaatttacgagagaatattttggaaggaaacttcaagaaatgtagaagagagggagaagaaagaatctctgaaagtcacctctttgggtggaattttctcatttctatatttgtggtcaccattgtatactggtaacaagatttcttgccataaaaatttctcagatggtgaaattatttacaatatggatacatttatttcttcctgtgt

SEQ ID NO: 905257 - DNA, 593 bp, Homo sapiens
tagataccagtattgtggagttgatcaagacagagaggactctcatcccctattacttaatttttcaataggatcaacataaaatacttttaaatagatgtttataataaatataatgacataaacacatagtctggagatttaaaaaatataatagactatctgcccataaaaaatatagctgatttctctactgcctaaaatcaacaataaagcatatccaaaatgtcccaagactctaaaaagagttatatttttgtgaaaggaaacaggcagtagatatatagacgatgatataattttaggtagtgataactgctataaaaataaaactggatgatataatagaagataattagggaattagggctagcttagataaggctctaaggaaaattcatgcacttcatttattaaacacagatatagtccaattttctccttcttgtatcagattcattatatattctcagtagttttctaggaatttggctattacctgaatttttttctttaaaaataatattgwttatattataaatttcttattttaaatgtgcataggatctttaatgatgccctatcttcattgt

SEQ ID NO: 905258 - DNA, 620 bp, Homo sapiens
atccctgatgaacattgatgcaaaaatcctcaataaaatactggcaaaccgaatcaaacagcayattaaaaagcttatccaccacgatcaagtcgtcttcatccctgggacgcaaggctggtttaacatatgcaaatcaataaatgtaatccatcacataaacagaaccaatggcaaaaaccacatgatcatctcaatagatgctgaaaaggactttgataaaattcagcaccacttcttgttaaaaacactcaataaactaggtactgatggagcatatctcaaaataataatagctatttatgaaaaacccacagccaatatcttactgaatgggcaaaagctggaagcattccctttgaaaaccggcacaagacaagggtgtcctctctcaccactcctattcaacatagtattgaaagttctggccagggcagtcaggcaagataaataaacaaagcgtattcaaatagaaagagaggaagtcaaattgtctgttttcagatgacatgattgtatatttagaaaaccctatcatctgagcccaaaaactacttaagctgataagcaactttaacaaagtctcaggatacaaaatcaatgtgcaaaaatcacaagca

SEQ ID NO: 905259 - DNA, 557 bp, Homo sapiens
tgcgatgccatttgcgtgggtagagggtaggcagagaagccatccttaaagaactgagaatcaagctgagatctgaactgtaagcacaaatttagttaggcgtagagagagaagaaggaaatcgcacttgaggcaaagggagtacatgcaacatccaaaggttttgacattcaggggaaagaagaggggaggctgaaagaagactgaattttctggaccccagcatgagaaaggcaccaaaacataaagctgaaacttcatggaacctggaggcatgcagagctttggcagccacttgcagaattagatccttatgagaattcaaatcacttccttccatatagcttaactatcaggaatgagaatgaggatcacttacaccaacaagatttaactgtttattcttaactggagattcttgctcagaaagttaaggctgtaartcaatgaataactttattgtttactttaggaaattcctgctaaccgatttatccaaacaaacacttgactcatctctcccatcaggacaaaagaatgttcacctgcagaaacag

SEQ ID NO: 905260 - DNA, 623 bp, Homo sapiens
aggcttctattgggccatcttgctcccaaataatataatttttattttaatcttctgtcatactagctaactggttaattaaaaaggaaaaactggaactatgraagtgggaattgcacaaatattaaaataagtgtacagagaaaggcacattcaagcaatgctggagggaatgtaaactgacacaatttgacatatctaagataatacacaaatgtatttttgtgcctttattatcatagatatgatagtatctgtgatattatcatagacatcatgataatgtcataatattatcaaacctggcaattcctctcaagaaaattatcctaaaaatatacttaaacaaatacaaagagacatgtccacaagaaacattctatgtggtattttttataccacaaacaaaacttactgtaaatgtccatcactagggttgtgttaattaaattatgacacaaacatacaatagaattttaagtagccactaaaaagaatgatgtagcactgctgtgttgatacaaaaagatctattatgttattaggtataaaattaggtatgaaatatatatatttttaatatcttatcataagatgaaaatgtctattatattattagcttt

SEQ ID NO: 905261 - DNA, 683 bp, Homo sapiens
ttaagctttttgtcatatgcttgttggctacatgtctgtcttcttttgagaagtgtctgttcatgtcctttgcctattttttggtggggttgtttgttttctcttgtaaatttaagttccttatagaggctggatattagacctttgtctgatgcacagtttgcaagtattttttcccattctgtaggttgtctatttactctgttgatagtttcttttgatgtgcagaatctcctaaggttaattagatcccagttgtcaatttttgcttttattgcaattgctttttgtgtctttgtcatgaactctttgcccattcctttgtccaggatggtattgcctaggttgtcttttggggtttttatagttttgggttttacatttaattctttattctatcttgagtttattcttgtatatggtataaggaaaaagtccagcttcggtctgttgcatatggctagccagttatcccagcaccatttactgaatatggagaaaactcttaatcatcaaataattcagtcccttctaattgaatccttgtgggtagataatagattyaactcaaaattcctcccccaacccatttagaggatgaatgccagactacaaataattgctctgactttggactgagacattttatccttaagcccccctcagtcacctccactaccact

SEQ ID NO: 905262 - DNA, 577 bp, Homo sapiens
aatatttgtaaatatttcatatgcatttgataactatattctgaggcacattcataaggacagaaagtagattagggtttgctaggggctggaggaaggtggaatgggatgtgacygctaatgagtatgggatttttttttttgaagtaatgaaaatgttttgaaactagatagtggcgatgcttgcaaaactttatgagtatattaaaaaccactgaattgtggactttaaaagggtgagctttgtggtttatgaattatatcttaataaagctgttataaacaaatatgaaccaaatcagctgtaccaaaataccctaatatgtattaaactttatcttaaatttcaaaaaaagaaaactgtattctgcagttttctctacacatgaattaagttatttttgttaatccaattgtttaatctatatccttacttatttttgtctatttattttatctgttgctatgacagaggtattaaaatctccagttgtgattatggctgtgtctatgtctccttttagttgtcaagttttgctttaaagcaagttcatttgtgtagtccaatttggaattg

SEQ ID NO: 905263 - DNA, 573 bp, Homo sapiens
atcattatgctgtgcttgcctatatttcaaaattcactataaaaagataggtgaacctcagatccatctcctagatgtatgatttctagctgcatattaacctcagtcacattttaatattattcacacaaaaattaaaacactcaggtatttgtgatgaagtaattttgcctaaatttattttatttccaaagaacctgcatcaatttgattcagtaacatttaaaatcattcaacaaaaatctttcaaacttttatgttacagtaatattcaaactctttttttgtggctcaaatctttttatgaacttcaattatgtgaaaatatccaattttatttttaaataaagatgtttagaaatgtattgatatttgtcaaatctaagttgcagctatgtaagtttttattaagtcattctctgtgtatacttctaagtatgttggacttcttacataaaaaattaaacgttattgaggaaagaaaagggagaataagtttcaaaaagaaatttatctttctttagatatatataatcatcacaaaawattatcagataacaaatcttgaatttt

SEQ ID NO: 905264 - DNA, 634 bp, Homo sapiens
aaaagacagctaggggagtgtaactggcaggtttgctgagtcaaaggctgtgtcaagggataggaaaggataggtgcatttgacataaaakacagtggtggacattagagaaagcctttgtggaggctagcctctccagctgccaaggcaaggcaaagagaaacttctagtgaagacaatactgatttccttctcttcatgctatcctcagtcacactatagtggcctttggcctttgtgtggagaaaaggtaaggactgtgaagactttttccttgacatcccgggctgatctcaaacatcaagtcacttgcaaaggggatgggagctctgtgttcagatgagtcctgtgggacattcaggaagaacagaaacagttccaagatgctggatccaactgcacattagattaagctgcctggtgttaagacttttagtgaaggtcatgtggttaccagtctgcgtgccaaagagcagtgtgtgttaaggtctgagctcatgtccttactcaagattccttttagtcaaagaaactcagtggatataaacttgagttatgatgatactaggccttctcataatacataatccagaaatatttccaagaatgccactaatcatttgtttggggaact

SEQ ID NO: 905265 - DNA, 640 bp, Homo sapiens
tttccagtgaaacaagattgaagtagagaaaaacrtaaaggccttttaaatatacctatagcttggatatccacttttaattaagctgacttttaactgtagcgctttttaagaaaatccttttaaatcccttgctacctgactttagctgcaccaaggagccgatatttctggcttttgaactttgccaaaagtaacctcacaggtgaaaccaagaagccttaaccaaggttatgacttaaaaatgattgtaccaggtattttcaaagagatgacaagcagtacttaaaaaatctagaatctttaagaggtagctcagagaaaggaagatttaagaaaggaagctagaagttcacagagggggagagaatcagcaaatggtaagtcatgcagatattagccagaaagtactcattccctaggccaggattaaacccaggccactattgtaaaatgacaaagacccaaagaagttaccgccacgttgttaaaatgtcaagctcccaaggacataaaacaagatggagacctcatttatgttttttcccctcagagacctatagcaaagtttgtaactgaatagtttcctgggctggcttgagaagtgggcttattgggtcctaggcccatgttctatcct

SEQ ID NO: 905266 - DNA, 569 bp, Homo sapiens
ggactcatactgagtgaaaaaagaagggagatttacaatggaggttaagtgtaaaatcttgttggttragtgtaatttctatctaaatgagacagggtatatacttatttccattttaaatctcccttcaaatatagtaacaaccaacatttttatgaattgtggaacattattaggacattaaagagaaggcactgcaggttttgtcctaatacctagatattaggtgtcttgggggatgttcgtctatcttcctgtgagcccatggcatcttggttctcattacttactattacaaggggccatagtctgaaaaattctcaagattataaaattttcttgaaaattaaaacttaaagagtttattactgtgtttggcccaaaaaacaagcttgcaatatatcaattctcttcttgataaaaacagggttgggggtcactaaagccacattttaatatatttaggatatattaacaagagtctgagctgtttattaatcagtgtggtttattataatttttaggggtttctatcatttacctttattaatatctcatccctccctaga

SEQ ID NO: 905267 - DNA, 639 bp, Homo sapiens
agcactctggagaggaagaaggggcacctgaaatctagatatgtgttaatttacttagttcagcagttgcagattcaagctctatgagaggtcagggaggtaaccgaratgagtgtaacaccctgtggacaagataagatgtggtggggtcttggcaaaccaagcatcatagccagtctacgggaagcagtgggcagtcctctggccgagtgtatgagtctgttttcacgctgctgataaagacatacctgagactgggaataaaaagaggtttaattggacttaacagtttcacatggctggggaggcctcagaatcatggcagaggctaaaggtacttcttaaatggcagtggcaagagaaaatgaggaagatgcaaaagcagaaacccccgataaaaccatcagatctcgtgagacttattcactatcatgagaacagtgtggggaaaactaccccagtgattcaaattatctctcactgggtccctcccacaacacatgggaattatgggagtacaattcaagatgaaatttgggtcgggacacagagccaaaccatatcattctgcccttggcccctccaaatcttatgccctcacatttcaaaacaaatcatgcgttccaacagttccccaaa

SEQ ID NO: 905268 - DNA, 669 bp, Homo sapiens
cacagcagagatgctagattgtattgtgcttacatgatgactttaggatattttattttttttgagacagaatcttgctatgttgcccaggctggcctcgaaccctgggctcaagtgatcctccttcctttcrgcctcactgaagctgggattacaggcatgtgtcatcatgcccagcttttgaagaattttttttttgtcatggcccaataattttttaaattctatttacaaatttctaaatacataatagtgaaaacatcaaaaatataaaaaggtattcaaactgtctcccactattgtcctctaactgccctgctgtcatctctttgaataggtgaccatctgctttttcgttattattcatcttttatttatttatttatttagagacagagtcttgctcttgttgcccagagaggagtgtagtggcacaatctccactcactgcaacctccatctcctaggttcaagtgattctcctgcctcagcctcccaagtagctgggattacaggtgtggtccaccatacccggctaatttttgtatttttaataaaggcaaggtttcaaggctggtcttgaactcttgacctcaagtgatgcacatgtctcggcctcccaaagtgctgggattacaggcatgaaccgctacacccagctgttatttt

SEQ ID NO: 905269 - DNA, 669 bp, Homo sapiens
cacagcagagatgctagattgtattgtgcttacatgatgactttaggatattttattttttttgagacagaatcttgctatgttgcccaggctggcctcgaaccctgggctcaagtgatcctccttcctttcagcctcactgaagctgggattacaggcatgtgtcatcatgcccagcttttgaagaattttttttttgtcatggcccaataattttttaaattctatttacaaatttctaaatacataatagtgaaaacatcaaaaatataaaaaggtattcaaactgtctcccactattgtcctctaactgccctgctgtcatctctttgaataggtgaccatctgctttttcgttattattcatcttttatttatttatttatttagagacagagtcttgctcttgttgcccagagaggagtgtagtggcacaatctccactcactgcaacctccatctcctaggttcaagtgattctcctgcctcagcctcccaagtagctgggattacaggtgtggtccaccatacccggctaatttttgtatttttaataaaggcaaggtttcaaggctggtcttgaactcttgacctcaagtgatgcacmtgtctcggcctcccaaagtgctgggattacaggcatgaaccgctacacccagctgttatttt

SEQ ID NO: 905270 - DNA, 629 bp, Homo sapiens
tcatgaagatgtccaaggtaattaaggatgttgaaggagataatctttatcrgatgaaatgcatcactaaatgctaaattagtgtacagaacgacccagaaaaaaacctgtacactgtaacacctcaagaccacatgaatcatgtctgtatttggcagctgaattaaaactttaagccataattaaattactgttgtaagataataaggatggcaatgctacagactgtcagaaagtgtaaaatatagtagggcaagataagggtgctaactcttgctgaatgttagtctgaagtactggtgctaggcatctgatacattggatctcatgtgaccagtgtaaatcgtcaaaagcaaaaccaaaaacctctcaaatcaactatgctgtttacatgaagatatactagataaatcatcaggaagagtaataattaaaatggcctctaaaaacttgtataaaatatatagcagataaaagaaaggtaaattataaaatccaaagtgagtcccctccctgatgtttcaagtatacgatgattttaacataacctctcttgatgcctaccacattgcattcttattcagcttttctgttaggagtcataagtttctaacgttgtgtgttctctc

SEQ ID NO: 905271 - DNA, 539 bp, Homo sapiens
cttttttaaatgcctgatttcaatgacaataaaatcaagatctatacccagaaagcactcattttggcttacaaacatgaagcaacataggactttataccaactactaatgtagagcttagattacatgctataagagaaactcttctgaaatacagatacctatttatgtgtgtataggaaaaacacacatttatattgttcccaccactcactgatttattgcactgttgatcactttgtttttatttgcatgtagtttaaatttactatagacagtgtcaattatgtatcactgggaacatttcttcttcctggtacaatcgtacatttattgaagacataaatttaatcaacaaatattaatggctgatcattgtgatttcattatctctgcctttcaaatacagacatgctttcctgaagtgtaactaattgtccttaaccctaggactctgaagctatgtgtacaagtagacaaagatattgcaaagtttgaccctaggaaaggggaaaaraagacctaaaacctttatttt

SEQ ID NO: 905272 - DNA, 587 bp, Homo sapiens
tgggcaaactcctccccatccatgaagcccttgctcaaatcttgccttttccttgagaattttccttcctgcattcttgttgcctctcactcaactcttctttctcccccgcccatggcatttaacagcttctaaagtaaagtttactttttccttatctgtattatttcttatctattacccacctgcctggaaaataagctccatgggagtaaaagtctttatttgttttgctcattctgtactctaggtaggtgtctaaaacagtgcctggtataatatagacttgatagataatttgcaggtgttattgaggagcaagccacacacagcttgggttaacacctctttaacttttgctgatgcccccctaccccctgtctttttttactttacaaaaaagaccagatctcagactgacagcctttgtttagtaagaatatttagctggaattttaacaaatcaactttattttaattttgtttacttttacaacctctgtgtttggcaatagattscagttctccactaactagtaatttaagacttccttttgaaataacatgaaggaactaaaaaatatatt

SEQ ID NO: 905273 - DNA, 629 bp, Homo sapiens
acagagacactcaataccagttcatgaaagcagccacaggggtggtacccttcagagccatagtgggggagctgccaaaggccttaggatcccagcttttgcatcagcatggcctggatgtgagacatggagtcaaacaagattattttcaagctttaaaatttaatgactgccctgttgagttccagacttgcatggggcatgtagcccctttgttttggcccatttatctcatttggaatgggagcatttaaccaatgcctgtaccctcattgtatcttggaagtaactaacttgcttttgattttacaggctaataggcagaaggaacttgtgttatctcagatgagacttttgggaacaaaagacttttggattaatgcaggaatgagttaagactttggtgggctgttgggaaagcatgattgtgttttgaaatgtgagaaggacatgagatttgggatggaccaacagcagaatgatatgatttggctctgtgtccccacccaaatcccatcttgaattgcaattcccgtgtgtcaaggaagygacctagtgggaagtgactggatcatgggggtggattttcccttgctgttctcctgatagtgagtgagctgtcatgagat

SEQ ID NO: 905274 - DNA, 526 bp, Homo sapiens
ccctgatatctgtaggaaactataaaaagcagctacgggtccccaaactcctatggaacagcttctggatttggaatttttagtttttaataacagggacaaagcagaggaagcagaaagaacaagatggacctsccccaaggtgcagctcttggctgcagccttaagctgcagattagggattcctgggctggagctgatggggttgccctcctggcctttggcctgaacaagggaagctgaaaggtgggaaggccaaagctggatgtctgagtcactgtgccttgtgcataaatcagtgtgcaccctgtaagaaaagtggtcattggaagagggagccattggcacctgaaccaataatggccaattagccagacaaacccaagagtgatgggggcccaaggccttctgccacagtttccatcagacaactagccatatctctggagaagcctcagtaacccttgatgtggcaggtaagaatattaacttccttctggactgcttactctgttttcgcccatta

SEQ ID NO: 905275 - DNA, 599 bp, Homo sapiens
cagaaaagggctcaagagttgattcatgatagtcataaarctaaatgtcttatttgcatctatttctctttttgctagaagttacaagaactattaaataattgtgcataggaagaagtcataacaagatttagatttaggatgaagggccatcatttgctgcctttaagcaaagacacttctataaacataaaggcatctgtacttttattcagggtctactagaagtttatctcagtgtaagcgaagttctcactgatccttagagggaaaggtatgaatgaaacctttttggagaaaatttaaaaatgatttcttaacttgcctattgtctacatttagtgaccaaactgcaagctatccatcaaatccttttttgccttcttcatgaatacatagcttcccagtttatatattcaacctgtctttcagctagttcttgtcatgtgccagttttctccaatagcatatgagttaagtggcatgtgaaaaacttcttcacttcttattagaaaattgttgcctgtaatttctttccacttccctttcccatgagctagaatgtaaattaacccattatcccctttaatcaggaaagc

SEQ ID NO: 905276 - DNA, 619 bp, Homo sapiens
agctaatcaagttttcagaaagttgtagaatgttttcttagctagacagagacaagtaattgccctgcgtgtctaagcatttggtcctcctttaaaccaacactacttacatatacaagatttttttccaacgttttttagctaggtggggagaaaataagtttctattaataaaaagtttgtgcttcttaatattcaaaactagaactgatatcaatgttataaaacattttcacttgaactgtgccttcagattttaattactatattattcacgatggaatagtttgcatcactcacatccaataaaagtaaaaatgagtataatttaaaagttcaggtctaaataactacaatttctccttttggctgacattctgggcagcaaatcttacctcacgtttctgcattcctgttttcagttcagtgttcttttgtatttgctttcgacccatgactgaagttgtcacattgatgctgccaattctctgtgcctttgtaagtgagaaaaacytttccttctcctcatatggggaaagtaataagtcatttacaaaggcctgtttgtaattgtggcctttagcgtctgtggactgcgttttaggtgcattatgagaga

SEQ ID NO: 905277 - DNA, 527 bp, Homo sapiens
tatttaagaggttgaaatggcaagcaagtgaagataggtggattaaattgatccctgacacaagcacattattttgcctataaaaccaggaagaacaatctgtctcctgtcctgagggcacattcatgacatttgccattgtgcagctactgttgacttttcctgcagaagaaaaatctgtctaaaaggacatcttgaaaggctaagagggcgtgttgggaccttctgccagctggcctgaagaggctcacaaaccacctcttcctcctggttcctttggaaattccactgggcaatgcagactggttcatcttcttgtacttaactgagctgccaggttggaaatagtcctaaacttttcgcacagagctgtaatcttaaactgtaattttattttattttatttttaaaatttttaaaattttaaatttttttttaaattattatactttaagttatagggtacatgtgcactaggtgcaagtttgttacatatgtatacaygtgccatgttggtgtgctgcacc

SEQ ID NO: 905278 - DNA, 605 bp, Homo sapiens
taaaactcccaaaaactaattcgtatttctagttttaatcctaaaaaacctaactattgctcccctccatacctctcccttctattcatycctagtggctattgtcctcatctttaagtccatgagtaaccaatgtttagctcccacttataagtgagaacatatggtatttggttttatgttcctctgttaatttacttaggataatggcctcgagctgcatcaatgttgctgcaaaagacaagattttgttccttttcatggccgtgtagtagtccaatgtatgtatataccacattttcttattccaatccaccattgatgggcacctaagttgattccatatctttgctattgtggataatgcagcgatgagcaaacaagcgcatgtgtctttttgttagagtgatgtgttttctttcaggtatatacccagtaatgggattgctgagtcaaatggtagttttattttaccttctttttttttaatcttcctttaagttccaggatacaagtgcagaatgtgtaggtttgttacataggtatacgtgtggcatggtggtttgctgcacctatcaacctgtcatttaggttttaagctccgc

SEQ ID NO: 905279 - DNA, 471 bp, Homo sapiens
tattgatttgtatttttattctactgtggtctgatagcatggctgatgtgattttgatacttttgaacttactgagacttgctttrtggcagagcatgtggttaatcttggagtatggtccatgtacagatgagaaggatgcatattctatggttgaggggtattctgtagatgtgtattagatacaatgggtcaagtgtcaaatttacatccagaatatttttgttagtattctgcctcaatgatctgtctaatgttgtcagtggggtgttgaagttcctcactattattgtgtggctacctatgtctttttgcaggttgagaattacttgttttatgaatctggatgctccattgttaggtgtgtatacatttagcatagttaagtcttctttttgaattgaaccttttatcattatataatgcccttctttgttcttttctactgttgttgatttaaagtctatttta

SEQ ID NO: 905280 - DNA, 552 bp, Homo sapiens
gttttaagaatgggagtttccctgcacaagctctctctttgcctgctgccacccttgtaagacgtggcttgctcttccttgccttccaccatgattgtgagctcccccaccagacacgtggaaccataartccattaaacctctttcttttgtaaactacccagtcttagatatgtctctatcagcagcttgaaaatggactaatacagtaaattggtaccaggagtgaggtgctgctgaaaagatattcaataatgcggaagtgactttgtaactgggtaacaggcaggggttggaatagtctggagggctcagaagaggacgggaaaatgtggaaaagtttggaacttcctagagacttgttgaatggctttgcccaaaatgctgatagcaacatggacaataataaagtccatgctgaagtggtctcagatggaaatgaggaacttgttgggaactagagcaaaggttatgttttagcaaacagactggtggcattttgcccctgacttagagatttatggaactttgaacttgagaagggaaaattta

SEQ ID NO: 905281 - DNA, 555 bp, Homo sapiens
gttttaagaatgggagtttccctgcacaagctctctctttgcctgctgccacccttgtaagacgtggcttgctcttccttgccttccaccatgattgtgagctcccccaccagacacgtggaaccataartccattaaacctctttcttttgtaaactacccagtcttagatatgtctctatcagcagcttgaaaatggactaatacagtaaattggtaccaggagtgaggtgctgctgaaaagatattcaataatgcggaagtgactttgtaactgggtaacaggcaggggttggaatagtctggagggctcagaagaggacgggaaaatgtggaaaagtttggaacttcctagagacttgttgaatggctttgcccaaaatgctgatagcaacatggacaataataaagtccatgctgaagtggtctcagatggaaatgaggaacttgttgggaactagagcaaaggttatgttttagcaaacagactggtggcattttgcccctgccttagagatttatggaactttgaacttgagaagggaaaatttaggg

SEQ ID NO: 905282 - DNA, 605 bp, Homo sapiens
gaactaattgacatctaaagaactcttcaccctaaatcaacagaatatacattcttctcagcaccacatcacacttattctaaaattgaccacataattggaagtaaaacactcctcagcaaattcaaaagaatggaaataataacagtctctcagaccatagtgcaatcaaattagaactcaggattaacaaactcactcaaaaccacacaactacatgaaaactgaacaacttgctcctgaatgactactgggtgaacaacgaaatgaaggcagaaataaagatgttctttcaaaccaatgagaacaaagacacaacattccagaatctctgggacatatgtaaagcagtgtgtagagggaaatttagagcactaaatgcccacaagagacagcaagacagatctaaaatcaacaccctaacatcacaattaaaagaactagagaagcaagagcaaacaaattcaaaagstagcagaagacaagaaataactaaggtcagagcagaactgaaggagagagagacacaaaaacccttcaaaaaaatcaatgaatccaggagctggttttttgaagagataaacaaaatagatagaccactagcc

SEQ ID NO: 905283 - DNA, 655 bp, Homo sapiens
gatctttgacaaacctgagaaaaacaagcaatggggaaaggattccctatttaataaatggtgctgggaaaactggctagtcatatgtagaaagctgaaactggatcccttccttacaccttatagaaaatgagtgaactcccgttcacgattgctacaaagagaacaaaatacctaggaatacagcttacgagggatgtgaaggaactcttcaagtagaactagaaatctctgctcaaagaaataagagaggacacaaacaaatggaaaaacattctatgctcatggacaggaagaatgaatatcatgaaaatggccatactgcccaaagtaatttatagattcaatgctagccccatcaagctaccaatgactttcttcacagaactggaaaaaactactttaaatttcatatggaaccaaaaggagcccacatagccaagacaatagtaagcaaaaagaacaaagctggaggcatcacactacctgacttcaaactatactacaaggctacagtaacaaaaacagcatgatacttgtacyaaaacagatatatagaccaatggaacagaacagagacctcagaaataatgccacacatctacaaccatccgatctttgacaaacctgatagaaacaagcaatggtgaaagga

SEQ ID NO: 905284 - DNA, 601 bp, Homo sapiens
ttggttaacttgaaagacatagaaggatgtgaaggactgaagagtgggaagaaaccaaagcagtagggcagagggaaaataacacagggaagcatgtaatcccagcattttgggaggctgaggtgagtggatcatttgatgttgggagttcgagaccagtctggctgtcatggtgaaaccccgtctctacaaaaagtaaaaaaattagccgggcatggtggcagccacacataatcccagctagctattcgggaggctgaggcaggagaatcgcttgaacctgggaggcggaggttgcagtgagccgagattgtgacattgcactccagcctgggcaacagagtgagaggtctcaaaacaaaaacaaaaacaaaaaacaaaacaacaacaacaaaaagaacacaggaaagagtatggaaccccacagaaatgcttcacctgcagcttcaaaggcttgggttatatttagaacacatattttggaccttacctattatatgtgcatttcatttccattttcagtctttcaaaggcaaataaaagaaacgtargagtcaaagattttttaaaaattgctcagaggcatattagtgaaacatag

SEQ ID NO: 905285 - DNA, 648 bp, Homo sapiens
tatgaaaaagtcaaaaaataacagatattggcgaggctgcagagaaaagggaacacytatagactgatggtgtgtatgtaaattagttcaacaactacggaaagcagtttggagatttctcaactcttgaatagaggacagataatccactaggccagcctgggaagaagtcttgtttgggaaatctaggaggccttcacttttggtgacacctacctgaattacaagtccagtatctgcaaggaaccaaccagttcccaatctaggaatgaatgtactttgcaaagtacattttgctgagtaaagataaacatcacaatctgaatatcactgacaatagccgaaacttaccagttacatcctacattcaaggcccttagtgtaaattatttcctttaatcctcaccacaatttgataaaatagattaagatgccatgcaattggaaggattgctactattaactctgtcacacagatgagaacatggagaacaaaaatagatttagtgatttgcccaatgtcacactgaaagtggagaaaggtaggttggatataggttttctgattctagaactgaaaactttcaccaatgggccatgttccctctggcatctctgcaatcatgtggcttcacaaccttgagaccc

SEQ ID NO: 905286 - DNA, 591 bp, Homo sapiens
cttccagcttttgcccatttagtgtgatattggctgtggatttgtcataaatatctcttattattttgagatacattccatcagtacctattttattgagagtttttagcatgaaggggtgttgaattttatcaaaggctttttctgcatctattgagttaatcatgtggtttttgtaattgattctgtttatgtcatggattgtttactgatttgcatatgttgaaccagtctcgcatcccagggatgaagctgacttgatcatggtggataagctttttgatgtgctgctggattttgtttgccactatttcattgaggatttttgcatcaatgttcatcagaaatattggccttacattttcttattttgttatttccctgccaggctttggtatcaggatgatgcaggacccagaaaatgagttagagaggagtccctctttttgtcttgtttggaattgtttcagaaggaatggtaccagctcctctttgtacctctggtagaattcagctgtgaatccatctggtcctgarctttttgttggttggtaggctattaattactgcctcaatttcagaactcattat

SEQ ID NO: 905287 - DNA, 615 bp, Homo sapiens
ctttgtaggtctctaacaccttgctttatgaatctggatgctcctgtattgggtgcataartatttaggatagttagctcttcttgctgcattgatccctttaccattatgtaatgcacttctttgtcgtttttgatctttgttggcttcaagtctgttttatcagagactaggattgcaacccctgctttttttgctttccatttgcgtggtaaatagtcctccatccctttattttgagcctatgtgtgtttttgcacatgagataggtctcctgaatacagcacactgatgggtcttgactcttcatccaatttgccagtctgtgccttttaattggggcatttagcccatttacatttaagattaatattgttatgtgtgaatttgatcctgtcattatgatgctagctggttattttgcccattgcttgatacagtttcttcacagtgtcaatggtcgttacaatttggaatgttttgcagtggctggtactggtttttcctttccatgttcagtgcttccttcaggagctcttttagggcaggcctagtgttgacaaaatctctcagcatttgcttgtctgtaaaggattttatttctcccttgcttat

SEQ ID NO: 905288 - DNA, 615 bp, Homo sapiens
ctttgtaggtctctaacaccttgctttatgaatctggatgctcctgtattgggtgcataagtatttaggatagttagctcttcttgctgcattgatccctttaccattatgtaatgcmcttctttgtcgtttttgatctttgttggcttcaagtctgttttatcagagactaggattgcaacccctgctttttttgctttccatttgcgtggtaaatagtcctccatccctttattttgagcctatgtgtgtttttgcacatgagataggtctcctgaatacagcacactgatgggtcttgactcttcatccaatttgccagtctgtgccttttaattggggcatttagcccatttacatttaagattaatattgttatgtgtgaatttgatcctgtcattatgatgctagctggttattttgcccattgcttgatacagtttcttcacagtgtcaatggtcgttacaatttggaatgttttgcagtggctggtactggtttttcctttccatgttcagtgcttccttcaggagctcttttagggcaggcctagtgttgacaaaatctctcagcatttgcttgtctgtaaaggattttatttctcccttgcttat

SEQ ID NO: 905289 - DNA, 624 bp, Homo sapiens
atttttacatcttgtactttacaaaggaactatatatttgaataaaatttactwtttatttgagtattgccatgtattcatactatgatacaattgccttgaataaataccttactcccagtaagtaaataaaccctaaatgttaaaaatctgaacaatttaaacatggctagaaaatgcaccttctatattattcctaaaataaaagaaataaaggctctaaaatgcaatattgaattcccccaaccatgctgatgtaggtaaactgtatttcagatattgggaaatagcctcataaactgagaagaacacggcttttagattcaagtacatatggattcaacttccacctttacccctacagctctgtgaccagtgggaagttatgtagctttgttcagccttggtttcttcatctgcgaaattaggaaaataatactccttcaaaagtgagagagcgtaacctgcagtggatgaatggataaacaaaatgtgctatgtacatataatggaatattattcagccttaaaaaggaaggaaattctgacacacgctataacatggattaaccttgagaacattatgctaagtgaaataaaccagtcatcaatagacagatactg

SEQ ID NO: 905290 - DNA, 624 bp, Homo sapiens
atttttacatcttgtactttacaaaggaactatatatttgaataaaatttactttttatttgagtattgccatgtattcatactaygatacaattgccttgaataaataccttactcccagtaagtaaataaaccctaaatgttaaaaatctgaacaatttaaacatggctagaaaatgcaccttctatattattcctaaaataaaagaaataaaggctctaaaatgcaatattgaattcccccaaccatgctgatgtaggtaaactgtatttcagatattgggaaatagcctcataaactgagaagaacacggcttttagattcaagtacatatggattcaacttccacctttacccctacagctctgtgaccagtgggaagttatgtagctttgttcagccttggtttcttcatctgcgaaattaggaaaataatactccttcaaaagtgagagagcgtaacctgcagtggatgaatggataaacaaaatgtgctatgtacatataatggaatattattcagccttaaaaaggaaggaaattctgacacacgctataacatggattaaccttgagaacattatgctaagtgaaataaaccagtcatcaatagacagatactg

SEQ ID NO: 905291 - DNA, 285 bp, Homo sapiens
cagctgcccagaggccaaaaccacccacctgatagcgactgtccccaagccaggagaaaaagaagagagcaggtcccactcacctgagtctgatcagtcagctgtgttgagatgtgcctctcacctagaaaayggtccttcacgcagagccactcacagacacggctgtgtgtctctaactgctccacaacacagaggcgatgggggcttagcaacagtgacattgtggggtgacacaacccaccacaatgggagcctgcatgggtcaacagggcccagagtcaa

SEQ ID NO: 905292 - DNA, 285 bp, Homo sapiens
cagctgcccagaggccaaaaccacccacctgatagcgactgtccccaagccaggagaaaaagaagagagcaggtcccactcacctgagtctgatcagtcagctgtgttgagatgtgcctctcacctagaaaatggtccttcacgcagagccactcacagacacggctgtgtgtctctaactgctccacaacacagaggcgatgggggctyagcaacagtgacattgtggggtgacacaacccaccacaatgggagcctgcatgggtcaacagggcccagagtcaa

SEQ ID NO: 905293 - DNA, 512 bp, Homo sapiens
ccaataagtagttttccaaccctggcccactctgtccctccctgttcttatttcccagtgtctatagttcccatgtttatgacaatgtgcacccaatgtgtagctcccacataagtgaaaacatgagatatttggtttctgtttctgtgttagtttgcttaggatagtggattccagctgtatccatgttgctgcaaaggacatgattttgttcttttcttggctgcatagtattccatggtatatatggaactttccaatctaccttggattttcaatctgccttggatgcacctggattgactccatgtctttgctgttttgaatagtgctgcaatgaacacacatgtgcatgcatctttttattacaatgatttattgtcttctagatatacccctagtatagtaatgggattgctgcatccaacggtcattgttagttcttaatttccaaactgctctccatagtagctgaaytaatttacattgccaaaaacggtgtgtgttccctt

SEQ ID NO: 905294 - DNA, 533 bp, Homo sapiens
ggatgtaaaattaatttaccgaaatcaattacaaactcattaaatttccasaaaaatattagtgtattttctaacaacttttataaatatagcatttgtaatagcaatgaaatcataagtgatctaagaataaacaacatacatgcatgggcatgttaaaggagaaaaataaaactttatgaaagtttcactaactagaaaattaactatgtttatagataagaaaacattaaaaatatcaaaactctcctcaaattgataaagaattaaattccagtgtaaatcatatcaagattctttgtgaaacttgacatgctaattctacattttacacagatgagacaaaaacaagaaaaaactgattattcctgaaaaagattggctaggaggagagggagcttgccttagcagatcttaagcctcataataaaactaaagtaatgatgacagtgtaatatcggtacataccagcagaatagaattagagaatccaacaacagacccatgtgtataagtagaaaatacacaaagtt

SEQ ID NO: 905295 - DNA, 641 bp, Homo sapiens
catcatgttttctttcatgctgactttacttatatatgtgatttacctggcagctttaattcatactgtattttttcttagaaattttccctttaggcccagcatggtggcttatgcctgtaatcctagcactttgggaggccaaggtgggcagatcacaaggtcaagagattgagaccattctggccaatgtggtgaaactgatctctactaaaaatacaaaaattagctgggcatggtggtgcatacctgtagtcacagctacttgggaggctgaggcaggagaatcgcttgaacccaggaggcagaggttgcagtgagccgagatcgcgccattgcattccagcctgggcgacagagcaagactccatctcaaaaaaaaaaaaaaaaaaagaattttttcttttaacatacacattagtatctttggaagtatccaaaacagtttaatgccagaaattgatctagcagtgacttgaaagggctaaggtttaaatctcagcaataacacaccccagttctgacagacagggtggtatgtcactagaactggtagcttctgctcagagtggcgagttattkctggaaagtggttgcctagccagatgtctttgtttttttcttttgctcttttgcatcta

SEQ ID NO: 905296 - DNA, 529 bp, Homo sapiens
ggaaagtgcatctgtcctcagaagtcatcacacagggcaaaaagaacatggtacctgcctacrgagtgactttagtgagatgaactgtttccctgtcctctggtattgaagacactaatctataaaaagaggccagtctagctgatacctaaggcactccacctcttacaattcttcccgtgatgccgtgaactacggaaaataggcatatataaacccttgcattatgtgacaagagcctaggaatcctagatagtcattagttacactaaatttaaatatttacttccaaatagccaaaccaagctcactttcttgatcggtcccccctcctcagtccttctcagttagaataaaagtcagatgagagttgattaaatatctaacattaaaacacttaggcttaaaaaatcctcctgcaatgatgtaataaacaagacaggatgtatttgaaattcactgaagcataaaactaaattaagtagataagtgcatatttttaatttgaagctacgtaaagactgctatt

SEQ ID NO: 905297 - DNA, 544 bp, Homo sapiens
atcagcagcagaatggataaataaataatggcatagtcacacagtgaaatactacatagtcatggtagtgaatgaaccacatctacatacaacagcatgaatgcttctgaaacataatgtgaaatgaaagatgtyagccatgaatgcatatgtaccatatgatgacatttgtagaaaatttaataaggggcataactaatctatgatgtagtggttacccttgggggaggagagactgaatatggacttctgggtttctccttatattctgaatcttgatctgaagactggtttcatggtatgttcatgtcaaaaatatcaagttgtacactcctgatttgagtactttcctgcatgcttttacgctttcaaaaaatttacaagcaacaacaaacaaccccagcacaattgttaatgagcagcatactttccaggctctatgaaggaactaggaaaaatatgacaagctttagcctccagaaacttatattcaagtaggagagatgagtataaaaagcaaaaccatatcattttatgtaataag

SEQ ID NO: 905298 - DNA, 577 bp, Homo sapiens
tgatgatcatcctgctttatttccccatctgcaagatgagaataataattatccctttgaaaatatcatatggtcaaattagttaatgttggacaagcatttcaaaatgaaactacctaataatttattagtggctccactggtgtgcaatttgagaatgaagtctgcgtttgaggaattggcatttgcattaattcatgttttcccttaaattcattacagaggtctagtctgaattctctcggctgggtgccagctgtgcccatctgtggcacatggtctcgtggccttttcctccagaagtcttgtttgagtaatcagaagtcatgtcctaaaagggaaactgagcaaatgaaattgctcatgtacttctcttaaatggaatcacttgtttgctttttaattaagatgagacttttgattaaagcaaaaatctggtggcattttattttctactctgtgcccctcgagatccattgcttgaccctgaaatgaatgatctcarttatatcttaaatgacatagtgaattaactgtatttcatgtgccagcatttccttcatgttacttagataat

SEQ ID NO: 905299 - DNA, 537 bp, Homo sapiens
tacctgaagggttttctcaccctctttttattatggcttgtttctactcacaccttgagtagcaactgcactattaagttcacagatraaatctcatttgaatacagtcttgtctccctatttcctcttaatttatttttttttacagagatcaatataatttgcaattatttcaatattaatttctgttctttgccctttaaatattaacattatattttattgagggcctactatgtgcctgacattgctttaaatcctttttataactcaatgcattcaatcatgcaaaaaccttataaagcaattattgtcaatcttatttgcaagtgaagagagtaaagtttagacagattgtgatatgctcacaatttaatagttactaagcagctaactacagaattgagttgtatgttaattgtctatatgttatagatggtagtatatacacaaactttatattctgtgaagaagggatagaatcagctttattctttattttattaatagttcctaccatgctatccagtatatact

SEQ ID NO: 905300 - DNA, 608 bp, Homo sapiens
aatgacagttttagcatagcttgtctctgcaacttctggctccatgattccatggcaccctatcttcatgaacctgctgataaatctaatttaaatcttcttcatgatggtacttaatcagaagaaaaaaatgaatctcattttacacagaaaacagtaatgaagaaataggcaaataataagaacactcaaaattttgatcccatttttttaaaaaaaatcgatccatatcagtaaacatttgcaggtgaaaagtaactagtgctcaaataccatcttttcatgaattaatcatggctgcctttgcacagtagtagactgttcagtgcttagttaaggccccagctagttctcgctcacagactctattcttgagagtacaaccgattatttgaattgaaattaccaatcccaaggtgcctaaatgagcaagaagttatgaatattatagggagattttcttgtcttccaagtctgctctgaatttagaaytttattgcaggttcagagagcactgagacaatgccatgttcagcccactgggaaggaggaaaatgaataagaagcaagtgaagattccaaagggagcaataaacaaacctgtccca

SEQ ID NO: 905301 - DNA, 570 bp, Homo sapiens
agcacctgaggtagatgaaatcaggactctgtccaataaaatgcaataatggcatttagagtcacatatattgccatatgtgttccttgaatatgtcgatgttgcgatttgtaaaatagcacagtggttaagctggaatctctagcttaagttgtctctaggtttaaatgtccacatctaccacactagccgcatgaatatttcaagttacttacatatttctgtgcctcagttgctttataagttgggaaaataagaatagggcttttagctatatctataataccacatttcctaatgcaatgcactaatttttccagatgatttgaatttcctactccttaattgctgctaatgtttgagtgctttaagcattataggcatagccctttaatgaaagtttaaagtgcacactagctttaaaaacttctcggctgggcgcacggctcacgcctgtaatcccagcactttgggaggcmgaggcaggtggatcacaaggtcaagagattgagaccatcctggccaacatggtaaaaccccatctctactaaaaacacaaaaattagccgg

SEQ ID NO: 905302 - DNA, 419 bp, Homo sapiens
ttttgagtgagtttcttaatcctgagttctagtttgattgcactgtggtctgagagagagtttgttataatttctgttcttttacattttctgaggagtgctttacttccaactatgtggtcaattttggaataagtgcaatgtggtgccgagaagaatgtatattctgttgatttcgggtggagagttctgtagatgtctattaggtccgcttggtgcagagctgagttcaattcctggatattcttgttaactttctgtctcattgatctgtctgaaaatcagagcacctcttctcctccaaagcaacacagctcctcatcagcaacggaataaagctagacggagaatgactttgatgagttgagagaagaakgcttcagacactcggtaataacaaacttctctgagctaaagga

SEQ ID NO: 905303 - DNA, 551 bp, Homo sapiens
ggtggaggttgcagtgagccgagattgtgacactcaactccacccttggtgacagagtgaaaccctgtctcaaaaaaaaaaaaaaaaaatgtggtacgtatacacaacaaaatacgatacagacttaaagaggaagttatgtaatttgccacaacatagaataacccaaataagccaggcgcagagacaaataccatatgttctcacttacatatggaatctaaaacaatcaaattcatagaagcaaagaacagaatggtgattatcagaggctggggagtggggtaatgggaagacaatagttaaaggatacaatgttttagataggagaaataaatgacaagtgtttaaggtgccatatatgttaatcaacttcaattatttgaaattgtatacatatatcagagcatcactttgtaccccatgaatttttamaagcataatttatcaatagtcaatagaaaataattaattaaatatcagtgtaaaaataaaacatttagataaaaattcagtgaatctgcttttggaaaatattttttaatacaaaa

SEQ ID NO: 905304 - DNA, 643 bp, Homo sapiens
gtagatggctgccttttgctggtatcttcatacagtcttctccctgtgtgtgtacacagccagccctccacatctgtgagatctatatccacacattcaatcaactgcagatcaaaatgttcaaaaaagataacaaataacaataaaataatacaataagttttacaaagaaatagcaacgcaacaaaacactatacaacaatataatacaaataaaaaactacagtataacaactatcacatttacattgtattaggtattataagtaatctagaaatgtacaagaagatgtggataggttatatgcaaatactatgccatttcataaaaggaacttgagcatctgtggatttctcagagggtcctgaaaccacagcctcatggataccaagaaatgactgtatttgttccctaatcccatctttctataaggatacaagtcatataggattagggctcactctaaagcttccatcaatcttagtcacctctttaaagatcttatctccaaatacagtcatatrctgagatgagacgtcaatatatgaattttgggggtccacaattgagcccacaaggccatataatatgtcactatgaatctactagaaaatatagagttcatgatataaaataatttat

SEQ ID NO: 905305 - DNA, 581 bp, Homo sapiens
tgcaacctcaccagcatctgttgtttcttgactttttaatagtcaccaatctgactggcaggagatggtatctcattttgtttttgatttgcacttctctaatgatcagtgatgttgagcattttttataggtttgttgaccacattaatgtcttttgagaagtgcctattcatataccttgcccactttttaatgggttcattttttgtttcttgtaaatttgtttaagttccttgtagatacttgatattagacctttgtcagatggacagattgcaaaaattttctcccactttgtaggttgcctgtcagctctgatgatagtttcttttgctgtgcaaaagctctttagtttaattagatcccacacatagatggagttggaaaccattatcctcagcaaactaatgcaggaacagaaaatcaaacaccaaatgttttcacttataagtgggagctgaacagtgagaacacatrgacacagggaggggaacaacacacgctggggcctgttgtggggtgcggggtcaggggagggagagcattaggaaaaatagctaatgtattctggcctcaatac

SEQ ID NO: 905306 - DNA, 656 bp, Homo sapiens
gggatttccatcctctgtccccgccctggrctgcacttgccagtgactaatgggtccaggctgtgaaagcccagcatcctgccctcaggtggagacacgctctgaggtgtaagttaacacttcagagctctcctggctgaagctaccctctgaggaacatggcctggcttctttgatatcttttcctgtttcgccaactccctcaccgggttctcccagaagcactttcttaagaaatcacttgcacgggaatgctcatgtcggtcggcttctaggggagctggcctgagacaccccctttccacagtaatgtcgtttgtatccacccattgccaggcagccttttgtgtcagtgatgctggaagccacctctggtgtgtgatctgaaagacccagggctccataagctcttcctggttgctgctgctgtgcctgaaaacccacctttgagattcgttcccttggaatgtgtctctcacttctcttaaaatgcaggtgcttctgaggtcaggagatcaagaccatcctggctaacacagtgaaaccccgtctctactaaaaatacaaaaaaaaaaaaaaaaaaattagccgggcgtggtggtgggcgcctgtagtcccagctactcgggaggctgaggcaggagaatgacgtggac

SEQ ID NO: 905307 - DNA, 597 bp, Homo sapiens
ttccacctttaaaaagcatttcatgaagaaaactaagccacaaattcagtaattcagtagttctgggtgggaagtggggaaaagaacaagtttggagggagtacacccaggagttgtcagcactgtattgaacaggagtgttcattcaatgaaagcttgcttagtgtcatatcaacctactcccatttttaacagtagtctagttttcatccagcctccacccctccctgacgtagcccacatgctttggcagaagataactccatctcccccaccccctttgcctcattatttgttcaagtaacctagattcatgccaaccaacacttgaaatgctgtcccatcaccatggacaacctatgtcatcaaagaagcagaaggaggggtctgtgattctactttgtctaggaagtttttctcattctaatccatggcttgcaatacatcttagtgtcattcaccttgttttgatttttccactcagtgatatacaggagtgctgtagtgccacatcagtgcatatgcagtgggatattcggctctgtggcaytgccccttctttaggtggcatgttacaaaaatgagccaaagatgatg

SEQ ID NO: 905308 - DNA, 658 bp, Homo sapiens
ctgggaggccttaggaaacttacaatcatgacagaaggtgaagcagaaacaagcaccttgttaacatggtggcaggagaaagagagagaaagagtgaaggaggaagtgytacacatttttaaaccatcagatctcatgagaactcactcaatatcatgagaacagcaaggggaaaatctgctcccatgatccaatcacctcccaccaggcctctcctccaattcgacatgagatttgggaggggacacaaagccaaaccatatcacaagcttttaaaaagtaacttataaatgatataaatgtatgtgtagaaaacaaaagaatttacagacaaagtgttagaatcagtaattttaaaagctaaggtcctgaaattattgtgacagaggaagcagatagcctaacatgtatattttattatgttttattgtatttttaattgacagataataattctatttatggggtataatatgttttgatacacgtatacattatggaatgatcaaatcaggctagttagcatatctcacttccaatatttatcatttctttgtgatgaaaacatttaaaattctcttttagctattttgaaacatacaatatgctattattaattatggtccatgctggtcaatggattgccagaacttattcc

SEQ ID NO: 905309 - DNA, 668 bp, Homo sapiens
tgtggtggcacacacctgtagtctcagctatttgggaggccgaggtgggaggatggcttgagcctggaaggtagaggttgcagtgagcccagatcgcaccayggtactccagcctgggcaacaaagccagaccttgtccccgtccacttacccccaaaaaactgtggttctgaaccacagcaactgagccgagcacaatccttctgtctctctaagacccagtctacactgagtagttctgttgatggcactgcttgatgggcctgtaactgccacaagctctggaaaaaccaggtccacagcttctcagagccttttagcttcactgtgaaaggagcaagagcacaccagtgaccaggtgttcataatttctctgcaaatgtcagctctcagtttccctcctaacagaagcacctgaagcagcaggctagctagcctgaagaggaaggaatagagtttagtcttataattgggacctatatattaagctgaataatttggcattcagtgttaagcatttgactcattcctgtaaccaattgtgagtgccctgattatgtataaactccttaaagtaaatgtgttttagttcgtggcccagtgtgtacacatggctgtaattaacaatattttgcacagccaaaccaaaagtttgcagattttccttt

SEQ ID NO: 905310 - DNA, 600 bp, Homo sapiens
tacccataataatggaaaataggaagcaaataggagttgtgtcctttacaacttctaaatctgtcattgccacacttcccccagggctgttaaggcatcagaccaactgctcctcctattcacatccctgcagatggccaggaaaggagctaatagggtggttacaggggcaagatggtccaatccttgttttatcagactcctagtaaccacagcttgatgactgtcctgctataggacagactgcatttgcccaggtcctgccagctgtgcacccctccatggtgccacatggcaggtcagaagtgccaatgaggtggcatgaggctcctgccacaccacctttcctcaaagccttatgtcttcatcatggaaaccttgtttatccattaccaagccaagagagaggattactgagaagaaggcagccaaaaacagggcactccctttggaacccagcgggtttctccgatcccaagcacaccttagtagttagcacagtgtgaatgaagacamccaaatgttcatctgtgaatgctaataatgaatggttacaactacaggatcagcttgttcttccttcagggacatggaggcaga

SEQ ID NO: 905311 - DNA, 627 bp, Homo sapiens
ttgtgccccactaccacatatataaaataaagtagaaatacaatgaattttatatagataaaacacagcagaggaaagaaaccccacagaatagaaagatgaaaccagatgctctagttcagagtccagaaagaagaaagtaagggcaagtttcaggaaagacagacgttgactaagatagaatcagccaggaaaagaggaaggcagaactctgagaagtcagcagtgtgtacaataggatacttgctactttatgtctctgccttcctctacttcacgtgccacgtgccacttgctggtccccaccattgtcctgagtcttctgtgcttggttaagaattttctctagctacaatctggccactgaggaaggacgcatcctgcaaacacctcagaaccgtgttttgctaggaagctttaccactcacaaccctgtggcttttaagataggtaggtacatagatagatagatagatagatagatagatagatagatagatagatagataggataaatagataacagatgaatagatagatagtagatagataagtgtatayatcctattctgtaaactctttcatagtaaaattctatgcataattttcatgatcacagaaactaat

SEQ ID NO: 905312 - DNA, 591 bp, Homo sapiens
cacatgggttggcatagtgtgctcagtttgattccagggatatctcaggcttatttaacaatgytacccttagaacaacattagcatactaatctatactactggccgcgaaccacattccttggtatcttttaactggatggattgagactattgccccagatagccaggataatatttagcatggtggcctaggattttaaaagggcagtatcaggggggaaagtcatggatttaaatcatttttcttttccagggttcttaccaacaacacacccagtaaaaaaaaaaaaaaaaaaaaatcatcttctgaagtttaaatatctctttcttttctcttgcttgtgctggattatcactcctgtgcacttcactgagcttgaaaattgcaaaagaaagacacagcttccccaccccccagctcctaaactactctgtttatagtcagtttgcctccctggatcttatgttttaacacatgctgtagtgttcagattgcaaacacagcgaagggatgtttaaatcctaaaaacaaactgttttcattgcaatgtgcaaaacagcattccatgaagacatttcaattaatat

SEQ ID NO: 905313 - DNA, 494 bp, Homo sapiens
acttctattcttttatctcttttatttgtgataaattttcaatattaatttacctaaaggaggtatcttatttgtaattgaaatctcaaccatagcagtaagrtgtggatttattctgaggatgatacaatggcctaaattaatgtggcaatggattccagcagtttttctgttttaagtttgaaaaactttgtaagtcttacttcttgatgatcagagaggttgttgtgggttttgtgtggcacttctctcccttaagggatctgactgatagaatcgacgtttaaagaaaagtacatgtgtgtgtatatacatattatatataatataatatatattatatgttatatagtatgtattatatataatataatatatatgttatatcgtatgtattatatataatatatattatatgttatatatattatgtattatatatattatatacatgataataatttgcaaggagtgtcaacataataaagctttag

SEQ ID NO: 905314 - DNA, 494 bp, Homo sapiens
acttctattcttttatctcttttatttgtgataaattttcaatattaatttacctaaaggaggtatcttatttgtaattgaaatctcaaccatagcagtaaggtgtggatttattctgaggatgatamaatggcctaaattaatgtggcaatggattccagcagtttttctgttttaagtttgaaaaactttgtaagtcttacttcttgatgatcagagaggttgttgtgggttttgtgtggcacttctctcccttaagggatctgactgatagaatcgacgtttaaagaaaagtacatgtgtgtgtatatacatattatatataatataatatatattatatgttatatagtatgtattatatataatataatatatatgttatatcgtatgtattatatataatatatattatatgttatatatattatgtattatatatattatatacatgataataatttgcaaggagtgtcaacataataaagctttag

SEQ ID NO: 905315 - DNA, 576 bp, Homo sapiens
tcaaaatagcgagcattaaaacattaaaatggcatttrtggatttaaggaactcctgttatatttagcagatctcacatctaaatttaaactaccacatacctttacaaatcatttaacttctcttgaccctagattccctatatatcaaaataaatattttttcacccacatggcataaatataactattaaagaaatagagatcatgtaattaaagctgcattctcctgagatgtactcagcacttaacatgagcatctggggctaatcaccagatacatctcttatcacctctgtcgccctcccccagccgcttcccccactccccgccccaagtgctgctatgtagtatttatttgcaaaatatgaacatatgtcacacttaaaatttatattctcctcactttgttgaagacagaccaatatatgttgtcactgatgcaattttcaagaggctcagaaatatagaattctgtgtatgactgtctgatttcattttgttctaaacagcaactgagactctttacacgtgagaagtattttgccaccaggaggagatgaccctgaagattaac

SEQ ID NO: 905316 - DNA, 575 bp, Homo sapiens
tataaaataaaacatcaaagtaatttaggataagattaatacatttcaatgttattttttctaaaagtttaaacagcaacaaagtgaaaattaattagagactatataatgaattacagtgtattctgtaagcagataatttattttaataaaaactccaacaaaacaaaactaacaaaagtgggcaaattattttaaacacaaacaaatattgcctaaaaataaaagttctcaaacctattcataatttgagaaaggtgattggatgtgagatgagaaatctatttaaataattttacccaatacataggcagtaaaaattaattttttgaggcaggttcttgctctgtcacccaggctgaagtgcggtggcatgatctcagctcactgaaacctcagcctcccaagttcaagtgattcttgtgcctaagcttcccaaatagctgcaactactggtgtgcaccaccacatcaggctaatttttgcattttcttttccatagagatgggttttgccatgttggccasgctggtcttgaactcctggcctcaagtgatctgccaacctcagcctcc

SEQ ID NO: 905317 - DNA, 654 bp, Homo sapiens
caatggcccctttcactgcggacacttagataggcctcttagggagatctaactgttggttttccaaaacagtgacccctgtcagcaggaagcacttaaaagtggtttttgttctcatccttatccttattctaacttcagttagatgtatttctttagagggggaaataacacagttaggaaacagccaagggtcctgggtgaaaccccaccttcaagcctaaaacctcctgaaggctgaaaaatcagactgctggtcccagatgaggcctggctttttccaactgattatgtctgaataatgtccacttgcacactgggggaagggactggagccatgggaagttcacaccttgtgcagggaggaggaatctggccacttcagttcttgtatgatggtctggtgttcagcaatctgggaggtgggggcctgtaaacaaattttttctttacttcttttttttctttttacccaatcgactttacttttcatccttcagagtgtccctgacctaatctttccttgtcatgtgacaagaacccaattttgctaaagttctgcaacatgaggatttggaaccctcgtttagaataagctgaggatatgcatgtargtgtctttctggcttctcttatctgtttcaacgtgtattt

SEQ ID NO: 905318 - DNA, 581 bp, Homo sapiens
tcgcttgaacccgggaggtggaggttgccgtgagccaagattgtgccactgcactccagcctggacaacagagcgagaccccatctcaaaaaaaaaaaaaattaaatgtgcctatgataatagttgatggatgggagtatatagaagtttttgacccctgtaaaggcaatttagtaaggtggcaaaatagtaactttgagttttaggcaacagttcaaatatctttgttttgggaaaagacaactaggatcatgttatatttggtgtatttatgtaaagccctccttatgtacagagtaacttcacttaccaattacagagctccgtttcctgggtgggcctcgtaaaacagacagataactttctaccagggtcctgagacaaacctgcctacctataaagagacaattccactgcatacatcaaggcagctagttccagatacagaccacgcccctgctggaaagagttctgtattaattaggcccagaggaagcttaccattgycacctgatattttaccctatgcttctccccaattattccaaaacaaaaggtcaaaagggaattcaatcataagc

SEQ ID NO: 905319 - DNA, 593 bp, Homo sapiens
aattaaaagggatctccaacagcatttgaaaagcatttagtggccatctctgtagcccttatgttggcatcaggagattctgagctcatgttttttatatttccaattcttgaagaaggtgcttatcaactgaaagaaaaatcctagttgtcttcttaccctttaaaaaagaattatggtgaaaatagcaaagataatattcctagaactccctctttctaccaaaataataaatcagattgtatgtccacatcactaggaaagtgagagatgagtagcaccatagagacttgaaagatgaatttatcttaaccgttttagccaattagcttaatgagtatttgaagagtaaatttttataagcttaatcaggacatgactccaaattataattactcttccaggtatagtctcattactagagcaatttaattcagctcaggaattctttgtattccttaggaagacatatgaatgagaaagagttaaaatcaatcttacaaaaaatatgtgattcatgatgcatacakcagggcatctactctaaagtgaagggtaagttacagcaccctcaccttgtacaattgagaaag

SEQ ID NO: 905320 - DNA, 639 bp, Homo sapiens
gtcagacccatctagttgaactcctgtttaggacttgaatcttaaggaagtgacaaaagttgccagacaatgtgaatgtatttatggcacaattaatagtttcaaagattcagtggcagaggcaactgaagcagcatcttaaatggaagcttctcttgtgtaaccatttctggagtattaatgattttttgcttgctacctgttattaagcattgcgatctggcttataggtgggcttataggtatcttcacaataaatccattttttttctttaaaaagcctaaattgaccccagttgtttgtaacaaatcaatcttactgtcaccaaaaccaataccaagaatgggactcaggactcagactcttatagaaatagaaaaaatgtaggatatagtatctgttatatgaactaaagtcagtgaagatttcagtattccataataaagataccttgcatgtgaaggaaaaaccattaactaaattattcactggggtttacctgaagacaagactatgggactgtagttacacctgaagagaagaatatgctacggtttgagttgtacactccaaggaaagtatgttgaagtccttacccccagtacctcrgaatgtgaactttcttagaaacagggtta

SEQ ID NO: 905321 - DNA, 604 bp, Homo sapiens
tcaccaaagaagaggcaccaaacaagcaagtagacaaaattacrgacaagttgatattgtccagccttccacatcagttattccatgacagacatgattacacttgacaggatacacataggtctgttagcgtggactccctccagtcggagccactgtagttactactaattctgaatgtcccatctgctaaccacagagaccaatgccttgcccctaatatggtactacttaaatttcatcaaaattaaaatttgtttctctctgaaaggtactatattaagaaaatgaagaggatatccacagactaggagaaaatattctctatatatctgacaatggacttggatccagaataatatgaaaaaattattttaaggctaaatatgcatttattttataaaataacattataatctgtacttttatattatactttaaaaaatctgctgttattgtgattattttacaattatttaaaacaacctcaattactgcataatattaaatcaaaagaacataagttgaccacttttctactgcacattgagttttctcccattttaatttatatttacttgtgcaatgagttcataaaaatgtc

SEQ ID NO: 905322 - DNA, 568 bp, Homo sapiens
gagcagtttgggtcaagaacctacataatccaagttatataatgcaatgtaagtattttgcttaagttgtttagackcctgtgattctgtaagcctaaccacagaaagactaatatttatctctctggttaaaccttagtgccgaaaatggccgtccaacttagatgaaacaatcatttcaagcgtgggtcttctttggcctctacttagataatgcatttaaagatatgatgaactcatatatcagagtcggatgtttcaaaaataggcatgctgtagttaaacaataaaactctatgtggtaatggctagaggagaaattcaatattttatcacaggaaatataattaagtcaatgacatctgtgcagtgcaagagattttctcagtttagatttaacttggaagccgttctgcttttgccaaaattgaggagctataaaaacctttctaccatatagcttaactcagtgggaggccaagcccgtgtctcagaggagagaaatgaggaaggagtccagaagcaagcattttctagagatcatgctttggatgaaacctagcctgct

SEQ ID NO: 905323 - DNA, 520 bp, Homo sapiens
tttgtggttgtcttcacagtaaacatcctgatactaaggaatctagagtagacaggataagtaaaagataatccacaaaagtctaaaagtagagcttctaaggagtacacaaatgctagattatgttttttttctcaagagaaggacagcacatttattattagctgctgaaacccaaccgttttctaaaactttccatattaatgacagctcttaagaattattcccattaagaggttaggagtcattacactttattatcttccatgtcaacaaatattattacgaacaagtgaattaaatattcaaggcatttaatgcatttatttacaaatcccaagaatgaatttgttcacgtagtttgtgcctcatcaagcattaaaaagccttataccatwtgcctttacagcttgacaagtctgtcaacctaacttcacccatgtgcatgaataggtaaatccacaaagacacaaggtaagctaaaaaaatttttggttgttttcaaatgactgcactaatc

SEQ ID NO: 905324 - DNA, 581 bp, Homo sapiens
atgggtataaaaatacagttagatagaagaaataagttctggtgttcattagcacagtaggatgactacacttaacaataatttattatacatttcaaaatagctagaagatttggaatgttcccaacacaaataaatgataaatgtttaaggtgatggatatctcaattaccctgatttgatcattatatgttgtatgcttgtatcaaaatatcacatgtactccatcagtctgcacagtgtatgaataaaaatgctaatttaagacatagatgtatagatagatataggtaaacatctaactgaacttgaagctgtaagacctttttaggcataaaatcaaaattaaaaaccagggagaaaaagtatgatggatttgactatgtacatagtaaaatttttgttgtgtcagaaaattaatagacaaattataaatagaaaatttttgaaacacrtatggcagacaaagggctaacaacctttatgttgaaagaggtctcactaatagttagaaaaatgtaaaccacccagtataacggaaagtaaagtacatgaggtggcaataaatatactaaagaaaa

SEQ ID NO: 905325 - DNA, 620 bp, Homo sapiens
actctgaaggagggcaaagtctcctcatctactatacacacaccacttcccacctgaaacagacatcctgattgcatggctatgcaggagaaaatattaataggcacagttttacttctctaagtgattctttcctacataactaatgacctcaatggtcataatgtccttatttactaatttttctttttcctttttttgggggtggggggagatggagtctcactctgttgcctaggctggaaggcagtgacacgatctcggcttgctgcaacttcctcctcccaggtttaagcaattctcctgcctcagcctcctgagtagctgggactacaggtgtgcaccactgcacccagctaattttttcttgtatttttagtagagatgggttttcactgtgttgggcaggctggtcttgaactcccaacctcaggtgttccccctgccccagcctcccaaagtgctaggattataagcgtaaactaccgtgcccagcayttatttacaaatttttctaacaaagcccagtgtgcatactttcctttgttggttgccatatcttcaaaaagataatccactacttgacaggctgaggctagaagattgagctgaggagatca

SEQ ID NO: 905326 - DNA, 688 bp, Homo sapiens
cctcataggacttcagtcagttgttarcatctttattccatttctgtctatggtttacaatccaggacagcgttgatgtttatattacagaccagtctcctctacttactttctttatgttactttgtttatctcctctacggataatttatttatcatctaccatatgttaggtcttggaaatacaaaggtgaataatattaagattctctcttcaaataacttataagccaatggagtaaaccagcagttataataattgcaaaatgtgctgtggttatatataggaaaggcaggtaactctggcttctgaaaagtggtagcacctggactgagtctcggatgacaggtagaaattaaccaagaaagtagcatgtgcaacagcatgagatcaagggaaaccacagcacattgaggaagttgtacgtggttcttcacagataggtacagacattgcgaaatgagatgagcagactagataagttgggcaggaccaggtgagagcgttacacctctgcgtcatcctaaggagtttgacgttaacttgaacactctgcatttctataaaagaaaacgttctctgataacacaactgaaaatatatcaaaggcaaagcaagaaagcaggcagaaagacaggttagaggaagcttgttgtagtgctttagaaaaaaaccaataccttaact

SEQ ID NO: 905327 - DNA, 628 bp, Homo sapiens
tggatgaattcctcatgaaatcttcagggaggaagatgtattctataatatgtgtagaaaaatagtacataatattattaactaaatgcttaaactacttttctcaaaagtgaaataacaagacagatataaatagattgatatatgcatacatacatgcataagtagaaaaaaaatgtgtgcatgcttgtctctgcatgcccaaattatatttatttttcttgttccacagttcaggatctgccaacttttcctcagttggctaaattactttcataaccagtaaacatatgttatttaagacagaaaaaagctatttgatagatttactcattgtattttaaaaatgtattttaattttatagcacctctataagaatcagtacacctccacctggaagctaggacaaatatctcaagtatcagggctctgggtggaaaccccaccaaacacccaaagtagcgggcctcttctacacacaccctttcttctcctaaataggtaagaaccgtctagcytgatgaaaattaccttattcccttcagagaatttcaaattcaccagctattattaatctttatttaccctccgtaagtgttctaaatcaaatcgataagtcacattctt

SEQ ID NO: 905328 - DNA, 597 bp, Homo sapiens
caaatcttgcagaattaagcagaaccccyttttttttttttttttttttttttttttacttttttgatacagtgtttcactctgtcacccagaatggagtgcagtcatgtgatcttggcacactgcaacctctgcttcccaggctcaagtgattctcccacttcagccccctcaggtgcacactactgtgcctggctaatttttcttttctctatttttaattttttgtagagatgggttaaatcatattgcccaggctggccttcttttcctaagttcaagtgatcctcctgcttcaggctcccaaagtgctgagattacaggcgtgagcaactgtgcccagcccactgtaattttatggggaccaaacttctggacatgtggagacgggaaggaaaaggatctgaaaataagataaaaaacataaattaattattcagtaagagggaatagaagaagacaggcctggaataatctagtctcaccacctggctgtcttgaccagcagttattctagtaaacctactgccatgagcaaagagaaggcctttatcaatatcatcatcattggccatgtggactctggcaagtccacca

SEQ ID NO: 905329 - DNA, 654 bp, Homo sapiens
tctccctccttccaccaccttccaccctctgataggccccagtgtctattgtttccctctatgtgtccatgtggttctcatcatttggctcctacttataagtgagaatgtgtggtatttagttttctgttcctgcgttagtttgctaaggatgatggcctccagctccatccacattcctgcaaagcacatgatctcattcttttttatgactgcatagtattccatggtgtatatgttccacattttctttatccagtctaccactgatggatatttacgttgattccatgtctttgctattgtgaatagtgctgcaatgaacacacacatgcatgtgtctttatgatggaatgatttatattcctttgggtatatacccagtaatgggattgctgaatcaaatggtagttctatgtttagctctttgagaaattgccacaatgctttccacaatggttgaactaatttacactcccaccaacagtgtacaagcaattatttttctctacaatcttaccagcgactgttattttgagttttcaataatggccattctgactggtgtgagatggtttcttactgtagttttgatttgcatttctctaatgatcagtgatgttgarctttttctcatatgcttattggccacat

SEQ ID NO: 905330 - DNA, 573 bp, Homo sapiens
agttcaggtcctaactatctttgttaattttctgctttgatgatctgtctgataatgtaagtggaatgttgaaatctcccactattactgtgcgggartctgagtctcttcataggtctctaagaacttgctttatgaatatggatgctcctgtgtagagtacatatatatttagaatcatgaggtcttcttgttgaattcaaacctttaccatcatgtaatgccctttgttgtctttttttgatctttgctggattaaagtctattttgtctgaacataggtttgcaactcttacttttttgtgatttccatttgcttggtagattttcctccatccctttattttgagcctatgggtgtttttgcatgtgagatggtcccttgaagacagcacactcttaggtcttgcttttttatccagcttgccactctgtgccttttaaatgggacatttagctcatttacattcaaggttaatattgatatgggtggatttgatcctgtcattatgttgttagctggttattatgctggcttgtttgcgtggttgtttcatagtatcagtgatcagt

SEQ ID NO: 905331 - DNA, 573 bp, Homo sapiens
agttcaggtcctaactatctttgttaattttctgctttgatgatctgtctgataatgtaagtggaatgttgaaatctcccactattactgtgcgggaatctgrgtctcttcataggtctctaagaacttgctttatgaatatggatgctcctgtgtagagtacatatatatttagaatcatgaggtcttcttgttgaattcaaacctttaccatcatgtaatgccctttgttgtctttttttgatctttgctggattaaagtctattttgtctgaacataggtttgcaactcttacttttttgtgatttccatttgcttggtagattttcctccatccctttattttgagcctatgggtgtttttgcatgtgagatggtcccttgaagacagcacactcttaggtcttgcttttttatccagcttgccactctgtgccttttaaatgggacatttagctcatttacattcaaggttaatattgatatgggtggatttgatcctgtcattatgttgttagctggttattatgctggcttgtttgcgtggttgtttcatagtatcagtgatcagt

SEQ ID NO: 905332 - DNA, 573 bp, Homo sapiens
agttcaggtcctaactatctttgttaattttctgctttgatgatctgtctgataatgtaagtggaatgttgaaatctcccactattactgtgcgggaatctgagtctcttcataggtctcyaagaacttgctttatgaatatggatgctcctgtgtagagtacatatatatttagaatcatgaggtcttcttgttgaattcaaacctttaccatcatgtaatgccctttgttgtctttttttgatctttgctggattaaagtctattttgtctgaacataggtttgcaactcttacttttttgtgatttccatttgcttggtagattttcctccatccctttattttgagcctatgggtgtttttgcatgtgagatggtcccttgaagacagcacactcttaggtcttgcttttttatccagcttgccactctgtgccttttaaatgggacatttagctcatttacattcaaggttaatattgatatgggtggatttgatcctgtcattatgttgttagctggttattatgctggcttgtttgcgtggttgtttcatagtatcagtgatcagt

SEQ ID NO: 905333 - DNA, 667 bp, Homo sapiens
ttttccacctccatcctcagtttccaaaaagattgttctggagagtgagacttagctggttgtttaatttattttcttcattgtcttttgttttttgagacaggctcttgatctgtcacccaggctggagtgcagtggtgcaatcacagcccacagtgccttgacctcccaggctcaggaaatcttcccacctcagtcttcagagtagctgggactacaggggtcccagcaccactgcactcagctaattaaatctttttttgagaaaaaaattttgaggggtctcactgcattgcccagactggtctcaatctcctggactcaagtgatcctccgaccttggcctcccaaagtgctgggattacaggtgtgagccactgcacctggcagggtgtttaatttctgtatgtccacgggcaagcatctgctttctctttacttggtaattacttcttgtctagaagtagaggagctgtatctagcccccatctgatgttctattcggctgttctactttaaatttccttcccctcttttcttgaccggcctttgttcttttcaccaatcaaagmtgagccctttattgcctagaaaaccccatcaaccacccctgcccctggactacagcaacttacaattggcatgaaacaatttcgttggcaatgac

SEQ ID NO: 905334 - DNA, 651 bp, Homo sapiens
aatatttgcaatgaattaattggctaatttctcatcaatggccttatgacaaagaggaagaattgagcaggttgagcaacgccgcttcaggggcgctgtgttcagtgacatggtgacagggtgggacactgactttggcacccccagaggttgttttccaataaatgtacttgctacatctttcaatcctataagaaccctaggaagagaaagtagtatgtcactaaaaaatctcatctttatagctatcacgtttgttctctgcattgtgacctttgaattaatcccaattgttgtttttgtttttgtttgacagagtctcactctgtcacctaggctggagtgcagtggtgcaatctcagctcactgcaacctctagcctcccaggttcaagcgattctcctgcctcagcctcctgagtagctgggactagaggtgtgcaccaccatgcctggctaatttttgtatttttagtagagatggggtttcaccatgttggctaggctggtctcaaactcctgacctcaagtgatctgcccaccttggcctcccrgagtgttgggattacaggtgtgagccacgagtttttttactagcatgggatttcgagtcagcctgacttacgctgagactcaagcatacagtagctag

SEQ ID NO: 905335 - DNA, 644 bp, Homo sapiens
ctggtgagacctggcaagttggtgtggggtagacttaaaatagatcaagcattgaayataaatgcaacttctagttagcttcatccattacggattaaggtgatcctttttttttccttactctagaagcctgaaagagaatgggtgaatgtttcctggagaaagatatcattcaaagccatctataatagtttaaaacatgatgcctgacacacagtgaaatgttatcaggtattctaagggtaaaaaaacaaaaggtttgaaaaacagataacatagtttagaagcaactcagatattgaaattttcaaacataaactttaatataattgtgattaatatgtcaagaatatgaatgatgagatggagaaatgcaccacattgctggggaaaatgtatacatatataacaatatatataaaactctgcatgtgtatttcaataatctggtcaatataatgtaaattttagaacaaaatacatgaatgccattaaattaaaaaataataggtttagaagtgtattagaataaaaggaagagattaccaatgcactggaaaactgtctagactgaaacacagagagaaagaaaactgatagataaacaaaaagaaaggcaagagacatatgggatgcataaaata

SEQ ID NO: 905336 - DNA, 631 bp, Homo sapiens
atttctacattctctactgttccattggtctatgtgtcagttattgtaccaagaccatgctgttttggttaggtagccttgcagtataatctgaagacaggtagtgtgatgcctccagctttgtttttgcttaggattttcttggctatttgcgctccttttaggttccatatgaattttaaaatagtttttttttctaagtctgtgaagaatgccaatggtagtttaatgggagtatcactgaatctataaattactttgggcaatatgaccattcttatgatattgattcttcttatccatgagcttgtaatgtttaccagttatatacccatagtaatataaatcattctattataaagatacatgcatgtgtatgttcattgaagcactattcacaatagcaaagacatggaatcaacctaaatgcccatcaatgatagaacagatgaagaaaatgtagtacatatacaccatggaatactatgcagccataaaaaagaacaagatcctgtcctttgcagggacatggatggaactgggagacattatcctcagcaaactaatgcaggaacagraaaacaaacaccacatgttctcacttacaagtgggagctgaatgatgaaaaca

SEQ ID NO: 905337 - DNA, 568 bp, Homo sapiens
tgagtatccacagggaagtagaaaaataataagactggttttccagtgagggttatggaaatcagtatcttcaacttaaagacacacattgtgaatgatttaagttttaatgaggtgcaagttagattgtgactctgaattacttcataagacagaagtgtagttaaagctttaatcacattagtttatttcactgtcaacaatcattttacaataccacagtgcatttaatagtggaaatgaaaacaacccagaagaaatacagtaccagagtcataagttcaaacttaaggactcacatgagtgagctaaaataaaactaaaatgtcacattttgaaaaccaatcagtgagtcagcccatcaggcactcaacatttctggaagacctactatgtggtaagaattgaacgaagatttttcttgtggagaatgaagggggagtttgaactgaggatggatctgattaaataaatatttctagaagatcacagataactttgcagtaacatgtagaatatattggaagaaggagatactagagcacagragccaattaggaaggcatga

SEQ ID NO: 905338 - DNA, 517 bp, Homo sapiens
aaaaaattaaatgcctactgtgttaggtactcaggacctgggaatttaaaaaggtgatgaagacgcattttctgccttaagttcacccttgaattatagtttcaagctaatcatttaattgaaaagcaattttatatttattcatttgctgtttaataaacaatttacctcgctttgggagaccaaggcaggcagatcacctgaggtcaggagttcaagactagccttgccaagatggcaaaaccgcatctctactaaaaatacaaaaattagctgggcatgtgcctgtaatcccagctactcgggaggctgaggcaggagaatcgcttgaacccggaaggcggaggttgcagtgcaccaagactgcaccactgcactccaacccgggcaacagagcaagactccatctcaaaaatatatatakacataaaaaataaacaatttacctgatgagccacacctatcatcacactttatacacagtaggtaatttaatcagtaagtaaattatccaaga

SEQ ID NO: 905339 - DNA, 597 bp, Homo sapiens
cctttaccagtatgcaatgcccttctytgtcttttttgatcttttttggtttaatgtctcttttgtatgaaattaggattgcaacctgtgctttttttcagttttccatttgcttggtagtgttttcatcatccctttgttttgagcctatgggtatcattgcatgggagatgggtctcttgaagacagcataccattgggccttgcttctttatccagcttgtcactctgtgccttttaattgggagcatttagcctatttacattcaagtttagtgttgatatgtgtgaattttatcctgtcattatgttgttagctgtttattataatgacatatttatgtggttgctttatagtctcactggtctgagtatttaattatgtttttgtagtggctgataatagtctttctttccatttttagtgcttctttcaggagttcttgttaggtaggtctggtggtaacagactccatcagcatttgcttgactgaaaataattttatttctcctttgcttatgaagcttgctttggccagatggagaatttttaggtggaattgctttttttaagaatgttgaatgtttatttcttct

SEQ ID NO: 905340 - DNA, 586 bp, Homo sapiens
gagtttatgatgaataaaatgatctctttttatgtgtgatattgagcatttttttcatatsattgttggctgtatgtatgtcttcttttgggaagtatctgatcatgtctttgcccactttttaatagcattgtttattttttcttgtaaatttgtttaagtttcttatatatgctaggtatcagacgtttggcagatggatagattacaaagattttcttccattctgtaagttgtttactttgttgatagtttcttttgccatacacaagctgtttagtttaattagacctcatttgtcaatatttgcttttgatgcaattgcttttggcatctttgtcataaaaccttcaccctcgcctatgccttgaatggtattgcttaggttttcttctagggtttttactgttttgggtctttaatcccttttgagttgatttttgtatatggtgtatggaaggaatccagtttcaattttcttcatatggctagcaagttctcccagaaccatttattaaacagggactcctttccccattgcttgtttttgtcaggtttttgaaaaatctggtgattgtaggtgtgc

SEQ ID NO: 905341 - DNA, 588 bp, Homo sapiens
attcatgaacactcttacacacactcatacacacgaatgtaaacacacaagtctcaggaatttctcaagatactggccatcactttttatcagtttatattatttgtagcatacttaataaaaactkaaatgtattagatacatttaataattattaaataagtgcaggtaaaatatctcataatatttttcaatataaaatttgtattagaaactgcatctggttcctccaaaactagaactagtgtgctgttttttgttgttgctaaatgaatataacacaattttggaatttgcactcctaagtttataagcactccaaattcatttagtgaagtgtcgctgttaataaatacatatatatttacatacaccaacacaaaatccaggtcagaaaatgcaatagatagggcagaattttttaaaacactttattttttatctttttgtcctgtggatattagccaataacagtttttaatagatgccataatagattttgacctcatttgtgttcaataagtacttgttgaatcaattaacaacggtaggaggcaaaaactagttttgtgaaagtttgtttttgaa

SEQ ID NO: 905342 - DNA, 555 bp, Homo sapiens
atcagattaaacagctctatttacctaaaaatatacatggcagtcaatcattaaaaagtcaaaatactttatcctttatgattggtaaggtgtgctataattgctgtaatacagtgwctttgtgccattttttgatatgaagtctcccagtttgtgaagtgtttttttttttgtatccacaataaacacttaacattctaagttgatcataaagtgggttttttatatgcacaataaacacttaacattctaagttgatctgattttatttttcactatatattattgtgtatatttatgcatatgtatacataaatctatgcaattatatataaaaataatatctaaattaaaatggtacctcttttctttctgcttcttctaaaagttacatatacatggttgtcaagagggctgacaagctctactctgttggtcctagatgacagtatgattttttgtgtgcttcatcttggtgatggtttccttgaaatgatgctccttctatgtacccagctcaagaattggtgcttagacccaagacaatcaaattta

SEQ ID NO: 905343 - DNA, 566 bp, Homo sapiens
gctcacttcaagaacgaagctgcagacyttactggtgagtgttacagcacttaaagctgttatgtgcagagttttttcctccagatgtttccagagtttcttccttctggcaggttcgtggtcttgctcacttctttaatgaagctgcggaccttactggtgagtgctacagcacttaaaggtgttatgtccagagtttctttcttcagatgtgtcaagagtttcttccttctggcagtttcgtggtcttcctcacttctagaatgtagctgcagaccttactggtgagttttacagctctttaaggtgttatgtccagagttttttccttcagatctgtccggagttttttcctactggtaggttcatggtcttggtcacgtcaagaatgaagctgcagaccttactgttgagttttaaagcacttaaaggtgttaggtccagagtttgttccttcagatgtgtccagagtttcttccttctggcaggttcatggtcttgctcacttcaagaatgaagctgcagaccttagtggtgagtgttacagcaattaaaggtggtatgtc

SEQ ID NO: 905344 - DNA, 622 bp, Homo sapiens
tttgtttttattgcatttgcttttgggatactggtcatgaaatccttgcctaagccaatgtctagaaaggtttttccagtgttatcttctggaatttttatagcttcaggtcttagatttacaaccttaatccatcttgagttgatttttgtgtaaggtaagagatgagaattcagttttattcccctccatgtggctagccaattatttcagcaccatttgttgaaagggtgttctttccccactttatgattttgtttgctttgttgaaaatcagttggctgtaagtatttgggtttatttctgggttccctcttctgttccattggtctatgtgtctgtttttacaccagtaccatgctattttgttgactatgaccttaccgtatagtttgaaatcaggcaatgttatgctgccaaatttgttctttttggttagtcttgctttggctatgcaggccattttttggttccatatgacttttaggattgttttttctaattctgtgaaaaatgatggtggtattttgatgggaattgcrtggaatttgtagattgcttttggcagtatggtcattttcacaatattgattctacccatccatgagcatgggatgtgttt

SEQ ID NO: 905345 - DNA, 617 bp, Homo sapiens
tgtaatttatgtctttttcccctccatgcctactaaaaattactttaactgtgaggtccttgtctttcctctctccttttttacttcccactttaattctcaatagaaaacctccctttagcataaagaaaatgcaaattttgtggggtaaatttttgctctctactgtttttatttcatgcatgattaccttgaggctttagtttacaagccctccaaaaagaaatattacacaccaaatgaaattaccaatagctccaggaatatgaagtgatgagagagcattttattccatacaatcttcaaaataactggtatccagaacaatacaacatgtgtcaagatgactcatgaaagtctctaatagaatggagaagaagcttgaaaatgaatgcagcagcatggtgtaaaattgtgcactatgaggtattaacacccttctggaaaatactatgaatcatgtttcaaactagtcattctcaaatgttatccatatcttccycttagagctatcatgacgtcctctgtccctcatttgccctcactgtccctcgaccagatgcaatctatcttcctagaattacagcacattcaaagatataaggtgtgtgaagaag

SEQ ID NO: 905346 - DNA, 269 bp, Homo sapiens
actagtatattcaacatctctctctctcctacataaataaaatcaattcagaattctatgttaaaaacacttattatttttattttttaattaaatataatattctgtcttattctaaaagagatttaaaatttgttgataaaatataaaataatcaacaagwtacatttaaagtattactaaaaaaagaaacaaaagatatatgggataacagatattagattcttcagcctagtctcagattttaatattataattatgtttaagga

SEQ ID NO: 905347 - DNA, 684 bp, Homo sapiens
taccagattgtacctcctgtaccttatgacattgytattgttcatttcatctctccacattctataattacccattttttgttactaaacagttatggatcaataagaataaaaaaagtttttaactttaatttattctttttcatttatttcttctttattgtgtatctgaatttctcacttgcatcattttctctccccttgaagaacttcctttagtatttcttgcaagacaggtcagctgacaatcacttaaattttgtttttctgagaaagttttctatttgctttctttgttaaaggaaatttcaatatatagaattgctttatccccctaaagtcatatgctgttgaatatattttcaaatacttatttgccatttttatatttcctttggtgacttatccatttatattgtttccccatttttaactgaattgtttgctttcttgtgaaatttgaagggtttcttgtgtattttgaataatagcctttattacagattagtggataaagaaaatgtggcatatacatacaatggaatattattcatccttagaaaaaaggaaatcctaaaatttgtgatagcattgatggactgagagaacatattgctaagtaaaataagtgagacacagaaagacaaatatactgcatcatctcacttatctgtgaaatctaaa

SEQ ID NO: 905348 - DNA, 557 bp, Homo sapiens
cataaaaacgagacaaaagcattctcagaaacttctttgtgaagtgtgtactcaactcacagagttgaacctttcttttgctgcagcagttttgaatcactccttttgaagcatttccaagtggatacttggacagctttgaggctttcattggaaacaggagtatcttcacataaaaactagacagaagaattctcagaaacttctttgtaaagtgtgcattcaactcacggtgttgacactttcttttaatagagcagattggaaacactctttttgtagtatttgcaattggatatttggacagctttgacgctttctttggaaacgggactatcttcacataaaaactagacagaagcattctcagaaacttctttgtgatgtgtgcactcaactcacagacttgaacctttcttttgatagagcagttttgaaacactctttttgtagtatctggaaggggacatttgragcgctttgaggcctaaggtgaaaaaggaaatatcgtcacataaacattagacagaatcattatcagaaacatctttctgatg

SEQ ID NO: 905349 - DNA, 601 bp, Homo sapiens
ttggaaacgggaatatcttcacataaacattagacrgaagttttctccgaaacttctttgtctatgtacattcaactcacagagttgaacctttcttttgatagaacaggtttcaaacactctttttgtagtatctgcaagtgaacattctgagcgctttgaggcctatggtggaaaaggaaatatcttcacataaaaactagacagaagcattctcagaaacttctttgtgatggtgatgtatgcatccaactcacagagttgaacctttcttttgatagagcaggtttgaaacactgtttttgcagaatctgcattggacattcggatccctttgagacctatgttggaaaaggaagtatcttcacataagaactagacagaaccattttcagaaacttctttgtgatgtttgcattcaactcactgagttgaacctttcttttgatagagcaggtttgaaacactctttttgtagaatctgcaagtggacatttggagcgcttttgggcatatagtggaaaaggaaatatcttcacataaaaactagacagaagtattctcagaatcttctttgtgatgtgtgccttcaactcaaata

SEQ ID NO: 905350 - DNA, 584 bp, Homo sapiens
ttccctacttgtgacacagagtattaagggatcatggagytggcttgtctaaataagaacaaacaaaggaaaattaagcagcctttgttaatttgtatcttttagtattaactgaaataagaaaatgtgtgtattaaaaggcactaagaagtaaaatgcaaagtgagagtaaagcagcttatatttgtaaaggaaagagaaataattttctattaaataatggatataattaagtatacaggtagttgctctgattattaaataaactatgtatttaatgaagcatttttttttactgaaatttgccaaaattatttatatttaggaaaatcagccaaactaaaatgaagatagttatgcatcactcttgggagacccaatcttacatatttatatatatatatatatgtatgtttgttgtaaaatataggccatattgctagaggattgaatcactaattttcatcatttctcaaacataccctgtctacacacacctatgtacacactcacatcccaacactgtcctttatcgtttaggagaatttttgatatattttgataattaccatcattcaatctag

SEQ ID NO: 905351 - DNA, 591 bp, Homo sapiens
tattaatcatcacccctaaatcacatacattctggaatatttactgagtctgcatatagagaatactaccttaaaaaggtaaaaatcacccatgtaagcataattttactttagctttcttgtgagtaaaatgggccatttggtcgcagtgtaggatagccatacatttccgtgaaatgtttacattggtcaatattgaaaagcttcctatgattaaagtcaaattatacatacataatgggttacaatttatgaaacattcatcactcaacattctggtttgtattatcagtcccatattagagatgtatggagtgccttgattttggcaacaattcaactaaattttgaccaaactttagttaggctcctaatgttcttcctagacacatctctgcatgcccttataaactctagttttagcaggaaccttgctaaggttcttgctaaagaaccttgttaagtcatttagcagaaaccactcaccttcaataactgatcaccttcaagaactgatcagtttcctcatcctccaccatcctcyatgtgacatctgatcatcctggccttcctctagcattaatactgtta

SEQ ID NO: 905352 - DNA, 592 bp, Homo sapiens
aaactgacgaaaactagcagcagggaaaaaacttctctattcaataaatgatgctggaataactggctagccatatgcagaagattgaaataggaccccttcctttctctaaacacaaaattcaacttgagatggattaaagacttaaatgtaaaacccaaatctatgaaaattctggaagacaacacaggtaatacaatcctgggcattggaatgagcaaagatttcatgacaaagacaccaaaataattgcaacaaaagcaaaaattgactaatgggatctaattaaactaaagaacttctgtgcagaaaaaaaaaactatcagctatctacagaacgggagaaaatatttgcaaactatgcatctgacaaaagtctaatattcagtatgaataaaaaacataaacaaatttacaagagaaaaactaacaaccccattaaaaagtgggcaaaggatatgaagaggcacctttcaaaakaagacacacatgcagccaacaagcttatgaaaaaaaactcaatgtcactaatcattaaagaaatgcaaatcaaaaccacaatgagataccatctcccaccagtcagactagc

SEQ ID NO: 905353 - DNA, 591 bp, Homo sapiens
gttattggttatctatttaagtcctatggaatcttgaaagtctaaagccctttttacatccctgtgcagtgtgggattarggtaaagaaaaactttgaaaatatagatggaaaaggcatttatggtactaataaaatgtaacatgcttaagacaactaaaaaaagtattaagaaatgaagaatgaactttaatgaaataaaaattcaattaattagtttgtaaaactgaaatctttgttattttgaaaggtctgttaatcataaaaatactgtgcttaaatcttccttactttagcaaacaggaaaactttatttttttctcttttcaatcttaatctagttcctctacctctgaaaactatcactaaagaaggagactgttgattttttcaaaattttggcctgcctagtgttaatggttttattttgtcttccaaaatgatacgttgaagtcctgacccccaataccttaaaatgttaccatatttggaaagatggtcttgcagatggaattagttcagatgagatcatgctggagaaggagggacccttattccaatatgactggtgtcattatattaataggaggaa

SEQ ID NO: 905354 - DNA, 599 bp, Homo sapiens
ttttttcacaaatttcaacagaacacgtctctactatcaaacaactctgtttataactcctggtcaaatacagaaaatacaagcaagcaatattttatatctgtgtccacctttagttacagaatgaacaatgactacaggttcctttaaaagtaaaaaatacatcttaccaaaaaaagaaaatcccaatctgaataatgagactgtacttaaacacagagagctcaaacaactcagctgaaatgtgatgcatttcctaattattaacttggttgctgaccatgagatgcaggatgcaggtgttcaaaggaagcatgcactttacccgaatttattcagcaaaacaattccagcctctaaaattggttttaggaatgataactacatttttcttaaactttgacatgaaactaacttgttgctgagaatttgcacatgtgaagtcaccttgacattgattttttgcaatctttataaagaagaataacataaataaacatggcattttccaggtggctgcaaatcgtaccagggaaaataaaatcctgaaatcgagtggagttttgcaataatcttkttcttggggtgaaactgtagca

SEQ ID NO: 905355 - DNA, 621 bp, Homo sapiens
aaaaggtgctaaaagaggagatatgctcagacatatacccatcctgtgatgctgagtttttaagtctcattacactgaaaaggttttacagtaaactttttctttaaaaggcyggttagtaaatattcattactttgctggccacctggtcactgtcacaactactcaaacctgccattgtagcacaaaaacagccagagaccaaatgtaaacaattgagcagggatattgaaatatgaatttcatacaattttatgtatcataaaatgttattattttgattttttcaaccattaaaaaatgtaaaactattcttatacaaaaataggctgcaggctgagttagcttaagagtttttctaagtctacaaaatttcattgtgcattttgggaagaaacagggcgtgggttgtagtgtcaactgtgagcgtttacaaggggagagcaagctggatattccaagtgaatatccaacttaaatataggacaaaatcagacattatggcccctcttgattaacagaatatgtgcacactaagaataaagacaaatagtactaaaagacgttgtaaatactaaaagacgtggtaagtatactctatgacatttgcataatgacaac

SEQ ID NO: 905356 - DNA, 595 bp, Homo sapiens
taaaaatgacagcttccctttctgtagcaattttaagatctacattatctctattttccatatgaatagcaaattgaaggaacaagcagaaaattgtatccttgagaagactgagtcaatatattttaatgcaaagttgtgaggttaaactaatgaggttaaaactagtaagaaaaggttgtaggcatgtagatttacaaagggtgtggtgtatgtgtatgtggtgtgaatatatatattcatatctatactaatgtaaacatatacatatatacaagagaaaaggaaggcaaagaatattaaagaattatatagtgctgagaactatgtttttagagggtgtcactacatgatttagtagaaagacgtcttatattaattggaagtctcatgtggcaggcactgctgtctacttaattccccccttgtaaaagaacccgattttgttcatggtggcaatatgtgcagctagggactgtacttccagcctcctttgcaactagtgtcccatctgcctaaattctggccaaagaggcagaagcagattttggttgaaamctctaagaagtctccttagaagggattctaacatcaa

SEQ ID NO: 905357 - DNA, 444 bp, Homo sapiens
tttttgaaatgatctgaatttacgtaactctataataaaacaaaacaaaacaaaacaaaaaatgtgatacatgcagtttgcaatgactactgtttaacatagtgaatcaaatctttgatactgtttaccattgtgtggtgtttttattatagtatgctcctgaaggaacttcaataaattatctcataccttcatcagcttaatgtgacaaggaaagaaaacagaattgttgagtatacacatcatttccaaacctagaagtagcatttcttctcagggttaaacatataaaaagcagggaaaataaaataataacatttcttgtgcaagcactgttatttatttgttagtacagagactactattatttctaggttgtttttgaccacacagatgagtaatattctttgcctatacacakaaaagcaacctaactctctgaga

SEQ ID NO: 905358 - DNA, 245 bp, Homo sapiens
caacagagcgagcctccatcaaaaaaacaaaaaaaaaagctcttagaagactgyctagtgtggtgagagctatatcagtgtgtaaaaaagtgcattatttgtggggacaaccaattatgagcctagaataacaaacttttaggtgaagatgaatataaattatatttatattgttaaacaatattacaagagtgattgtacctcttctggatatatttttccggcaaggcaaaaacatgcctgcc

SEQ ID NO: 905359 - DNA, 245 bp, Homo sapiens
caacagagcgagcctccatcaaaaaaacaaaaaaaaaagctcttagaagactgtctagtgtggtgagagctatatcagtgtgtaaaaaartgcattatttgtggggacaaccaattatgagcctagaataacaaacttttaggtgaagatgaatataaattatatttatattgttaaacaatattacaagagtgattgtacctcttctggatatatttttccggcaaggcaaaaacatgcctgcc

SEQ ID NO: 905360 - DNA, 639 bp, Homo sapiens
tcctttccatgtttagtgcttccttcaggagctctttagggcaggcctgctggtgacaaaatctctcagcatttgcttgtctgtaaagtattttatttctccttcacttctgaagcttrgtctggctagataggaaattctgggttgaaaattcttttaagaatgttgactattggcccccactctcttctggcttgtagagagtttctgccaagaaatccgctgttagtctgatgggcttccctttgtgggtaacccgacctttctctctggctgcccttaacattttttccttcatttcaactttggtgaatctgacaattatgtgtcttggaattgttcttcttgaggagtatctttgtggtgttctctgtatttcctgaatttgaatgttggcttgccttgctgggttggggaagttctcctggataatatcctgcagagtgttttccaacttggttccattctccccgtcactttcaggtacaccaatcagacgtagagttggtcttttcacatagtcccatatttcttggaggctttgttcgtttcttttaattcttttttctctaaacttcacttctggcttcatttcgttcatttgatcttccatcactgataccctttcttccagttgat

SEQ ID NO: 905361 - DNA, 578 bp, Homo sapiens
ttaaatgtatgtagaattaaaatatatgatgacaataatgtaaatgtggtagaggtaatttgggattgttgtatgagtagtagtagtaaaggtattataaagtcttataattgtaaaaaaaagtagtcaaatactaaattatatcagggtatacgtgaggtatgatgtaatctataggtaatcactgaaagaatagtagaagtgtatataaataacaagcaattagagggtgaaatggaataataaaatatttggttgattcaaaagaaggcaagatgaaagggaactagattatagaaaatactggataaatataaagctaatggcaagattacaatttaaacctaagtatattagtaattacattaattgtagtagattatgcactccaatgaaagaatagttgagaaacccaggtgcttgatacaggaagatgttagcatttacaagaatggtccactgaagttgtaastgaccttgtagatgggcccaaggcatataagctagagcctcagcaacatttgatatactaacaagtgcactccttgttatatgtacccatatgcaaaccaaaaaaa

SEQ ID NO: 905362 - DNA, 651 bp, Homo sapiens
ttgcgaatgggagttcactcacgatttggctctctgtttttctattattggtgtataggaatgcttgtgatttttgcacaataattctctatcctgagactttgctgatgttgcttatcagcttaaggagatttggggctgagacgatggggttttctaaatatacaatcagtcatatgcaaacagagataatttgacttcctctcttcctatttgaataccctttatttctttctcttgcctgattgccctggctagaacttccaataatatgttgaacaggagtggtgagagagggcatccttgtcttgtgctggttttcaaagggaatgcttccagtttttgcccattcagtaaaatattggctgtgggtttgtcataaatagctcttactattttgagatacattccatcaacacctagtgtattgagagtttttagcacgaaggggtgttgaattttattgaaggccttttctgcatccattgagataattatttggcttttgtcattggttctgtttatgtgatggatyacgtttattgatttgcatatgttgaaccagccttgcaccccagggatgaaaccaacttaatcgtggtggataagctttttgatgtgctgctggatttggtttgccagtattttatc

SEQ ID NO: 905363 - DNA, 675 bp, Homo sapiens
actagctttaaacaaagaaaacatttgacaaaagatggagaagagagaaaaccctcttttgttgccccacataaatcctaatacactggaaacagaaaatgcctttattgagagggtaatgaactaacaaatgaaaaaagaatcctcattgaactggaatacttttataagtataagcattgcaaggatagaaattgtgcctgagctcatcttactttctgtagtaccacatgatgtgctatatattcaataaatagtttttttttcttttcttttttctttttgagatggagtcttgctctctctcccaggctggagtgcaatggcgtgatctcagctcactgcaacctctgcctaccaagttcaagtgattctcctgcctcagcctcctgagtagctaggattacagatgtgcgccaccatggctggctaatttatgtgtttatttttttttagtagagacggggttttgccattttggccaggctggtctttaactgctgacctcaggtgatcttcccgccttggtctcccaaagtgctgggattacaggcgtgaaccactgtgccggtctcaataaatattttgtgaataatgattttcagtccasaaagtttaaatgttttttccttgtttagacggacttttccaagacagattcctttcatacactga

SEQ ID NO: 905364 - DNA, 676 bp, Homo sapiens
tgtttagcccattgttcagtccaaaacttttaaattcttctctcttatcctccatacaaatcaattggagtatcctgtccccttatcttcaaaatatatccaggatttcaccacttctcaactgcctttactatgactatcttcatctagccaccaaatccttacaatattctaatagtttctgactattcctatacttgcctcattatattctatttttcacatcaaagtcagtatgattcatttaaaacgtgagtcttactgtttatttaaaatataaggcttactctctgctcaaattctccagtggctttcctttttacctttactccaattaacatccaaagtactttctatggcctaccaggctgtatggtaatatttcttttctcaacttcctcaatctcatcttcttgcttctctggtccagtcattcactctgtactttgcttcctccaccttgtacccttgtactttgtttcctccatcttgaatgaacttttcacagacaccctcaaagcactctttcttacttccctcaggtcttttctctaatgttattttttcaaagagggcctactttggtctcgggtcttgctttttgttccattgcattaatcrtaacctgacacactataggtttatatttatataggtatattttgtttctcttcta

SEQ ID NO: 905365 - DNA, 686 bp, Homo sapiens
tgaaaattcagtctggttcattatgtaagggtagatcattaaaatatcagggggaaaaacgatcaaacttcttgacattgaaactgtgacctaattaaacagattgtgtaaaaacaaggccatcatttataawatatgtactaatatctttagaacgaaccagtgtccttagtcagaaaattcaagttaatagattataaaagtagttttactatacaacattttaaaacatatagcaacaattctattcagatcatgtgaggaagaatatcttagccatgtttgattagttaaaaataagtttctgcataattttatgttataaagtttctcttcaaaaagaacaaattaaacatggaaaatataatcattttcccagacctatctaggtgatcaccatttataagaatcttataataaatcatgtcttacaatgctaagaactcttttatgaagaatgtaataacctcttaattgccttctgtgttaatttaattttccatttaacttcttacattcatatagcattctgcaaattacatactccttttacctccattaccttatttaataaaaaggtaaaatgtataaatatataaataactcttaaaagtcaacaacaaaaaagtctggtttaaaactgggccaaagaccttaacagacacctcaccaaagaatatatacaa

SEQ ID NO: 905366 - DNA, 659 bp, Homo sapiens
aaggccagattttgcctaacaacaggaaaatgtagagacacctaaacttaataagattaattttttttaaatcatgcaattttaactcacatcatttaatgttaactcacatatttatagcacatgccctcttgtagctatagagaagcaatgagtttagaacctaggttgcaaaggcatatagctaaaactgaaagctgcaggatggcctacattgttaatagcactcacataatgaattataaagctgatctccaaatgtcttggagctgaatactttgcagcaatatttctagctgagaagctaataggaaaaattcaaaaaaaaaaaaaaagcttgtgacttgatgtactgggatatattacgtcagctttcagttctcacatttgttttctgtctggcaaattttcatttatccatcaactattacctttgatgctaccttataaaaaacaaataatccagtggttcccaacagatctaatactacttctccttggttctactgctctgtataaatgtttagattgaagtccttaacttctagaatcaaaaatkttttaatatattttaattgcctcattttttgcaaacatctcaagatcaggaatatgcattttatttgtttccataaatacccaaaactaagtaatatatg

SEQ ID NO: 905367 - DNA, 555 bp, Homo sapiens
ctttatagcagcctggtgagacactagcgggagacccagtgaagccgtgtccagactcctgactcgcagaagctgtgagatgccaggcctctgttgttttaagtcrctgagtttgtggtaatttgttatatagaaacaggaaactaatacaaacaccctcagtattccagacacattttgaggaattagaaatggagcagtgaacaaaatgaagtccctgttctgaggagcttgtatttcaataaatctaaaacatagacattttagaagctttaattcatctcaattataatttcaaagtaaaaacctcagtgatcccaaaatgggaaagaaaaatttacttaaaatatttatttttaacttttattattattttttgagacagagtctcattctgtcacccaggctggagtgcagtggcgcaatcacagctcacagcagccttgacctcctgggctcgggtgatcctcccacctcagcctcctaagtagctgagactacaggcgtgtgtgaccatgcccaggttatttttgtattttttctagagacagggtc

SEQ ID NO: 905368 - DNA, 580 bp, Homo sapiens
ccaagtctttggctggaagataaagtctttttttttttttttcagatgaatgagcaaatctttgaccccttctttttgaaagaatratagaggagatgggatgcaacctggtatccgtttcaaaagaggatctgtttctaacttctttattcagacctcttcttgggtaggaatcattgacggtaattgtgtccaatcataattacatttgaggtaggtctaatagcagcacttctctgttctgttttgtgtttttgtttttgagcaggaactttaaagagcaagctggcaccatggtttcatagggaaccctggcagcatttcatgctctatttattaaaataatgtaaaatttctctttcaatgagttccttttctggaatttttttgacatgaaaataccgagagagaatatttctttagcaaataaagcagtaagatgtaaagctctctgctgtggatcagagaagttgagttggcacaaagaagaaaaatacgtcatgaagagacagtattgacaacagttgagtttctagttcattgaacacctgctatgcatcaggtgctgatctagatatgg

SEQ ID NO: 905369 - DNA, 572 bp, Homo sapiens
tccaaactttgccagcacaaataaatgaaaaatatttgaggtgatgaacatgccagttactctagttttatcattcatcttctatatatgcattgaaataatcccacaaatatatacaattatatgtcaatttaaaataataataaaagtaaaaagcacatctctcaaatttaagaaaacaatccaataaaaagtagtcaaaatattcaaatataaactttaccaaaaaaaatatatagataataaaaaaacacatgaaagaatattcaacattataaccattatagacatgtaaattaaaaccataatcaaatagcactatatacttattacagtggctaacactgacaatattaaattctattaagaatatggagccactggaactcacacatgttcctggagataatgcaacatattaaatccatcctggaaaatttaggcagctgttgtaataaagttagatatgtatcagaagtcccacttgtacttgtttatagtagagaataaaaacataagttcacacaagmatctccatgtgatgattcctaatagttgtattcataatcacc

SEQ ID NO: 905370 - DNA, 627 bp, Homo sapiens
atttcttgccaccacttggttktgtgtgtcttttctattacaaccatcattgtgggcgtgaagtagtttctcactgtggttttgatctgcatgtccttaatagctattaattttgagcatcattaactcacttgctgtccttttgcataatcttctttgaagcaatgtctatttaaattctgtcccagtttttaactaggtatttgcttctattattgaggcatcagagttcttatgtcttcaggatataagtccctttttagatgtatgactggcaaatattttcactatcctgtagattgtcttttcactttcttgacagtaccctttgaaacacaaacattttgcattttgatgcagtctaattaatcaacttttttctttttgtttgtgcttttggtgtcataactaagaaacagttacttaattccaaattacaaatatttactcttgtgttttcatctataagttttatagttttagcttatatccattttaaaggaatttttgaatatggtgttggcagggtgggggatgccactttgttcttttgcatgtggatttccagtagtctcagcaccttttgtccaaaagactgttctctttgttaaagtatttagcagactt

SEQ ID NO: 905371 - DNA, 651 bp, Homo sapiens
atagaatttaaaagaatacagcagaaattctggaagaagaaaattcaattgacatgcagaaraatgcatcggagtctctcagcaacagaattgatcaagcagaagaaagaatttatgagtttcaagacaggttatttggaaatatagtcaggaaagtcgaaagaaaaaataaaaataatgaagctaacctatataatctagaaaatagtctcaaaagagcaaatctaaaaattattggccttaaggaagggctagagagagagggtgggatagaaagtttattcaaaggactaataacagagaacttcccaaacctacgggaaaaataccagtactcaagtacaaggttatatttaaccaggcatatttaacccaaataagactacctcaagctttaagacactaataatcaaactcccaaaagtcaaggataaagaaaggatcctaaaagcagcaacttaaaaaaaaaggtaacacataatgagcttctatatgtctggcagcatatttttcagtagaaaccttacaggccaggagagagtggcatgatataattaaagtgctgaaagaaaactcattcatcctagaatattgtatgccgtgaaaatatccttcagacatgaaagataaataaagactttcccagacaaa

SEQ ID NO: 905372 - DNA, 496 bp, Homo sapiens
actattttcaggagatctctgctagatattttctgcctacattatacatattaaagcaaattaatagttttattccacattcttccattatatccagcttccccataacaatgactgctgycatctaagttatttcacaaagacaacagactattcttgactggcaggtttatgttttgctaggttttttttttttttttttgtcaaatcctgatttattttaaaactttaattttaaaactttaaatttgtcatcataaaatcataaaaatctccagagtttttgttcatttatcatttagtttttatatttatttatttatttatttatttattatttattttttttgagatggagtcttgctctgttgcccaggctggagtgcagtggcacaatctcggctcactgcaaccaccactttccaggttcaagcgattctcctgcctcagcctcccaagtagctgggattataggtgcttgccaccatgcctagct

SEQ ID NO: 905373 - DNA, 494 bp, Homo sapiens
ttcatgccattcttctgcctcaagcagctgggaccaccaagcctggctaattttttatatttttagtagagatgrggtttcaccatgttagtcaggatggtctcgatctcctgacctcgtgatccacccgactcggcctcccaaagtgctgggattacaggtatgagccaccgcgtccagccatcttttgattttttaagaaaaggtgggaatttggatttttagacactagttcaaatttaaaaaataaaagatcactcagtgggactagaaggccaaacaaaagaggttatggcaagcttcggtctgaggcccaccagcttttgaccttgtctgttggtagagccattctttcccccaaaggcacgaattagatgttgttgatgagtactccagattacaactttaaaaagtggtacatccatgggaaacattttgcccttcctcctcccacctccctgtttggaacagaaaaattcatcatctgtccgaga

SEQ ID NO: 905374 - DNA, 494 bp, Homo sapiens
ttcatgccattcttctgcctcaagcagctgggaccaccaagcctggctaattttttatatttttagtagagatgaggtttcaccatgttagtcaggatggtctcgatctcctgacctcgtgatccacccgactcggcctcccaaagtgctgggattacaggtatgagccaccgcgtccagccatcttttgattttttaagaaaaggtgggaatttggatttttagacactagttcaaatttaaaaaataaaagatcactcagtgggactagaaggccaaacaaaagaggttatggcaagcttcggtctgaggcccaccagcttttgaccttgtctgttggtagagccattctttcccccaaaggcaygaattagatgttgttgatgagtactccagattacaactttaaaaagtggtacatccatgggaaacattttgcccttcctcctcccacctccctgtttggaacagaaaaattcatcatctgtccgaga

SEQ ID NO: 905375 - DNA, 494 bp, Homo sapiens
ttcatgccattcttctgcctcaagcagctgggaccaccaagcctggctaattttttatatttttagtagagatgaggtttcaccatgttagtcaggatggtctcgatctcctgacctcgtgatccacccgactcggcctcccaaagtgctgggattacaggtatgagccaccgcgtccagccatcttttgattttttaagaaaaggtgggaatttggatttttagacactagttcaaatttaaaaaataaaagatcactcagtgggactagaaggccaaacaaaagaggttatggcaagcttcggtctgaggcccaccagcttttgaccttgtctgttggtagagccattctttcccccaaaggcacgaattaratgttgttgatgagtactccagattacaactttaaaaagtggtacatccatgggaaacattttgcccttcctcctcccacctccctgtttggaacagaaaaattcatcatctgtccgaga

SEQ ID NO: 905376 - DNA, 616 bp, Homo sapiens
ggactatctgtgccagaccctgtattccatgctggggaagcacggcgctggagaccctgccctcccagagcagaagcagatacagaagcaggagcggaaggagctccctgaacacatggatgatgctcttctgtcccgggaagaatcccttcatgcccacactctcctggggaaggacacgtcccccggggaagccacaggctcccaagaagcagcagctgctgtgggtcagcaatcaggaaacccaacctctagtcctggctctgtcccttcctctctgtgtgaatttgggaaggttgttaaacccctttgagcctctgttctcttgaatcataggctccttttgagaatgaaatgagaggtggtcatgggacctaacaaacaaatgctactgctattgcaaaagaaaactcaaggcagaagaatcaatttgaagctacctaattccaatctccagccctgcgtccctgggcccagccaagagacactgtgtagtaaaacagtggctgtaggtgcatcccaatctttggtttgaattgctttgtctaagtgtaagtatcatttcttcctaaataagctcatgtgccrtgactggtaatgtcccaggctgtctttc

SEQ ID NO: 905377 - DNA, 649 bp, Homo sapiens
tctatattaacaaagctgtagcatatgtttcccttgtgttcttaaatcmccttacatagcaccaaacatgtgctgtacatccaaaaaatggttgttgaatcaagtggagttctttgagtgagcaagggaaagttgggatttgtaccgaggaagcagcaggtgagtttgggaaggacatctttttgctatgtgagtggacacctccattggcttgggtggctgcagaacctgcctcccccttcacacatcctcccttgttccctctccctggcagcttaagcaagagcactaagcttggccagttggaacgccagccatgcccagtcttgtgttttgagggagctaagcagagagacaggattactacagatgcctcagaggtagcagcagaatcgagggtggtggcagtggtggggataagtccccaaagccagcagtaccagagtctgtctcctaacaggcttcctctggcagcaccttggttgtattctcagctgtctgtgcttatttttctgagcttgattctccaggtttcctgttgactctgagaggcactgcctatctgtccaataaattcctttcctgggtaggtgagccagagtccacttctgtagtttgcaaccaaaaaccttgacaggtagaagttagg

SEQ ID NO: 905378 - DNA, 586 bp, Homo sapiens
ctgcataattaagtaaaagaaaaaaattaaaaatgattacatctactataacaacagcaatatagatgacttaggcataaagstactaggaaatgtgcaggacttttggaaagagaactattaaattttatggaattacataaaagaagacctgaataaatggaaagatgtaacatgtttgtgaattgaatgattcaatatagtttatagatgttagtgcaaatctagtcaaaacccatgggaaattaaacttctcaaaatgatcctaaagttctgcaagaacaaaaactgtaggtgagaataaccaagaaaatcttaaaaaagaattataagagtagcctgtacaaccagatattaaagctcccctaaaattaaagtaatgaaaaagaaagaatatgattgtttctactaaagccaatattattaatgatgggttttaattatattaacttacctgattgagatggctagaaataatttaaaaatactgccatctaaccattgattacattaatagccccaattcttcacccctccctgcattcacggtctttgtcgtgtgactttttaccaccctctttcaaaa

SEQ ID NO: 905379 - DNA, 586 bp, Homo sapiens
ctgcataattaagtaaaagaaaaaaattaaaaatgattacatctactataacaacagcaatatagatgacttaggcataaaggtactaggaaatgtgcaggacttttggaaagagaactattaaattttatggarttacataaaagaagacctgaataaatggaaagatgtaacatgtttgtgaattgaatgattcaatatagtttatagatgttagtgcaaatctagtcaaaacccatgggaaattaaacttctcaaaatgatcctaaagttctgcaagaacaaaaactgtaggtgagaataaccaagaaaatcttaaaaaagaattataagagtagcctgtacaaccagatattaaagctcccctaaaattaaagtaatgaaaaagaaagaatatgattgtttctactaaagccaatattattaatgatgggttttaattatattaacttacctgattgagatggctagaaataatttaaaaatactgccatctaaccattgattacattaatagccccaattcttcacccctccctgcattcacggtctttgtcgtgtgactttttaccaccctctttcaaaa

SEQ ID NO: 905380 - DNA, 600 bp, Homo sapiens
cacgtccctttattgtggtttctgcaggaatgaaactgtgaagcagggcaagtaggtttaagattggctrgtgtgaataatttcagtgagctctgaggactaggcactggcccttgttgcctggtatctggctatggggcaatttgggttgatgcatagtggcccagagtttggggtacatgattggggtgtgaacaaaatcaaatgttcaagaaaaaaagtgactactctctagccagggcctcaaactgggtcaagataccatttgaaaccactatattacacaattctcacaattagttaaaaaacttaacgaaaatcccattggaaattgttttataacttgaaacattaattcaaaattactcttcatctggaagggtaatcaagaatagacaagaacacatgtgtaaacggaaggtagtagaacttgtagaaccagatgttaagatgtactttaaagcctcaacaattattctcgcactagtacaagaatgcatgaaaaagcaaagaaacagaattaagatcctaaaagttactctaatgcccataggaatttagtatctaatatagggaacatttcaaatctgtgaggaaagg

SEQ ID NO: 905381 - DNA, 611 bp, Homo sapiens
ttggtacgtgccatcttctgttatttcagggtttgagagaattttttgccccacctacagcacctatggagggtgatgaacaggagagggaggatgaaaattggcttgtatcatcttctttagtggttgcaaaaatgctaaatgttataagtgtagaaaaattggatctatgggagtaattttaggtaaaagtcaacttaacttacacggtattactgtagtcccaggagttgttgattcggattgtgaaggagaaattcaggtggcggtaatgtcataagattttaggttttaaaccaggagaatatcttgcagaactgttgcttattccctgtaaattgcacccttctccacataaggagaaatgagtttgcggatttggctcaactgttgcttattccctgtaaattgccctcttctctatgtaagaagaagcgaggaggtcgggaatttgggagtacaactaggagagagatttatctatcacaacccatagcatctaatasacccacctgtacagtacaaattgaaggcttaaggattgtttttttactatgttattgcacgagagggagaggcttcgatttgttttctctgtgccttctgttaat

SEQ ID NO: 905382 - DNA, 615 bp, Homo sapiens
catgaaaaaaagctcagcatcactgatcattagagaactacaaatcaaaaccacaatgagataycatctcatgccaatcagaatggttattattaaaaagacaaaaaacaacagatcctggcaaggttgtggagaaaaaggaacccttatacaccattggtgggagtgtaaattagttcagccattgtggaagacagtgtggcgattcctcagagacctagaggcagaaatatcacttgatccagcaatcccattactgggtatattcccaaaggaattagaaattattctattataatgcacgtgtatgttcattgcagcactatttacaatagcaaagtcatggaatcaacctaaatgcccatcaatgatagagtggataaagaaaatgtggtacatatacactatggaatactatgcagccataaaaaaaatgagatcatgtcctttgcagggacatggatggagttagaagccattattctcagaaaactagctcagaaacagaaaaccaaacactgcatgttctcatttataagtgggagctaaatgataagatcttatgaacacaaagaaggaaacaacagacaatggggtctacttgaggatggaagg

SEQ ID NO: 905383 - DNA, 609 bp, Homo sapiens
gcttccctttgtgggtaaacccagaatttcatatccagctaaactaaacttcrtaagtgaaggagaaataaaatcctttacagacaagcaaatactgagagatttttgtcaccaccagtcctgccttacaagagctcctgaaggaagcactaaatatggaacagaaaaactggtaccagccactgcaaaaacataccaaattgtaaagatcattgacactatgaagaaactgcatcaactaatgggaagaataaccagctagcatcataatgacaggatcaaattcacacataacaaaaataaccttaaatgtaaactttctaaatgccccaattaaaagacacagactgacaaattggataaagagtcaagaaccatagacatgctatattcaggaaaaccatctcatgtgcaaagacatacgtaggctcaaaataaagaaatggaggaatatttaccaagcaaagggaaagcaaaaaaaaagcaggggttgccaccctagtctctgataaaaaaacatactttaaaccaacaaagatcaaaagaggcaaagaaggccattacacaatggtagagggatcaatgcaacaagaagagctaactatccta

SEQ ID NO: 905384 - DNA, 656 bp, Homo sapiens
tgtttatgaagaaaaaaggtttaagtggctcacagacccacaggctttacaggaagtatgattccggcatttgcttggtttctgagaaggcctcaggaaacttataattatggcagaaggcaaaggggaagcagrctcctcttacatggccaaagcaggagaaagagatggagtggggaggtgctacacacttttaaacaaccggatctcatgataactgtcacaagaatagcactagagggatggcgctaaaccataagaaaccaccatgatccaatcacctcccaccaggccccacttccagcattggggattacatttcaacatgagatttgggttgggactcagatccaaaccatattattcagcccctgttctctcccaaatctcctttctcacattttgaaatacaatcatgccttcttaatagtcccccaaaatcttacctcattataacattaactctcaagtccatagtcaaaagtctcatctgagacaaggatagtcccttctgcctatgagcctgtaaaatttaaaaaaaataaaaataaataaataaataaaaaagttagttacttccaagatacaaggggatacaggcactgggtaagtaagaaccttccgaaagagagaaattggtcaaaagaaagaggcta

SEQ ID NO: 905385 - DNA, 537 bp, Homo sapiens
tttatttcaaatagtgtgctattgaacagcaaagtcaatttgatattagtttctgaagagcccccaaaaagccaattgccaattggcaattagcaagactaccatttttagtctagatgctcaaaagaaagtgctgaggtcaaaaagggtgaaaagagttaatctgtagtttagcttgatctttagttttgtaacattaccattgaactgtaatccaaagctttttgttcaataatattattttcccttgaacaattgtgttgtaagtctgtgcacagtaggcttctaaaatgttaagacatgtttatatacacatttacactttaaaaagtaggtctctcagtgaataaattttcatttatctatacaatattctttctacttgtaaaaatgtttcattccagtgttcatgtttaagaatgcctataattaattgtttgtaatagtcatccatcaagaataaaattgcaaaataaatattttacataygtataataaatatcagagaagaatgaaaactaaaaattataaattatg

SEQ ID NO: 905386 - DNA, 652 bp, Homo sapiens
caaatgaaaaattgtctacatgcttatggatcagagaattaatagcattaacatgaccattctggctaggcatggtagctgacacctctaatcccagcagtttgggatgctgaggagggcagatcacttgakcccaggagttcaagactagcctggtcaacatggcaaaacttcctctctattttttaaattataaatttaaaaaataaataaataaaatgaacatttacccaaagcaatctacagtttcaatgcaattcctatcaaactaccaacatcatttttcacagaattagaaaaaaagtcctaaatcttatgaggatccaaaacaaaccacaaatagccagagaaattctaagtagaaagaaaaaagctcaaggcatcacattatcttacttaaaattatactacaaggttataatgaccaaaataccatggtactattataaaaatagacatatgtataggtcaatagaatagaatagcgaacccagaaataaagccatctatccaccgccaacaaatctctgacaaagttgaaaagaacatgtactggggaaaggacactgttttcaataaatgattctggacaaattggatggctatatgcagaaaaatgaaactagatcaactcaaaaatcaactcaagatg

SEQ ID NO: 905387 - DNA, 614 bp, Homo sapiens
cagagttagtaaatggtagacctggatttcatrtattttgttaattctggttgagcacatttttcagttaaaatatatctttccaaatttagataccattatctttccatgatacaaagataatcttttaacttacacaattttgtcttatcaaaacatgagactcataagcaatgacgtagaaagcatagaatatcctagtgaaggtaaatatagagttagaagttttagttttaaataattatcaaatagtatttataacagattttcagtaaattagctatttttccattttggaactaaaagtttaagtttagtagaaaaatgaattgtatgaatttatgcatttcctctttttgtgactgaaacacagcatataaaaatttcttaccattatcttaagatgaacagttcagtacacatactaaagtgttactagggaaaggttttgagctaggtgtatttttattaaaattattaataaggttttattaaaattattttcttcagtttaaaaatgttcccattgttgaaatacataatttttcatggtttctgatcctatgggagattgtaattgattttggtataatatatcaattatagtattattt

SEQ ID NO: 905388 - DNA, 588 bp, Homo sapiens
gtaaatgctcagatatatgttctatcaattaaattgaaggstatctctggttcctggcaaacatatggtaatgttaacaaatacaggaaagatcttagggcaaaaagactaaagtaagcattgtaaagaagaaaaattaggaagaatggatgatgatttattaggaaatgatctactcttttcaaattattcaaagtttttatgccctttattagtgaatgaacccctaatttttaataaaagtacaggtttgttaagaaaattcaaagctagatcaagcctcaaattagtgagaaatcataggaattgaagaagttcaaaaccctgggaatggacaaataaatactgagataatatatttgtaaatgaggtgagaagatatcttggaggattctttgtggtaccccttatcaaaagtcaaaaattgatgttaaataaatatttttcttcacaaaggaaagcagtaactagtagactttaaaaatccttcttatatttttgattcatcatttgattttgaaccatcttctactacaactcctgagatgccactgtcccacgacatggttcatcaactggacctggtca

SEQ ID NO: 905389 - DNA, 580 bp, Homo sapiens
agccaaagcatatcatttagctcctggcccctcccaaatctcatatcctcacatttccaaatcaatcatgccttctcaacagtccccaaaggtcttaactcatttcagcattaactcaaaagttcacagtccaaagtcttatctgagacaaggcaagtcccttccacctatgagcctgtaaaatcaaaagcaagttggttacttcctagatacaatggggacacaggcattgggtaaatgcagccattccaagtgggagaaattggccaaaacaaggggctacaagcccaatgcaagtctgaaacccagtagggtagtcaaatcttaaagtcccaaaatgatctcctttgactccatgtcttacatctgaatcatgctgatccaagaggtgggttcctatggtgtttggcagctctgccactgtgccttttcagggtatagtctcctccctggctgctttcatgggttggtgctatctgcrgcttttccaggtgcacagtgcaagctgtcagtagatctaccattctgggatctggaggacagtggccttcttctcacagctccactaggtggtgttcca

SEQ ID NO: 905390 - DNA, 634 bp, Homo sapiens
aaggccctggaaattttgcattatcagttctgcagccttgcaggggctgaaatgaatcacagggccaggctagattcaggcgggtgaggagacagatgctcctcttgatggacagcacaacagagtccccktgcagaggggtgtgcatactggggtgggtagcatctgagaccatttaataacttaccacagggtctaaccaagagaacagatgctgcttttagcagttacaacagagggaatgagagcacaggaaactggctcaaagtgaggactgagctcagccctcgaaaggacctgcacccacttgtgcctctcccctccagcaggccctccatgcctgtgtttagtctggccaggagtggatgctgggcggagggcttggtgagtattcttcccgaatattttcttcacttagagccagtctacagattactttatatatttacttttttactcaggagccctaaatgttacatctcttttcttccactgtgctggcttttctgagggcaacagcagcctcctcactaccttccaggactcagggtgcggtaaagaagctcagttagtcaccagtaaggaaaactgcctggttaatatttcatagcatcatataaaactgtgcaaacta

SEQ ID NO: 905391 - DNA, 645 bp, Homo sapiens
  misc_feature 606: n = A,T,C or G
gacgagtgctgtagaaaaggccagaagtagaagaggaggcaggaggtgtaggtgagagggtgatatgggagggttcatgtgagctgagacctaaaggaggttgagaaagcctccggatgtgtgaccaaagattattccaggcagaggagggagcaaagtgcaatgatcctaaagcaggaatgttcctggagtgtttgaaagcttccaggaggccagtggggctggaggagaatgagcaaggggaggggtaggagagtcccaggggtgagggtgggtggcaccagttaggctcagcctcagaagccctggtgaggacttcagcttaagccaagtgagatggggaagcccttggaggtttaggccggagaaatctctggcccgagtcacatctcagcagaattattctggttgctgcattgaggagagaggtaggggaagtagggggttagggccgaaatgggcatatcccagttaggaggcattgaagtgagccaggtaagagatgatggttgcttgggctggagcagtcgtaacgaaggtggtgggaagtgctcaggttcgggatrtgttttcaagataatcctgttggactaggtgtggcatgtngaaagaaagagagcattcaagaatgactcctggaaattt

SEQ ID NO: 905392 - DNA, 640 bp, Homo sapiens
ggaaggattaagcctcttatttttaatgtttgttttccgttacaaaacgcaaatctaatctgttcaaaactgaaatcctcatcctctccttaaaatctatacagccacagttttcccaaattcagttaatggcaattccatttttctcccaaatttaaaacacctaaatcattttctgtctttcttcctcaatagactttactttcaaaagatacccagaatctgaccacttattattacctccactgataacactggactaagccactttcattctcgttgaaatattttatcttcttactgtttccaatcttagttccaactttggcccactcccccaaagtgcagctacattctacttttagtgtggcagccaggctaattcatttaaaataaaaatcaaatcatttttcttctagtcaaagtgctgcaacagcttaccaaaatcatccaagtaagacactaggcacttaaaatgatccctgaaattctgtattatctgcttcttcatactattatctttctaactttattgcatagttatcctcatcattcattctgctgtagacacaggctaacatccytgctgttacttttatatgccaatcactcctgagcattatgggtgttcactgctttt

SEQ ID NO: 905393 - DNA, 576 bp, Homo sapiens
agtttttcaggtttactttgaaattcccttggccaagagggcatctattcaatcagttgagggacttacaattttatttttggtttatagagaacacatcaaatgaacctgtagaaccacttggcaaagtgatatataaccctaagaaagatagccaaattcacaattaaaagatgaaacaattctggataaaattaaacacaacacatgaagcaatgttaaattgtatattaataaactccaaataggtaaagaacaagcaattgctttaaattggcatgtatgcatttattttttttcttcctttatttatttttatagatataggggaaagaagtacagttttgttacatggatataatgcatagtagtgaagactgagcttttagtgtaatcatcacctgaagagtgtacactgtacccattaagtaatttctcatccttcatccccccttaccctcccacccttctgagtctccaatgtttattattckactctctatatccatgtgtaaatttgtatatttagtgtcttaatgaatgtataagctaggtatacattttataataaaaaca

SEQ ID NO: 905394 - DNA, 591 bp, Homo sapiens
atcttgttttttatctcttttcttatgtcaggtggtgtttgttttaagaacctggctactccagtgttaggcatgtatatatttaggtatgtaataacttattgttgaattgatacttttatcattatatagtgactttttcatcttttttttttaactgttgttgatttaaagcctattttatctgatataaaaatagttactcctgcttgcctttgttttctgtttgcatggaatatctttttcatccatttactttaaatctgtgaaggtctttatcattaggagggtttcttgtaagcatatcattagatctaatttttttaatgcaatctgccagtctacaccttttaagtagaatatttatttgatttgcattcaatgttaatattgagatatgagattttgttcctgttataatggtaattattacctagttgctttatagtctcaattgtgtattttttgtgctttacataattgtgcattatatgattcgtgaattttgtacattcatgtgctttatgattgtatcattcatttgttttcatrtttagaactccttttagtatttctttcaggattagtcta

SEQ ID NO: 905395 - DNA, 587 bp, Homo sapiens
tctagaaccagaaataccatttgtccaagcaatcccattactgggtatatacccaaaggattataaatcattctagtataaagacacatgcacacrtatgcttattgtggcactgttcacaatagcaaagacttggaaccaacccaaatgcccttcaatgatagaccacataaagaaaatgtggcacacatacaccatggaatactatgcagccataaaaaaggatgagttcacgtcctttgcagggacacggatgaagctagaaaccatcattctcagcaaagtaacacaagaacagaaaaccaaacaccacatgttctcactcataagtgggagttgaacaatgagaacacatggacacagggaggggaacatcacacaccaggacctgtttgggggttgggggctaagggagggatagcattaggagaaacacctaatatagatgatgggttgatgggtgcagcaaaccaccatggcacatgtatacatacataagaaacctgcacattctgcatatgtatcccagaacttaaagtataatataaataaataaataaataaataaataaataaataaataaata

SEQ ID NO: 905396 - DNA, 643 bp, Homo sapiens
tctctttctcatcatttttcctttatgttacacagcattctaacatctagaagtacataatatcttgtaaaaggaaattagaaagtgactcactttttataatgaaaataatttkttgtagcaatgagaaagggaggaacacttttaaaagaagaatcatgaagtttaaaaaatataaaaaaacagggcagccaagatggccgaataggaacagctctggtctagagctcccagcgtgagcgatgcagaagacgggtgatttctgcatttccatctgaggtaccgggttcatctcattagggagtgccacacagcgggcgcaggacagactttaaaccaacaaagataaaaagagacaaagaaggccattacataatggtaaagggatcaattcaacaagaagagctaactatcctaaatatatatgcacccaatacaggagcaaccagattcataaagcaggtgctgagtgaccaacaaagagacttagactcccacacaataataatgggagaccttaacaccccactgtcaacattagacagatcaacgagacagaaagttaacaacgatacccaggaattgaactcagctctgcaccaagtggacctaatagacatctacagaactctccaccccaaat

SEQ ID NO: 905397 - DNA, 579 bp, Homo sapiens
agagcttgtgcaagggaattcccatttgtaaaatcatcagatctcatgagacttactaccatgagatagggggagaccgccccagtgattcaattatctccacctggccgtgcccttgacttgtggagattattacaattcacggagagatttgggtcgggacacagccaaaccatatcattctgcccttggccccttccaaatctcatgttctcacatttcaaaaccaatcatgacttcccaacagtcctgcaaagtctaaactcatttcagcattaactcaaaagtccacagtgcaaagtcgtatctgatacaaggcaagtcccttctgcctatgtgtgagcctataatatcaaaagttaattagttgcttccttgatacaatagaggtacaggcattgggtaaatacagccattccaaatgggagaacttggccaaaacgaagggcytagaggccccatgcaagtctgaaatccagtggggcagtaaaatcttaaagctccaaaatgacctcctttgactttatgtctcatatccaggtcacacttttgcaagagatgggttcccatggtcttgag

SEQ ID NO: 905398 - DNA, 587 bp, Homo sapiens
gtttttcttttcagaaaactgattggtgcaaatatatctcaaatctaacagctaaagccagatgtacttaggaaagagctcacaatctctgggcagattgaacagcagtccctgcacccaaagaataatataagttttgtgtccagtaaattgttgttgaatatattcttgaagagccactttttatttcatttttgtaaagcaacacagcaccatcttctttataattatttccactttaattccatctgtttaaattgaaataaactactatgtcataaaaagattcctcttttcaaagagtttataattgcagtagaacaaagataaaccatgcttattttcagaatatagttgaactttagaggatgttacatggttaagtgacaaaatcagtgctaggaaagaaaatccaaagatgttcagtaaacagaaatatcctagtggagtacagcagtcagaatgttttcaaagtacaaggtcatgattgcaaccccaaaaccatgaggaggtaatcaactcaattacyttaaagcagagatgtcctgcatacaagacaacttttgaataaaatatgcctctccagc

SEQ ID NO: 905399 - DNA, 570 bp, Homo sapiens
aacatcattattcactgaggaaatacaaatttaaatcacaatgggatatcatgaaaacctgctagaatggctagaatataaaagacttagaataccacgtgtttgtttgggctgtggaacattgttaacaatcaacatattttactgatgaaaatctaaaatggtacatccactttggaaaacagtataacagtgtcttataaaactaaacataggtataccataaaacctaaaaattggacatatacacgttatgtaagaaaaatgaaaatagatagccatacaaaaacatgtacatgaatgctgatagccctttattcacaaagggctctgtattagtcccttctcacactactataaagatagacctgagactgggtaatttgtgaagaaaagagctttaattggctcacagttctacagaatgtacaggattctgcttcttggggggcctcargaaacttacaatcatggcagaaggcaaaggagaagtaagcatatcttcacatgcccagccggaaagagcgagaaagggaaggtgccacacactttacaagaattagatctcag

SEQ ID NO: 905400 - DNA, 356 bp, Homo sapiens
cattctttccacaccagctgatrttttggaataagatatcagctgcataccaaagcagagtgactcattgagcagcacaaaccagttcggtttagagttgggactgaaagcagaatctccccagtagtgggtctccctgaatcctccgagccagtgttgcatatgcattttgatgagcatgcatgtttgtttaagactcatctaaggattttattccaggtggaatagagactcttccattgcagtataatcatcattctaaactggtgtgttctatcatgtgtgataccagtggttctttccacctttacaaagtcttctcggctcttgcactgactccacagtactttgcaaac

SEQ ID NO: 905401 - DNA, 620 bp, Homo sapiens
atccgtatgtgctgggcactgctaagtatttcaaagatattaatttacttttcacactgagtgacaataggagtattgtcatctcccactttattcatgagtaaattgaagcagagaaagaaacttgcccaagggaacacagctagtgagagatggagctcgatctgaaaacagatgattgaattcctcctgcaaccctatctaccatgcagtgttacctccacatctccctgctacacagaacaatagtttgccttaggggatgagacatgaatgtggggatagtttcagctatttagtgagtggtactttatacatccacacaatttattaatttgagctttcctagataggtacttaggagaaacaaaaacttcccatccaaaatacgatatataaggaacaatacttccttgcaagagccgttcttctgtaagaatagaagagatctgaacttctataatagttaatcaatgactcaagtttagccaatttgaacatcagcaaatccaacccatcacatctaaccaatgccctggtcamtgatattccagttaggacttaccgatgttgccgtactgcaatagatttggcattattttcctctgtcttttttcctt

SEQ ID NO: 905402 - DNA, 679 bp, Homo sapiens
ttgcatttctctgatagccagtgakcatgagcattttttcatgtgctttttggctgcataaatatcttcttttgagaagtgtctgtttatatcctttgcccactttttgatggggtttttttttcttgtaaatacgtttgagttcatgaatgaatgtagtcattctatacttaaagattaaaattccagggagggagactccaattgacatagcttgggtcacctgtctataacttgggcagggcatgggatgatttaactttacatggtatataggattccccagagggacaaaactaataggagatatatatatatatatatacacacacacacattatatatatatatatgtatatatgtgtatacatatatttacaaatatgtttttatatattgtgagacttcaccttgtgattgtgtgagacaattctccttaataaacccttttcatatatatatatatgaaaagcctttcatatatatgataggccatctgcaagctgaggttatcaatacatatacatatgtatatatatgtttgtatatattgtgagtcttcactttgtgatcgtgtgagtcaattctccttaataaacccttttcatatatatgagaaaagcctttcatatacatgataggccgtctgcaagctgaggaggtaggaagccagtaaggg

SEQ ID NO: 905403 - DNA, 625 bp, Homo sapiens
ctggcaatgtaggaaacatgaccactttgacctagtttgttttagacagttatatcccccttgacggatccaaatgcctttttaagcatacctcatttctagtaccactattagccagaaaaccatgcatgttgaaaaataactttaagtcaggtctaatttttcaaaaaaagaaaagattaaatgattgaagaatctaatggatcaaaagaagatagttcatgaattccagcctcagatcactggattctgtccagctgcctcctttctccaattgggattgtagaatatttaatgagagagctgtctgaactgggagcttgtctagtgctacatctttacaatgacaagtaattatatatatatgtgtgtgtgtatgtatatatatacatatgcataactcatatatatgtattgatttatatacatatttggagaaatcaatcatgtattttattagcataataaccaatatcatagggtttattgagtgatgaacatagccttraaccttactgatatgaatatgaagttgaacacattggcagttcatacaggtaaacatgttttgacttagggtatattttagtgggtaaatagtgtcagaacttattgactagaattg

SEQ ID NO: 905404 - DNA, 578 bp, Homo sapiens
ggaggctgatgcaggaggattgctcgaggctaggagttcaaggaaacagaaatgagaaaattttctaatatagtcatggtttcatggtagaaaaggttagtaaagactagattctgtataaaaaaaaacttcaaaatcattagtttaatttttcttaactacagagactatgaaaaaaggctaagtttttaataatttttttcaaagctaatgccttattggctcttttaaaaattatttattgagtatcttctgatctataagacgtagttgatgatataactgtgaccagcatatagtgtccactctcaagggattctttgtgtcatagaggattgtggcagttttaagccatggctacaattatttgacactccacccatcaaaagatgggctctatgtcccctcccatgcacctgagtgggcctacaattactttccttctgaggctgagtaatataaggtcatgcacttgggaacttgagctggtaagaagcccaactaccatgatgtcaccatcctggaggckcaagacacatactccatatgtaggcaatggcactcttactgacattccc

SEQ ID NO: 905405 - DNA, 649 bp, Homo sapiens
cccatgattcaattatctctcctaccacatgtggggaattcaacatgtggggagatttgggtggggacacagccaccccatatcaacgatgccttctaggtgatttctgcccagttttatgtattgcaaatgagttgcacagagaagcattttcagaggcaacatttctgtcatggtttttagcaagcaatataaatgaaaattataagagtaatatcattatacgataatcattttcttttaataaatttgttctactagaggggagggtttgaagattactgtgagtttgtcagtagataatagtttttcatcccagaaaacactctatccctcaatttaaaaaataaattggagactaattcactgatctttataagagaattacaaaatgtggcatctgtggctgactactactgtgattattactgtagtcctttcaagaaaagccctgttaactcctgttaattctttgatactgaattgaaatatgtatctatttaagataatactgaacacaaaataaaccagccacatgagcctaataaatsttttatgttggtgtgggatgcttctggattcaaataataaaatacctgatacaaactgacttaaacaattaggaaatataaaaagttcagatattgtt

SEQ ID NO: 905406 - DNA, 225 bp, Homo sapiens
agaagtagtaacagagcttgggaaaggcgatgatgaggatctgaaataatagaggccaagggatggcacttaagcaccagaggacaagggctgtaattgttgtaatagcaaaatcagcaaaatttcttttttcatcattaaaaccttcccrcatgtttttcatagcaacgagcatcctactagcacagaaatttgggccttaaacaaggatgttgcattctctta

SEQ ID NO: 905407 - DNA, 592 bp, Homo sapiens
aacaaccaatgaagaaaggaccctctgtttaataaatgatgcagggataactggctaaccatgtgtagaagattgaaactggacccctacctttcctcatatacaaaaattaattgaagatgaactaaatatttaagtgtaagacctgaaattataaaaatcctagaaaacctaggaaatacccttcttgacatcagccttggcaaatcatttttggctaagtctgcaaataagttgtaataaaacaaatattggcaagtaggaactaattaaactaaataacttctgcctgataaaacaaactataaatagagtaaacatacaacctccagaatgggagaaagtattcacaaactatgcatctgacaaaggaatgatatccagaatctatcaggaacttaaccaaatcaacaaacaaaaagcaaataaccccattaaaatttgggcaaagaataaacatatgaaaaatgctcatcattactaatcatcagagaaatgcaaatcaaaactacaatcagatactatctcacaccagtcagctattatyaaaaagtcaaaacaacagatactagtgaggctgaagagaaaaggg

SEQ ID NO: 905408 - DNA, 639 bp, Homo sapiens
tgtggtcattcagtagacataatatgtatataaaatatcaccttcttattttaacaataaatctgatctccctcaccraatgatttttctatagttctaaaaagtaacatttacatgagtagctggctttcattaggttatatttgaaaggattacaagaaatgaaagggccaaaatacaaagaattccagtaaggcaaaaagaagctttcaaaggctcctccaggtctatggaagttttagcaacgcttataatagtaaagcaaatgatctgtacaaactctggagccaaaagccaggccaacctctctcaaagcaaatatatcttcaatgaaaataggagttgttaggaagagggaaagaataaagcatgccaggacagcaagcaagggtgtcgagtatgcttcacatctttgcctaatttccatctgtatcctgcttcctaaacacatgtactaaccctcccccttgaaacatcttggctacctcccagacataaatttattgcactgagatctgagtccagcatttctggttgatggcagttccattagttctgcactgaactcttgataccctagcaaacgagataaataagttactcaattctaatgtactttaatactattcaataaagttt

SEQ ID NO: 905409 - DNA, 678 bp, Homo sapiens
ttcctttttgtctctaaagaattttaattcactcaattattattcrcaaagtagtgtgtaaatttttataattctggtcactaattcaggacctacatttgctaatatccttcttggaatgtgttgcctagaaattaaagttttccagatatgctgatcagagcacagcattcagaagaactctattttcctgagaaaatacttttttctactcatgtatcctaaatttgctttagatattttttacagtaaattgatggttccattgaatttataatcaacttaaactcacagctctttttcaaattatcagtagttgctgtgtgcttaatgtattcaaacccaaacaggaactttttcttcatccatatgcagttctaccatacttattacctattagagaccttggttgttgaatgtccatgtccttaccgattttgattctattaacttattaaactttactccacttggtggcagtcacagtttgataaataaaaaacttctacatctttaggcattttaaacctttccatgagtacagggccaagtttaagtccttaagaacaccattacagacatcttctccagacagatactgatatatttacaccaattctgggtcatgttgttagagtaggtatgaatttatctaaatctactgcaatgtacttctca

SEQ ID NO: 905410 - DNA, 693 bp, Homo sapiens
ttctgatgaaaaaaatttttgcttaatactttcatattttgctagataaagatataaagaatgcactgggacrtttcagaaatagggcttgataaaagctgttattttaaaactggaaaatcttttttgacacgtatttaaatattttatgttttatgagcttgagaaatcatctgtggctgagacgttatgcagtttgtattatcacctgagaccagagtcccttaggcttgcttgaatcaacaacactttgcaattgcatgttctaaaataaacttttgaaagaataaataagttccctgttcttcagtaaaaattgctgtaacgcttttataatcaggattccttcccacttcttgctagagacagttgcactgtgtggaagacagttttcaaaaagcaatcatcaaacaaagcatccagttggtactaatcggtgtagaaaaaaataatcaaattgaaaataaatgtataagaatgatgcatgagggattatatgaaaatgagactaataaaaaggattctagacaaaaggatgatgttaaaggagattctgcatcatttccatcagactgtaaaatgtatctctgcaggaaaatattaagaggaaataaaatttacttaatacaattttacttaatgagtgtagctacactcattattcagcttaatggtacttgaaaagacaaggac

SEQ ID NO: 905411 - DNA, 588 bp, Homo sapiens
attctcatcattttcagatacacaaatcagatgtagatttggtcttttcacatagtcctatatttcttggaggcgttgttcatttcctcttattcttttttctctaaacttcttttctcacttcatttcattcatttgatattccatcactgataacctttcttccagttgatcgaatcagctactgaagcttgtgcatttgtcacatagttcttgtgccttggttttcagctccatcaggtcctttaaggacatctctgcattgtttattctagttagccatttgtttaatctttttcaaagtttttaacatgtttgccatgggtttgaacttcctcctttacctcagagaagtttgatcttctgaagccttcttctctcaactcatcaaagtcattctccatccagctttgttccatttctggtgaggagctgcattcctttggaggaggaaaggtgctctgagttttagaattttcagttattctctctgtttttcctcacctttgtggatttatctacctttggtgttygatgatggtgatgtacagatggggttttggtatggatgtcctttctctttgttag

SEQ ID NO: 905412 - DNA, 621 bp, Homo sapiens
taggtacataatttattatgggatcgactggatgtcttttcctgtctggcctcaactcaactaatctctggtacctcaaatgggaacactgagatgatgagaagctctgstccccttctccacctagtttgtcattctccagcaagataactagggcttctttacatagtggtggtagagtttgaggagcagcaagtgtatagactccaacaaataagccaaggctaagtttctatcatgtcttctattgtcccattgactaaagcaaatttggtcaagcccggattcaaggggtagaagaatagacttcactgctttatgcaagatggtgtaaaattgcattgcaaaagtgaaatgcaaacatacacagaaaaaaaagtagtcatttttgcagtttgccaccataatctgaatcttttataggagaaacatttttattgaatgtcattaaaaataagtaaaataacattatcttaaatacttatttattggtagccaaaccaaacctgttaatatttttcatatagaactctctacaatttggggatattagcagcattcactgattacagcccacagtcaactacaagtcattaacgcagaaataaaggaccaacaatt

SEQ ID NO: 905413 - DNA, 622 bp, Homo sapiens
aagaggaagggttggtcttgctgtcttgcctggcagaggcaaaagaggtagaggaggtggaagggatacaggagaggcaggcacacttggtgcagttttacagaaatacattgtaactcccacctgacatttttactttttcatttttctaaaaatatttctatatggttccagtcctctttcactgtttgctttagtttcaagggtccatgttgcaaaatggacccttctatgatatggacactgaagtcaaaagcagtcttgaataatcagaactcttctgccagattgtctaatgtcaatttgttttttggcaccacttcttctacgtgttcttcctcattatctgacagtggtctggaagcagtcatctccatcaagttgtttttaattaacttcctctggtgtggtgtctattagctgttgaatttctctaaaatctgtatcttgcaacccttcactcccaaccttttttggtcatatctacaatctctttcattatttccttgattgactctcttgtaaatcctgtgaagtctgtacaacatctggaaacagttttctctagcaggaatttactgctttgggcytgatggctttcacaactttttccataacaaca

SEQ ID NO: 905414 - DNA, 563 bp, Homo sapiens
tccatggtgtgtatgtaccacgttttctttatccagtctatcattgatgggcatttgggttgatttcatgtctttgctattgtgagcagtgctgcaatgaacatacatgtatatgtaccttwatactagaatgatttatattcttttggatatatacctagtaatgggattgctgggtcaaatgctatttctgcttctagatctttgaggaatcaccacactgtcttccataatggctgaactaatttacattccaaccaacagtataaaagcatttctcttcctctacagctgcaccagcatctgtttcttcttgactttttaataattgccattctgactggcatgagatagtatatcattgcatttttaatttgcatttctctaatgatcagtgatgttgagcttttttccacatgttttttggccacataaatgtcttcttttgagaagtgtctgttcatggtttttgcccactttttaatgaggtagttttttttttttttttcaaatttgtttaatctacaatccttgtagattctggatattagacctttgtcgaa

SEQ ID NO: 905415 - DNA, 685 bp, Homo sapiens
ttcctcaacttagctcacccacacagcaattaaactccacgtatttgaacaactcaaaaattccatgtgtgcaagaggctaagtgcataagaatcctagggcctagatgacaagaattactaaagaaacgtagcccactccttctcactcttttgcagttttgtatgttatatgtacattagtatgttacatgtacattaatttgcctgaagttgctgtgttggcttaatggaacaccattgccacctgctagccatattgagctattaaagtcctgcaattaaccaaattaagcgcaggttaacacaatcaggttttgctgtgctattgttttaaataacttttacgtatttaaatttagagtgcacagtgtgacacagcttgccatttaatgactcagcatgcatacagtaacctcagctaaccagcattaagtggaagtattatgtcttggcactgaagaatatagactgacatcaaaaataagagtttcaaggctcagttccaccatttgttagttatatgatctttgataagtcacttaacctgtctagactcacattatttaaaaaggtaaaaatagaataatagtagtgccttcttcatagggttgatataaccattaatgaaataagaaatttgaaatgcttacrtgataactaccatatggtcacaatcaatggat

SEQ ID NO: 905416 - DNA, 537 bp, Homo sapiens
tgctaataatgtattattgtaatctgctgttttyttttttcatttaccatatacttacatctcttatctaggattccctgttctcaacctttagttcattatcaccctcctctcctcacaaaggagacttttgagaccactgccaatgaaattttgatactgcatttgtattgtttatctgtatatatctgtttatgtatttctgtgccttatacatggaaagtaacattttctttcatttctcccaataccccagagccaattttcacctccttgggggtgatgtcaactccattgagaacatgtatcttattccttttttcctgctacctggcagcatgagatgttatattaatcctgtctttttattttctgtacttttgatgctttgacatctagggacttgctgactctggaaagactgccctttccaaagttaggcaattcttagagattaaaaaaaaagactccccttccagcatccttttcatatgcctttaataggcaaatcaaacaatctactacccacatcccaac

SEQ ID NO: 905417 - DNA, 585 bp, Homo sapiens
ctagcaaaccaaatccacaacacatcaaaaagacaatatgctatgataagttgagatttatcccagtgatacaaaaatagttcaatgtacaccaaatcaataaatatcacctcaacataatgaaggacaaagaaatattatatcaatatacactgaaaaagcatttgataaaattcaacatttcttcatgatgaaaattctcaacgaattagcatagaaggagagacatctcaacatattaaaggccctatatgacaaacttatgggtagcattatacaatatggggaaaagctaaagtatttttcctctaggaaatggaacaaaacagctagtctactttcatgaaccctattcaacataatactgcaagtcctagctagagcaatcaggcaagagaaagaaataaaaggtatcccaattagtaaaaaaaaaaaaaaaaaaaaaaaaagtcaaggctgagtgtggtggctcatgcttgcaatcccagcatttttggcggccaaggcaggyggataacccgaggttaggaatttgagaccagtctggtcaacagggtgaaacctcatctctactataaatacaaa

SEQ ID NO: 905418 - DNA, 641 bp, Homo sapiens
tgtcaagaagctctgggcactttctacttaacagaaatgtagctgaaaatatcgggacatacaaaggaaagkaggattttcatcactacatgcattcctcagggagggagatcaccgaggctaagccagagtagatatcttcacccaaagtaaaattaggtgaaccctgagatggacctggctagaagctctggaaacagagcctcatctaaaggaagaagtctgcttgtagtaatgggaaaacttgcacatatgttggtatctctgtccagagagaaacagaaaaggcaagtgtgtggctactagatatcaaggcaaaggattacaaccagagaaatataatgtataagaaaattggaaaggatcacagagctgactacagaggatgacaggctttacctattaaaattatgagcagtgcctcctcttgtgagtctcactgaccttcatatattttcctttccactatttttctttcatcaacataacctcaaatcaatattattatttttcttcttttacctcactgcagaccagactttcccttgtggcaccatttcctgcttctggaaaatgaaaacagacacatttctacatttttatatgatttgtccctaacattgctcctggcttctccaata

SEQ ID NO: 905419 - DNA, 599 bp, Homo sapiens
gagatgcacagagcatggtatccgggaagggggagaagcttccacgccttctctgagtggattcccttcccagtacctcaaygtgttcaccaactcagaatctcgctgaaccccattgtttaggattttcatggaggttccgttatgaaggtatgactgattaaatcgttggttctaggtgactgattaatttccagtccctctctcctctctggagattggggattgaagctgaaagttccaaccctctagtaataccttggtctttctggaggccagccctcctcctaaaggtatctaggggcgcccatccaccaatcatctcattagcctacagaaagacactcatctggtgatacaagggccttagatgctcttacgtcaggaaccaaagactaagaccaaatatcctaacaaaagatctttctatcaccccatcagtcaggaaattgcaagggttttaggagctcgctgccaggacataaaccaagtatgtatgtatataatatcacaatatcacacagtcttaaaaagaaagaaatcctgatgcatgcgcccacatgaatgaaccttgaaaacatgctaagtgaagagagcca

SEQ ID NO: 905420 - DNA, 578 bp, Homo sapiens
ggagtaactgcaaagggtgtgggatatcttttctggggtgaggaaagtgttctaaaattgattgtggtgatggctgcacaactctgcraatatactgaaaaccactgaactgtacactttaaatgggtgagctgtacaggaattatagctcaataaaactactaacaaataaataaaagaataggctgaggcaaaaagtagtgaaggaaagggaaagaatgacagaatgccttaaacccagggtgacaattaattttaggtttctgctacagtgtattttcctttggcccttagtaggtatctctaaaaatgagcagaaaacgcaacttgtaaaaggcagtgaaagtcaggaaagagaggtaatatacaaagccaggagtcaggcaaggggaggctggagccaaatagctgaaaaatgtaagggtctagatttaaacagcaagggctgagacaaaggagaagagatgcgtatttacagatataagaacatgcagggcatcctcccagctctttctgtctgtgcttcatctttctcctttgtttcatttctgtccaacactgtctataagtcacaccac

SEQ ID NO: 905421 - DNA, 583 bp, Homo sapiens
aatttagggaatgtctaaagaaagaaaaagaccctcatgtaagcaaataaatgataytaaaggaaagataggtcttgtctgccttaccagatatgagacgtgatgcccttaagtctagtgaaaaccatctacacgataattatgagtgaagataataatggtaagcagtagaagcttactcttcatattcacattgcacttttcaaataacaactgtaacatttcttgctcaagtcctcaaagctcagaaatagttatattcgaagtctgtgccaaccaaatggatgtattaaatacattgctggctaaaagccatcgaaaaactctcttttcatttttccttcacccttctctctatctatgcaagaaagacctaggcaccatggtgcaaaattctactataatatcactcttggaattacctggctttggaacattgtacataatagttctaatgtaacagcaagaaatttcctcctcctgtttatttttctgaagctgtaataagcaatcctgtgtgacattgcctgtggtgcggttgccaggcagcagaaagagatctgcagcaggaggcgggagagcg

SEQ ID NO: 905422 - DNA, 673 bp, Homo sapiens
aaactgcccttatcttgtctgagtgtcaaaatgtcatccaggagacctagagacaaagagtttacaggtggaaagtccagctgtaaattaactgcattgtccatatcctcttatttttctgaatttggggcttaaatttggggaatgcaaaatgaagagttttcagagaagaggaggtataaaaacatgagacagtctctagaggcaggtaatagttacccaaatgtttgttctctccaggcaatatttgaaaacacaccataacaagaaacaataattagtagaaacttttaattcttttaagctgtgagggtttttttgttttgttttgttaaaataatttaaaagcatgtccaaaggaatgagggctaatagaatattatagtgctaaaaaaggtacatctgtgagaaaaaatgactgagtcattttacagaaaaacacaaattataattttctccttttggttcactattcacgtaacaaattgtagtaaataatttactaatactgctctatgtgcaagaatttagacatagagagakaaatacacaaacagatgataaacataaagattttaactttagtcttaatatataattttataaatatattaaacaaaataatgcttattatattgaatttaccattttaattttctgcaacaatttcctg

SEQ ID NO: 905423 - DNA, 617 bp, Homo sapiens
tcaagagaaacctttttagttktaagaacaacataactttatacagaaaaagtaagcattaaagcactattattcaatgaacaaatatttcttaaacaactctatgcaaaggatttatttaagcatcctgttcgattactacagaggatagattttgtttataaggtttcagttttgttttttatatgtgtggattgaatagcttctaatctccaacttttcttagaaggatattgattcaccttttgaaaatcagagctattaaactctcagtttatgtgactggggcgttattgactttattgccattctaaggataagcacgtgaccaccctctcggtcaagaatagaattttatatctcctttccagagaaattggttcatagatttacccaagttagatctatggcagtcttttcaggcaactttgctgaaactattaagaaagaggcattgttattacttcttacatgaactattaagatacggtcatcaagcttctgggggtcaccattgggtagagtaccagcttggaaataaaaccaacatggaagagagcacagctgagagatgcaaagggagatctagccttgataataatatctaagcagctgtt

SEQ ID NO: 905424 - DNA, 632 bp, Homo sapiens
ctggaaacactgttttggcagaatccataaaggkttatttgggagtgcattgaggcctattgtgaaaaaggaaatatcttcagataaaaataagaaagaagctttctgagaaactgctttgtgatgtgtgcattcatctcccagagttaaaccattttttggagtgaacagtttggaaacactgttggtgtagaatctgcaaagggatatttcagatctcattgatgccaaaggcaaaaaatcaaatatcacaggaaaaaaatttagaaagaagttatctgagaaactgctttgtgatgtgtacattcatctgtcagaattaaacctttctttacattcagcattttagaaacacagtttttgtagaaactgtgaagttatttttggaagtgcattgagttttatgttgacaaaagaaatatcttcagataaaaactagaaaaagctttctgagaaactgctgtgtgatgtatgcattcatctcaaagagttaaaccatctttggattcagcagtttggaaacactgttttttgtcctttctgcgaatggacattttggaactcgttgaggccaatggcaaaaaagtgattatcccaggatgaaaactagagaaaacctctctgagaaacca

SEQ ID NO: 905425 - DNA, 574 bp, Homo sapiens
tcttcagatcaaaagtaaagagaagctttctgagaaactgctttgtgatgtatgcattcttctcacagaattaaacctttcttcagaattggcagtttggaaacactgtgtttgtagaatctacgaagatattttagatagctcattgagggcatatggcaaaaagtgaatatcccaggattaaaactggaaagaagctatccgagaaaccgctctgtgatgtgtatattcatctcgcagtgttaaacatttattttctttcagtagatggaaacactgtttttatagaatctgccaagagatatttagaagcgcattgagacctatggtgaaaaaggaaacatcttcagataaaaactagaaggaaggtgtctgagaagccactttgtaatgtgtgcattcacctcgcagacttaaacctatcttttaattcagcagtctggattcactgtttttgcagaatctgtgaaaggatatttgggagcccattctggcctaaggtgaaaaaggaaatattttcakataaaaactagaaggaagccttctaagaaactactttgtgatgcgggcattc

SEQ ID NO: 905426 - DNA, 607 bp, Homo sapiens
tggttttcctgatatccacacttgggtgtgacagagacagaaactatatcaagtgacgtgatgctactgatatgcttgaacttgtaatatcgggttgtggattagaatggagtgattctacacctgcccacctctcatctttagttgtttgcccctagaaatttcaacttgattatactgataaatttatgtgaaatgttcccgatcatttttattccagtgtgctttggccctctttaccctgtcttaattttcttaatagcaattatcactacctgatactaaattttatatttgtttgtttattgcttgtttccaccactacatgtaggttccataagagtagttactacatcttcagtatttagaatagtggctggcacatagtaagcactggatatatatttttaaaataaatgttgagtggatgaattagccacaggcaagaaggacagcatattatcaatgatcagtatcatgtcccctccaytggaatctttcagacgaagatctctaggctgttttgctatagttttgcctaacgttgggggagatgagtgaagtgctgtaccataaatgttaagagcgtgggttttgattcagattc

SEQ ID NO: 905427 - DNA, 590 bp, Homo sapiens
atactgttacagtgtcattttattaaacattttaattcacctgtcaaaacaacagattaactccttagtgtaaactactagagataatttttaagagggaaatggaattcatatcacctcttatttattatgagcaatattttaatataaaaattttatatgtgaaaatgctattttaggtactttgccattctctttataaatgtgtatttgagtggttctgtatatttatttacattatcatgtgtgaatatgttcacccatatttcaggtcactgcattttattctcttaatacaatgttttcacaacggttaccttgctttccaaagataaatatattttggattagaaatctgagttgttttaatttctaatacctcttgtaaaagaagaattaataactttttaaagcagtattcaggtaaatacaatacattattttgttttctaacaaaagcagttcttagttcaggaagaaaagactaatctggcttctatgtcaatttgtctccatagaaatgaaagcctcctcttgcttctttcattattagcttcacaccartgactgtgatgcattagaatttggac

SEQ ID NO: 905428 - DNA, 548 bp, Homo sapiens
ataaatcattctactataaagacacatgcacacgtatgtttactgcggcactattcacaatagcaaggacttggaaccaacccaaatgcccatcaataatagactggataaagaaaatgtggcacatatacactatgtgtatatgtgaatactatgcagctgtataaaaggatgagttcatgtcctttgcagggacattgatgaagctggaaaccaccattctcagcaaactaacacaggaacagaaaaccaaacactgcatgttctcactcctaagtgggagttgaacaatgagaacacatagacacagggaggggaacatcacacaccagggcctgtcagagggtggggagctaggggagggatagcattaggagaaatagctaatgtagatgatgaggtcgatgggtgcagcaaaccaccatggcacgtgtatacctatgtaacaaacctgtacrttctgcacatgtgttccagaactaaaagtataatttaaaaaaaaaaactatgctgaaatcactgtatacttaaccccactggtatccaag

SEQ ID NO: 905429 - DNA, 579 bp, Homo sapiens
tctagtgaagctatgggaacaggactgctatcctccagacccaagaagggtagagccaccagcagcttgcaccctcagcattgaaaaggcacagacaccagactccaacctgtgagagccacagggatggagcttcccaaggcattgggagcccaccccttgcaccagtgtgccttggatgcgggacacagagtcaaagattatgttggagctttaaactttaatgtctgccctgctaggtttcagacttgtgtggggcctatttccctttcttttggccaattcctcccttttggattgggaatgtttacctaatacctgcaccactgttgtatcttggaagttaagaatttgtttttgattttacgggctaataggtggaaagaaatgtgtcttgagtctcagataagactttagactttggatttttgagttgatggtggaatgagttaagactytggatactactgggaagagatgattgtattgtactacgcaagaggaacatgtgatgtggcgggagaaaggggaccactcgtacactgctggtgggaatataaattagtatggctactaagg

SEQ ID NO: 905430 - DNA, 623 bp, Homo sapiens
agcacagcaacctgtgctaagagtaatgactttaaaatgggtttcagaaagaatattatctttttgtggtacttgaaaattttcaggagtgatattcattctattcaaatgttttgcaattgctttgactgacacaaggcaaagcatgagaagtgaatttatctttagtttcatcatttattttaatttttcgtttttaaatggcctttcattaattttcctctccttctatccattgtataattttagaatttcaaattacactaataatatttgaccagacatcaacgatagaggggccctgttcctcagttcttttatgtttcttgtagctgctttggtatgtatgaaaacctaagtaataattcccaagacattgtttctgaactcaggttctggctctgttcctctcttacagcttttatctggtgcgtacctcaagtgataacaaattctggcattaattatattctatcacttaaacatacttacagtgatcatggagaaatcatgctccaataacattgragcttataattaagttagagtataaatgtgtattatattagagagttggaatctaacacagaaaaaaaggcttttaaaaccctcgctggcttggt

SEQ ID NO: 905431 - DNA, 623 bp, Homo sapiens
agcacagcaacctgtgctaagagtaatgactttaaaatgggtttcagaaagaatattatctttttgtggtacttgaaaattttcaggagtgatattcattctattcaaatgttttgcaattgctttgactgacacaaggcaaagcatgagaagtgaatttatctttagtttcatcatttattttaatttttcgtttttaaatggcctttcattaattttcctctccttctatccattgtataattttagaatttcaaattacactaataatatttgaccagacatcaacgatagaggggccctgttcctcagttcttttatgtttcttgtagctgctttggtatgtatgaaaacctaagtaataattcccaagacattgtttctgaactcaggttctggctctgttcctctcttacagcttttatctggtgcgtacctcaagtgataacaaattctggcattaattatattctatcacttaaacatacttacagtgatcatggagaaatcatgctccaataacattggagcttataattaagttaragtataaatgtgtattatattagagagttggaatctaacacagaaaaaaaggcttttaaaaccctcgctggcttggt

SEQ ID NO: 905432 - DNA, 623 bp, Homo sapiens
aaaaataagtagttaacaccacatccaatgatctcacctggtgactgttataactgtgtctgaatttactacttaagctccagtggctatctatgcagatarttcacttggataaattagccacttaatttaatataatagcaaatctgttgtcaatctaaatgtcctacaaccaagaaaacatcttaaccttcttttatgcaggaaaacatccagttgcattaacgaatatgctttaccgctaatgaagagtgttgtctaagattgttgtctaagctggttttatactcagcatgggtaaaagagataagtggcttgaatagttagcacaatgatcccttccacgttcttaaagtaccagcagactaaatattataatttaatgtatttatgcaagaaaattaaaatttaaacttgtttgtatgcatggacattattttatttttgtactatgtagtaattgttctgatctgacaatttctatggactgttttaagatttttaaaagcttgactttttttcttttttaaagttaatacattcccttagcacttaacccatatttaatacaaagacttagatgtgttttcttcctttcagattttaggcaaatttgttgagac

SEQ ID NO: 905433 - DNA, 638 bp, Homo sapiens
taagcatcctcagacctctgtttctttaaagaaaaaacagtaacagactttcctataacatgctgagtacaagtagtttaaagamgtattagaattgctttcctttcctttccttcctccagagctccaagcagggaaccatcttatgactatttccttaccagcacgacataagtagggtgaccatatgtcatattgcatgactcttgtgcttacataattattaaaactgtcaacgtgtcccagtttagataataagttatatgatggcctttgccataagagattctgatctttaaaggagttgcactttgactaaaggaatgagctaaatgtcactgtagaggttatcagagaggcacgtatgtggaatgatagtcatgtacgggaacacatttagactagtttgacaagccaggtggtcaaatttctgtagttccatgtcatagaaagtcaatataaactacctttttttctaatttcttaacttccttaaaatataacttccttaaaatataactgacaacatcaaattaaaatatatcttaacttccttaaaatataactgacaatatcagcaattaatttgaggcttataatgtgtagttctaaaatatatgacaataatagcacaaaca

SEQ ID NO: 905434 - DNA, 752 bp, Homo sapiens
gatatattttaacatttattgccagggctcccttttgtttgtcattttactgaaagtgcatgtttagctcactcgggatcatcataatatggtcaggtctactaataatgaacaaacaccaaatattctagcagctgtattttttttaagttctgatcatttatcaactatcttggatctgtaaatattctgctggatcatgagcctggttctgctataccacaaagcaccctataaatactgacgtataaaataaatgcttccttggagtattctgagttctcccttttctctcagcatgtattccagggaaaagttatttttcctcattataagtgctgctcatcatgataaggaaaaaaaagttactgactcttcatgagtaagacttactcatgaacatattctgatagaagtggtggattttgatatatccatctgtttattccttctggtttactctccttgggactaagaagacacatgtgtaagctaactggccggggttaggaatggctatggactagaaaattcagttgaatcaaacccttgaccttggccttcttagcaataggattataccaattgaactaattgtgtgcagacatttcacgctacaataacctactgctgagaagatgaggtcgaagagtgataaacatcattatgactacaggtacagaggaagaagcaaggccaatagacgtccatygatatgcttcccatagagtgtgttatgccttcttttagtg

SEQ ID NO: 905435 - DNA, 600 bp, Homo sapiens
ttgacacaactcaaataagggagtttargagtaaactcaagtctatataggaatttactatttgataaagttgacatttgaatcaatcagaaaggctggaatggcaagttagagaagggagatgacagttgaaacaggagcaaatgacatacacacacatgcacacatatacccatagaaaatatatcaaatatatagagacttttgctttgcatggtgttggaatccatggctcaactagcatgattattttggtgacatccatggctcagttcttttgagagtgcaagaaattgctcaagtggccagagtaatataaatggcaaaatcctgttccaatagtttacctgatttcctctagatagtagaccctgaagattgtagactacgaaacctaataagctccatgaaggcagagacaaggtcagtcttattaaaagttgttctcctaaccaagtaggaactcgatatgttgaataatgaataaatgcttggaaattgtttgtctttctttccattaggtagcaggcctcaatctgtatttctttgtgtttttaagttgccttatgttatatctggctacattatcattagctgagg

SEQ ID NO: 905436 - DNA, 600 bp, Homo sapiens
ttgacacaactcaaataagggagtttaagagtaaactcaagtctatataggaatttactatttgataaagttgacatttgaatcaatcagaaaggctggaatggcaagttagagaagggagatgacagttgaaacaggagcaaatgacatacacacacatgcacacatatacccatagaaaatatatcaaatatatagagacttttgctttgcatggtgttggaatccatggctcaactagcatgattattttggtgacatccatggctcagttcttttgagagtgcaagaaattgctcaagtggccagagtaatataaatggcaaaatcctgttccaatagtttacctgatttcctctagatagtagaccctgaagattgtagactacgaaacctaataagctccatgaaggcagagacaaggtcagtcttattaaaagttgttctcctaaccaagtaggaactcgatatgttgaataatgaataaatgcttggaaattstttgtctttctttccattaggtagcaggcctcaatctgtatttctttgtgtttttaagttgccttatgttatatctggctacattatcattagctgagg

SEQ ID NO: 905437 - DNA, 610 bp, Homo sapiens
ttggaagaatgatatattttgttttggatgtttacctagtaatggggttgctgggttaaatggtagttctgttttaaggtctttgagaaacctgaaaactgctttccacaatgggtgaagtaatttatgttccyaccaacagtgtgtaagcgttcctttccccctgcagccatgtcagcatctgttgttttctgactttttagtaatagctattctgactgatgtgatgtggtatctcattgtgcaatcatccatttaaaaaatatgtttgatctgctgtggattgaatccatggatgtggaacccagagaaatgaagggctgactggatagagtaaaattaaatgagtagtgaagataaggttaaaaaaaggcaggttggaaatatttatgaaggaagttgaatacaaggaggagaacagtgttcttaaatagtgaagctttttaattaagtcagtgatacgttcaaaaagtaataatgtgattaatgctggtaagaaatggaagccatgaatcaatttggagagtattccaacattgaggaattatgtgaaatgtctgaatttaaggtcttgacaactgaaaggaaataaaaaggaaaatatattctt

SEQ ID NO: 905438 - DNA, 626 bp, Homo sapiens
tgagtggatgaaggaaagagttgtcagaaattaactcagacaagtttggggaaatcaggtactgkagaaacctttaatttaaataagatggtaagtaattggaggatctgaagcaatggaggggcatgatctgacttacatttcagcagggtgactgactgctccatcacgaaggtggtaagggtagaagcaggggaaaaaatgagcagaatataacataagcctgggtgcaagagattaatggggagtagacttgagagattctagaggtggcagtgagaatttgtttctgaatatattttaaagttagagccaataaaatttgctgatgtgttaaatacataaggcaaaagagaagtagaggagttaaggagagtccccaagggttttatactgagcatctggaagagttgctactaaccaagacagcaagagaagcaggtttggaagaaggagcagaaatttgtttttggacatgttacatttgagatgcgtattagacatccatgcagaaattttaagtagatagttgtgtttatatgtataggatcccagaatagataagtttggaagtcatgaggatatatacatacatagtaagaaatgccatgatagtacacatagag

SEQ ID NO: 905439 - DNA, 621 bp, Homo sapiens
aatgagatatcactgcacacctaacaaaatagctaaaatttaggaggctgacagttccaagtrtttgtgacaatgacaaggaagtggaaatcttacactttgctgacaagagtgtaaaaaggtttaaattcattggaaaactgtttagcagtatctgctaattgggacactcaatacgctttgattaagcaatttcattgctttctatttacttaatagaaatgtgtacatatatatattctccaaaagaaaaatagaagaaggctcctaacagcattatttttaatgaagcaaaaactgaaaacaaccgaagtggccatcagtaataaaatgaataaataaactgtggtatagtcatagcatacaatactacacagcaagaagaaacactattatttcatgcaacaatatgaaactcacaacccagatgttcttcagtaataaaatgaataaataaactgtggtatggtcatatcatacaatactacacaagaagtagaagcactaactactactgcatgcaacaatatgaaactcactatcataatgttgagcaaaagaagccaagcacaatagaatgcatacacattataccacattattccatttttcaaataccag

SEQ ID NO: 905440 - DNA, 612 bp, Homo sapiens
tattaaaatttttcagtttaatatccagattcattgttatgtttgtttgctttacaattaccataaaggcggcaagacatagtggaaagaatttgagctacaaaattagagacctgaattcaaaatcaagatatttttatataacttctctgaccttcagttttctcatcttgaacaaggggataaaatcaggcttgaaaggagacaacatctataaagctacccagtatacttttaggcacatggtaggtgttcccgaaatgttaattttcatggcattacttttcaacttagattcacttgtggttttaattatctagagaatagtgcatgttcaaatgcataaaacacaattaattatattatcgtgcgcccttttggggctttttttttaatctatactgtaataaaggtcatttagtttgcatctggatctcttgggcatagttgcaaatatttgtatgatgtagctaatatcacaattgttaaataaaaaacagtttgctaccatcatctgtcaggcctacctttgtcaaagtttcctataaataattaattatactcctgaaaggagaagggaactmacatcccaaaaaaagaaaaaaatatata

SEQ ID NO: 905441 - DNA, 612 bp, Homo sapiens
tattaaaatttttcagtttaatatccagattcattgttatgtttgtttgctttacaattaccataaaggcggcaagacatagtggaaagaatttgagctacaaaattagagacctgaattcaaaatcaagatatttttatataacttctctgaccttcagttttctcatcttgaacaaggggataaaatcaggcttgaaaggagacaacatctataaagctacccagtatacttttaggcacatggtaggtgttcccgaaatgttaattttcatggcattacttttcaacttagattcacttgtggttttaattatctagagaatagtgcatgttcaaatgcataaaacacaattaattatattatcgtgcgcccttttggggctttttttttaatctatactgtaataaaggtcatttagtttgcatctggatctcttgggcatagttgcaaatatttgtatgatgtagctaatatcacaattgttaaataaaaaacagtttgctaccatcatctgtcaggcctacctttgtcaaagtttcctataaataattaattatactcctgaaaggagaagggaactcacatmccaaaaaaagaaaaaaatatata

SEQ ID NO: 905442 - DNA, 677 bp, Homo sapiens
catgtaaaagctagtttctccttaatttacatgtacaatttaaccttcaaactgagtgtaaagtgtcttaaaggataaaacaaatgtatacatatcagggtttgttggtcttagtcttttctacaatggcacaggagtatagagctttttaaagtattttatagcattcattacttggttgttaattataaacagggaataggaaaatgggaaccatggataaagaaattgaaagaagctcctccaattcctaaagatgtaatgtttaatgaaatcattgtgccaactctggacacaattcgatactctgcattaatggaattgctgaccacccatcaaaagccttcaatatttgtaggaccaacaggaactgggaaaagtgtttacattacggtaagtactgcagaaatctgcatattaaactgtgcataatcttcctaagaatgtttttgaaatagcagacaaataattttttaaaaatactcaagtactttgatgtttgaactgcagagaatttttgaaaaattgcctacttatttttttttgttttagccaaaaggccaagaagtgataattgcctatttattttcaaaagttgattaatgatacrttgccattttataccattaaattgttgtcccatttattttgatattttaataagaattgcttgttcc

SEQ ID NO: 905443 - DNA, 624 bp, Homo sapiens
accatccccatgattcaattatgtcccaccaggtctctcccacaacatatgggaattatgggagtgcaattcaaatgagatttgggtrgggacacagagccaaaccataaaagagaggacagacgaaacagtttaaaacaccacagcccaaaactcatacaggaaggaaaacaatctgcctgggagaccactagaaaaggctctggtatcagggttggcagataccaaaggagagaatgagtaggaaggctgaaaaccaggaggttatctgaacagctttctgccaacaaattacataaaaagaatacgttcccaaaaggcaaaaaaggatcaaatatgacccaatcaacaacagaaaatctgaatagatctgtatcaagtacactaattgaattagtaattagcttgccaaccaagaaaagttcaagtccagatggcttcactaatgaatttgatcaaacaaggaggaaataataccaattctacacaaattctttcagaaaatagaagaggtaaaaacacttcccaactctttttatgaggccattagtggcctgatatcaaagccagacaacaatatcacaagaaaactacagggccatatcattcatgaatataaactaa

SEQ ID NO: 905444 - DNA, 611 bp, Homo sapiens
ccatttcaatatggataccttttaatttttttttttttttggtcttattgcacttactagaatctacagtgtaatgttgaattaagatggtgagtgaagacatatttgcrctgttcttgaccttagaaggaaagcatttggcttgtcaccattaagtatgttaatgagttgcttcttttgtttgttcaattgttttttatagacgctggtttttgtttttttttttcttttttttgagatggagttttgctcttgtgatccaggctggggtacagtggcgtgatctctgctcactgcaacccacacctctagggttcaagtgattctcctgcctcagcctccagagtagctgggattacaggtgcccactaccacaaccggcttattttttgtatttttagtagagacaatgttttgctatgttgggcaggctgatctcaaactcctgacctcaggtgatccacccaccttggcctcccaaagtgctgggattacaggcatgagccaccatgcctggccagtagatcctgtttaaagacaggaagttatttctttgtactcttggtttgctgataatttttttaaaaatcataaatggatgctgagttttt

SEQ ID NO: 905445 - DNA, 547 bp, Homo sapiens
ccggtctgcacagttcttcagaggacccctgggattgaatctcagttgcccactggtaaccagctgcttaatgcactcagttggagctttctcccttccccaggccacagtccccattcgcctgtacttcctggaatcacctctaagatgaactacccgcccccaagtgcttgtctcagcatctgcattaggggaatgcaaacttggcatataccctccaaagacagagcatttacaattctacaatgaatgcattaactcacatgtcttaccataggggtttgctatttattcacctattaaaattggtgaaaaaaaaaaaagtttgtgaccaagcgcagtggctcacacctgtaatcccagcactttgggaggccgaggtaggtgaatcacaaggtcaggagttcgagaccagcctgaccaacatggcgaaaccccrtctctcctagaactataaaaaattagctgggcgtagtggcgggtgcctataatcccagctactcgggaggctgaggcaggagaatcacttaaaccagggagcgggagg

SEQ ID NO: 905446 - DNA, 639 bp, Homo sapiens
ctccgtttcagaaaaaaaaaaaaaaaaaaagagtcagtgtccatacaggaagtcaggagccacattaggtatttcaaaaagaaaagaggaagtataaaaaactagttttcaacatgctgccaaggcctaaatacaaaaagaaggtgtgataacatggtaacacagagatgattaactgcagggagtagcaaccaccccagggctggaggaacatgggatgagagatggcattagcagagcccaggagtgtacctgctacagcagggctgggatgctgcgggtcagagctggagctgcccaggagagatggtcctagtcagtgctagagccatgcaggagggtgctactgaaagaactgaagaggggacaccctgctgaggctatggtcaccaaaaagagagaagctgtggctaaagcttagattatgtaaaaggatgcaaccctttctgaagacacagccaaaagcaggaaaatggaacaaattcaagactttcctctccctaacagtgtctccttgttggcaaaagcaaacaagaagccagatggtaggagagttcaggaagtgtaattcacacckgctcccagctttgacattataggaaaaggtacaggaagatcacctctactggagaaaggaga

SEQ ID NO: 905447 - DNA, 698 bp, Homo sapiens
ggtcatcagtaaacacatccagaatttctcactatctctcatttttaaaataccacgtataaatgaatatatttaatttttacagagacaaatggcatatgcaagcttttgtaatttgagaaaaaaattcttatagtacaaaaattccaaattataattatagtaagggttttattttgccacgctaattagataaacttaatttgataaatacacaccatgtgaacacaatgttatgtttttaacaacccttcctgatagtgtgtgcttctataaaatcctttattaaaaatcatgatctttaaaattttctgcatatttttatgaggatacacacttatttatgatgtgtgtatgtgactacatgtgactttctcactctttgatacttataaagtcaggtcagggtgaccaagaggtttgggaagaaaaatccccatcaagatcttaaccaattattttacaaagtgaaagcctgttaccgtgttaaactctaatctctcatcatgaacatctattaacaacttctctatacttccaagtgctcttccgccctcttccttstgtcccccaaatgatatagagcagcatttatacataggcacacatgtatcatgtatcatttaaaatgtgagaaaagatctctaactttcacaggatagagaaagtgaggtacagatttcttgtaagatctcttt

SEQ ID NO: 905448 - DNA, 617 bp, Homo sapiens
aaagaaagataattaagataattaattttcttaagatatcttaagataattaattttcttaagatatcttaagataagagaaaaacagaaattaatggaacagaaaacaaatatacagtggagagaataaacaaagagatggtttattgaaaatacaaataaaattgataaacatgtattctacttctatcaccaggtaagctcctaccagacatgactcttccccagataataagtataaactttggacaaaatacaaaagcaacaacctgaagttggagagtgaacaaaaacaagcagattctggaaggaagtgacatcaggaaaaggaatgatgcagtgtgagttgcctggttttatggcttttaacctgagaataggccaaatcaggactccatggttgtattagtcttctcaggctgccataacaaaataccatagattgggtggcttatacaacagaaattaattttctcacagttctggagactggaagtccagtgtcaaagtgtaagaagggttggcatctggtgaaactttctccttaaattggagatgrctgttatctcactgtgtgctcctatgacctcttctttgtgcgtgtgtgagggaagagc

SEQ ID NO: 905449 - DNA, 625 bp, Homo sapiens
gtggataaatgaagaaatttggggaatctcacactggagatgtttgatgtagktaaatgatctgagattcattaggtgtgaaataatgaagtgtatatatagttctgcatatacatgcctgggaaggtataatattcagagcatactatcactcaattgtatctgctgtggcctcagacagtacagggcagtgtttgcattgataatagaatgggaaagggagggagcggatgcatcagtggctccatgtgttactccatttctttgcagatttcctcagtgagtcctctttgatgtagtatgttgcaggagaaacaatgatatgagtcacagagtttctgtaagttctgacctcccttgtccagctgcttagagtagggcagcccttgtaaagtaaaaagagccagatttgaggtgaagcttctaacatagcacaataaaaagagaagaatttgcccccagttttgttaccattttccttcagcgcacttggaaggaagaaggaattaatgaggctcattgtgtatgcaagggtaagcacagtttgtgttgagctgagtctagcagaagctgaaaaagcatatctggcacagctaagtaattagacttcacatttctcacattt

SEQ ID NO: 905450 - DNA, 516 bp, Homo sapiens; identical to SEQ ID NO: 901791

SEQ ID NO: 905451 - DNA, 654 bp, Homo sapiens
ataccatttgacccagccatcccattactgggtatatacccaaaggattataaatcatgctgctacaaagacacatgcacatgtatgtttattgtggcactattcacaatagcaaagacttggaaccaacacaaatgtccaacaatgatagactggattaagaaaatgtggcacatatataccatggaatactatgcagccataaaaaaggatgagttcacgtcctttgtagagacatggatgaagctggaaaccatcattctcagcaaactattgcagggacaaaaaaccaagcaccgcgtgttctcacttataggtgggaattgaacaatgagaactcttggacacaggaaggggaacatcacacacctaggcctgtcgtggggtggggggaggggggagggatagcattaggagatatacctaatgtaaaggacgagttaatgggggcagctcaccaacatggcacatgtatacatatgtaacaaaccttcacgttgtgcacatgtaccctagaacttaaggtataataataataataataaaacccagaagacaaaaattcaattaggaaatggtcaaaggacctgaataaacatttctccaaagaagacatgtaaatggytgatgagcacatgactatatgttcactat

SEQ ID NO: 905452 - DNA, 620 bp, Homo sapiens
gcttggcctcttcagagaccttttaatcaactgaaacttttaattttctttacttttaaaattcatttctatatatttttwaaaaacttagagacagtagagacagggtctcactgttgcctgagtggaagtggtgcaattatggctcactaaagccctgaactcctgggctcaagcgatcctcccacctctgcctcctgaggaactgggacaacaggtgtgcaccaccattgctggctaattaaaaaaaaaattgtagagacagcgtatttctatgttgctcaggctggtcttgaactcctggcctcaagcaatcctccagcctcagcttcccaaagcactgggattacaggtgtgagacactgtgcccagccagaagcttttaattttaacaaagtcaagtacatttgttttgtctttctttttattttctgtttaagaaacatttgcctacttgaggttcatagaataattcatcctatggtttctttcagatgatttattgtttcagttgtcacatttacatatttgtgccatctcaaatgaatttttgtatatggtacaaaccagtggggtggggcggtggggggattgtactcatttattttccagtgctattc

SEQ ID NO: 905453 - DNA, 585 bp, Homo sapiens
tccatcagtggtagactggataaagaaaatgtggtacacccatggaatactacacagctataaaaaggataagattatgtcctttgcagcaacacggatgcagccgaaggccattatcctaagtgaactaatgtaggaacagaaaaccaaataccacatgttctcactcattaagtgggagctaaaccttgagtatacatggacacaaaggtgggaagaatagaaactggggcctacttaaagagtggaggatgggaggagagtgagggtggaaaaactccttttgggaattatgcttattacctgggtgatgaaataatctgtacaccaaactcccacaagatccaatttacctacgtaacaaatgtgtgcctgcacccctgaaactaaaataaaagttaaaaaataatgataataaagtcaacggttggtcctttgtaaagactagtaaaatctataaatttctagaaaaatgatagaaaaaaagagaaaacaaaatcattaatatcaagaatgaagaaaaaaaagacatcwctataaatcttagagatgttaaaaatacaaggaggtccacacaaaaaccta

SEQ ID NO: 905454 - DNA, 594 bp, Homo sapiens
acatgttatgggagggacctggtgggagataagtgaatcatgggggtgggttcctccatactattcttgtggtagtgaataagccttacgagttttgatggttttatcagggatttccacttttacatattcctcattctctctttgtctgctgccatccacataagatgtgatttgctcctccttgcctttggccatgattgtgaggcttccccagccacatggaactgtaagtccaattaaacctctttcttttataaattgcccagtctcaggtatgtatttatcagcagcatgaaattgaactaatatgtaaattggtaccagtagagtggggtgctgctgaaaagatacctgaaaatgtggaagcaactttggaactgggtaacaggcagaggttggaacaatttggagggcttagaaaactcgaaaatgtgcgtaagtttggaacttcctagacacttgttgaatgactttgcccaaaatgctgatagcaatatggacaataaaatccaggctgaggtggtctyagatggaaatgaggaacttattgggaactggagcaaaggtggctcatgttatgttttagcaaag

SEQ ID NO: 905455 - DNA, 599 bp, Homo sapiens
ggcaggcaggcctccttgagctgcggtgggctccacccagtttgagcttccaggccgctttgtttacctactcaagcctcagcartggtggatgtccctcccccagccttgctgccgccttgcagtttgatctcagactgctgtgctagcagtgagtaaggctccatgggcatgggaccctccgagccaggcgcggaatataatctcctggtgtgtcatttgctaagacctttggaaaagtgcagtattagggtgggagtgtcctgattttccgggtactgttggtcatggcttcccttggctagaaaagggaattccccaaccccttgcgctttctgggtgaggcgatgccctgctctgctttggctcacggtcagtgggctgcacccactgtccgacaagccacaatgagatgaacctggtacctcagttggaaatgcagaaatcacccctcttctgcgctgctcaccctgggagctgtagactggagctgttcctattcgaccatcttggaacctcctcatcagcttcaatttttaaattaaaatacttatattctcaaatctataattagaaacactttggtactgtgcaaaagg

SEQ ID NO: 905456 - DNA, 673 bp, Homo sapiens
ggctgcagtgagccatgatttcaccactgcactccagcctgggcaacagggtgagaccctgtctcaaaaaagtaataaaataataaaacaataatactgccattccgtttaggtcaaatgttttcaattttttgacatctttgctaaaacttagttggtaacattgtatgggaagcattgccaaaagataaataacactaaatcttctttttttttctctgagacagaatcttgctttgtcacccagtctggagtgctgtggcatgatctaggttcactgcaaattctgccccaaggttcaagcaattcttctgcctcaacctcccaagtagctgggactacagacacgtgccaccatgcccggctaattttgtatttttagtagagacaagatttctcccatgttggccaggcaggtgtcgaactcctgacctctgatgatctgtccaacttggcctcccagagtgttgggattataggcatgagccactgtgcccagcttaaatcttcttttggttacttttatagggatgttattaatataaatattttaaaccttatataaattgtaaaaatckaatagggtttcagtcataattttgatgatgttaaatattttctaaagttgtatgtgtatagatatattattaatataaatattctaaaaattata

SEQ ID NO: 905457 - DNA, 630 bp, Homo sapiens
agccttctcagcatggacaccacaatttccaggcttcatacctccacaggttttttgattccctctgcccacctgtgtacctgggcccttgctaactttggcctgtggcctgcttgcagttaagaatttgtcattaaaaaaaaaaaaaaaaaaaagaacttgtcattggcagccgggtgcggtggctcacgcttgtaatcccagcactttgggaggccaaggagggcggatcacgaggtcaggagatcgagaccatcctggctaacacggtgaaaccccgtctctactaaaaatacaaaatttagccgggcgtggtcgcgggcgcctgtggtcccagccactctggaggctgaggcaggagaacggcgtgaacccgggaggcggagcttgcagtgagcccagatcacgccactgcactccatcctgggcgacagagtgagaccacgtctcaaaaaaaaaaaaagactttgtcattggctcactccttctatatccttttacctagatccactgaaagagattcaactgtgtggaacctatgccgcggagaattgctttstgccattgttattgtccagcagttgccgaatagctctgacctgagcaaagcagtgaaacgcggtgctgttg

SEQ ID NO: 905458 - DNA, 685 bp, Homo sapiens
tttggcttttgttgccattgcttttggtggtttagacatgaagtccttgcccatgcctatgtcctgaatggtattgcctaggttttcttccagggtttttatggttttaggtctaacatgtaagtctttaatccatcttgaattaatttttgtataaggtgtaaggaagggatccagtttcagctttctacacatggctagccaggtttcccagcaccatttattaaatagggaatcctttccccattgcttgtttttctcaggtttgtcaaagatcagatagttgtagataggaggcattatttctgaggcctctgttctcttccattgatctatatctctgttttggtaccagtaccatgctgttttggttactatagccttgtagtatagtttgaagtcaggtagcgtgatgctgcctccagctttgttcttttggcttaggattgacttggcagtgtgggctcttttttggttctatatgaactttaaagtagttttttccaattctgtgaagaaagtcattggtagcttgatggggatggcattgaatctataaattaccttgggcagtatgaccattttcacgatrttgatttttcctgcccatgagcatggaatgttcttccatttgtttgtatcctcttttatttcattgagcagtggtttatgttgttttatgtgt

SEQ ID NO: 905459 - DNA, 663 bp, Homo sapiens
cagttgttatatcctcttgctgaattcacccctttatcgttatatagtgaacctctttgtctcttttacaacctttgacttgaagcctataactggtataaggttagctactcctgctcttttctcatttccatttgcatggaatagctttccttcctttcactttcagtctatgtgtgtctttataggtgaagtgaatttcttgtaggcagcttatagttgggttgtgtttttcaaaaatctactcagccactctatgtcttttagttggagaatttagtcaatttacattcaaggttgttattggatatggaagtacttaccactgtcatattgttattttctggttgttttgtgactcctctctttcttcctttgttactgtcttcttcctctgtggctatgtgatttttttctctggtaatatgttttaatttgttgcttttcattgttattgtatctattataggtttttgcctcgcagggtttaccatgaggcttacagaaaacttcttatagatataacaagttattttaaataaaygataagtgattacaaagaaaagaaacaaacaaatgaaaaacaaaaaccctgcactttaacttcatcccttccacattttgacttttcgttgtctcaattttcatcttttaatattgcct

SEQ ID NO: 905460 - DNA, 612 bp, Homo sapiens
aggcttcaagcagacaggagatcatggattttggtttcttmaatttattcagttatgtgaaacagctttatttgtgtgagacagattgtgtgtgtttcaatggaaaaaaagggctttcagacacaccagaatgtaaacaaattgcttttttcatgtaatcattttaaagaaaaacaaaggaaaatacactagagatttctgggtacatttgccctcatgaagtcactcgtaatgtatttggtctcggactgctaatgacaagaagactatgtgtcaattttaactttttttatgaatacttccttcagtcacattgttttacaaccattttgtcactgaaaaaagcttccttgaaataatttttaaaaaatcaaatatttaatcagtttgatattttctaacattatcttatagcatattttaaatatttctattaataagaatttgtgggactcccaagcaagatggtggaataggaacagctccagtctgtagttcccagggagaccaatgcagaaggtaggtgatttctgcatttccaactgaggtacctggctcatttcactgggattggttagacagtgtgtacagcccacagagggtgagcagaag

SEQ ID NO: 905461 - DNA, 507 bp, Homo sapiens
actttaacgtgcctcttattaagtgctgagatgcagcacatacaagatatttacattacggatatgtgttaaacatytaccatgttccaagctctgttttggagttaggaatatatctgtaaacaaagcaaaaatcctgagatattttatatgatgtctgacggtgaagggggctacaaagaaaaataaagtataaggacatagggaatggcagagtggttgagtatctatggggaggtgatatttgagcgagatattcatgaatgaagaagtgggccctggagagggctcagagaggggaaatcttaaggtgggaaaatgctttgtatgtttcaagcacattaaggaagatatagtgggtagcctttagtaaacaggaggagaatgctggagaggacgtggaagaggtggccagggacttcagattttacctgtgaggggaggggaagtcatgggaaatttggagcagaggactcacataatctcacttccactcacacattgaaa

SEQ ID NO: 905462 - DNA, 597 bp, Homo sapiens
agtttttatttgtataaatttaaggggtacacattcagttttgttacatagmtacattggtgaactactctataccttggccacttaccaattttttcacaaaattgagaatttctgccaagcagtatgattaagtagaaataagaaaaatcacaaaatttacctatctttctcttctctctctcttctgtcaaaggagcttcattctttccacgtttatttgatttgtagttctaaattcccacataagtatgaagttttatgcttacctgccactagcaaactatgcctctctccattaacctctgaccagataaatctcttctaaaacctaaaagaatatttagataaaaatcacatcaccgtcaatccctgaaatctcttctaaaatctagaagaatattttgatagagagtacatcgtggatactcttctatgaaagaatgaaaaagtgatcacttgtcataatgtgattttcacctgcaagaaagataattttttcattgaccaatagcatgttgatataaggaagcaacagctgttatctttgttttcttatttattggcggggaaatggtaccatttggtacactagga

SEQ ID NO: 905463 - DNA, 529 bp, Homo sapiens
gtggagtatttttttcatatttttttttgaccacttgtatgccttcttttgagaaatctcttactacattaaactaaccgacacctagtctaatttccttccagaagacaaagaaaaatctctctggagaaaggtgacttcatcaagagtcacatcactttttcatattcagcatctaataaaaatttaacaggcaaactaagacaggaccaagagaaaaaataggcaatacaaacacatccataggtgattaacatattgaacttgtcagattattgctttttaaaatatagtctatatatttccagatggaaaggtttctctttctttcttcattcattcattcttcctttcttttttctttctgtctctttgttcctttctttctttctctcttactttgtctctcttgcttttatccttcattctcttgctccttcccttacttcctccctcctgccttcctgtttcccttttttctactataatgagagaacaygctttcatttgttctgcctaattgaaattt

SEQ ID NO: 905464 - DNA, 656 bp, Homo sapiens
tgccctcttcttggggcagtatgcatccaaaattggttcatatagttacaaagattcaatcccttctcccctgctagggtcaataggggctatcctactgtagagttccccatgggatcagctgagacctttsctgagtctgattgaggccaactttttcctctgcccaatcctacatctttcccttcttctacagatgttgaacccaagagcactccttcacatatctgcttcaaagtcttcttctgagagatcccaacctaaatatcgtctgaaaccgatcaaccaaccttcatacaacttatttatctcacatgaacttttagagccaaaatacttgccagaaagaaatttgaaactttggtttaaatatgaataagatgagaccatttgtcctagaaaaaaagcaagtatacaggcaattgtctacaatttattcacataagaataacacgtgaatgtatcctcttttcattgtatcacttaacagtagagcctaaacagtaaaatttgcaagttgaaaattattggttgctatgttgatagacacactgaaattggatggatagaaagaaattagaagatgtcataactcttgttaatatcacctttacatttctgtacacattggtgtttataaagcctttcatattttt

SEQ ID NO: 905465 - DNA, 521 bp, Homo sapiens
gacacagtctttttatagaatatgcaaacggatatttcggagccctatgaggctgtagtgaaaaaggaaataccttcacataaaaattagacagaagttttctcataaaattctttgtgatgtgtgtattcatctcacagagctgaacctttcttttgattgagcaatttggaaacagtctttttgtagtatctgcaagtggatatttggagcactttgaggcctatagtgcaaaaggaaatatcttcacataaaaactagacagaagcattctgagaaacttctgtgatttgtgcattcatctcacagagttgaacctttcttttgattgaacagtttggaaacagtctttttgcagaatctgcaaagggatatttgggatccctttgagrcctctgatgaaaaacggaataccttcacataacaactggacagaatcactctgagaaacctctttgtgatacgtgcattcaactaacagagttgaacctttcttttgattgagaagttaggaaagtgtg

SEQ ID NO: 905466 - DNA, 567 bp, Homo sapiens
gtggtttgaggcctatggtgaagaaggcagtatcaacatataaaaactatacagaagatttgtgagaaacttctttatgatgtgtgcattaatcacacaaagttgaacctttcttttttgagcagtttggaaacagtctttttttagaatttacaaagtggtatgtgggatccctttgaggtctatggtgaaaagggaatatgttcacataaaaactggacagaagctttcagagaaactactttgtgatgtgtgcattcaactcacagagtttaaaatttcctttgattgagcagtttggcaacagtccttttgtagaatctgcaaagggatatttgggagacatttgaggactactgtgaaaaaggaaatatcttcacataaaaactagacagaagatttctgagaaacttatttgtgatatccgcattcatctcacagagttgaatctttcttttgatagagcastttggaaacagtcattttgtagaatctgcaaagggatatttctgagcaatttgaggcctatgatgaaaaaggaaatatattcacataaaaactggacag
